United States Patent Application Publication US 2007/0067865 A1 - sequence listing, part 33

SEQ ID NO: 201248 - DNA, 417 bp, Gossypium hirsutum
actgtatagaatataatatagatatgagtgatctacagggcctgtctccaacacatgagccacgtgtttctgatcacatggagcagatcaaagatatgataactcagattataaacaaagactttggatatgttgttgacggcgatgtgtttttcgctgttgataaattcccaaattatggcaagttatctgggcagaagctggaaaacaatagagcgggtgaacgtgttgctgttgactcaaggaagcgtaatccttccgactttgcattatggaaggctgcaaagccaggtgagccatcttgggacagctcatggggacctgtacgacctgtgtggcacatataatgtattgcaatgagtgcgcattatttaagcttcaaatttgacattcatggtggtgggcttgatttgattt

SEQ ID NO: 201249 - DNA, 373 bp, Gossypium hirsutum
gccgtttccgcctgcggtggctgatcggagggtcgaaattacagggccggtggagaggaagatgatcatcaacgctcttaactcgggagctaaagtgtttatggctgattttgaggatgcactgtcaccaagttgggaaaatcttatgagaggtcaaataaacttaaaagacgcagtggaagggacaataacgttcaacgacaaagcaaggaacagggtttacaagctgaataatgaaatagcaaagctatttgttcggccacgaggttggcacttaccggaggctcatattttcatcgacggggaacctgcaactggttggctagtgggatttggcctttattttaccacaattatgccacttttcgcaaca

SEQ ID NO: 201250 - DNA, 297 bp, Gossypium hirsutum
cattgattattgttccaacctcaaaagcacaagcaagacagggaagtggacgtgcagggcgtgaaggacctgggaagtgtttccgtctctatcctgagagcgagtttgaaaagcttgaggattcaaccaagccagagattaagcgttgcaacctctcgaatgtcattttgcagctcaaggccctgggtgttgatgatatatttgggtttgacttcatagagaaaccctcaaggacagctattaaaaagtcattggaagaagtgctcttgctaagtgctttaactgatgaattcaaac

SEQ ID NO: 201251 - DNA, 399 bp, Gossypium hirsutum
  unsure (1)..(399): unsure at all n locations
ctacctctgagttttcaacttaaaattccttggttgggctcaagaaggaagaagatgttgcaaatagctttcagctcgtattcatggctgatgactgctagcaaccacaaagatggaatgttgttcccagtagctttgtcatttttggtagccatattgggaatttcactgtgccacgtatggaccataaggaagccaaagaaagacatcgccccattaccgccgggtccccgtgggttgcaaatagtgggatatcttccatatnctggaactgataatcttcacttggtgtttacagatttggctgcagcttacggtcccatctacaagctttggctaggaaacaaattatgcgtagtcattagctcggcaccactggcgaaagaagtggttcgtgac

SEQ ID NO: 201252 - DNA, 363 bp, Gossypium hirsutum
  unsure (1)..(363): unsure at all n locations
agatcgaagacccggagattgtacacggnctggcaggtcacagcaagaaaggtgaagattttacgttgcttaaaacagaatgccaaagagcgctaggagatggtttcaccacattctcggtttttgggctctttgacggacacaatggatctgcagctgctatttacacgaaagagaatcttcttaacaatgttctaagtgccattccggcagatcttaatagagatgaatgggttgctgcccttccgagagctttggttgcaggtttcgttaaaacagataaagattttcaacagagagcaaaaacgtcaggaactactgtaacctttgtgatattagaaggatgggtngtaacagtggcat

SEQ ID NO: 201253 - DNA, 363 bp, Gossypium hirsutum
ggcaattggagcatggcaatttctttcatggactggggtcgtgttggagcccttacccaatagctgaaagagaaggaagtgcttataatgggacgagtccacacaacacgaccagtgtcgaagaatatggcgctcgtggtggtgagggagaggggatctaccgtgcaatgctagtgtgctacgcatgaaccgtgagtgagtcgtcagatggcgaagtttgtatctgcactcaatcgagaatccatcattgatgcaatcggtatggtatctgtgcctgcgaatcccatcatgggaaccacccagcatgtctagattcatggtggaaaattgcattgtgtgaataaagctatgcctaccttaccc

SEQ ID NO: 201254 - DNA, 381 bp, Gossypium hirsutum
ccccagcaaagatcagtacatacacgattggtccttggccagcattaagaagtgaaaaaccaaaattgaaggtcaaagttcgtttgaatttgcatggaattgtgtctgtggactcagctacactcttggaagaggaagaagttgaagttctagtttcaaaagagctggcaaaagaagatgctaagatggagacagatgaaaagcctaatgatacttctgcccctggtgccaacgagacagatgttaatatgcaagatgccaagggtacagccgaggcagctggggtcgaaaatggtgttcctcagtctggagacaagcctgtgcagatggagactgataccaaagttgaggctcccaagaagaaggtgaagaaaacaaatg

SEQ ID NO: 201255 - DNA, 349 bp, Gossypium hirsutum
ctgaaatctgagtccaggacataaaatatgaattcaggtcacttgcttcttgaagagcccataagaatggcttccattcttgagccatcaaagcctagtttctttcctgcaatgactaaaattgtggggacacttggtccgaagtcgcgatctgttgaaataatatccgattgtcttaaggctggaatgtctgtggcgaggttcgatttttcgtggggtgatattgaatttcaccaagagacattggaaaatttgaagactgctgttaaaagcactaggaagctttgtgccattatgcttgatactgggggtccaaaattgcaagtaggtaataaaacggagcacccca

SEQ ID NO: 201256 - DNA, 330 bp, Gossypium hirsutum
gggatttactctggttctacttgcaaacaaggagagagcgaagctgtggttattgccaccggtgtccatactttcttcgggaaggcggctcaccttgttgataccactaaccaagttggtcatttccagaaggtcttgacagcaatagggaacttctgcatatgttctattgcagttgggatggtaatagagataattgtgatgtatccaattcaagaccgggattaccgtcctggaattgacaatcttcttgtccttctcattggtcggatcccgattgccatgcctacaagtttgtcagttacaatggctatcggttctcataagcta

SEQ ID NO: 201257 - DNA, 126 bp, Gossypium hirsutum
aaaagattgaggatgttgccaaactcctttgctggtagataaagcatgagaagggtgaaattgccatttggcaaaagagagtcaatgatgagtcttgtcgtgacagagaagatgattcttaatcca

SEQ ID NO: 201258 - DNA, 346 bp, Gossypium hirsutum
taactcttaaaaattgagatttgatttttccgatgagccaaacagaaacggagccatcaatgctgatcatttgagaaaaattgaagctattgtgaatgagcaaataaaatctgagttagatgtatattcaaaggaagtaacccttgctgaagccaagcgtatcaactgtttgcgagctgtctttggagaagtttatcctgatccagttagaatagtggcaattggtaaaaaaatagaggaccttcttgctgatccagaaaacaaagaatggtcatcaatttcatcggaattatgttgaggtacacacataacaaatacactggaagcaaaagcatttgctctttta

SEQ ID NO: 201259 - DNA, 381 bp, Gossypium hirsutum
gaagcatggccgtcgggaagaacaagaggatggccaggggaaagaagggaggaaagaagaaggcagcggatccttttgctaagaaggattggtacgatatcaaggctccttcagttttcactaccagaaatgtgggaaaaactctcgtcacccgtactcagggtaccaagattgcttctgaaggactcaaacaccgtgtgtttgaagtttccctggctgatcttcaaggtggtgatgaggatcatgcttacagaaagattcgtttgagagctgaagaggttcaaggaaaaaatgttttgaccaacttctggggaatgaattttacaactgacaaactgaggtctttggttcgtaaatggcaaaccctgattgaagctcatg

SEQ ID NO: 201260 - DNA, 345 bp, Gossypium hirsutum
caaagctctttctaaatcaaagtgaaatcgagaaatggcacgtcaacgataatccaccgagaacagacatgaccatcactgggaagcttaatcctgaagatgataccatcttccttaaagttcagattgcagatacagagggttctactaggaacatctactttccctttgatattgtggaatatacgccattggatgtggcaactgaaatggtgaatgagcttgagataaccgattgggatccacttgaaattgcagaaatgattgcaggtgaaatttcagctctagttccacaatggaataaatcagacctccctatacatcaagcccataatacatataact

SEQ ID NO: 201261 - DNA, 313 bp, Gossypium hirsutum
catgggtccaaactatgtacctggggagaagaaagagttgtgtgtaaagagtgtacagagaactgtgatttggatgggaaagaagcaggagacagttgaggacgttccttgtggtaatacagttgccatggttggtttggatcagttcatcaccaagaatgctacattgaccaatgagaaggaagttgatgcccacccaattcgtgccatgaagttttctgtctcccctgttgtccgtgttgctgttcagtgcaaggttgcatcagatcttcccaaacttgttgaaaggttgaagcgtttgggcaagtctgat

SEQ ID NO: 201262 - DNA, 334 bp, Gossypium hirsutum
ggatattcaacccctcgtctgtgataatggaactgtgatggtgaaggccggttttgctggtgatgatgctccaagggcagtttttcccagtatcgttggtcgtccccgacacactggtgttatggttgggatgggtcagaaggatgcctatgtaggagatgaagcacaatctaaaagaggtatccttactttgaaatatcctattgagcatggtattgtgagcaactgggatgatatggaaaagatctggcatcatacattctacaatgaacttcgtgttgctcctgaatagcaccctttgcttatcacggaagcacctattaaccccaatgcc

SEQ ID NO: 201263 - DNA, 378 bp, Gossypium hirsutum
  unsure (1)..(378): unsure at all n locations
gtagtctcgagttcactcattaatatgtatgtaaaatgtgggcagctagagattgctcgtactgtatttgatcaacttggttccaaggacttgatttcctggactgcaatcatgtcaggttatgccatgagtgggagaactagagaggcaagggaactctttaatatgatgccggaacggaatgtaatctcatggaatgcaatgctagcagggcatactcgtttgtctcagtgggaagatgccttagaatttatttttcttatgcggagaatgactaangattttgaccatgtgacgcttgntctaattttaaatgtctgtgctggcctgtcagacgttgaaatggggaaaaaagttcatggatttatctaccgacat

SEQ ID NO: 201264 - DNA, 385 bp, Gossypium hirsutum
tcttcctgaaaaattgagatttgatttttccgatgagccaaacagagacggagccatcaatgctgatcatttgagaaaaattgaagctattgtgaatgagcaaataaaatctgagttagatgtatattcaaaggaggtaacccttgctgaagccaagcgtatcaactgtttgcgagctgtctttggagaagtttatcctgatccagttagagtagtggcagttggtaaaaaagtggaggaccttcttgctgatccagaaaacaaagaatggtcatcaatttcatcggaattatgtggaggtacacacataacaaatacacgggaagcaaaggcatttgctcttttatctgaggagggaattgctaaaagagttcgaaggataact

SEQ ID NO: 201265 - DNA, 386 bp, Gossypium hirsutum
  unsure (1)..(386): unsure at all n locations
gggaagcaatatgaatcttcaacaaaattcggacaggatgaaggagaagacatcgtaccaaaaactttccctgtttgtgacgatcgtcattcagaattgattccctgcttagacagacatttaatataccaaatgagattaaagctggacttgtctgtgatggagcactacgaacgtcactgccctcctcctgaaaggagatacaattgcttgattcctcctnctncaggatacaaggtcccaattaagtggcctcaaagcagagatgaagtatggaaagcaaatattccccatacacaccttgcacatgagaaatctgaccagaactggatggttgtacaaggtgaaaagattgtattttcaaggggaggaacccattttcacta

SEQ ID NO: 201266 - DNA, 215 bp, Gossypium hirsutum
cgatggctatcttttctacatcaatggctgctatgcgccttctgctaaggctcttcgctgcaaacttggatcctactgctgcacagattggtgtttgctatgggatgcttggcaataatctcccaaattcatgggaagtcattcaactttacaaatcaaacaacatccggcgattgaggctctacgatccaaatcaacaagcattacaagctctt

SEQ ID NO: 201267 - DNA, 351 bp, Gossypium hirsutum
gttaagagcttgcggtgaaaggtggaaactaggcactagatcatttagtactcaaggagcaacaactgctgatgctccacaggcacctcctcctcctccaccgcctgaaaaaacccattttggtggtctaaaagatgaagaccgtattttcaccaacttatatgggttgcatgacccttttctcaaaggtgccatgaaacgtggtgactggtatagaaccaaggatttagtactcaaaggtgctgattggattgtgaatgaaatgaagaaatctggacttcgaggacgtggtggtgctggatttccattcggccctaaatggtcttttatgccaaaagtatctgatggtcg

SEQ ID NO: 201268 - DNA, 358 bp, Gossypium hirsutum
cccagctttaaggcagagagatatatggccagagaggggcaaaagaacaccatgttcattgaacaaaacactggcgactatgaaaatggtgaccttcaaaagaatttggatgatgatggtcgagaaaaaagaactgggacttgggttactgcaagtgctcatattatcacagctgtgattgggtctggcgtattatcactggcatgggcgattgctcagctaggttgggtggttggaccggcggttcttatagctttctccttcatcacctacttcacttcaacccttcttgctgattgttatagagctcctgatcctgttcatggaaaaagaaactatacttacatggatgttgtta

SEQ ID NO: 201269 - DNA, 364 bp, Gossypium hirsutum
acaacatgttcgtgttcatgcaatggaagcagttatggcttgttgggatcttgagcaatcacttcaaagtttaacaggtgtatctccaggtgaaggcactggtgcaaccatgtctgatgatgaagatgaagttgtagatagtgataccagcttgtttgatggaagttttgatgggattgacagcatggggtttggccccctcgtcccatccgagactgagagatcactaatggagcgtgttaggcaagaactgaagcacgagctgaaacagtgttacaaagagaaaattgtggacattagagaggaaattctacgtaagagacgagctggaaagctaccaggcgatacgacctcgttttaaaag

SEQ ID NO: 201270 - DNA, 418 bp, Gossypium hirsutum
  unsure (1)..(418): unsure at all n locations
aagagcatcaaccctgatgaggccgttgcatacggtgctgcagtccaagctgctatattgagtggtgaaggtaatgagaaagtgcaagatctcttgctcttggatgtcaccccattgtctctcggtttggaaaccgctggtggtgttatgaccgttttgattccaaggaacaccaccattccaaccaaaaaagaacaagtcttctcaacctactccgacaaccaacctggagtgttgatccaagtctacgaaggtgaaagaacaaggaccagagacaacaacttgctcggtaaaattgagctctctggcttcctnctgctcctagaggtgtcccacagatcactgtctgctttgaaatcgatgctaatggtatcttaaacgtctntgccggagacaaaaccactggacaaaagaacaa

SEQ ID NO: 201271 - DNA, 388 bp, Gossypium hirsutum
acatcatgttgtttatatggaggtgctccttaccacgcccaagagatgaaactgaagagaggggttgacatagttgttgggactcctggacgtgtaaaggatcacatagagaggggcaatattcacttaggttcattgacattccgagttcttgatgaagcagatgaaatgttgagaatgggatttgttgatgatgttgaacttatattaagcaaggtagcggatgcaagtaaagttcagacagttctttttagtgccaccttgccagactgggtgaaaggtattgcttcaaggtttcttaaaccaagtaagaagactggtgatctaattggtaatgagaagatgaaggcttgtaccaatggtaggcatattggtttggcctggtcta

SEQ ID NO: 201272 - DNA, 380 bp, Gossypium hirsutum
gaagaattgatagtcagagtactatgcccatttgacgggattgggcgtgtcattggaagggcagggagtactatcaaaagtataaggcaggcaagtggtgctcgtatcgacgttgatgatacaaaggctgatcgcgatgactgtattataactgtaatagctacagagtcacctgatgatttaaaatccatggctgttgaagctgttctattgctgcaagggaagattaatgatgaagattacgaaactgtaattatgaggctcctcgttccatctaaagttattgggtgtattattggaaaaagtgggttctattataaatgaaaatcggaagagaactaaagctggagtacgtattttaaaaaagggtaaacccaaat

SEQ ID NO: 201273 - DNA, 378 bp, Gossypium hirsutum
ccaccatcttctttcaaagagcataaatttttccacgtgcaccactgaatgccttttttatctcgatttttctgccaccaatatcttgccataatgccttctaattcaacacatagagacttaggaattaaggaacatgccatcgtataggttggaatagcttgaagaatagcttttataaacacctctttccccccttgagatagatgccttacactctagttatcaatccgttgtttcattctgtcctttaaggtctgaaaagacattttcttctttcttcccatcatattaggcagacctggatacctttccaggttattagaactacgcactccaagaaccctagatataactactttatccccttcttgcgta

SEQ ID NO: 201274 - DNA, 228 bp, Gossypium hirsutum
gagagatataaagcttttggttgggtgcttgaaattgatgcgtatgctgtttcgtctgccttgcatggtgtgggtaacatcctgtacaaagatttcatgatccagcctccttgggatacagaaataggtaacaagttcatcattcattacacatatggatgcgactattatttgaagggttggttaacctatgtaaagatttgagaatggaggttcgattaaatatca

SEQ ID NO: 201275 - DNA, 395 bp, Gossypium hirsutum
  unsure (1)..(395): unsure at all n locations
actttgcttttttgctttgtttgtttagtaagaaaagtttactttcctgggaaaataaaaaaacaaaatatgggtagaggtagggttcaactaagacggatcgagaacaatattagcagacaagtaacattctcaaagagacgaagtggtttattaaagaaagccaatgagatctcagttttatgcgatgctgatgttgctttgattgttttctctaacaaaggaaagctctttgagttctcttctgatcccagcatggagaggatcctagaacgatacgaacgacaaatatatgccccaactggttctgaatcacaggcaaattggtctttggaatcttccaaactcatgtcaactattgaagtcttgcanaggaacttgaggaactttcgtgg

SEQ ID NO: 201276 - DNA, 398 bp, Gossypium hirsutum
cttcctttggtactcaagaaaaagcaagagatgggtgtttcaaggaaagagtacgagttcttgagcgagatcggattgagttctggcaatttgggatgttttgtgaatggcacctggaaaggaagtggccctgtggtttctactcttaatcctgcccataatcagaaaattgccgaagttagtgaggcttccatccaagactatgaagaaaggatgcaagcttgcagtgaagcagcatagatttggatgcaggttccagcccctaaaagaggtgacatagttcgacaaataagtgatgcattgagatccaaactacagcagcttggccgacttgtttctcttgagatgggaaaaattcttcccgaaggaattgtggaagttcaagaaatcattgacat

SEQ ID NO: 201277 - DNA, 376 bp, Gossypium hirsutum
aaagaacttttcctccccagtggatctttcagcataggatggtgttgagttgcgcttaaagggtgatggttgtcggtataaactaattgttcgcactagcactgattgggatacggtgggttatacatcaagctttgacaccattggaggccaatggcagtctattcgattgccattctcttcactgaggcctgtatttcgagcacggactgtatctgatgctctacccttcaatccaagtaatgtcgtatcatttcagctcatgttcagcaagtttgaatatgatggcgaactgaatcccatctttgtagaatgaccttttgagcttacactctctaccattaaagcatacatttaggatcctatcacttccagg

SEQ ID NO: 201278 - DNA, 402 bp, Gossypium hirsutum
aaaaaatcttctgatttttctgagtctttttggtatgttctgtttggctcctgagaaagtgttttaagaagaacaatgaatgcattagtggcaaccaacagaaacttcaagctagcagccaggcttcttggtttggattctaagcttgaaaagagtctcctcattcccttcagggaaatcaaggttgaatgcaccatacccaaagatgatggcacattggcaacttttgttggctttaggattcaacatgacaatgctagaggtcctatgaaaggaggaatcagatatcaccctgaggttgaccctgatgaagtgaatgcattggcgcaactaatgacatggaagacagcagttgcaaacatcccatatggtggggctaaaggtggtataagatgtaaccct

SEQ ID NO: 201279 - DNA, 395 bp, Gossypium hirsutum
  unsure (1)..(395): unsure at all n locations
gtatcagctgcgcgttgaaagtagttccgagtgtgcgtctgatggttcttttcgcgttagcgaatgccaagaaatcagctgatgtgaccgaactgcaaatcggcgtcaaatataagcctccatcatgtgaattccaggctcataaaagtgatagagtaaaagtgcactatncgggngaaactcactgatggaaaggttntcgattccagttttgaaagaagtgatcccattgagtttgagcttggtagtggacaagtaatcaaaggatgggaccaaggatngctggggatgtgcgttggtgagaagcgcanattgaaaatacctgctaagcttggatatggtgaacagggttcaccacccaccatcccaggtggagcaacgctaatatttgacac

SEQ ID NO: 201280 - DNA, 412 bp, Gossypium hirsutum
cgatcatatgccgtgcgaggatcctaggcgtaataggcagctcagtagggagatgaatttctatagagaaaggcattgccctttgcctgatgaaacgcctctttgcttgatccctcctcctcttggctacaagattcccgttcagtggcctgaaagcttgcacaagatatggcattccaacatgccacacaacaaaattgctgataggaaaggtcaccaaggatggatgaaagaggaaggtccttactttattttccctggtggtggaacaatgttccctgatggagctgcatcgtatatagagaaacttggacagtacattcccataaccggtggaactcttaggacggccctcgatatgggctgtggggttgctaagtttggggggttcaatggtaaaagaaggcttttt

SEQ ID NO: 201281 - DNA, 409 bp, Gossypium hirsutum
actgtaaagaatataatatagatatgagtgatctacagggcctgtctccaacacatgagccacgtgtttctgatcacatggagcagatcaaagatatgataactcagattataaacaaagactttggatatgttgttgacggcgatgtgtttttcgctgttgataaattcccaaattatggcaagttatctgggcagaagctggaaaacaatagagcgggtgaacgtgttgctgttgactcaaggaagcgtaatccttccgactttgcattatggaaggctgcaaagccaggtgagccatcttgggacagctcatggggacctggacgacctgggtggcacatagaatgtagtgcaatgagtgcgcattatttaagcttcaaatttgacattcatggtggtgggcttga

SEQ ID NO: 201282 - DNA, 384 bp, Gossypium hirsutum
gggaagcaatatgaatcttcaacaaaattcggacaggatgaaggagaagacatcgtaccaaaaactttccctgtttgtgacgatcgtcattcagaattgattccctgcttagacagacatttaatataccaaatgagattaaagctggacttgtctgtgatggagcactacgaacgtcactgccctcctcctgaaaggagatacaattgcttgattcctcctcctccaagatacaaggtcccaattaagtggcctcaaagcagagatgaagtatggaaagcaaatattccccatacacaccttgcacatgagaaatctgaccagaactggatggttgtacaaagtgaaaagatagtatttccagggggagggaacccatttcac

SEQ ID NO: 201283 - DNA, 386 bp, Gossypium hirsutum
gccttttattgttgaatatggtgcagattaccgtgtggtaagcatagctaatgcccccttccagcttgcgttttataacaccacccctaatgccttcacccttgcgttacgcatggctacaacgcgttcggagtcgctcttccgatgggtttgggaggccaacagggggaaccctgttcgcgagaacgccacgttctctctcgggactgacgggaaccttgtcttggctgatgccgatggtcggattgcttggcaaagtaacactgccaacaaaagtgtggtaaggttccaattggtgcctaatggtaacatggtgttacacgattccaatggcaagttcatttggcaaaggtttgatcatccaactgatacactcttggtgggtc

SEQ ID NO: 201284 - DNA, 395 bp, Gossypium hirsutum
cttccctgctcgtcgtctcccttgtttggttcctctctgggcgatcgcgcggcatatctaaacttgatagattgttgatgtgctggtgggctttcacgggacttacacacataattcttgaaggatattttgcattctcccctgaattctataaagacaagactggattttatctggctgaagtttggaaggaatatagcaaaggtgattcaagatatgcaggaagagactcagcaattgttgctgttgaaggaataacatcagttcttgaaagtccaccttgccttctagcagtgtatgctattgccaaaggaaaaggatatagctacatactccaatttgccatctctctgggacagttatatggtacatttgtatatttcataacagcttac

SEQ ID NO: 201285 - DNA, 306 bp, Gossypium hirsutum
cctaagcaatatcaatcatcaacaaaattgggacaggattaatgataagacatcgtaccaaaaactttcactgattgtgacgatcgacattcacaatagatttcctgcttagacagacatttaatataccatatgagattaaagctggacttgtctgtgatggaacacttctgacgtcactgacctaactctgaaaagagatacaactgcttgattcacatctctacaagatacaaaggcccaattaaacgggctcaaagcaaagattaatgttggaaatcaaatattccctatacacaccttgca

SEQ ID NO: 201286 - DNA, 398 bp, Gossypium hirsutum
  unsure (1)..(398): unsure at all n locations
gtagtctcgagttcactcattaatatgtatgtgaaaggtgggcagctagagattgctcgtactgtatttgatcaacttggttccaaggacttgatttcctggactgcaatcatgtcaggttatgccatgagtgggagaactagagaggcaagggaactctttaatatgatgccggaacggaatgtaatctcatggaatgcaatgctagcagggcatactcgtttgtctcagtgggaagatgccttagaatttatttttcttatgcggagaatgactaaagattttgaccatgtgacgcttgttctaattntaaatgtctgtgctggcctgtcagacgttgaaatggggaaaaaaggttcatggatttatctaccgacatgggtttcttttccaatata

SEQ ID NO: 201287 - DNA, 381 bp, Gossypium hirsutum
ggatggagtccaaaggcggcggcgcgtcagctatccgtcgagaaatcgaagctttgaaagaagaaaaagcccggattgagcaaaggatttcggtcctcgaagctcagctccaagaagaagcttcattagcaactcaacagcagcaaaacgacggcgtctgcaatggtttttggccttcggaaatatcctccgtcgatgccaatctggctcacgggttatcggcggatagtatttaccgttacagccgtcatcttttgctttcttcttttggagtccaagcacaatcaaatctcttgaagtcttcaatattggttgttggagctggaagtttgggttcggcggctttattatatcttgcagcttgtggtgttggtcgcttgg

SEQ ID NO: 201288 - DNA, 290 bp, Gossypium hirsutum
gggatttactctggttctacttgcaaacaaggagaggtcgaagcggtggttattgccaccggtgtccatactttcttcgggaaagcggctcaccttgttgataccactaaccaagttggtcatttccagaaggtcttgacagcaatagggaacttctgcatatgttctattgcagttgggatggtaatagagataattgtgatgtatccaattcaagaccgggattaccgccctggaattgacaatcttcttgtccttctcattggtgggatcccgattgccatgcctac

SEQ ID NO: 201289 - DNA, 369 bp, Gossypium hirsutum
atagagagcatgttgaggattggattcagaaacatcgttaatggcttcatatgtagagcctcacttcctcagagcttttataacagggaattatcgacacaaaccggaaggctgaaaggcaaaatagcattgatcactggggcagcaagcggtatctggaaagcagctgcagcaaaattcatcagtaatggtgccaaagtcgtcattgctgatatacaacaccaactagggcaagcaacggcgaatgagcttggacccaatgctacttttataccctgtgacgtaacgaaagaatcagatgtatccgatgctgttgactttaccatctccaaacacaaacgactggatgttatgtataataatgctggg

SEQ ID NO: 201290 - DNA, 368 bp, Gossypium hirsutum
gattcaaacagaggaagaagaagaagagaaaaaaaagggaagtctcagatctgtttagcctttggaactttggccttgttattagcttcagctttggccgatgacgtcgtcgtactgaccgaagcgaacttcgataaggaagttggtcaagatagaggagttctcatcgagttctatgctccttggtgtggacactgtaagaagctagctcctgagtacgagaagctcggggcaacttttaagaaggctaaatccgtcttgattggaaaggtggattgtgatgaacataagagtttatgcagcaaatatggtgttcaaggctacccaactgttcagtggtttcctaaaggctctttggaacctaaaaa

SEQ ID NO: 201291 - DNA, 368 bp, Gossypium hirsutum
ctggtatgggaatgggggattttagcaatcgttttgatctgtttgagtcgctattcgagggcatgggtggtatgggcggcatgggcatgggtggacgaagttccaggaatagagctgttgatgggcaagatgaatattacagtcttgtattgaatttcaaggacgcaatttttggagttgagaaagaaattgagataacccgactagaaagctgtggaacttgcaatggttcaagtgcataacctggaacaacaccatccaaatgtaccacatgtggtggccaaggtcaggttatctcatctgcaaggactccgttgggtgtcttccaacaggtaatgacatgctcttcttgtggtgggacgggggaa

SEQ ID NO: 201292 - DNA, 377 bp, Gossypium hirsutum
gctatcccagctgaaaaatctacaggtactcgatttgtgcaacagtaacatgacgggggagttgccggtttccgtcacggagcttcccaatttgcgtcacttgcatttgggaaggaactatttcagcggtcagatcccgtcaagttacggccgttgggagcatcttgaatatttagccgtttcgggtaacgaactcagcggtaaaatcccacccgaaatcggcaacctaacgaagctgaagcaattgtacattggctacttcaatagtttcgaaggtggtttgccgccggaggtcgggaacttgtcggaacttgttcgttttgacgccgctaactgcatgttatccggtgaaataccgccggagatcggtaaattgc

SEQ ID NO: 201293 - DNA, 362 bp, Gossypium hirsutum
ctggcacctgatttgccgatgtttgctattggtgaggagaggctgcttatgcaaactattctaaatgttgtgggtaatgctgtgaagttcacaaaggagggttacatttcaattatagcttctgttgcaaaaccggagactttaagagactggcgacctccagaattttacccagtgtctaccgaaggccacttctatctaagagtgcaggttaaggattcaggctgtggtgttctcccacaagatataccaattctctttaccaaatttgcacagcctcaaagtggaaatagcggtggtgcggggcttggacttgccatttgtagaaggtttgtaaatttgatgggaggccacatatggat

SEQ ID NO: 201294 - DNA, 386 bp, Gossypium hirsutum
acggtggtgatgagtgaaggtacagttccacgtgaaggtcaaattcgaacaaaggagatgcatctgcaagctgagtttggctttgcagctcactggagatacaaggagggtgactgtaagtactcttcatttgtacttcagatggttgagtgggctcgatgggttgtgacttggcattgtgaaacaatgagcaaggaccaatcgtcaatatgctacattgattctgtcaagccaccctgcaccttccctactcattccgatgattgcccgttctcttataagcctcactgcagccaggatggacctgtctatgttatcatgatcgaaaatgataaggtatgtttctttaaatagcactttcattgctttttcaaggttgaccctgt

SEQ ID NO: 201295 - DNA, 388 bp, Gossypium hirsutum
  unsure (1)..(388): unsure at all n locations
cacgagcctgatgtgtttaggggaactgtacgttatggaagggtgcatgctcatttgggtaggacaggcagtcgaagggatgaccttgagtcattggcttatacactaatatttttacttaggggaaaacttccctggcaaggttacattggggagaacaaaggatttcttgtttgtaagaagaagatggcaacttctcctgagatgctttgttacttgtgccctcctccttttcaacaatttcttgagattgtgaccaacatgaaatttgatgaagaaccaaattactcaaagctcatttctcttttccgtaatagcattgatttcaattcatcaatatgtcctatccaaattgatggagctattaagctgngtcaaaaaaggggga

SEQ ID NO: 201296 - DNA, 408 bp, Gossypium hirsutum
aaagagcccaaggtggatggtgaacttatttatgccgatgcaaagattgatagactcggcgaaattgaagaattcattctcataccaaatgttgctaatcttcaaaatgttggtgaccgcttgttcgatgaagccctatacgaagctgcaaaaataatatttgcgtttatatctaactgggccaaattggctgttacactggtaagacttaaacaattccaaggtgctgttgatgcagcacgaaaagcaaacagtgcaaagacatggaaggaggtttgctttgcttgtgttgatgcagaagaattccgattggcacagatatgtggtcttaacatcatcatacaggtggacgacttgaaagaagtaagcgaatactatcagaaccagagatgcttcaatgagttgatc

SEQ ID NO: 201297 - DNA, 274 bp, Gossypium hirsutum
caaaagcctgatgtgtttaggggaactgtacgttatgcaagggtgcatgctcatttgggtaggacacacaatcgaaggcatgaccttgagtcattggcttatacactaacatgattacttctgggaaaccgtccctggctcgggcacaccgacgagaacatcacgctatcttagatgtgcatacaagatagcagctcacactgacatgctgtgttacatgagcactactcctttccaacgatctattcatattaagaccatcatgaacagtgat

SEQ ID NO: 201298 - DNA, 279 bp, Gossypium hirsutum
cttaaaccattaaagcttggaacaagcttaaggaagtgcagaaatggccccaaagagaggtgtaaaggttgctgccccggccaagaagaaacaagagaaggttgtgaatccactgttcgagaagcgtccaaagcagtttggtattggcggggcactacctccaaagaaggatctacatcgatttgtaaagtggcctaaggttgtccgcattcaaaggaaaaagaggatccttaagcagaggttgaaagtcccaccagcattgaaccagtttaccaagac

SEQ ID NO: 201299 - DNA, 360 bp, Gossypium hirsutum
ggttatgctgctatgcaaagggttactcagtggaatggggatttcaccgaacacagtgagcagggggataggtaccgtgaactagctagtcgtgtggatgaggcccttggattcatggctgcagctggacttacagttgaccatcctatcatgacaacaactgaattctggacttcccatgagtgcttgctcttaccttacgaacagtcacttacccggcttgattctacttctggccgttactatgattgttctgctcatttcctgtgggtcggggaacgaacaagacagttggatggtgctcatgttgagtttttgagaggagttgctaatcccctttgaattaaagtgagccgatag

SEQ ID NO: 201300 - DNA, 392 bp, Gossypium hirsutum
cttaaatttgccatctcactatgcagctggggtaatattagttggttgctgtcctggtggtacagcaagtaacattgtcacatatcttgcccgaggaaatgtggcactttccgtgttgatgaccgctgcaagcactctatctgctgtgattatgaccccctctctcacaagcatgctggctgggaaatatgttccagtagatgctgctgcactgctaaactcaacactgcaggttgtgcttcttcctgtattgggtggtgcattcctaaatcagtatttccatggcttcgttaaatttggttctcctttgatgccaagcattggtgtcggaacttgtggtgttctatgtggaaatgcaattgcccaaagttctttcgcaattcttgcatctg

SEQ ID NO: 201301 - DNA, 225 bp, Gossypium hirsutum
gaagcttccttttccgttttagatctcaaaattcaaaaggctcgctttttcatctcatggctgctactattgtctccgtcaaagctaggcagatcttcgacagccgtggaaatcctacggttgaggttgatgtggaaatatcgaacggtataaaggctagggccgcagttcctagcggtgcatccactgaaattaacgaggctcttgatttgaaaaatggaggtt

SEQ ID NO: 201302 - DNA, 408 bp, Gossypium hirsutum
aaaagatcgtcttccatatcatcacagataagaagacatatgctggtatgcacgcctggttcgcactaaaccctgtatcccctgcaatagttgaagtgaaaggggttcaccagtttgattggttaacaagagagaatgttcccgtgcttgaagctgtagagaaccatcatggcattcgaaattattatcatggcaatcatcttgccggggcaaatctcttcaatactacttcttgaacattcgcttcgaaattgcacggcttaaatccaaaatgcatatatttacttaaccatatttggatatatttaccagagcttttttcaaaactttacaaagtggtctttctagacgacgacatttgaattcagcgtgatttatctcctctttgggagattgacttatggggaa

SEQ ID NO: 201303 - DNA, 283 bp, Gossypium hirsutum
ggtcaatggaagcatcatgagcttaaggtgaaggactcaaagagccttctctttggtgaaaagcctgtcacagttttcggtatcagaaaccctgaggaaatcccatgggctgaggctggagctgagtatgttgttgagtctactggtgtttttactgacaaggacaaggctgctgctcacttgaagggtggcgcgaagaaggttatcatttctgctcccagtaaggatgctcccatgtttgttgtgggtgtcaatgagaaggaatataagcctgaccttaaca

SEQ ID NO: 201304 - DNA, 297 bp, Gossypium hirsutum
tggttcttttttgggttttcagacagtattggcttgggaggaaaatgactatccttatcgagaagcctgagctagactgccagattcatgtggatgaaagtaaggaattggtgttggatggtggattcccagtgccgaaatctttgtcaggagaaggatttttggcaccagaggtcaattcatttggcaactcctttagggattacaatgcagaaagtgaaaggcaaaagagcgtggaggaattctacaagcagcaacatgttaaccagacatacgaatttgtgcaaaagatgaagg

SEQ ID NO: 201305 - DNA, 398 bp, Gossypium hirsutum
  unsure (1)..(398): unsure at all n locations
gttccaaacgagattatcagcttgtatgagtcagcatcaaagtttggcgcaggactgtttcttttggttcaagtcgtgcttttactcgactttgttcatggatggaatgacaaatgggttggatatgatgagcaattctggtatgttgctctactagttgtttctcttgtttgttatttggcaacatttggcttctcgggacttctcttccacttgttcactccatccggacaagattgtggactcaataccttctttatcgntatgaccttgactctntgtcttttggttgccataattgcactgcatcctgcggttggcggtagcattttgccaagttcaagtatattaatggactggatggacctatgctataatggacttgcaagtgaaccgag

SEQ ID NO: 201306 - DNA, 330 bp, Gossypium hirsutum
  unsure (1)..(330): unsure at all n locations
gtctcccgctatctcagtggagaagctcagcacatagagtggagtaagagccagactccaactgatgaagtggttgttccttatgacanccttgtctccctctcctgatgatcctgctgaaaccaagaagctcttggacaaacttgttgtcttaaagcttaatggaggtctcggaaccactatgggatgtactggtcccaaatccgtcattgaagttcgcaatggcttgactnttcttgacctaattgttattcagatcgagaatcttaattctaaatacggatgtaatgttccggtgggtctgatgaactcattcaacacccatgatga

SEQ ID NO: 201307 - DNA, 426 bp, Gossypium hirsutum
gctacttaaccatttcccaaatctcctccctcctcttctttagcgtccttttcatttccgctcatgcagcgcgctttgaaatccgcaatgagtgctcctacaccgtctgggcagcagcctctcctggtggtggccgtcgcctagaccctcggcaaagttggaccatcgatgtgcctgctggcactgctatggctcgtatttggggtcgaaccaattgcaatttcgatgccagtggtaggggtcattgccaaaccggtgattgtggtggactccttcaatgcaaaagttggggtgtacctccaaacaccctggctgaatatgcacttaaccaatttggaaacatggatttctacgacatttccttagttgatgggtttaacatccccatggtgtttggtccaactaatggcggttgtcacaacattc

SEQ ID NO: 201308 - DNA, 330 bp, Gossypium hirsutum
catcaatctatgcctaaatctccaacctcctcttctttagcgtactgttcatttccgctcatgcagcgcgctttgaaatcctcaataaatgctcctacacctactggccagcagcctctccacttccagaacgtcgcctaaaccctcgtcacacttgcaccatctatcaacctgctgacactactatttcatccattcgtaatcgaaccaattccatttataatccaattgtatattatatttcccaaccccttaatattttttacctctttcaatcaaaatattggattaaccttcttacaaccttacttaataatcactttaccaatt

SEQ ID NO: 201309 - DNA, 427 bp, Gossypium hirsutum
ccgcatctttgaggtttgatggagccctgaatgtggatgtgagtgagttccagactaacctggtcccatatcccaagatccactttaatgctttcttcttatggccctggcatttcaacttaaaaagcttaacattaaccagttttcgtggcttgaataaccaacagtgcttttgaaccctttttaatgatggccaaatgtgacccacgaacacggaagtacatggcttgctgccttatgtaccgaagagatgttgtgcccaaagatgtgaatgcggcttgggccaccattaagaccaaacgcacaatccaatttgtggattggtgccctactggattcaagtgcggtatcaactaccagccaccaactgttgttccaggaggggaccttgccaaggttcagagagctgtctgcatgatctccaact

SEQ ID NO: 201310 - DNA, 236 bp, Gossypium hirsutum
ggatgctagacatggtgcaaagactcgagaggaggagggcaggctgaagttccattatcagtcttttgtatctttcaatgtagcttatcgaacaatcatggctctgtggaaagccagagccttgagcccagaacagaaagtgcaaatagttgaagaagagtccgaggcaaaaagcctccaaagtgacgagagtggatctttcttaggccttgaggatgtcagtatggtctgaggtt

SEQ ID NO: 201311 - DNA, 411 bp, Gossypium hirsutum
ctcattccacaagtgtttcttcgtcggagtgggagaggagtccctaggaacaattaaaaagaaccgaaaaaaaaacacagattaagacagaagcatggccagccagctcgtaggaacaaagagagcttgtgtcgtgggtggcagcggattcgttgcctcattgctggtcaagttgttgctcgagaagggttacgccgttaacactacagtcagggaccctgacaaccagaagaagatctctcaccttgtaacactacaagagttgggagacttgaagatctttcaagcggatttaactgatgaagggagctttgatgcccctattgctggttgtgaccttgtcttccatgttgcgacacccgttaactttgcttctgaagatccagagaatgacatgatcaaaccagcgac

SEQ ID NO: 201312 - DNA, 405 bp, Gossypium hirsutum
ctcatttttcatttttcatctaaatctctgatccgaggcaaaaaactcaaatcggtgggaatagcaatgggttttgagaagatcaaggtcgccaatcccatcgttgagatggacggagatgaaatgaccagagttatttggaaatcaattaaggataagctcattcttccctttgtggagttggacataaagtactttgaccttggtcttccacatcgtgatgctaccgatgataaagttacaattgaaagtgcagaagctactcttaagtacaatgtcgccatcaagtgtgctactattactccagatgaagctcgtgttaaagagtttgacttgaagcagatgtggaagagtcctaatgggactattaggaatattttgaacggcactgtctttagagaacca

SEQ ID NO: 201313 - DNA, 380 bp, Gossypium hirsutum
aattagaaaatatattagtctatactaatcattcttatttcacaaatgcgagcaatgaggaataaaagaggcaacccacatgcaaactaaatccaaaatcaaaggttccttttcctgatgaggtgtaactaaaatatccgagtgaagacgtactgaaattttgcacgacaccaaaaaataagggttcacagtttgaatccccttaactcatgctgcatgggatgatagtttataacaaagcatttctctcatagccgactgatgactgcttccacctctgaaggggtgtacagatggtatatcggtgctactttggcaatatcaacattgttgggagtcaccttttcttccattacttgctttaaaatggacagagcaat

SEQ ID NO: 201314 - DNA, 330 bp, Gossypium hirsutum
aagaaacgaatagaaaaggaaaattaaaaaccctttgcttcccgtccccgttgtttttagttttcttttggctaaagaaaattatggaaccgagtcagacgatcgaggatgaatcacaaccatccatcgccagcgtgacccgtcgcatccaacgtttgtctcttcaccttatcccacttccgttcctccaacgttcacctcagctggacatgctgacatgcgccaaggccaataagcaggaggtcgacgtagccttcctttcaagctacatgagagggaggcataaggaaaatcaagagaagatttttgattttttaactcagggcctga

SEQ ID NO: 201315 - DNA, 379 bp, Gossypium hirsutum
gcagatgctattgcttatgcatttcattctgtcgctcattatgtggtcggggaaaatgcatagattaagaagacacatgattaacaactggttggagatgtgcatgctctctatgcaggcctgaagtcttatgtgacatcctttacagaagagtgattgactacctgcagggaagcctgtggaggtcatgggtatgctgttgtcaaccggtttgttacccttgggaatgatcatgacattttctacacatttgaaggcgacgatacagttcttttgcaaaaggtaactgcaaatttaatgaagcaaatcaaggacaagttccaaggtggggctatgtgtgtcacatggaactacttgagagaatctattaacacatact

SEQ ID NO: 201316 - DNA, 151 bp, Gossypium hirsutum
gcttcaacttatgcatttcattttgccactcagtattgcgtaagtaaatattcatagatgaagaagacacatgatgaacaactggttggagatgtgcatgctctttctgcaggcctgaagtcctatgtgacatcatttacagcaaaatcat

SEQ ID NO: 201317 - DNA, 227 bp, Gossypium hirsutum
gggaaagtagaaacaaagaaaacatatggcgggtgaggcggcggatgaagctaacgtccctgcagcggctgcggcggaagcacccacaacagggaccgagaagcaaccacataagcttgaaagaaagtggaccttttggttcgataaccaatcaaagcctaaacaaggcgctgcttggtgctcctctttacgcaaagcatacactgctgacactggcgacaacattt

SEQ ID NO: 201318 - DNA, 295 bp, Gossypium hirsutum
aaaaaatcttctgatttttctgagtctttttcttatcttctgtgtggctgctgagaaagtgttttaagaagaacaatgaatgcattagtggcaaccaacagaaacttcaagctagcagccaggcttcttggtttggattctaagcttgaaaagagtctcctcattcccttcagggaaatcaaggttgaatgcaccatacccaaagatgatggcacattggcaacttttggtggctttaggattcaacatgacaatgctagaagtcctatgaaaggaggaatcagatatcaccctg

SEQ ID NO: 201319 - DNA, 410 bp, Gossypium hirsutum
aaaggttttcctcttgtctaattctataagggcttccggagcaaatattagtactggtgtttttaacatgactgttatcccaaaaccctggagggctagcatgttagcagcagctctacaacgcaccatgggtgttgggaacaaagggaatccctgtaatgggcagttacctagcttgtctcttcgaaatcttcttcttgggagaaaaattctaatcgtagatgacaacaatgtgaatctaaaagtagctgctggtgcattgaagaaatacggagcagatgtggttagtgctacaagaagaatagaagctattgagctgctcacaccacctcaccagtttgatgcctggttcatggatatccaaatgccggaaatggatgggtttgaagctacaaggagaatttcggata

SEQ ID NO: 201320 - DNA, 408 bp, Gossypium hirsutum
  unsure (1)..(408): unsure at all n locations
aaatcggagaaaaagttcagattgtaggagatgatcttttggtcaccaacccaaagagggttgcgaaggctattgccgaaaaaaacttgtaatgcccttcttctcaaggtcaatcaaattggatctgttaccgaaagtatcgaagctgtgaaaatgtccaagcaagctggatggggtgtgatggccagccaccgcagtggtgaaacggaggatacttttattgctgatctttcagtcggtttggccacgggccaaattaagaccggagctccatgcaggtctgagcgtttagccaagtacaatcagcttctgcgaattgaggaggaacttggtgccgaagctgtctatgctggagccagcttccgtgctccagttgcaccctattaagatgcnttgttagatgataat

SEQ ID NO: 201321 - DNA, 294 bp, Gossypium hirsutum
agtccctccaccctagattcttataattgtgcttcccccctgcgaaggcgttattcttcattcgcttcgttgaatttttatcttctttttatctgaacggagtttggtaatccagttttcgtcttcggttgattcaggaaatcttagtttttgaattgcgtgactgaatgatctaatggagtctaaaggtgggaaaaagaagtctagtagtagtaagtctttattctacgaagctcctctcggttacagcattgaagacgtgcggccaaacggtggaatcaagaagttcagatc

SEQ ID NO: 201322 - DNA, 363 bp, Gossypium hirsutum
gtcactttctcttaccttctccttgctccctgaaacagcttcagctcagctaagacaaaattactacgctaaaacctgtcccaatgtagaatccattgtaagaaacgccgttactcagaaattcagacaaacttttgtcactgtccccgcaactatccgcctcttcttccatgattgctttgtccagggttgtgatgcttcagtaattattcaatccaccggcagcaacaaagccgaaaaggaccaccccgacaacttgtcgttagccggtgacggtttcgacaccgtcatcaaagcgaaacaagcggtcgatgcggttccgaagtgtagaaacaaggtttcatgtgctgatattttggcaat

SEQ ID NO: 201323 - DNA, 202 bp, Gossypium hirsutum
attgagactacctcttgagtcagaccaagttcttctgaaagtgatttatgctggtgtaaacgcaggtgatgtgaactttagcgcatgccgttattttcaaggaaccaagaaagaccctggatttgaggcagtgggaataattgctgccattggagattctgtaagaaattggaagtttgaacttctgcttcagtcatgacta

SEQ ID NO: 201324 - DNA, 240 bp, Gossypium hirsutum
tctgttcagaaaatacagtgtctgactccaaatattggagttggttacagtggcatgggtcctgattttcgagttttggttcggaaaagtaggaagcaagcagaacaataccataggttgtataaggaaccaattccagtaacacaacttgtaagggaaactgcagctgttatgcaggagttcactcagtctggtggtgtaaggccttttggtgtatctctactagttgctggatatgac

SEQ ID NO: 201325 - DNA, 283 bp, Gossypium hirsutum
  unsure (1)..(283): unsure at all n locations
gcaagtttcaatggcaaaggcaaacattctcttggttttcttgtgttcactgggattgctactgcttgggggtgttggagtggaaggaaatccgaattacagagatgcactacaaaaatcctttctcttcttccaaggccagagatcaggcaagctgcctgccaatcagaaagtttcatggaggtccaactctggtctttctgatggctcccttgaccatgtagatttgactggtggctactacgatgnctgaaacaatgtgaaatttaactttccaatggca

SEQ ID NO: 201326 - DNA, 263 bp, Gossypium hirsutum
gagcagtaaagaaaatcagctcattcaagctactgctttattagaggagaaagatgaatatgctctgaaagtacaagatgagttgaatgatacaaagatgaagttctctgaagctgaaactgtcatagaacgaattgcagaactcacaaaccgactagttatctcagttaaggatgaagacaataatgtgttgaggcctgttgatgatgtgagcagcgaattaatgcatcagctggtagataggccttctagtgattttggat

SEQ ID NO: 201327 - DNA, 411 bp, Gossypium hirsutum
cagttgtaaaagctgcagttgatgaaagatgaagggggcttcaaatttggagggaatcacagggccgggcatctaagctatatggttttaagcatgattctatgtcatcgcttaggaaaacaagtaagacaggagaattggttgattcaaaaactaatggagatctttcacgttccaagtccgaatcaatgaatgaggatgaaaatcttctttgtctgacaggagatgctaagtcggattctgttccagatcttcaacagcaagttgtagggttaaaggtcgagttgtgcaagttgctggaagaaaaaagatcaactgttctcagatctgatgaactggatacagcattgatggagatggttaagcaagacaatcgacgccaattatgtgctagggtagagcaattagagc

SEQ ID NO: 201328 - DNA, 374 bp, Gossypium hirsutum
aggaagcgcttggaaaagcggaagagtctattagaaccaagagatcatttgaagccttcttccttaaagcttatgcattggccgactctagcatggatttttcatgttcttcaacagttatctcattgcttgaaaatgccttgaaatgcccctcggataatcttcggaaaggtcaagtaaggtttcttttgccctatctttttcattagaaaaatcctttttgtcacaacagtttcttctaaggcgtacaatcggattctcggtaatatttttcaagtaagccaaaagatatattctttggctccatcaagtagttgtatcactagcaaaaatcatgtctttcaatgatttcagttttattgttagaaaacgtg

SEQ ID NO: 201329 - DNA, 214 bp, Gossypium hirsutum
cttcctttggtactcaagaaaaagcaagagatgggtttttcaaggaaagagtacgagttcttgagcgagatcggattgagttctggcaatttgggatgttttgtgaatggcacctggaaaggaagtggccctgtggtttctactcttaatcctgcccataatcagaaaattgccgaagttagtgaggcttccatccaagactatgaagaaagga

SEQ ID NO: 201330 - DNA, 409 bp, Gossypium hirsutum
cttaacctatcatttaatcacatgagttatggcatatctccaagactcgtgtttacagaaaagctgcttgtattggatttgagtttcaatgatttatcaggccctcttccggggaaaattgctgaggcaactgaaaaatcaggccttgttcttctcgacctctctcacaaccggttttctggtaaaatcccattgaagatcaccgagctgaaaagcttgcaagcattgtttctttctcataatcttcttacaggggaaatcccaacaaggattggaaatttaacttatctccaagtggtcgatctgtcgcataactccttatcaagttcaattccattagatattgctgggtgttttcagttacttgcattgatacttaacaacaacaatctttccggtgaaattcaac

SEQ ID NO: 201331 - DNA, 406 bp, Gossypium hirsutum
atatccttgagctttacactttaggccgtagattaggacagggacagtttggggttacttacttatgtaccgagatttcgactgggattgaatatgcttgtaagtccatatcgaaaaggaagttgatttgcaaggaggatgtggaggatgttaggagggagatccaaattatgcaccatttggctggtcataagaatatcgtgacgatcaaaggcgcgtacgaggatcctttatttgtgcatatcgtgatggagctttgctccggaggcgaactgtttgatagaattatccataaggggcattacaccgagaggaaagcagctgagttgactaagatcattgttggtgttgttgaggcttgccattcacttggggttatgcatagagatttgaagcctgaaaattt

SEQ ID NO: 201332 - DNA, 277 bp, Gossypium hirsutum
ggaaattcttgaggtgacccaagttaccccaacctttaactcaccaaaatcgacgacggagttccgtcttccactcactttctccgacataatctggttcaagtttcctcctgttgagcgcctcttcttttaccaattcgacgagttaacccctgccttgttcaactcagttatccctccaaaactcaagcgctctctttcccttacacttgtccattaccttcccctcgctggcaatctcaagtggccaccaaacgaacctaaacccatcatttta

SEQ ID NO: 201333 - DNA, 362 bp, Gossypium hirsutum
gaacaactttcagctgaaacagccgcttcctccaacatggctagagggttgaagaaacacttgaagaggctcaatgcccccaggcattggatgcttgacaagcttggtggtgcattcgcgccaaagccatcgtctggaccccacaagtcgagggaatgtttgccacttattctcattctgcgaaacagactgaagtatgctttgacatacagagaaatgattgctattctaatccaaagccatgtaatggtaaatggaaaggttagaactgttaaaacctaccttgctggtttaatggatgtggggccatttccaagaccaattgagaccttcggcttccttaatacccttaaaggccgttt

SEQ ID NO: 201334 - DNA, 227 bp, Gossypium hirsutum
ggcagatgcaaccgtactcgtaatggggctcgaccaatctatagagagcagaattcagggacagggtagggctgctcttgcctggacgccagcaagagcttgtttcccgagtggctcgagcttctagaggtccaaccgtgctggtcttgatgtcaggtggtcctatcgatgtctcattcgctaagaatgatcctcgagttagtgcgattatatgggctggttatcca

SEQ ID NO: 201335 - DNA, 405 bp, Gossypium hirsutum
tttaaagtccagtttctagatgaaatagggacatttggaaggaaaacagaggatagccaaatttgaacatcaataataaggggaaagcaagttttgaaaaacagagtaaaagggggaaaaagttgagaacaaatgggagatgttattttgtttgtcgataatttctcatcgaattcttcaatttcactctgtagaatttgccatgaagaagagttggaaagctttaagagcttggaagttccttgtgcttgttcaggcactgttaagtttgctcatagagattgtatacagagatggtgtaacgaggaaggaaacacatcttgtgaaatgtgtcttcaggaatatgaaccaggatatacagtaacagtttccttaaagaaggctcagctgattgaagatgctgta

SEQ ID NO: 201336 - DNA, 399 bp, Gossypium hirsutum
attcgccgcacggcatcagtctcatcaggcggggaagaatgtctcacaggaagtttgaacacccaaggcatggctcccttggatttcttccgaggaagcgagcttctcgtcacagagggaaagtgaaggcatttcctaaggatgacccaagcaaaccttgcaagctcactgcctttttgggctacaaggcaggcatgacacacattgtccgagaggtcgaaaaacctggatctaagcttcacaagaaagagacatgtgaagctgttacgatcgttgaaacccctcctatggtgattgttggggttggtggttatgtcaagacaccacgtggtcttcgcagcttgaacaccgtttgggctcagcatctgagcgaggaagtcaaacgtaagttctacaagc

SEQ ID NO: 201337 - DNA, 388 bp, Gossypium hirsutum
catctccctctacaaaagacaaaagctattttctgaaatcttggatcttttgatcaaagcaaaaacaaccagaattcaatggggaagaaagctgtgttgattggaatcaactatccaggtacaaaggctgaactgaaaggctgcataaacgatgtgaagagaatgtacaaatgccttacagaacgctatggattctctgaagaagacatcacggtattgatagacaccgataattcttaatatcaacccaccaggaagaaccttagaagggctttgaatgatcttgtgagatccgcttaacctggggattttctggttgggcactacaatggccattggactaagctttcttgttaaaactgggaccaataataatcctgcttccaat

SEQ ID NO: 201338 - DNA, 399 bp, Gossypium hirsutum
ggaatctatgaccactaatccaatggcatgggaaggtggagttgacccaagggtgaagcaaatggagcaagctcagaattgtctccttcctatgggtattacgtcagagaacgttgctcatcgctttggtgtgacaaggcaggagcaggatcaggctgcggttgaatctcacaggaaagcagctgctgctacagcttctggtaaattcaaagatgaaatagtccctgtggccaccaagattgttgatccaaagactggtgatgagaaacctgtcacaatctctgttgatgatgggatccgagctaacacatcagtgtcagatctgggaaaattgaaacctgtattcaagaaaaatgggaccactactgctggaaattctaatcaagtgagtgatggtgc

SEQ ID NO: 201339 - DNA, 408 bp, Gossypium hirsutum
gaggaatcagaggctagggcaagacaagttggagcaggtgaaatattggcccgtgaactccaagaacaattatatcatgaggtctcaatatatggcaacaatgagattgatgaaaacattgcgagggctcttcagcaggaggaagatacattcccaagtccttctaatcgtagcatctcttcaccgaattaacagtttaccactctccaaagtgcagactgataactttgaggaagtttgtgcgatatgccttgaaacccccgcaaatggagaaaccattcgccatcttccttgtctacataaatttcacaaggattgtatcgatccatggctgagtcggaaaacttcatgcccggtttgcaagtcatctataaattgaatatttgagtgatacaatggttaagcaac

SEQ ID NO: 201340 - DNA, 257 bp, Gossypium hirsutum
accattttccgtgaaaaaaagggatgcaactgtagttgcaaagctaaagaaagggaagaagcatgaatatccatggcctgcagatccagatccaaatgtgaaaggcggggtcctaactcatctctcccatttcaagcctttgaaagaaaagcaaaagcccgttactttggattttgagaagccccttgttgaaatcgagaagaagatgattgacgtgaggagaatggcaaatgaaactgggttggatttcagtgatc

SEQ ID NO: 201341 - DNA, 194 bp, Gossypium hirsutum
tgaatgttaagatattactggggatcagggggccaggtccaaataaactggcgggaggcttggaatgggaacaaacatgtacccttcatcttctttactgagccaagacaaggactcttccatagctgcccttgctatagattaattgattgagaatgctgatggattagcgttagagtttacagaccaaattt

SEQ ID NO: 201342 - DNA, 383 bp, Gossypium hirsutum
tgaacatgggattgggaaattcaggagaagaagactgccagaggatgagattttcacgtcagatgagttgacaaagaagttccatggccgagttcttgaattcttcaaccatgggtgcgaggttcacttcttcatgacatggattgccaaggtagggtcctttggaagaagggaaatcatggctgtggaaagcgtttttaaggctcatcctaatggttgcttgatgattctatccagaaccatggactcagtacaaggttacaggatccttgaacccgtgcttggatcgggtttcaaagttctagcagtggccccagacttcccatttctggtgaagaacacacccgctgaagcttggcttgatgatatgaagagtgggaaaa

SEQ ID NO: 201343 - DNA, 248 bp, Gossypium hirsutum
aaacgatgggtcagggaacaccgggcggtatgaataggcaaggtgtcccaggggaccggaaacccgatggctctgataagaaggataagaaatttgagccagcggcgcccccagccagggtggtgcgcaagcaacgaatacagataggacctgatgccgcggctcggcttccgactgtaacgccgctgacgaagtgtaaactgcggttgctaaagctggagcgggtcaaggattatttactgatggaa

SEQ ID NO: 201344 - DNA, 437 bp, Gossypium hirsutum
  unsure (1)..(437): unsure at all n locations
gcggaattctacaggaagaagctcgctaggcgacttctttgtgacggcagtgctaatgacgagcataaaaggagtattctgactaaactaaagcagcaatgtggtggacagttcacctcacagatggacggcatggttacagatctgacattggccagggaaaaccatgccaactatgaggactaccttatgagtaactcagctgctcatcctgggattgatttaacacttactgttcttaccacaggattctggccaagttataaatcattagatcttaatcttcctgctgacatggttaaaagtgtggaggttgtcaaaggattttatgaaacatanacaagcctcagaaagcttacctggatttactcattgggaacttgccacattcatggcaagtctgagcagaagataatcgaactgattgtttcgacata

SEQ ID NO: 201345 - DNA, 206 bp, Gossypium hirsutum
tagcaaagaagcttctgtattgaacaagatgtcattcaagtatgcttggtgtgcttacaagcttaaggctgaacttaagctatatatcaccactgataatgcctactggaaatattataccatcaaatactacttcactgtgattcattcttctctacacttctacttattcatgtacatgattactattacactgcatgcttaca

SEQ ID NO: 201346 - DNA, 415 bp, Gossypium hirsutum
  unsure (1)..(415): unsure at all n locations
agtccaccctccacttggtgctccgtcttcgtggtggtatgcggatgtttgtgaagacacttactgggaagaccatcaccctggaagttgagagctctgacacaatcgataatgttaaggccaaaattcaagataaggaaggtatccctccagaccagcagaggctgatatttgctggaaagcagctagaggatgggaggacccttgcagattacaacatccagaaggagtccacccttcacttggttctccgtctccgtggcgggatgcaaattttcgtgaagaccctgactggaaagaccatcaccctggaagttgagagctcagacacgattgataatgttaaggccaagatccaggataaggaaggaatttctncagaccagcaaaagctgatttttgctgggaagcaact

SEQ ID NO: 201347 - DNA, 442 bp, Gossypium hirsutum; identical to SEQ ID NO: 190597

SEQ ID NO: 201348 - DNA, 343 bp, Gossypium hirsutum
ccgcatctttgaggtttgatggagccctgaatgtggatgtgactgagttccagactaacctggtcccatatcccaggatccactttatgctttcttcttatgcccctgtcatttcagctgagaaggcttaccatgagcagctatcggtggctgagataaccaacagtgcttttgaaccctcttcaatgatggccaaatgtgacccacgacacgggaagtacatggcttgctgccttatgtaccgaggagatgttgtgcccaaagatgtgaatgcggctgtggccaccattaagaccaaacgcacaatccaatttgtggattggtgccctactggattcaagtg

SEQ ID NO: 201349 - DNA, 441 bp, Gossypium hirsutum
gatccctagtgggcatacaattaatctattgagatggtgtgatgagacaccacctgtacttcatcttcagttgagaaactatttgtactcttttgagtatctcatagacaacaaaagctggagagcctcggttcatatgtacaagaagggcaggaccagatatgctcattatcgtcaatccgatctcatcttagcagatgctgggtggcattgtagcttttgctttcggtatataagcgactttatattcaagatgaaagcttacagtcacacggatcgagtgagattcgctcatttcttgaactccaagaggattcaggacgtaatatgcagagggtctaacctattcgacatgcttgctgaagaatacacattcaaggagatcatcgtgaagatgggacctatcccttactcgtattcagcagtccatcttcctgcgta

SEQ ID NO: 201350 - DNA, 411 bp, Gossypium hirsutum
attgaaagctcagtcggtggctgttaagctcctggatttagggggcctgcaaggacatagagagtggttgactgaagtgatctttcttgcacaattgaggcatccacatcttgtgaagttgatcggatattgctgcgaagaagaacatagactgctggtttatgaatatatgccaagaggcagcttggagaaccagctatttcgaaggtactcggtttctcttccatgggcgacgaggatgaaaattgctcttggagctgccaagggtcttgcctatctccatgaagcagaaaaatcagtaatttaccgagatttcaaagcgtcaaatatcttgttagattctgattacacagccaaactttcagattttggtctcgcaaaaagtggtccggaaagggatgacacgcatgt

SEQ ID NO: 201351 - DNA, 396 bp, Gossypium hirsutum
atttcctttgccgcccctagggttttattacattccccacatggcttctgcagatgtcgagtaccagtgcttcgtcggaggtctcgcatggaccatcaacgaccgtgctctcgaagaagccttcagtgcttacggcgagatcgtcgattcgaagatcattaacgatcgtgagactggaagatccagaggctttggcttcgttactttccgtgatgagaaatctatgaaagatgctattgaaggaatgaacggtcggagtctcgatggaaggaatataaccgtcaacgaagcacaatctcgccgaagcggcggcggcggtggtggtggaagatttggaggaaacggtgggtacaaccgtggaggcggtggatatggtggtcgccgtgaaggtggata

SEQ ID NO: 201352 - DNA, 444 bp, Gossypium hirsutum
ggtgtttcttagaaaaagagaaaaaatcaaattacaggagggatatcttcaggtttgcaggtgatatgactcatttgatcagcatcttagtgctgctcctcaaaatctacgctaccaaatcttgctcaggtatttcgctgaagacgcaggagctatatgcgctagtatttttgacccgctacttggatctattcacggattttatatctgtgtacaacaccatcatgaagctggtctttattgccagctctctcgccattgtttggtgtatgagaatgcaccgagtcgtgaggcgttcctatgacaaggacctcgatacatttcgtcattatttcctcattttggctagcctcattttggcgcttttggtacacgagaagttcacctttcacgagatcttttgggcattttcaatctacttggaagctcttgcgattcttcccc

SEQ ID NO: 201353 - DNA, 434 bp, Gossypium hirsutum
tgggcagctcacgctaaaatctgatgtttacagtttcgggggagtctttattgagcttataaccgggcgcaaggccattgataatacacgtgctccgggagagcagaatcttgttgcatgggcacgaccacttttcagagatcgtaggaagtttccaaaaatggctgacccactactacaaggtcgttatcccatacgaggattgtaccaagctcttgcagttgcagcaatgtgtttgcaggagcaagcagcaacaaggcctctaataggcgatgttgtgacagcacttacatatttagcatcgcaaacctatgaccctaatgcacctaacaatcaaagcaacagagttggtccgtcaactccaagagtcaaagatgatcgaaagagtatggcagacggtctggacagtccagatgcacgtggactggtaggtt

SEQ ID NO: 201354 - DNA, 439 bp, Gossypium hirsutum
  unsure (1)..(439): unsure at all n locations
gaaaaacgaataatcaaatgaaaaaacagtattgaagacgagctgtttcgaccaagaattcttgctgccataatcggagaaacggcattaaaattggtgaaggttttgaagagaagacgaaaatggatgctgccaagaagaagtacagtataatagtaccaacgtataacgagcgcctcaacattgctctcatcgtctatctcatcttcaaacatctccgggatgttgattttgaaataattgttgtggatgatgggagcccaaatggtactcaagaagttgtgaaacagctgcagacactctatggtgaagatcgaattttattgagacctagacctaataagcttggattgtgaacggcttatatacatggtttgaagcatgcttctgggaaatnntgtgtaatcatggatgctgatctatcacatcattcaaaata

SEQ ID NO: 201355 - DNA, 444 bp, Gossypium hirsutum
  unsure (1)..(444): unsure at all n locations
catcagcgttacaatcagttgaaaaatggtggagatgaagaggcagcggcccttgttttcgtgtggacggaccgtggttattacaggagaagaaggcctaagattctctctttccttttactttctcttcttgcttgtggcttcatattggctcctcacttctttagcttttcttctgctttatctcatctctatttatatggtgtacaaaatgacggccttgctggtgatttatatgtaaatgctcctctctgntcttcaatctctaatggttcagtttgctgtgacagaagacattttcgatctgatatttgctttatgaaaggtgacataagaacacattctcccagctcttcggatttctttattcaccanaaaatagcgacgatgacgcttcaagtacggttgatggtgatgaacttcaacacgaaaagatcaaacctt

SEQ ID NO: 201356 - DNA, 442 bp, Gossypium hirsutum
  unsure (1)..(442): unsure at all n locations
ctaagatattcaaccaccatgaatgattcttcactgttctgcggttgatcaaatcacgaagaagaagctgacgttttgcaagccatgcatttagcttccatttcatcactccctttcactttgaaagtcgccgtcgatctcggcttgttagatattatagccgaagccgccgacactcctcctggtatggtgtcggttgctgagatcgtctctaagcttcccaccaataatccaaacgccccttccattgttgatcgaatgctcaggcttttggccgctcactccatcttgacctgtgatcaaatcactggccaagatggcctgacccaaagatcgtatggtcttgcatcaatcggtaaatacttcgttcaaaatgaagatggagtctcctttgctgctttgcttcgtctccatctcgaaaatacatnctcgaatgctggaa

SEQ ID NO: 201357 - DNA, 419 bp, Gossypium hirsutum
cttcgtcagagatatacaagacattgcctattagggaagagcttttgggtgcctttttgaatgcggatttaatcgggtttcatacttttgattatgcaaggcattttttgtcgtgctgtagtcgaatgcttggtcttacttatgaatccaagagggggtacataggtgttgagtattatggaagaactgttagtatcaaaattctccctatggggatacacatgggtcagctggagtcggttttgagccttccagagactgaagccaaggttacagagcttcttaagcagtattgcgatcaagggaagacaatgttgcttggggtggatgatatggacatatttaagggtattagtttgaagctgctagcaatggaacaactacttttgcagcatcccgagtgtcaagggaaggtagtg

SEQ ID NO: 201358 - DNA, 401 bp, Gossypium hirsutum
gagagccatttgcaccattttctacatgataacttgggtgctgaaattgttgctacagttattgagaacaagcaagatgctgtggattatcttacttggactttcatgtataggaggctcacccaaaatccaaattactacaatctccagggtgtaagtcacaggcatctctctgatcacctttctgagctcgttgagaacacattaaatgatctggaagcaagtaaatgtatcactatagaggatgacatggatctttctcctttgaatcttggcatgatagcctcttattattacatcagttacactaccattgagcgtttcagttcttccttgactttcaagacgaagatgaatggtcttcttgagattctggcctcagcttctgagtatgctaatct

SEQ ID NO: 201359 - DNA, 445 bp, Gossypium hirsutum
  unsure (1)..(445): unsure at all n locations
tcaagttcaaggattacaattgtaccgttgagtactaccgagcggctttccttgttgtacaaagcaggccgcctgccgggtctccgcaaaacatcaagacaacccttaagttggatcgaatggattggaattcatttaggtggaaagatgccgatttgttggtcttcaacaccggccattggtggaactacgagaagaccgttagagggggatgttactttcaagtcggggaaaaaatcgaaaccaagatgaccatagaacatgcgtatcagaggtctttggagactgtgatgcagtggctacgcaacgaggtgaatatgagtaagaccaaggtctacttccgcactttcgctcccgtacatttcagaggaggggattggagaaccggnggaagctgccacctcgagactttgcccgagcttggaacaacattagtgccatcgga

SEQ ID NO: 201360 - DNA, 455 bp, Gossypium hirsutum
ttaagatgctatatgatgggcgaccagtggatctaactcctgaacaagaggaggtggcaacaatgtttgcggtagtgcaagagactgattacatgagtaaaccacagttcaagaagaatttctgggaggattggagtaaattactggggagaaaccatgtcattaagagcttggacaaatgtgatttcactccaatctatgagtggcatttgcaggagaaagagaagaagaagcaaatgagttctgaagagaagaaggctttgaaagaagaaaaattgatgcaggaggaaaagtatatgtgggctattgtagatggtgtcaaagagaaggtaggaaatttcagagttgaaccacctggacttttccgaggtcgaggagagcatcccaagatgggaaagttgaaaagacgtattcgtccatgtgacattaccattaatatcggaaaggatgcccca

SEQ ID NO: 201361 - DNA, 385 bp, Gossypium hirsutum
ccccccccctttttttttttttattttttttttttttttcggcaagagtaacccaatatcaaataatcgaccaaacctcattagttccatctttaaaaccaaattcaaccatccaattttcccgtacttaaatttaaacaataagctttcacgaatcagtgtccatatatttacacagatttaggttgaatttgctcaaagtcaaaaacctcgaacataaggcgtctcacatctggcttaccatatacagtgtatgaaaggccatggagggcctgctgaacagcagttgtggcaagtttccggagtcttcgattgttctcatacgcatcttgaacttgctctgagtagatcataaaacgatgcatatacttttcccgcaaatacc

SEQ ID NO: 201362 - DNA, 437 bp, Gossypium hirsutum
  unsure (1)..(437): unsure at all n locations
gtgagtttaaaaaatcaacacttggaaaatatttcgcttttaatacttgcgcaactaaagaatttgaattgtttataatacgccatccttgcttagctaaaagtgaaacattaaattgagccatatttctgaagcccaatccaccctcttctttaggacggcataagtacttccactgacaccaatgaatacctctcataccatgcgttttttgccaccaaaatttagcaaaaatattctcaaattctcctcaaagagtctttggtaataagaagcatgacatagcgtacgttggaatggcctgtaacaccgatttaataaagacttctttacctncttgagataacattctagtactccacccatcaatcctggtagcaatcttttcttttaaatgctgaaaggatnntttctttcgtcgaccaaccatgtttgga

SEQ ID NO: 201363 - DNA, 423 bp, Gossypium hirsutum
ccacaatcgacgtggagtgggtgcatgtaatcagcgaatgctgggctgatcctttgaaaggatttatgagggaagatgagtgtctgcaaagcttacattttagttctctgagattgacagatgggtctgttgtcaacatgtcacttcccattgtgaaggctattgatgatgatactatggacagagtcgggtcttcttcccatgttgggctggttggacctgatggacacttgatcgccattcttaggagcattgaaatctacaagcataacaaagaagaaagaatagctagcacatggggaacagctgcaccaggtttgccatacgtggaagaagtcattactcctgctggaaactggctcattggaggtgacctataagttttgaaacctattaaatataatgatgggctcgatcactaca

SEQ ID NO: 201364 - DNA, 426 bp, Gossypium hirsutum
gttgaaagaaaagagtgataaacatggtgcctgacaacaatgggaatgaggttgaggattataagttaactgttcaagtccctgaaactgcccatcaagttagcactgattcatggctccaggccggttttgtcttgacaactggtgttaacagtgtatttgtgttgggatattctgggacaatcatggtccctcttggttggataggaggcatagtcggtttgcttttagccaccgtgctgtcgctgaacgccaacatgcttgttgccaagctccatgaacatgggggaaagaagcatatcagatacagagatcttgcagcacaaatatacggtaggagagcctatactattacatgggcaatgcaatatatcaatctgttcatgattaacattgggtttctcattttgggtggttctgctttaa

SEQ ID NO: 201365 - DNA, 443 bp, Gossypium hirsutum
  unsure (1)..(443): unsure at all n locations
atccaagacaaggaagggattccaccagatcagcagaggtggatttttgccggaaagcagctcgaggatgggaggacacttgcggattataacatccaaaaggagtcaaccctgcacttggtgctgcgactgcgtggtggaatgcagatttttgtgaaaactttgactggaaaaactattacattggaggtggagagctcagatacaattgataacgtgaaggccaagattcaggacaaggagggtatcccacctgaccagcagaggttgatttttgcttgaaaagcaactcgaggatgggaggacgcttgcggattatagcatccaaaaagagtcaaccctgcacttggttctgcgccttcgaagagggatgcagatattcgttagaccttgactggtaaaaccccatacactgangtcgaaagctcggacaccattgacaa

SEQ ID NO: 201366 - DNA, 434 bp, Gossypium hirsutum
gttttggtaatagctatcttgttaaagatgatcatgaaacggcggttttctatcattcagtgggaggctcttgctttgttgcttattggaattagcataaaccagttgcggtctttaccagagggtactacttcatttggtcttccggttgcaactggcgcatacttgtatacactaattttcgttactgttccatccctagcatctgtctttaatgaatatgctttaaagagtcagtttgagacaagcatttaccatcagaacttgtttctttatggatatggtgccattttcaatttcctagccattcttggaactgcaatttttaaaggtcccaatagcttggatatcctgcagggacattcaaaggctaccgtgctcttaatatgcaacaatgcagcccaagggatcttatcatctttcttcttcaaata

SEQ ID NO: 201367 - DNA, 434 bp, Gossypium hirsutum
cttacaaaaggataaatagattgattggtactgcaagatgcgagggacgtgatggacatgaatgccggtcttggaggatttgcagcagctctcgaatcacccaagtcttgggtgatgaatgttgtgcccacaattggcaaggacaccttaggtgtgatctatgagagaggtctaattggaatatatcatgactggtgcgaaggtttctctacgtatccaagaacatatgaccttattcatgctaatggtgtctttagcttgtatcaagataagtgtagctttgaagacatccttctggaaatggatcgcattttacggcctgaaggggctgtgatattccgggatgatgtcgatgtcctaaacaaggttaggaaaattgctggaggcatgagatgggacaccaagatgaatgatcacgaggatggtccccttgt

SEQ ID NO: 201368 - DNA, 444 bp, Gossypium hirsutum
ccgtcaaggaaatttccaacaccatttcatttgcacgaatgggccttcttgacatgttcaacagcagcggtgccgtggagaagttcgaagtacaaatgacatccaatgagaaactgcagttctttgatggcgaggtttcctcggagttgacaacttcactcagcaacaaccggaatccaacagcagcgatcagtctcaaagtccggggttgtgggaggtttggtgcatactcatctcagcatccgttgaagtgttgtgtggacaatgccgacactcacttcaactatgactcagccaccggattggtgacacttacattgccagtgccatcggaggagatgtacagatggcacgtagaaattcaagtctaagtttagcttcaggttattttattaggccatcatattaaaagtcattattgtattgagggagatttcatggctt

SEQ ID NO: 201369 - DNA, 407 bp, Gossypium hirsutum
gttgaaagaaaagagtgataaacatggtgcctgacaacaatgggagtgatgttgaggattataagttaactgttcaagtccctgaaactgcccatcaagttagcactgattcatggctccaggccggttttgtcttgacaactggtgttaacagtgtatttggtgttgggatattctgggacaatcatggtccctcttggttggataggaggcatagtcggtttgcttttagccaccgtgctgtcgctgaacgccaacatgcttgttgccaagctccatgaacatgggggaaagaggcatatcagatacagagatcttgcagcacaaatatacggtaggagagcctatactattacatgggcaatgcaatatatcaatctgttcatgattaacattgggtttctcat

SEQ ID NO: 201370 - DNA, 421 bp, Gossypium hirsutum
cgtatgtgtatatacgggtgaccgacaagtgttggaggctgaatatgcatgaacctatcatttgggcattggttgatctctataacaatcttcatctagagcaaattcctcaaagttccaatgtcactcaagttgacccagagatacgtgttgacctgatagatatttcagaggtaaggttgaaagtgtcattggagacagcaccagcccaaaggcctcatggagttctgggtgtgtggagtcctatactttctgctgttggaaacgcatttagaattcaggtgcatctaaggagggtgatgcgcaaagacagattcatgcggagaagttccatagctcgtgcagttgtaaaccgtatttggcaagatttgattcataaccctcttcacttggtattttcagtagatgtacttggtatgac

SEQ ID NO: 201371 - DNA, 441 bp, Gossypium hirsutum
  unsure (1)..(441): unsure at all n locations
aacacaacccgcattattatcattgttgttgcttcaggtgggggaattcccatactaattgcttcctccatctgcatcattcggagggccagaaagaccccacaacaattacttagaactgatgatgatgaggtcattagggctgactccttgcagttcgactttgccactgttcgggcagcaactaataacttttctgatgcaaataagcttggccaaggtggatttggagctgtttacaagggtcaacttccaaatggagaagaggttgctgtgaaaagactagccagggattctggacaaggggacctggaattcaagaatgaagtcctcttagtggccaagcttcagcaccgcaatttagttaggctccttggtttctgcttagaagggcatgaaaggcttctcatttatgagnttgtgcccaacactagccttgat

SEQ ID NO: 201372 - DNA, 412 bp, Gossypium hirsutum
ccgcactgtccctcttttcggatcaattcatagttcagacgctcggcgtaacattcctcgtgtacctcttggccatcaccctgaccctttgtgctcttgcggtgctagaaatcaagtggtccggcattgaactggaagagtggtggaggaatgaacagttctggttgattggaggcaccagtgctcatcttgctgcagtgctccatgggctattaaaggtgattgccggtatcgaaatatcattcaccctgacatcaaaatccgctggtgatgatgtggatgatgattttgctgatctctacatcttcaaatggacatcgctcatgatacccccactcaccatcatatatggtaatttgattgccattgcgtacggagtcctgcgtacggtatacagtgatgtacctgaatg

SEQ ID NO: 201373 - DNA, 451 bp, Gossypium hirsutum
  unsure (1)..(451): unsure at all n locations
ctcgtgacaaacttgtagaccataaaccactggtatagatggaaacggcggagaaaacaatggacattatcacgattgatagcttctaattaaagtttggaaagtggttatgaataattccagccaaaagaatggaaattacaagcatattaccagaagagtgcctgtgtctgatcatatcgttgacttcgccggaagatgcatgtcgatcggccatgatttctcacgcttccagatcggttgcaaaccgtgatgaagtgtgggaaaggtttctgccgtctgattgtagatcaatcatttcaggatcatcatcatcatcattgctttcgctgggaaagaaggatgtatatttccatctctgntttcatcccattctcattcaaaatggtaccatggtaaaccccanagctcactccttaatctccatctncatcggtttttattcgattta

SEQ ID NO: 201374 - DNA, 438 bp, Gossypium hirsutum
atatccttgagctttacactttaggccgtaaattaggacagggacagtttggggttacttacttatgtaccgagatttcgactgggattgaatatgcttgtaagtccatatcgaaaaggaagttgatttgcaaggaggatgtggaggatgttaggagggagatccaaattatgcaccatttggctggtcataagaatatcgtgacgatcaaaggcgcgtacgaggatcctttatttgtgcatatcgtgatggagctttgctccggaggcgaactgtttgatagaattatccatagggggcattacaccgagaggaaggcagctgaattgactaagatcattgatggtgctgttgaggcttgccattcacttggggttatgcatagagatttgaagcctgagaatttcttgttggctaacaaggatgatgatttctcac

SEQ ID NO: 201375 - DNA, 402 bp, Gossypium hirsutum
aaaaaatcttctgatttttctgagtctttttcttatcttcggtttggctcctgagaaagtgttttaagaagaacaatgaatgcattagtggcaaccaacagaaacttcaagctagcagccaggcttcttggtttggattctaagcttgaaaagagtctcctcattcccttcagggaaatcaaggttgaatgcaccatacccaaagatgatggcacattggcaacttttgttggctttaggattcaacatgacaatgctagaggtcctatgaaaggaggaatcagatatcaccctgaggttgaccctgatgaagtgaatgcattggcgcaactaatgacatggaagacagcagttgcaaacatcccatatggtggggctaaaggtggtataggatgtaaccct

SEQ ID NO: 201376 - DNA, 400 bp, Gossypium hirsutum
gtaccttccatcgttttgataaatttaaccttaagggtagggcttgtggtcaaagtaggctcatggaaattttcctcaagcaggataatcttatccaaggtcgattccttggggagctgacaaagcaggtcttttctgatcttgccgcaagcaaataccatatggctgaatacagaatatctatatatggcaggaagcatagtgagtgggatcaactggctagttggatcgttaacaacgtattgtacagtgagaatgttggctggctaattcagatccctcgactttacaacgtatacaagtagatggtgattgttacatcatttcagatcattcttgacaacatctttattcctctctttgaggttactgcggatcctgattcacatcctcagatgca

SEQ ID NO: 201377 - DNA, 419 bp, Gossypium hirsutum
  unsure (1)..(419): unsure at all n locations
aaaagattgaggatgttgccaaactcctttgctgggagaagaagcatgagaagggtgaaattgccatttggcaaaagagagtcaatgatgagtcttgtcgtggtagagaagatgattctcaagccaaattctgcaaggctgaagaggctaacgatgtctggtacaagaaaatggatgtgtgcgttactccataccctgatgttagtagttcgagtgaagttgctggtggggaattgaagccattcccagagaggctatttgctgtccctcctagaattgctagtggaagtgttcctggagtttcagttgagacatatgaagaggacaataacatatggaagaaacatgtcaatgcatataagaaaatcaatagacttattgactctgggaggtatcgtaatatnttggatatgaatgct

SEQ ID NO: 201378 - DNA, 437 bp, Gossypium hirsutum
gaggagcaaggcgaggtattcttcgacgaatccgatataagggacgagattgatgtcgatgaagaagaccttcctgatgctgaagatgatattgttgaggattcagatgattctattcacatattcactggccataccggtgaactttatgcagttgcctgtaacccaacagatccggtgttagtggcaactgggggtggagatgataaggggttcctttggaagataggtcatgctgattgggcttctgagctccaaggccatactgattcggtctctagtttggcctttagtcatgatgggcaattacttgcatctggaggttttgatggacttgttaaagtttgggatacctctggaaatctcaaaagcactcttgaaggccctggaagtggcattgagtggattaagtggcaccctataggacatctgatctt

SEQ ID NO: 201379 - DNA, 422 bp, Gossypium hirsutum
gtttcatctgaatattttgacttcgatttcccccgaagaagatttggtcctgttgaggatgactattatttactcttggatcggtctcctcgaaaacaagttccacttgggccaaatcatcaagccaatgttccatcatggggtaggcacataaagaatattaagtttgcacagaatgaagcatctaaagctgcagatattgacaatgaagataataagatggggacatgtatcattccattgccagatttagatttgtctgctaacagcagtgataaagttggtgctggaagattcgactgtagttgcctggataggggctctttaagatgtgtgcaacagcatgttacggaagcacgaaaactactacgaaaatcccttgggcatgaaaaattcgtgaaacttgggttttataacatggg

SEQ ID NO: 201380 - DNA, 441 bp, Gossypium hirsutum
gttgattggaagaaaaacaggcggaatatcagtttatgcagttacgtcatctatacgaggcaaggaagatcccagtagccatatcattgtccgaggcaaatcaatggctgggcgtgctgatgacctatttaatctgattaattgtgttcttcaagaagtacagtttacagaccaacaacggttcaagcagtttgtgtcccaaagcaaagccagaatggagaaccggttgagaggtggaggtcatggaattgccgcagctaggatggatgcgaagttaaatgttgctggctggatttctgagcaaatgggtggagtcagttacctggagtttcttcaagcactggaagaaaaagtggataatgactgggcaggaatttcatcatctctcgaggagatccgtaaatccttactttccaaggaaggttgcttggtaaacatgac

SEQ ID NO: 201381 - DNA, 423 bp, Gossypium hirsutum
actgtttagaatataatatagatatgagtgatctacggtggctttctccaacacatgggccacgtgtttctgatcacatggagcagatcaaagatatgataactcagattataaacatagactctggatatgttgttgacagcgatgtgtttttcgctgtcgataaattcccaaattatggcaagttatctgggcagaagctggaaaacactagatcgattgaacgttttgctgttgactcaaggaagcgtaatccttccgactttgcattatggaaagctgcaaagccaggtgagccatcttgagacagctcatggggacctggacgacctgtgtggcacatagaatgtagtgcaatgagtgcgcattatttaagcttcaaattttacattcatggtggtggtcttgatttgataattcctc

SEQ ID NO: 201382 - DNA, 444 bp, Gossypium hirsutum
  unsure (1)..(444): unsure at all n locations
cttcctctcttgttctttcagtttcctttggtgttttaagagattggagactcaagctcctccagaaaatggttatggcagaagcaacagcttggaagagaaatcagcaaaggagaaagcaatcgatgagtggctgccaatcacctcatcaagaaatgcaaaatggtggtattcagctttccacaatgtcaccgctatggtgggagctggtgtcctcagtctcccttacgccatggcagaactcggatggggtcctggtgtgactgttctaatcctatcatggattattaccctatatacactatggcaaatggttgaaatgcatgaaatggttcctggaagacgtttcgatagataccatgaactgggtcaatatgnccttggtgaaaaacttggcctctacattgtggtgccacagcaacttattgttgaagttggtgtctg

SEQ ID NO: 201383 - DNA, 385 bp, Gossypium hirsutum
cgaagtttggaagtgtcacaatttgattaatttaggattagatcttgcattttttgaaactcttacaactttagatgtctggaattgcaatgggatgtcaaaattgattacatcttccaatgcccgaagtttggtgtgccttgttacaatgaggataagagaatgtaaaatgatgagagaagtagttgcaagcgacggggatgaagcgtcatacaagattgtttttagagtgctgaaacgtttggagcttcattgcttacaaaacctcacaagcttttgttcagggaattacaccttatggtatccatccttagaacaggttactttgagccagtgtcctagaatgaagaacttctatcaaggagagctaatcacaccaaaactg

SEQ ID NO: 201384 - DNA, 434 bp, Gossypium hirsutum
cccgatccaaacgtgtcgtcacacctcctgttgatgcaaccacaaattggatttggcagcttgctaaggcccacgtttgctccaatgatgctggtgttcaccaattggttaaccactggttacgaacacatgcatgcatggagccttttatattggctgcacataggcaattgagcgcaatgcacccgatctttaagcttttggatccacacatgagatatacgctagagatcaatgccctagctcgccaaagcttgatctgggctgatggtgttatcgagaactgcttcactcccggtcgctactgcatggagatgagtgctgctgcttatcggagccattggcgcttcgacaaggaaggcctgcctgcggatctaatccgaagggtaattactgagtaatcttttggtgttttatcaatattgagacgaaaa

SEQ ID NO: 201385 - DNA, 412 bp, Gossypium hirsutum
ccccaccttattgtttctttatttttttttcttttggggaagtaaaactttaatgaggagtggaaacttacaaatacttattagcagacaacaaagaaactggaaaatacagaggaaaaggtacaaatacttcataggattcccatcacttgttgggtacctttatgtaaccaacatgggaagagttagaggctttagcaagggttttcaactcattaacggtccaacatttggatgtctccctgtggtaaaagtgccccaaacacttgcaatcataggtgcatttcctcccacagtcactctcctttatccagaacccttcattgtactggctcatgaactggaacactccttttagctagaactaactgaaaccatgctggctacaattcaccttcatcagctgacaatt

SEQ ID NO: 201386 - DNA, 442 bp, Gossypium hirsutum
gcccctcaactctcttctctctttccccttcactgtttcagctcaaagaaatggcggaggagaagaaggctcaatctgctggggtttggcctacggttaaaccttttgtcaatggtggtgcctctggtatgcttgctacctgtgtcatccaacccatcgatatgatcaaggtaagaatccaactgggtcaaggatcggcagcaactgttaccaagaacatgcttagggaggagggtgttggtgccttttacaagggtctatcagcaggactgctcaagcaagctacatacactactgctcgattgggatcattcaaaatgttgacaaacaaagcaattgaagccaatgatgggaagcccttacctctatatcagaaagctttgtgtggtctgactgctggtgctattggagcctgtgttggcagcccggctgatttggcact

SEQ ID NO: 201387 - DNA, 364 bp, Gossypium hirsutum
aacaatgtctcttcactcttctctcaccatgtcattgctgggttgctccttcttgttgctgggtacttttagtgccaaagctgttgttcctccatctgaaacttttaggtttgtcaacgacggagaatttgggccgtttgttgttgaatatgatgcaaattaccgtgtcataagcatagctaatgcccccttccagcttgcgttttataacaccacccctaatgccttcacccttgcgttacgcatggctacaacgcgttccgagtcgctcttccgatgggtttgggaggccaacagggggaaccctgttcgcgagaacgccacgttctctctcgggactgacgggaaccttgtcttggctgat

SEQ ID NO: 201388 - DNA, 446 bp, Gossypium hirsutum
actgtaaagaatataatatagatatgagtgatctacagtgcctgtctccaacacatgagccacgtgtttctgatcacatggagcagatcaaagatatgataactcagattataaacaaagactttggatatgttgttgacggcgatgtgtttttcgctgttgataaattcccaaattatggcaagttatctgggcagaagctggaaaacaatagagcgggtgaacgtgttgctgttgactcaaggaagcgtaatccttccgactttgcattatggaaggctgcaaagccaggtgagccatcttgggacagctcatggggacctggacgacctgggtggcacatagaatgtagtgcaatgagtgcgcattatttaagcttcaaatttgacattcatggtggtgggcttgatttgatttttcctcaccatgaaaatgaaaatgctcaa

SEQ ID NO: 201389 - DNA, 465 bp, Gossypium hirsutum
ctgacgaattcagcacgagatttcgatttgattgaagaacaagatttagcggttcgagtgcaagggattcgtggacttgcgtgggtttgtaaggatacaaaggagtacatttctaaaatagtagacattttagggcaactccttactgctgatgagattgtggagcgtgatgctgttcataaagccttaatgtctgtattaaggcaggatgtgaaggaacttattggaataattgaagggcaggctgatttagatgcacaatttgacgtctctgatgcagatcatattgataggttgatatcgtgtctgttcatggctattccattttttgtgaggggtgcacctggcagcaagtttctcaactacttaaacaaacacattatacctgtttttgataagcttcccgaggaacggaagctggaattgctcaaagctttaacagaaattttctcttacacaacacca

SEQ ID NO: 201390 - DNA, 431 bp, Gossypium hirsutum
attactttttatttttttcagagcctccttcaccaacctccgctctgttcagcccgtgatcttttgatctttctccatggctaccatttccaagctcgctaaccccaacccagtcgcttctctttcattatctttcaaacccagatcttcttcatcgcttaaatgcttcgttgggttccctaccaggcctgctttcagctctaagctgggttcatcttctagcttgtcctcgataaacacccaccctttcaggggcttcttggttgtcaagtgttctcttgctgatggaaacggtagttcagtgaagacgactactttgcatgatctgtatgaaaaagaagggcagagtccatggtatgacaacctttgcaggccagtgaccgatttgctgccactgattgcaagtggggttagaagtgtaactagcaacc

SEQ ID NO: 201391 - DNA, 235 bp, Gossypium hirsutum
caaagctctatcgtgaccaatatatgatggcatgttgttgggtaaagttgttagagacagtctagtacaaacaaggttgcaccagacattaactaacgttgttatcccaacatttgatgtcatgcatcttcagtcagccatttcttcaagctttcatgtgatgactaaacctactattgatgcctagctgtcagacatatgcattgcaacctcagctgcactatacatatactac

SEQ ID NO: 201392 - DNA, 433 bp, Gossypium hirsutum
gcaagctgggatcccccatgaggttctcaatgcaaaaccggagaatgtggagagagaagcagagattgtagcacagagtggtcgtctaggggcagtgactattgctaccaatatggctggccgtggaacagacatcatcctaggtggcaatgcagaatttatggccaggctgaagcttcgcgagatgctaatgccaagagttgtcaaaccagctggaggagtctttgtatcagtgaagaaacctcctccaatgaagacatggaaggttttatgctcattttcaatatgaaaatattttggtattggtagatgaatttaatttagattagggttgctattccaagtgaatgagaagttatttccgtgcaagctatctgacaagaacaccaagttagccgaagaagctgtagagttgtctgtcaacacttggggc

SEQ ID NO: 201393 - DNA, 441 bp, Gossypium hirsutum
agtccctccaccctagattcttataattgtgcttcccccctgcaaaggctttattcttcattcgcttcgttgaatttttatcttctttttatctgaacggagtttggtaatccagttttcgtcttcggttgattcaagaaatcttagtttttgaattgcgtgactgaatgatctaatggagtctaaaggtgggaaaaagaagtctagtagtagtaagtctttattctacgaagctcctctcggttacagcattgaagacgtgcggccaaacggtggaatcaagaagttcagatctgctgcttactccaactgcgctcgcaagccatcctgatatactcacaagcgtgccgtctgaccactagtagtggttaataaaactgttatttgctttgttagttagttttagattatttccccgaccaacttcttcctcttctctct

SEQ ID NO: 201394 - DNA, 388 bp, Gossypium hirsutum
gctttaaaaactgggggttcccccggcttgaagaaattcgcaccaggttataccctaacatttaacgagaataaatgtggaactaagtgtctatggacacaatctgaggtggtaccacattcctcgttcatggctcaacccatcagggaatttgttggttgtgtttgatgaaatccgtggagatcctaatggaattactttggtactcctagaaactgacagtgtctgtgctgatatctacgagtggcatccgaacctcatgaattacctgatgaaagcctctggttaattcaacacacccttatagctcaaatttcatttatagtgcgatgctgggcaaaaaatctcatcacctaaatttgccatttttggaacaccattaagagtc

SEQ ID NO: 201395 - DNA, 397 bp, Gossypium hirsutum
agcgcgagattagttagaggaagtatgacgagtcattgctgtatgctataaagaattagcaaagtatggcacatatgtgggccagtttagctcatgattcaaatgtcgcaactgcgcttgtattggcgttctttgagatattatataggacagcggtgcttagatacagaaagcagatcaaggattacgaggataggttgaagattgacaaggcataggcagaagatagataaaagatgatggagttggagagggaaatggaacgaattgatggggaggatgatgaggctgagcaaggtgtacgtgagcataatccttatttgaaaatggctatacaatttatgaagtcaggagcacgtcttcagaaggcacaaaataagagactgccacagtattt

SEQ ID NO: 201396 - DNA, 418 bp, Gossypium hirsutum
gttatgccggaacatttaacgagaagaaatgtggaactaattgtggaggggcctctcaaagatggtaccacgttcctcgttcatggctcaacccaacagggaatttgttggttgtgtttgaggaatggggtggagatccgaatggaattactttggtacgccgagaaactgacagtgtctgtgctgatatctacgagtggcaaccgaacctaatgaattacctgatgaaagcctctggtaaagtcaacaaacccctaaggccaaaagtgcatttagagtgcgatgctgggcaaaaaatctcagcagttaagtttgccagttttggaacaccaggaggagtctgtggaagctaccgcgaaggaagctgtcacgctcaccactcttatgatgcttttactaggctttgtgttggacagaa

SEQ ID NO: 201397 - DNA, 435 bp, Gossypium hirsutum
agtaacactaatggttgtgatgatatcaacgaaaatgaacgagatgctaaaagatggtaagcttggatcatagccaaaaatgaaaaacagattctcccattaatgggttcttgttttagcttacgcttttgtgattttttttttttgcaggaaaggtgaaaatgagaatgagggtatggtaggttgtggtagcaaaactgtgaaagagcctagaatagtggtgcaaacaacaagtgatattgatattcttgatgatgggtatagatggaggaaatatggacagaaagtagtcaagggaaaccccaatccaaggttagtcattattctccacctaattgtctactaataggaagcctggatgtgcagtttattcaactaacattgttgacttcgtcaaaatcttttatacaggagctactacaaatgtacgacaat

SEQ ID NO: 201398 - DNA, 372 bp, Gossypium hirsutum
cactttgattcccatgttgagcaacatagcgaagattaggggcagaaatctttcaaagagatgattactactctccctaaagggaacagctgtggtcttcccgatcatctatatcaggatcaagacttttggttcacctcacctttactacaaggagtcctgttaactcaacaacagtttgaggctcaacccactgatatcatactttctagggcccctagaaccggcacagtctgattaaaatctgtcactttcgctactattacaagaacttcatacgatgattctaccacccctttgcttttcatgatgcctcatgatgttgcgcctttcatggagcttgatcatgctcatttttccgctaatcgacat

SEQ ID NO: 201399 - DNA, 412 bp, Gossypium hirsutum
atttagtctaagaaaacatttccttagagcatagataaagagaaggtaaaaattaagaacatgggtgtcaatgctgaaattgtagtcccagtcattgagttcctgtcatcggatttagagcgaggaactgatgggtggcaccatttgtgcaagagggttcgagaggcttgtgaaacttacggttgtttcaaggtggtgtacgaaagggtatcaaagaaagtccgagaggagatgttcggattggtgaaagaattggtccaggtcccattggagaggaaacaaaagaacgctagtcccttgccttaccatggctgggttggaccatgcagtcaagtttctttgttgtatgaaggctttggacttggagatgcctctaattatgactcagttaaaagatttgctcaacttatgt

SEQ ID NO: 201400 - DNA, 334 bp, Gossypium hirsutum
  unsure (1)..(334): unsure at all n locations
aaacaaccaaacacagtcctacattttaggagtttttgttgttcgaatctgcggcggagataatgatgcacagatttatttcggtcaggaggttattttcggaaactaaatgttctcttccttgccaactacgacgacgttgcttctctcaggtggctcgaaatgagattgataacagggatgatcttgttcgtaaaatgcctccttttgattactctccgncttcttacaccggtccttccgncgacgagatcctttccaaacgcaaggagtatcttagcccctccatgttttacttttacaccaaaccgttggacatagtggacgggaggat

SEQ ID NO: 201401 - DNA, 353 bp, Gossypium hirsutum
cacccaggtacagaagcactaacattttctctttggcttagcaaccttggatctgaaatggcaaagtcacccgaagaagaacaccctgtcaagacctttggctgggctgcaagggacccatctggtcatctctctcctttcaccttctccagaagggtaactggtgaagaagatgtgaggtttaaggtgctgtattgtgggatttgtcattctgaccttcacagtatcaagagtgaatggggctcctacaactaccccatggttcctgggcatgaaatagtacgggaagtgacagaagtaggcagcaaagtggaaaaggttaaggtgggagataaagtgggcgtgggatgcat

SEQ ID NO: 201402 - DNA, 433 bp, Gossypium hirsutum
gaagagttcaaagaagcaccaaatttacagcaaggaattcgaggctatgttagatggtttagatgaagaagacagcttagaagaaggtggtcaagcaacagagaagaaaaggcgtttatctatgcatcaagttaaggctttggagaagaatttcgatgtgggaaacaagttataaccagagagaaaagtgaagttagctgaagaattggggttacagccaaggcaagtgcttattgggttccaaacccgacgtcctctttgaagaaccagggggttggagaaagattatgcaatgcttaaagctaattatgatgctcttaagcttgatcatgacaatcttgaaaaagaaaaactgggtctaattgcaaaggttagtgtatatatttcacaccccattttatagttttttaagggtaaatgttatataagtgtt

SEQ ID NO: 201403 - DNA, 444 bp, Gossypium hirsutum
  unsure (1)..(444): unsure at all n locations
gagcagtaaagaaaatcagctcattcaagctactgctttagtaaaggagaaagatgaatatgctctgaaagtacaagatgagttgaatgatacaaagatgaagttctctgaagctgaaactgtcatagaacgaattgcagaactcacaaaccgactagttatctcagttaaggatgaagacaataatgtgttgaggcctgttgatgatgtgagcagcgaattaatgcatcagctggtagataggccttctagtgattttggattgcagaanaagcaacttgaaactgaactcagattcactaaagagagcttaaaagataaagaaatggaagttcttgctgcacagagggctcttgcaataaaagatgaagagctcaaaatggttcttggaaggttggaggcangagaaaaagaactacaaaggctgaaggaagaaatgattga

SEQ ID NO: 201404 - DNA, 437 bp, Gossypium hirsutum
ccggcatctcctccttcactgttttccttcaatcgcttctgtcatttcccatttctacctacatctccgccaccaccacctccgcctctgaatgtcttgttacaatgcatcaaggaaggtgttaaattggaccactgctatcgtccatacagatttattgagagtagtatctagaagacttgttttggcaaccaagacgcagtcaataacgaccatggcagctcaagaggaagaatgtaagggtaatgtgaaggcacagttagcaaaactatttgaagtttcacttaaagtaacagttccgaatgaggcagatgttgacccattgatagctgcctgcactggcaaatttggtgattaccaatgtaataatgccatgggcccttggtctaaaatcaaagggaagggtactcagtttcgtggccctccagctgttggag

SEQ ID NO: 201405 - DNA, 436 bp, Gossypium hirsutum
atccggcaaaaggaggattattcagagcgggttcaatggagaacggggatggaatagccgttgggtggttagggcaccctatctttagagataaagacgggcgtgaactttttgtacgtcgtatgcctactttttttgaaacatttccggttgttttggtagacggagacggaattgttagagcggatgtcccttttagaagggcagaatcaaagtatagtgtcgaacaagtaggtgtaactgttgagttctatggcggcgaactcaatggagtgagttatagtgatcctgctactgtgaaaaaatatgctagacgtgctcaattgggtgaaatttttgaattagatcgtgctactttgaaatccgatggtgtttttcgtagcagtccgaggggttggtttacttttgggcatgcttcgtttgccttgcttttctt

SEQ ID NO: 201406 - DNA, 309 bp, Gossypium hirsutum
ccgcagcctagaaaacacaccttatggcagacaacttcagagttggctgatggtcaagctagcatacataggcaacattttctgcagagtccccaagggttgttaaacaaacattctgaaaaactggtccaatgtgatatgcgtttgaactgtgataagcatgactgccagagatcattatgtgattcaccgtgctttgaatcacgaagttctgtgtttgaggatcctactgaacctaaatggcgtgactatggccaaggggagactggtcaaggatctactagctatggctttcagaatatagcatca

SEQ ID NO: 201407 - DNA, 409 bp, Gossypium hirsutum
gaaacgcacgatttgtagattcatttctattgtctatccacctccgaatcaagggctttgccgaaccagcaaacagttgattatccaagcttcaagctcgttatcgtcggcgatggaggaactggaaaaactaccttcgtgaagaggcatctaactggagagtttgaaaagaaatacgagccaaccattggtgtggaggttcatcccttggacttcttcactaactgtggcaaaatccgtttctactgctgggatactgctggacaggagaagttcggtggtctcagagatggttactatatccatgggcaatgcgccataattatgtttgatgtaactgcccggttgacatacaagaatgttccaacatggcatcgggatctttgcagagtgtgtgagaatattccta

SEQ ID NO: 201408 - DNA, 404 bp, Gossypium hirsutum
agttgcttcagctataacccaaaccgtgttggctcaaaactgtggctgtgcgccaaacttgtgttgcagtcaacatggttattgcggtcagggtaacgattactgtggcactggttgcaaagaaggcccttgtttctccaagtctcccactggtgcttcagttgcctccattgtttcacctcagttcttcaacgggataatcaaccaagctcgtgcggattgtgcaggcaagaaattctatacacgacaagctttcctgactgcacttgattcctttcccgatttcggaaaattgggttctgatgttgaatccaagcgtgagattgctgcattcttcgcccatgctacccatgagactgaattcttttgctatacagaagagcaggataaaagtaatagctact

SEQ ID NO: 201409 - DNA, 399 bp, Gossypium hirsutum
  unsure (1)..(399): unsure at all n locations
cgaagacgtggcaaaatacgaggtgcaaggcagagatattagcccaccctttggacgagcagctactgtcggcgcacgtgtcgtgtcttaggatcgccacgccggtggaccagctcccgaggattgacgctcagctggatcagtcgcagcacgtggtggccaagtactccgctctcggcggcgcagcccagggcttggttgcggacgacaaagaactcgatcagttcatgacgcaatatgttgtattgctatgttcgtttaaagaacaattgcaacaacatgttcgggtccacgcaatggaagcagttatggcatgctgggaaattgaacaatccttacagagcttaacaagagtttcacccggggaaggtacggnggcaacaatgtcagatgatgatg

SEQ ID NO: 201410 - DNA, 374 bp, Gossypium hirsutum
  unsure (1)..(374): unsure at all n locations
ggactcggttgttgatgtaggaaacaacaataacctctacgagtaggataaaagcagacttccctccttatgggagggattttttgaatcacanaccaaccgggaaaattctgtaagggaaaattagcctcgaacttaactggttctaattcccataaaacccttttaaacaccatctggaattggctggctcattttaatatggtttcatcttacaaatgggttttgtttggttagctgaaaacattggcttaactgattacccaccagcttatctcagcaaaaaggccaaaggaaataacctgttaattggagccaattttgcatcagcttcttctggttaatatgagactacagcaaagttatatcataca

SEQ ID NO: 201411 - DNA, 438 bp, Gossypium hirsutum
  unsure (1)..(438): unsure at all n locations
ccggtagggagggaagaaaggaagagataggaaattggtagggtttccaaaaggtcggagaagggtgaagaggttgttagagatggaagtaacagccagagggtggaggaggagaaggcggaggaagaagaagcagctgctgctgccgccgcctttgcagctaaagcaagagcgaaaaggaagtcttcacggccaaatccacggctgagtaacccacccaggcacgtccacggcgaacaagtcgccgccggctggccatcttggctgtcgaacgtcgccggtgaagccatcagcggctggactcctcgccgtgctgattcttttgagaagattgataagattggtcaaggaacatacagtaatgtgtacaaagctagggatactttgactgngaaggttgttgcattaaagaaagttcgtttcgataatttggagccg

SEQ ID NO: 201412 - DNA, 400 bp, Gossypium hirsutum
  unsure (1)..(400): unsure at all n locations
ccacattggctcagcgccaccagttaattctgcattctggggcaagcggcatccttatatcggggagtctcctgaaacttcaggttttccccttggatctcttggaagcgtgggctttcctagtagctcgctatcacatccggtggaatatgcttcccacaacattttttctcatgttggtggaaattgcatggatttgacaaaaactggtggggtacgctctcctcagcagatgcgccaccttttccctcgcaggaaccctattatgcccgcatctcttgattctcctaatgatcgtgtcagaaacttttcataccgcagaaatgaatcaaattctagtaatgctgantaataacaatatgaacttgatattgaccgaatcatacgccgggaagacagc

SEQ ID NO: 201413 - DNA, 316 bp, Gossypium hirsutum
atagagagcatgttgaggattggattcagaaacatcattaggggcttcatatgtagagcctcacttcctcagagcttttataacagggaattatcgacacaaaccggaaggctgaaaggcaaaatagcattgatcactggggcagcaagcggtatcgggaaggcagctgcagcaaaattcatcagtaatggtgccaaagtcgtcattgctgatatacaacaccaactaaggcaagcaacggcgaatgagcttggacccaatgctacttttataccctgtgacgtaaccaaagaatcagatgtatccgatgctggtg

SEQ ID NO: 201414 - DNA, 380 bp, Gossypium hirsutum
cgatggctatcttttctacatcaatggctgctatgctcctgcttggatggctcttcgctgcaaacttggatcctactgctgcacagattggtgtttgctatgggatgcttggcaataatctcccaaattcatgggaagtcattcaactttacaaatcaaacaacatccggcgattgaggctctacgatccaaatcaacaagcattacaagctcttataggctccaacattgaagtaatgttaggtgttccaaatgatcaacttcaaaacctcgctgacccttccaaagcacgatcatgggttcaatcaaatgttgtagcttactggccgagtgttcggttccgatacattgctgtcgggaatgaagtccctcattcatct

SEQ ID NO: 201415 - DNA, 425 bp, Gossypium hirsutum
acaacatgttcgtgttcatgcaatggaagcagttatggcttgttgggatcttgagcaatcacttcaaagtttaacaggtgtatctccaggtgaaggcactggtgcaaccatgtctgatgatgaagatgaagttgtagatagtgataccagcttgtttgatggaagttttgatgggattgacagcatggggtttggccccctcgtcccatccgagactgagagatcactaatggagcgtgttaggcaagaactgaagcacgagctgaaacagtgttacaaagagaaaattgtggacattagagaggaaattctacgtaagagacgagctggaaagctaccaggcgatacgacctcgtttttaaaagcttggtggcagtcacattccaaatggccttacccaactgaagaagacaaagcaaaattag

SEQ ID NO: 201416 - DNA, 429 bp, Gossypium hirsutum
gtcacttcggagattttccggcgtttcatacctacggcgggcaatttattcagtacggtatttttggaaacttatttgagatcacgtctaaatatcggcctcccatcatgccaatcggtcgtggagcctacggcatcgtctgctcggtgttgaattcggagacgaatgaaatggtagcggtaaagaaaatcgccaacgctttcgataatcacatggacgctaagcgtacgcttcgtgaaattaagctcctccgacatttggatcacgagaatgttatcgcaattagagatgtcattcctccgcctttgcggagagattttactgatgtctacattgccttggagctcatggataccgatcttcaccaaataattcgctccaatcagagtttatctgaagagcattgtcagtatttcttatatcagcttc

SEQ ID NO: 201417 - DNA, 363 bp, Gossypium hirsutum
caaaagcctgatgtgtttaggggaactgtacgttatgcaggtgtgcatgctcatttgggtaggacaggcagtcgaagggatgaccttgagtcattggcttatacactaatatttttacttaggggaaaacttccctggcaaggttacattggggagaacaaaggatttcttgtttgtaagaagaagatggcaacttctcctgagatgctttgttacttgtgccctactccttttcaacaatttcttgagattgtgaccaacatgaaatttgatgaagaaccaaattactcaaagctcatttctcttttccgtaatagcattgatttcaattcatcaatatgtcctatccagattgatggagct

SEQ ID NO: 201418 - DNA, 443 bp, Gossypium hirsutum
ctgctgtgaaaccttggtctaccgggctaagcggacagctgcagaaagcatttgtaaccggtgtaccaaagctgaagagatcagagctggaagcagcctgcgaagatttcagcaatgtgattagttcttcaacagttggcactgtgtacaaagggacactgtctagtgggattgaaatatccgtggcctacatccctgtgaaatttgccaaagattggtcaaggaatttagaagcacagttcagaaacaagattgaaacattatcaaaggtgaaccataaaaatttcgtcaacctagttggatattgtgaggaagacgagccttttacgaggatgatggtttttgaatatgctccgaatggaacactttttgagcatttacacattaaagaatccgagcacttggactggacgaccaggttaagaattatggtgggcatcgct

SEQ ID NO: 201419 - DNA, 419 bp, Gossypium hirsutum
gttaaggaaagtatgcgttatcaagatgcttagcagtgctggtttggataaagtatatagtcttcgccgtcaagaagtacgagaaaccataggttatttatatagtaaggccggttcgcctgtaaacgtgggagagcagatgtttttaactatcttgaatgtggtgaccaatatgatatggggcgggtccatggaaggggaggccagggcgagccttggtgcagagttcaggcaagtcatctcagaagtaacagaacttttgggtctacctaatgtttcggatttcttcccggcgttggccccgcttgatttgcaaggtgcagtgaaacgtgtccgaaaatcaacggagaagttggacgcaattattgataagataatcaatcaaagggtggaagagaagcaaagtgggcacacagttt

SEQ ID NO: 201420 - DNA, 435 bp, Gossypium hirsutum
cgccattctctcatttttcgcgtcctttatttaccttttgggtttctttgggattgacttcgttcaatctttggttttccaaccatcgcctgacgtttggattgccgaggaagaggatgatgaagttctgcttgcaaaggaagatgcccgtaaggtcccttgcgggcaagctctcgattgttcgcttccacctctgcctcctgcggcaccaatcgtgaccgtccagaaggtgttcgatgaaaagcctgtgacggttctaacggaggaagatgaagaaataattaaatctgtagtggctggtacaaccccttcatattccttggaattgaaattgggtgattgcaagagggcggctgcaatcaggcgggaagcgttgcaaagattaacagggaagtcgttatctggattgcccttggatgggtttgattacgagtc

SEQ ID NO: 201421 - DNA, 434 bp, Gossypium hirsutum; identical to SEQ ID NO: 191033

SEQ ID NO: 201422 - DNA, 416 bp, Gossypium hirsutum
atccggcaaaaggaggattattcagagcgggttcaatggagcgacggggatggaatagccgttgggtggttagggcaccctatctttagagataaagacgggcgtgaactttttgtacgtcgtatgcctactttttttgaaacatttccggttgttttggtagacggagacggaattgttagagcggatgtcccttttagaagggcagaatcaaagtatagtgtcgaacaagtaggtgtaactgttgagttctatggcggcgaactcaatggagtgagttatagtgatcctgctactgtgaaaaaatatgctagacgtgctcaattgggtgaaattttgaattagatcgtgctactttgaaatccgatggtgtttttcgtagcagtccgaagggttgggttacttttgggcatgct

SEQ ID NO: 201423 - DNA, 439 bp, Gossypium hirsutum
ctagcacatttcattgaatctttgaaagaagctgcatcagcaaaggaagtggtgaacattagtaagaagattggggcgcttaatgaagagatgactttgagaatggttttggggaatgtgaagaagtatgagggatttaacctcaaggagcttattgatgagcttactcacatagcaggagctttcaatcttgcagatgttgttccttttctgggtgctttcgacctacagggactcaaagcacgtacaaagaaactcggtgaaaaacttgacaaagccctcgagacgatcattgacgaccatgaacaacataagcaggatgatttcgtcggtacactgcttaaagagttaaatcaaccaatgaacaatgatggtgatataatggatcggaatagcatcaaagccataacaatagatatgatggtgggtgccttggaca

SEQ ID NO: 201424 - DNA, 331 bp, Gossypium hirsutum
agcgagagattaggaagaggaagtatgaggagtcatggcgtgatgctagaaggaattatcaaagtatggcaaatatgtgggccagtttagctcaggattcaaatgttgcaactgcgcttggattggtgttctttgtgatattttataggacagtggtgcttagttacagaaagcagaagaaggattacgaggataggttgaagattgagaaggcagaggcagaagagagaaaaaagatgaaggagttggagagggaaatggaaggaattgagggggaagatgatgaggctgaacaaggggggagtgagcagaatccttatttgaaaatggc

SEQ ID NO: 201425 - DNA, 349 bp, Gossypium hirsutum
ggattgtaggttgcttgggaagtttgatcttactggaatggctccagctccaaggggaacacctcaaatcgaagttacatttgaggttgatgcaaatggtatcttaaacgtcaaggccgaagacaaaggcacaggtaaatcagagaagatcacaatcaccaacgacaagggtcgtttgagccaggaggagattgaaagaatggttcgtgaggccgaagaatttgcggaggaggacaagaagctgaaggaaaagattgatgctcgcaatagcctggagacttatgtttacaacatgaaaaaccagattagcgataaggacaagcttgctgacaagcttgaatccgacgag

SEQ ID NO: 201426 - DNA, 307 bp, Gossypium hirsutum
gggatttactctggttctacttgcacacaaggcgggatcggagctgtggttattgccagcggtgtccatactatcttcgggaaagcggctcaccttgttgataccactaaccaagttggtcattttcagaacgtcttcacagcaatagggaacttctgcatatgttctattgcagttgcgatggtaatacagataattgtgatgtatccaattcaagaccgggattaccgacctcgaattgacaatatactcgtactttcctattggtgggatcccgattgccatgcctacagttttgtcagataca

SEQ ID NO: 201427 - DNA, 334 bp, Gossypium hirsutum
gcaccaaaaagaaaaggtaacattcatttcaatggctgctgttgggtcttcttcgtcctcctgtctcctcttctcatctccacctaccaagtttccttcaccttctctatatcctcctctacgcttgtctcttcccacttcttcttttctctcttcttctctttcactttctccttcctgccatgcctaccccaccagctctagacgatactctgcttcttctttcactatcagggcccttgctgcagagaagaagaaggtccttatagttaatacaaacagtggcggccatgcagttatcggtttctactttgccaaaaaactgctgggttct

SEQ ID NO: 201428 - DNA, 429 bp, Gossypium hirsutum
  unsure (1)..(429): unsure at all n locations
catttgtgttgcttgatacccgagacaacagctacattgtggcacgagatgctattggggtcgcatccctctacattggctggggacttgacgggtcggtttggatatcttccgaaatgaaaggattaaatgatgactgtgaacactttgagtgctttcctcctggtcacttgtactccagcaaaacaggaggatttagaagatggtacaatccaccatggttctctgaggccattccatcagttccatatgatccccttgttctaagacgtgcttttgaaaatgctgtgatcaaaagactgatgaccgatgtaccttttggagttcttctatctggaggtctcgattcgtcgttggttgcttctatcacagctcgatactgggctggtaccaagactgctaaacattgnggaagccagctccattctt

SEQ ID NO: 201429 - DNA, 307 bp, Gossypium hirsutum
atttcggggatcaaatactctttcacaaaaaggagataatgtaggtgattaattaacacaactttttttcgttgcagttgaaaaagctcatcttttttttgatagtttgagtgagcaatggctaataatgtgggaattcttgctatggaaatctacttccctcctacctgtgttcaacaggaagcattggaggctcatgatggtgctagtcaggggaaatacaccattggacttggacaagattgcatggccttttgtacagaattggaagaatgcatctctatgagtttaacagctgatactttac

SEQ ID NO: 201430 - DNA, 377 bp, Gossypium hirsutum
gtggaaagcatacctgaaatccgacaaaatggcaaaaccgagaggataaaagggtatcagcttcgccccccgagggatgctcctatcgagtggtatacaacagtcgctctcaagaaaatgcaagaacatggtgctatttatctgactcccttttcacatcgtcttgctgaagaaattgacaatcccgagtatcaacggttgaggtgtagagttaactatcatgctttgaggttcaagccaaatattatgcagttaagtgagtcaatagttgataaactccgggcacagggtcatttcatgtcgatacatcttcgttttgagatggatatgctggcatttgctgggtgcgttgatatttttaacctagaagagcaaag

SEQ ID NO: 201431 - DNA, 390 bp, Gossypium hirsutum
gcggcggctgctgcttctcaggcagccgcagcctccgttgccgtctctgatgacgtggcggttgtagaaggttgtattgacaacgatagtgtacagattggggattcatatgattccaagacatcgtttttgatctccgatgggagcatcactgttcatgctggtgaaagattaggtcgcggtatagttactgatgcaattactactccagtggttaatacttctgcatatttctttaagaaaactcaggagcttattgacttcaaggaaaaacgccatacaagttttgaatatgggcggtatggaaatccaacaaaatttattggtggacacaatgatgtccttgctggttgtataagtggttctgagaagttggttacagaaattcgt

SEQ ID NO: 201432 - DNA, 356 bp, Gossypium hirsutum
ctttgcccttgtatggaaactcactgaccatgaccggaaggtccacaacatcgcagaagagcggaacagcaagctgcatttcattggcttcctccaatcttggccgcttcttctccttccaagagatccttgatgcgaccaacaaatttgatgagagcctacttcttggagttgctggtttcggaagagtctacaccggcactcttgaagatgggactaaagttgctgtcaaacgaggtaatcccagatccgaacaaggtcttgctgaatatcgcaccgaaattgaaatgctatctaaacttcgccatcggcaccttggctctcttattggatatcgtgatgaaagatcggaaatg

SEQ ID NO: 201433 - DNA, 435 bp, Gossypium hirsutum
agttccgacaaaagaaaacgaaaaaaatagaagagatacaatcgttttctttttgaagtcgggttttagtttttggggagaaaaaaatgttgggagtatttagcagtgcgatagtgtctccgccggacgagctggtggcggccggttgccgaactccatcacctaagataacggcggatgctctggtgaaacggttccttgagacgaactcctccggcgtgtccatgcagatcggagaccatgtccaattcgcttattctcaccataaagagtctcctttacggcccaggtaaaaaaaaaatcatatatggtattggctgttggatgatctcaatcgttgaaaattaattatgaattcaaacttcagttgatcatcgagtgctttcgaacgaacctaggaattactataatttgtttaatcgaataatttacgat

SEQ ID NO: 201434 - DNA, 432 bp, Gossypium hirsutum
  unsure (1)..(432): unsure at all n locations
caccaataagttttttagaaattaaaaacttgtctgggttggcaaattgcaaatcaaatttcgattgaatcagacacaatttcttttttcaattttataatgaagaacaaaagggcgagaacgagtgtggacaaggcggtggttgatgtttggcaacgggaagttggggaactctccactaggaatttcgcccaccggcttgccgcttctgaggatcttgtgctccgactcgagatttacaagaaactcaaaaagcaccgaggttgtgtgaacactgtgagctttaatgctgatggtaacattttagtatctggttctgacgataagaaggttatactatgnggatgggaaactgggaatgctaagcttactttccagtcaggccatgtcaacaatgttttccaagcaaaaatcatgccttactctgatgat

SEQ ID NO: 201435 - DNA, 439 bp, Gossypium hirsutum
gttcagttagaattccccgagataatcttcttaatcgatggggggatgtcacccgagatggaaaatacacaagtagtctccctacaataaacaaacgttttgctgctactcttggtgaacttgtaggtgggagggttggccttgcacattcttcagttggtatcctcaagattgctgtcactattgcagtacgatactccttactacgtcagcagtttggtcctccaaaacagcctgaagtcagcattcttgattatcaatctcagcagcacaagctcatgccaatgttggcttcaacttatgcatttcattttgccactcagtatttggtagagaaatattcagagatgaagaagacacatgatgaacaactggttggagatgtgcatgctctttctgcaggcctgaagtcctatgtgacatcatttacaagcaagtc

SEQ ID NO: 201436 - DNA, 290 bp, Gossypium hirsutum
ggcaattggagcatggcaatttcttccatggactggactggtgtcggagcccttacccaagagctgaaggagaaggaggtgcttataaggggacgagtccacacaacacgaccagtgtcgaagaatatggcgttcgtggtggtgagggagaggggatttaccgtgcagtgcttggttgctacgcatgaagcgggagtgagtcgtcagatggtgaagtttgtagctgcactcaatcgagaatccatcattgatgcaatcggtatggtatctgtccctgggaatcccatcaa

SEQ ID NO: 201437 - DNA, 397 bp, Gossypium hirsutum
  unsure (1)..(397): unsure at all n locations
gaagtctgtgacgtggtcctccatgctgatgccatccacggaggtggtgggcagatcattccaacagctaggagggttttctatgcttctcagctcacagccaagccaaggcttctcgaacctgtttacttggtcgagatccaagccccggagcaggcacttggtggtatttacagttttcttaaccagaagcgtggacatgtatttgaggaaatgcaaagacctggcactccactttacaacatcaaggcataccttcctgtcattgagtcctttggattctctagcactttgagggctgcaacatcaggacaagctttcccacaatgtgtgtttgatcactgggatatgatgtcatcagacccattggaacctggctctcangcagcagcccatg

SEQ ID NO: 201438 - DNA, 423 bp, Gossypium hirsutum
atccaagacaaggaagggattccaccagatcagcagagggggatttttgccggaaagcagctcgaggatgggaggacacttgcggattataacatccaaaaggagtcaaccctgcacttggtgctgcgactgcgtggtggaatgcagatttttgtgaaaactttgactggaaaaactattacattggaggtggagagctcagatacaattgataacgtgaaggccaagattcaggacaaggagggtatcccacctgaccagcataggttgatttttgctggaaagcaactcgaggatgggaggacgcttgcggattatagcatccaaaaggagtcaaccctgcacttggttctgcgccttcgaggaaggatgcagatattcgttaaaaccttgactggtaaaaccataacactggaggtcgag

SEQ ID NO: 201439 - DNA, 435 bp, Gossypium hirsutum
ctcggttcttcgtttttgacgagctaactcactcagtcagggactcgttctctctttggctcactcgctcgatctctctctagatttttccgattacaaatggaggatttcgatatcccggcggcggaagacatgatgaacgaagatatggatcttcccgacgacagtcccattctgaaagtcggagaagagaaggagatcggaaatcaaggcttgaagaagaagcttgttaaggaaggtgaaggttgggagtatcctgaaatcggagacgaagttgaagttcattatacggggacgttgctggatggaacacagttcgattcaagccgtgatagaggcactccttttaagttcactcttcgtcaaggacaagttattaaaggatgggatgaaggtattaagacaatgaagaaaggtgaaaatgccatctttacc

SEQ ID NO: 201440 - DNA, 363 bp, Gossypium hirsutum
ccaccctccaatcctccggatcttaacacacagtgccatagttgttgtgtgtgggaaaacgaaataggggattcatggaagagaggcatattctgtttgggaaatatgagatggggagattgcttgggaaaggcactttcgccaaagtctactacgcgaaggaattaaaatcgggtgaaagcgtcgcgataaaggtcatcaacaaagctgaggtaaagaaagaaggcatgatggagcagatcaagagggaaatctctgtgacgcgtcttgttcggcatccaaacgtagtggaactcaaagaagtcatggcgaccaaaaccaagatcttctttggtatggaatacgtccgtggcggtgaactat

SEQ ID NO: 201441 - DNA, 413 bp, Gossypium hirsutum
gcgtctgcaaggttttggcaggaaactaatagccggttaaggcgggtgcaggacccagggtcacctttgtcttcaaacccgggctctagaattggctcaccagctaagtttagtcaaccaaaaagggtttcttgtgatggtgcagcggcttctcctattaggggttgtataagacctgcttctcctagtaagctttggacatcttcagattcatctacaactccatcgaggggactaagtcctgatcgggttagaaatgcacatgttggtcaagagatgattgggaatgctgttaataccccttcaattctcagctttcccggtgatattctgagaggaaagaagggagaggatctaattttcgatgctcatgcattgaggcttttttataacggctacttgcaatggagatt

SEQ ID NO: 201442 - DNA, 391 bp, Gossypium hirsutum
gttaaggaaagtatgcgttatcaagatgcttagcaatgctgctggggataaagtatatagtcttcgccgtcaagaagtacgagaaaccataggttatttatatagtaaggccggttcgcctgtaaacgtgggagagcagatgtttttaactatcttgaatgtggtgaccaatatgatatggggcgggtccatggaaggggaggccagggcgagccttggtgcagagttcaggcaagtcatctcagaagtaacagaacttttgggtctacctaatgtttcggatttcttcccggcgttggccccgcttgatttgcaaggtgcagtgaaacgtgtccgaaaatcaacggagaagttggacgcaattattgataagattatcaatcaaaggttg

SEQ ID NO: 201443 - DNA, 309 bp, Gossypium hirsutum
gaagcatggccgtcgggaagaacaagaggatttccaagggagagaatggaggaaagaagaaggcagcggatccttttgctaagaaggattggtacgatatcaaggctccttcagttttcactaccagaaatgtgggaaaaactctcgtcacccgtactcagggtaccaagattgcttctgaaggactcaaacaccgtgtgtttgaggtttccctggctgatcttcaaggtggtgatgaggatcatgcttacagaaagattcgtttgagagctgaagaggttcaaggaaaaaatgttttgaccaacttct

SEQ ID NO: 201444 - DNA, 428 bp, Gossypium hirsutum
gtgtaacatgttcgactcaaggagactatagagttggtacggaactggaagtctatgcagtatccatcattggtccttttcctattgctgtaactaatttattggatttaacaagattggatctccataacaacaagctgactggcccaattcctccacaaattggccggctaagacgacttagaatgttaaatttgaggtggaataagctccaagatgtccttcctccggagattggggagcttaaaaaactagcccatctgtcattgagctttaataattttaagggcgagatcccgaaagagcttgcaaatctacccgagctccgttatctctatcttcaagaaaaccgtttcactgggcgaattccacccgaattgggcactttacaaaaccttaagcacttggatgttggtaataaccatttg

SEQ ID NO: 201445 - DNA, 425 bp, Gossypium hirsutum
gattacgccggcgccgccgtgctcggctggggagacggggattacaaaggggaagaagataaagagaaagcaaagtcaaaagcttctttatctacaatcgccgagcaacagcatcgtaaaaaggttctcagagaactcaactctttgatttccggttcaaccgccaacactgacgacgccgtcgatgaagaagtcaccgacaccgaatggttctttttagtttccatgacccaatctttcgttaacggcaacggacttccgggacaagcttttttcaattcatgtccagtatgggtcgctggatcggaccgcttagccaattctacgtgtgaaagagcgaaacaaggacgggttttcggtttacaaacgatagtttgtataccgttggcgaatggtgtcgtggaattgggtcatcggaatcatta

SEQ ID NO: 201446 - DNA, 370 bp, Gossypium hirsutum
accagttgtttgtctcgttggtctcggtctctttgcgcgaggcttcccattggtaattgttctttgaacactttaatgcttggttgggacaaataatatgctgatataaataatgcagttaatgtatgatacagcttggtaactgcgtggaaatcggcctgcctatgcttattctactgattatttctcaacagtacctgaagcgtgtcccctcgagagcccatctaatactcgagaggtttgccttgcttatttgcattggaattgtgtgggcttttgctgctatcctaaccgtgtctggtgcttacaacaacgttaagactgctactaaactgagttgccgcacggatcgatcttacctaatgtcttc

SEQ ID NO: 201447 - DNA, 437 bp, Gossypium hirsutum
gttttaatcttctgtttctttttaaagttatttatagctcgagcttatgaaaaaaatggcggaaaaaggtaaaaccgatcatccggctttgcttcatggaaaatacgagcttggtcgaatgttgggtcacgggacttttgccaaagtttaccatgcacggcatgttacgacggggaagagcgttgccatgaaagttgtgggcaaagaaaaagtgatcagagtcgggatgatggaacagatccagcgagagatttccgtcatgaatatggtgaagcatcccaacatagtcgagttgcacgaagtaatggcgagcaaatccaagatttacttcgccatggaactcgtccgaggcggtgaactcttctctaagatcgtccaaggtcgactcaaggaagatttggccagggtttatttccaacaactggtttccgccgtcg

SEQ ID NO: 201448 - DNA, 408 bp, Gossypium hirsutum
cacctctcttagcggtgaaataaaaagttgtcaaagccaaggaatcaaggtcatgctctcccttggaggtggcgcgggaagctactcactcgcttctcaagaagacgccaaaagcgtagctgattatctatggaacaacttcttgggcggtacctcgtcttctcgtccgttgggtgatgctgtgttggacggaattgattttgatattgaggctgggtcaggtcaatattgggatgaccttgctcgttctttatcagcttatagtagccaaggaagaaaggtgtatttaacagcagctcctcagtgtccatttcctgatgctcacttgggaactgccattaatacaggtctctttgactacgtatggattcagttttataacaatcccctggctcaatgccaatacgc

SEQ ID NO: 201449 - DNA, 341 bp, Gossypium hirsutum
gaacatctttcatacttcaaatttgttggacgagtagtgggaaaagcactttttgatgggcaactcttggatgttcactttactcgatctttctacaagcatatattggatgttaaagttacttaccatgacattgaagcgattgaccctgattacttcaaaaacctgaagtggatgcttgagaatgatattagtgatgtcctagaccttacttttagcattgatgctgacgaagagaagttgatattgtatgaaaggacacaagtgactgactatgagctgattcccggtgggcggaacattaaagttactgaagagaataaacaccaatatgttgattt

SEQ ID NO: 201450 - DNA, 427 bp, Gossypium hirsutum
cagaaaccttcaaactgttcaatctgccgcatctacagaggaaccttacagaactggctttcattttcaacctcccaagaactggataaatgatcctaatggggttatggtttacaagggactttatcatctattctaccaatacaatccaaaaggtgcagtgtggggcaacattgtctgggctcactctacatcaaaagatcttgtgaattggacccctcatgagccagctatctttccctcccaaccatctgatattaatgggtgttggtccggttcatccacaatcctccccgggggcaaaccagccatgctttacaccggaattgacaccaaaaacagccaagtccagaatcttgccgtccccaaaaatctatccgatccttaccttagagaatgggtgaagtcaccaaagaaccctttgatg

SEQ ID NO: 201451 - DNA, 351 bp, Gossypium hirsutum
ctctgctcgccgccttcacttctctctctctccctctctcggtgtgatctcactcagcctcctaaaacagagcattaccctttcgagttcaagacttcaagctggcgatcgaaaatcaagaatccactgtccgtgaaattaagcctaagaacagaagaatcatgggtgctggtggacctgatgaagaagacaataggtggccgccatggttgaaacctttattaggagaacatttcttcgttcaatgcaagcttcatgctgattctcacaagagtgaatgcaatatgtactgcttagattgtatgaatggcgctctctgctctctctgccttgctcatcacaaggatcatc

SEQ ID NO: 201452 - DNA, 304 bp, Gossypium hirsutum
gtagtctcgagttcactcattaatatgtatgtaaaatgtgggcagctagagattgctcgtactgtatttgatcaacttggttccaaggacttgatttcctggactgcaatcatgtcaggttatgccatgagtggcagaactagagaggcaagggaactctgtaatatgatgcctgaacggaatgtaatctcatggaatgcaatgctagcatggcatactcgtcatgttcagttggaagatgccttataatttatcattgctatgcggacaatgactaaagattttgaccatgtgacacttgttc

SEQ ID NO: 201453 - DNA, 446 bp, Gossypium hirsutum
tctccgtctccttctaaatcttgattgatccaaaaccaaagggaaaaaaatagggcttttttcttacaaaagttgggggttcgaagagcataaaacgataatatgccttcgttacctctcagatcgattttgctcccattaatcccttccttaaccccttttcatgctggtttaagttcccatcgtttgaaacatcttgaaaagagtgatcggcgtggtaatcttagttaacgttttcccctcaaaatcattagctctcttttgactcctttactttctctcctttattcctctctgttatctgtcttcccctagagtcgtccgtttcttttgaggctattaccgtgcgacacgaaggaatctagtttgctcagaaagaaaaaagaaaaccctgcagatttggttcgatcttgaactgagattgcttttttcagaggttttaagat

SEQ ID NO: 201454 - DNA, 432 bp, Gossypium hirsutum
atgcacagaaagattgcatccaacgaccacaagctggtggggtgggtggctgacgcttgatctgctctttctgtattgctggcgaaaaaatctagacgcagcgaacttgctctatatgttcttccacgagccacagaatcgctgtggtatatctcagtaaatcggcaccttcttcctgatgttaaaaattctgaggtggcgttattttgtgcatgcatgggaggaatcatgtactacctagaatatgaaccagatagcatagcaccattccttaagggtcttatccgccggttcctatctagcagaataagcaaccccggcagttcatttgatcggacagcttcctacacctacttgcagactctagatgccatgaagaagccaaaaccagaggataatccacagctagatacttcagctcctaaacaatac

SEQ ID NO: 201455 - DNA, 430 bp, Gossypium hirsutum
ctagggagaaaaatgcgatgtccgtaagctttctatcaggggtgcttcgtgcagcgatataccttgaaacaactgttgcttgtcgacttgatttggagagaaggatggccttgcaattaggacaggctgttttggatgatctcttgattcctgcatattctgttaccggcgatacattatttgatgtggacaccatgcagcggatcctgacgaactacgttgaatatgaaactgaaggccaccattttggatacaaagaagatgatgagtacatttctcccccaccaagtgacatggaaagggtgggaaagctaatggagagctacctagctgaaatagcatctgaccgtaatctacctatctcgaaattcatcggtcttgctgaactcattccggaacaatccagggtaacagaggatgggatgtatag

SEQ ID NO: 201456 - DNA, 409 bp, Gossypium hirsutum
gctggatttttgtgctacgaggtccctagtcgagacatgggtccgtaatcttcccatggctcaacctttctatgcagtcaaatccaaccctaaccccgctttcctcaaagaaatggcagctctcggcaccgtctttgactgtgcaagccttcctgagattgaaaccattttatcgcttgtggtttcgcctgatctaatcgtttacgcaaacacatgcaaacccgagtctcacatcaagtatgcaactaaagttggcgttaacttagccactttcgactccaactgtgagctcgaaaagataaagaagtggcacccgaaatgtgaactcgtgaaccgaatcaaagtcccggaagccattggttcagcattcatgttcggttccaaattcagtgcactccctgaagaaatt

SEQ ID NO: 201457 - DNA, 406 bp, Gossypium hirsutum
cttaacctatcatttaatcacatgagttatggcatatgtcgaagactcgtgtttacagaaaagctgcttgtattggatttgagtttcaatgatttatcaggccctcttccttttaaaattgctgattcaactgataaatcaggccttgttcttctcgacctttctcacaaccggttttcttgtaaaatcccattgaacatcaccgatttgaaaagcttgcaagcattgtttctttctcataatcttcttacaggggaaatcccagcaaggattggaaatttaacttatctccaagtggtcgatctgtctcataactccttatcaggttcaattccattagatattgttgggtgttttcagttacttgcattgatactcaacaacaacaatctttccggtgaaattc

SEQ ID NO: 201458 - DNA, 406 bp, Gossypium hirsutum
gctagattttttgctcatttaattgatatctgattggggagccagtttcaattttgtcatgacagagatcaatagtgttgcagtcagagcagatccatggcctttgagcaatattatgctcacgaatggaatacgatccccagtgattcaacatccgagaacttcaatggtagcttcgactgcaatatctgtttggactttgcgcatgaaccgatcgtcactctctgcaggcacctctactgctggccctgcatctataagtggctgcacgtccagagtgcctcacttgccccagatgagcacccacagtgcccattttgcaaagctgatatatcccacaccaccatggttcccctttactgtcgaagccaatccgaatctatcttcaaagcaagcagacacttta

SEQ ID NO: 201459 - DNA, 429 bp, Gossypium hirsutum
gatccttgcacccttgagaagttcctcgggagaattcccggggtgttcaatgtcgtgattcttacacctcacggttactttgctcaggacaatgttttggggtatcccgacaccggtggccaggttgtttacatcttggatcaagtccgtgccttggagaacgaaatgctcaaccgtatcaagcaacaaggactcaacattacccctcgtattctcatcattactcgacttctccctgatgccgtgggaacaacttgcggtcaacggctcgagaaagtatacgggacggagtactcggatattcttcgaatacccttcagaacagagaagggaatcgtacgtagatggatctcgagatttgaagtctggccttacttggaaacttacactgaggatgttgctcatgagatttcaaaagagttgcaaggc

SEQ ID NO: 201460 - DNA, 432 bp, Gossypium hirsutum
aagaaacgaaaagaaaaggaaaattaaaaaccctttgctggccctccccgttgtttttagttttcttttggctaaagaaaattatggaaccgagtcagacgatcgaggatgaatcacaaccatccatcgccagcgtgacccgtcgcatccaacgtttgtctcttcaccttatcccacttccgttcctccaacgttcacctcagctggacatgctgacatgcgccaaggccaataagcaggaggtcgacgtagcctccctttcaagctacatgagagggaggcatagggaaattcaagagaagatttttgatttttttaactcaaggcctgatttgcaaaccccgactgagatttcaatgaaagaacatagggagctttgtttgagacagcttttcgggttggttagagaagcaaagatcaagccttttagat

SEQ ID NO: 201461 - DNA, 424 bp, Gossypium hirsutum
  unsure (1)..(424): unsure at all n locations
gggagttggtgagactgcccaagggaaagaaggcaatggggggcaaatgggtatatgcgaaggaagaatttcctggtaaaaatgaaattcgatacaaggctagattggtagcaaagggttacgctcagaaagaaggaatagactacaatgaagtgttttctccagttgtgaagcattcgtctattcggattttgctagccttggttgcgcaatatgatcttgaactagttcagcttgatgtgaagaccgcgtttttacacggtgatttggaagatgaaatctatatgactcagccagatggattcaaggttgctggaaaagaaaattgngtttgcaaactgacaaagtcgctttatggatagaagcaatctccgaggcagtggtacaagcgatttgatcagttcatgaaagggcaaaggtacac

SEQ ID NO: 201462 - DNA, 433 bp, Gossypium hirsutum
caccaataatttttttagaaattaaaaacttgtctgggttgccaaattgcaaatgaaatttcgattgaatcagacacaatttcttttttcaattttataatgaagaacaaaagggcgagaacgagtgtggacaacgcggtggttgatgtttggcaacgggaagttggggaactctccactaggaatttcgcccaccggcttgccgcttctgaggatcttgtgctccgactcgagatttacaagaaactcaaatagcaccgaggttgtgtgaacactgtgagctttaatgctgatggtaacattttagtatctggttctgacgataagagggttatactatgggattgggaaactgggaatgctaatcttactttccagtcaagccatgtcaacaatgttttccaagcaaaaatcatgccttactctgatgatc

SEQ ID NO: 201463 - DNA, 335 bp, Gossypium hirsutum
taaaattgattatcatcaacagcagctaacgataggagctgagactataaaaaaggattgactccttattcattacattgctctacatgctgaatgtcaatggaattttcttgcaaaacatccatttttaacgataacattcaatattttcaccttcagattgttgaattatttgaaaccagatattaagcataccaaccttactgctcaaaaacactttttcatccttgaactccattctaaattctctaacagctcctccaatattgcacaacatctacctttaagaaccgattatcatattaataattactgtataacccatgtacaaaaac

SEQ ID NO: 201464 - DNA, 436 bp, Gossypium hirsutum
atctctacttccatttcatctgccatcaatttgctctggggatcatgttggctatttttcacaaggcatttgctaatccaccagaggagctgaatagtccagcttctcataaatctaccaagaagcctaaacagcctgaagaaaccctaaatgatttcctatctcatcaccctcacaacactttctccatgagctttggcaacgctgctgttttggcttatgtccgccatgaacgtgctgcttcagttcatcagaggttgttttgtgggtttgatgacatatactgcctcttcttagggagcttgaacaatctatttatgctgaatagacaatatggtctttccaaagggagcaatgaggcgatgtttgtgattgaagcatataggacgctgagggataggggtccataccctgctgatcaggttgttaaggatct

SEQ ID NO: 201465 - DNA, 429 bp, Gossypium hirsutum
tttctctccgattattccgtctgaacccttatatctttctgtgtgtaaaacaaagtttgtaactttctatctcagcaatctcgttttactcttgaaccatgtcggctgctgaatcagctactgcaattcacagaaaccaagttgatctcttggattttattgattggtctggagttgaatgccttaatcaaagctccagtcaccctttgcccaatgctctcaaacagggttatagagaagatgaaggcttgaacctagagagcgatgctgatgagcaacttctgatttatatccctttcactcaagttattaaactacattccattgttgtcatgggatctgaagaggatggtcctaagacagtgaaactttttgcaaacagggagcatatggggtttagtaatgtgagtgacttcccttcaatgacac

SEQ ID NO: 201466 - DNA, 426 bp, Gossypium hirsutum
cccctctgtgccgtgtcttgcgggtttcacttcacagctggcaaaggatctgcaagatggaaagcatgaatagcttttggcagttaggagatgatctccggggacaatctaaagcctcagaggatcacaaatggttgatggttgcctccaaactggctgaacagacgaggataaagggtgagcgaatgaacaatctcgatctttcaaagggtccagctgaagtaaggacaagggataaatttgggttccatgaagacaacaaattcgagaaccttaacttcaatatgttgaacttggactccaagatcggagatagtgtaagcaaaagtaccttccgaaatggtatttacaacaccgatgctgtttaccagattaataacagccacaacattgggaacctgtctgccaacatatatagcggcaaca

SEQ ID NO: 201467 - DNA, 433 bp, Gossypium hirsutum
cttagtactgctgttacctgtcaaagaaatggaaggccagggtctggctatgaaaagtggaaatggaagccaaatggttgttctcttccaagatttgatgcactgaagtttcttgggaagatgagaaggaaaaggataatgctagtgggtgattctataatgagaaaccaatgggagagtctagtttgcctagtgcaaggagttataccaacagggcataaaaaagtgacctacaatggtctttcaatggccttccatgccttggatttcgagacgtcgatcgagttttcttgggctccattgcttgtggaattgaagaaaggacctgaaaacaagagagtcttgcatttggatttgattgaagagaatgctagatattggagaggtgttgatgttcttgtgtttgattcggcacattggtggactcattctg

SEQ ID NO: 201468 - DNA, 416 bp, Gossypium hirsutum
actgtaaagaatattatatagatatgagtgatctacagtgggttgcttcaacacatgagccaggtgtttctgatcacatggagcagatcaaagatatgataactcagattataaacaaagactttggatatgttgttgacggcgatgtgtttttcgctgttgataaattcccaaattatggcaagttatctgggcagaagctggaaaacaatagagcgggtgaacgtgttgctgttgactcaaggaagcgtaatccttccgactttgcattatggaaggctgcaaagccaggtgagccatcttgggacagctcatggggacctgtacgacctgtgtggcacatataatgtagtgcaatgaatgcgcattatttaagcttcaaatttgacattcatggtggtgggcttgatttgatt

SEQ ID NO: 201469 - DNA, 361 bp, Gossypium hirsutum
ctgataacttctcatcattagaatcacttcactgcgggacgtgttattgataccatggaacatgctatctatcacatagaaacctatcatattaccacaatcaggtaaaacactccaatatacctaatgtaccagacaatcaagtctttacagcataagatagttatatctgctgaaacctttcataacaccttcaaaagatattcttacttacacaaagcaccaaataaagatcaatctcatcacctaacctacctatagatcaaattcacttacctgcatcattatgagacagctaccacatctacatcttcatgcgaattacagtctacagaaccatctttatacaaccaattcatca

SEQ ID NO: 201470 - DNA, 433 bp, Gossypium hirsutum
gaagagcgttggggacttgaaggaagctgatttgaagggggggaaagtgtttgttagagtcgatctgaacgttccattggatgataacttcaacataactgatgacacaaggatccgtgccgctgttcccaccatcaagtatttgatgggtcatggctctaaagtcatcctctctagtcatttgggacgcccaaagggtgtcactcccaagtacagtttgaagcctcttgtgccaaggttatctgaactccttggagtcgaggttaaaatggcaaatgactgtattggtgaagaagttgagaaaatggtggctgcattaccggatggaggtgtattgctgcttgagaatgtgaggttctacaaggaggaagagaagaatgatcctgaattcgcaaagaagctagcttctcttgctgatctatatgttaatgat

SEQ ID NO: 201471 - DNA, 427 bp, Gossypium hirsutum
  unsure (1)..(427): unsure at all n locations
gttcttggaatcgatggaggatataagggtttttatgcagggaacactatcaccttaacacctaagtttgtcgatgatatccataaacgtggaggtacgattcttggaacttctagaggaggtcatgattctgtcaagattgttgaccgcattcaggatcgtgggatcaatcaggtctatataatcggaggtgacgggacacataaaggagcagctgtgatttttgaggaaataaggcgacgtggtttgaaagtagctgttgctggaattcccaaaaccattgacaatgacattccggttattgacaaatcatttggtttcgatactgcggttgaggaggctcaacgtgccattaaagcagcacatgttgaatctgaaagtattgngaacggcattggacttgtaaagctaatgggacgctactgcg

SEQ ID NO: 201472 - DNA, 431 bp, Gossypium hirsutum
gtttcacgcaaacatatgggatagacttcacagaaactggggcacctgtggcaaagcttaacactattcgagtactcctaagtttggctgtaaattgcgattggaaattacaccaacttgatgtaaaaaacgcatttcttaatggcaagcttgaggaagaagtctatatgcaattgccacctggctcaaagtctattgaaggtagcaacaaggtttgcaagctcaacaagtctctatacgggttaaaacaatcacccagagcttggttcgagaggttcactaaagtcattcttcaaaatggctacaagcagtcccttgccgatcatacgcttttcatcaaggtaacttctacaaataagaaagctatcctaattgtgtatgtggatgacatcattcttactggagatgatgaggaagagattagcaatttg

SEQ ID NO: 201473 - DNA, 367 bp, Gossypium hirsutum
ccgcatcctttacattttatggatcccttaatttcgcggtgactaatttccacactaacctaggcccatatcccaatatccactttatactttattcttatccccctatcatttcaactgataatgcttaccatgatcatctatcgttacctgatataaccaacatttcttttgaaccctcttcaatgatggccaaatatgacccactacacgacaagtacatatcttgcttccttatgtaccaacaagatctcctgcccaaacatgtcaattcctctctggacaccattaagaccaaacacacaatccaatctatatattgctaccctacttgattcaagtgcagcatcaactaccatccaccaac

SEQ ID NO: 201474 - DNA, 370 bp, Gossypium hirsutum
  unsure (1)..(370): unsure at all n locations
ccaaatactttacattaaaagcatccattaatttagggaggactaatttcaacactcacctattacaatatccacatataaacttcatactttaccactatacctactcacattaagatgataactattaccatgaacatcatatcccatcctaatatataccaacatcacttctgaaccctctacaataatggccaacaatntacccaccacactacaaacacatctatagctgcctaatacaccgaaaatattttaatcccatatatcacaatgcatatcaatccaccattaagaccaaactcacaatccaatttttagaatcttaccctacagaattcacatgcggcatcaactaccaatcctcaac

SEQ ID NO: 201475 - DNA, 433 bp, Gossypium hirsutum
  unsure (1)..(433): unsure at all n locations
tcaagttcaaggattacaattgtaccgttgagtactacctgtctcctttccttgttgtacaaagcaggccgcctgccgggtctccgcaaaacatcaagacaacccttaagttggatcgaatggattggaattcatttaggtggaaagatgccgatttgttggtcttcaacaccggccattggtggaactacgagaagaccgttagagggggatgttactttcaagtcggggaaaaaatcgaaaccaagatgaccatagaacatgcgtatcagaggtctttggagactgtgatgcagtggctacgcaacgaggtgaatatgagtaagaccaaggtctacttccgcactttcgctcccgtacatttcagaggaggggattggagaaccggnggaagctgccacctcgagacttttgccgagctgggaacaacatt

SEQ ID NO: 201476 - DNA, 430 bp, Gossypium hirsutum
cctgcttctgctgatatcaagtctgctgaagatgccagtagttttattgatgaaaagaagatagtaattgttggggtgttccccaaattctccggtcaagagtttgacaactatatggctcttgctgagaaattgcgtcctgattatgaatttggtcatactttggatgctaagtaccttccccgtggcgagtcatcagtgactggccctgtcgtcagacttttcaagccttttgatgaactctttgttgacttcaaggattttaatgtggaagctctagagaagtttgttgaagaatctagcattcctcttgtgactctctttaacaatgacccaagcaatcaccccttcattatcaaattctataacagtccccttgcgaaggctatgttgtttgcaaatttgagcaatgaaggagttgattccttaa

SEQ ID NO: 201477 - DNA, 417 bp, Gossypium hirsutum
  unsure (1)..(417): unsure at all n locations
ggattatcaatttgaagccttcttcgaaattcctctttcgggatgcaaattttcgtcaagaccctcactggcaagaccatcacccttgaggtggaaagttctgataccatcgacaatgtaaagaccaagatccaagacaaggaagggatcccaccagaccagcagaggcttatctttgctggtaaacagctggaggatggccgtacccttgctgactacaacatccagaaggaatccacactccatttggtcctccgattgaggggtggtatgcaaatttttgtcaagaccctcaccggaaagaccatcacattggaggtggagagttctgatacgattgacaatgtcaaggccaagattcaggacaaggaaggcatccncccagaccagcaaaggctgatcttcgctggtaagcaa

SEQ ID NO: 201478 - DNA, 432 bp, Gossypium hirsutum
cttaaaacaaaaaccatggttcaagaaaagaagctaggccgggacgtatctggttggctaagagtctatgatgatggctcagtcgacagaacctggactgttccccctgaggtcaagttcatggctgaaccagtctcaccccatgaacaattcattgatggtatagccactcgtgatgtcaccatcgatcaaaattcaggcctccgggctcgaatttacttgccggaggaggaaaatcccaagtttccgatcatacttcatttccatggcggtggcttttgcatcagccaagctgattggttcatgtactatcagttttacactaggttagccaaatcgattccagctattgtcgtctcggtttacctcaggccagcacccgagaacaagcttccggcagcttgtgacgatggctacgccgctctcctttgg

SEQ ID NO: 201479 - DNA, 388 bp, Gossypium hirsutum
cttgtctatattcttcaaagggttaatgaatccaccccatgaccgtcttattccaactgcactcacttcatcaatgaagcctaagcttccctttgaaatccttaatggttctgtctcttcaaatcccaccaacgctttttcaatgctgtttgcatcttcggcttctttggcttatgttccaccccacaatccttcctccacttataaaaggttgtttagcggactgtatgaaatgcattgcatattcatgggtaatttgaacaatctatgtagcctcttaatgcaatatggtctatcaaggggcaccaatgaagcaatgttcatcattgaagcatataggacccttatagaccgtggtccatacccaccacatcaagtcctcaaccac

SEQ ID NO: 201480 - DNA, 428 bp, Gossypium hirsutum
aatttattctccaacttctttggaggaaggaacccattttgtgagccttttatcacacgccgttttggaagcatgtttgattcaagcttctttggccccggtcaaagtccttttatggatatgcatccgactgggtttattgagcgtcaggctccagagccaaagagaccaaggggtctgattattgaagaactaaattctgatgatgagaaggaagaagcagataccgggatgaaagggaatcctaggaagcatggtaggtctaatgccgaaccttatgttgaggttccagatgatgaagctggacaatctgagagaaggaacaggcatttgcagtatatgaatggttacaatggtttgtatcaaaatcagcagcagcaacagcctcaaactagtaattttgtgtttcagagctccactgtcactta

SEQ ID NO: 201481 - DNA, 397 bp, Gossypium hirsutum
cctgcttctgctgatatcaagtctgctgaagatgccactgattttattgatgaaaagaagatagtaattgttggggtgttccccaaattctccggtcaagagtttgacaactatatggctcttgctgagaaattgcgtcctgattatgaatttggtcatactttggatgctaagtaccttccccgtggcgagtcatcagtgactggccctgtcgtcagacttttcaagccttttgatgaactctttgttgacttcaaggattttaatgtggaagctctagagaagtttgttgaagaatctagcattcctcttgtgactctctttaacaatgacccaagcaatcaccccttcattatcaaattctataacagtccccttgccaaagctatgttgtttg

SEQ ID NO: 201482 - DNA, 431 bp, Gossypium hirsutum
cacacttcaactctgtctccagatctctgtctcccccttcggtttctatctgaaaccaaataaaaataaattcgtgaacaccatgtcagtctgctcgtcttcttcttcaacaggtaaagcttggatagttcacagtattttagctggcacagcaattgcggtagccattggtgcccatgcctatctgggtcgggctaggaagtttcggacacgggtcgtgggaattatacccgccagatatgcatcttctcggttcgaaagcaagcctttggttcatatccttgggaaacccatgatccagaggacatgggagaggtcaaaactggcgaccacactgaaccatctagttgtggcaacagatgatgaaaagatagcagaatgctgtcgaggatttggcgctgatgtgatcatgacatcagagtcttgtcaaa

SEQ ID NO: 201483 - DNA, 434 bp, Gossypium hirsutum
  unsure (1)..(434): unsure at all n locations
ctcacctgtatcattctcactcattcactccttcacaggggaaaaaccctttaattttaaaaaggatattttggttatatactgagaaatccaacttcttttgtatctttatccttttggtacttcaattatcaaaagaaagaaaagcatcaacaacaacaaaaaaaagcccatacacttaagtgaaaaaccagacaagagagaaaacaagaaaaatgggtgttctggatcatgtttcagatctgtttgactgttctcacagttccaagcacaaaacgtaagcagttgcagacggtggaaatcaaggtgaaaatggactgcgaaggatgcgaacggaaagtgaaaaaatcagtggaagggatgaaaggggtgacacangtggacgtggagcggaaggccagcaagttgacggtcgtcggatatgtggacccgaa

SEQ ID NO: 201484 - DNA, 473 bp, Gossypium hirsutum
ctagaactagtcggtcccccaatctgcactaattcaacactagcatagatattttcatttattgaacaacgactacacccactgttagatgtattccataggtggaagtgcaaaccccaccattaacatccacgtcaaccgataccttgcccctttcaaccgcttttctaaatatgttacaaaaagagtgcatagatcgaagagtaaatggagacattggaattggacttcacaaagagacatgtttttaaatggagcatatttcactccatcacgagcattatcatcagccagctacgctaacgcctctaacttatcaaccaaatcttcttacttagttgtcaccattacttcaaatgcattctccctgtcttgtcaccatggtttcatgtgttagttctttgctactcctccgtacataagatggaaacaaaactcattgtcctttagataatatatataccattttatat

SEQ ID NO: 201485 - DNA, 428 bp, Gossypium hirsutum
ggtgtttcgtagaaaaagagaaaaaatcaaattacaaagtgaatatcttcaggtttgcaggtgatatgactcatttgatcagcatcttagtgctgctcctcaaaatctacgctaccaaatcttgctcaggtatttcgctgaagacgcaggagctatatgcgctagtatttttgacccgctacttggatctattcacggattttatatctgtgtacaacaccatcatgaagctggtctttattgccagctctctcgccattgtttggtgtatgagaatgcaccgagtcgtgaggcgttcctatgacaaggacctcgatacatttcgtcattatttcctcattttggctagcctcattttggcgcttttggtacacgagaagttcacctttcaggagatcttttgggcattttcaatctacttggaagct

SEQ ID NO: 201486 - DNA, 436 bp, Gossypium hirsutum
gagattacaaaaacacgaagtgagctaagcttctgattattgtcggaatcaagtggagttcagctctctttgaagactcgaatatcgcaataaactgtgaagatttggggatcaaagctcaaagggtaaaaagtacctccgttagatctttaccgtcaaacgagagaattaaaaaaaaatgtcggttcaagagtacctcgacaagcatatgctctctcgcaaaatcgaagacgccgtcaatgccgctgttcgagctaaaactccggatcccgtcctcttcatctctaatcatatgaaaaaagcggtttcttcagtgataacgaaggtaaaagctcggcagattctcgatagtagaaggattcctactgttgaagttgagttgtacactaacaaaggggtgttccgtgcttctgttccttgcggcgactctactgga

SEQ ID NO: 201487 - DNA, 363 bp, Gossypium hirsutum
aagtctggatcaattcgacactaacgaatttattcgtaatcaagatgcttatcaatgctgcttggtataaattatatagtcttcgccgtcaaaaaatactagaaaccataagttatttatatagtaaagcctgttctcctgtaaacgtgagacagcagatgtttttaactatcttgaatgtggtgaccaatatgatatgaagccgttccattgaaagggaagccaattccaacctttgtgcaaaattcaagcaaatcatcttataactaacaaaactttttggtctacctaatttttctgatttcttcccggcgtttgccccacttgatttgcaaagttcaatgaaacatgtccgaaaatcaa

SEQ ID NO: 201488 - DNA, 374 bp, Gossypium hirsutum
actgtttattttataatatagatatgaatgatctacggtagctttcttcaacacattagccacgtgtttctgatcacatggaccacatcaaagatatgataactcatattataaacaaatactttggatatgttgttgactactatgtgtttttcgctgatgataaattcccaaattatggcaacttatctgtacagaatctggaaaacaatatagcgtttgaacctgttgctgttgactcaaggaatcgtaatccttccgacttttcattatgtaaagcttcaaatccaggtgagccatcttgttacagctcatgatgacctttacgacctgtgtagcacatagaatgtactgcaatgagtgcgcattattta

SEQ ID NO: 201489 - DNA, 430 bp, Gossypium hirsutum
aagactttagacttttcattaaagcgttataaagataagcgggataacatttcagactccaagatcaaagcggtatttacgggaccttacattttggataaaaatgggtgatcatctggttttatgtgtggaccgtcttataacacctgaaagtttgcaatcaatgcaagaaactgaggctgcaggatcttccggtgaaagttcttctcaatcctctgacccaaatgcttgtgctattggtgttaaggaagtggaagaacatggttgctgtgatgaagaagaaccacttatacagacagctgaatgccgtatctgccaggaggaggactgcattaagaatttggagactccttgtgcttgtaatggtagcctgaagtttgctcacaggaaatgtgttcagcattggtgtaatgagaaaggtgatataact

SEQ ID NO: 201490 - DNA, 355 bp, Gossypium hirsutum
cccaacgaaacaattcgttctattttattaatcaccttataatcaactagggtagccacaatcatacatgcgtcagccaccagactaaccacctgcgtatcctccaatccatcaatactccaaatctctaacatacatctaccatactacaatgtcgacatacttacccaaactttatctcaactactcaccatccacataatctaataagacaaccacattaacttaccaatcaatacataccatggtccaacactatcaataatacaatcatcaaataccgatcttttaaagtttcaataagcaccgtgccatttcatccatcattatacgcgaatacaatcatcaattacaa

SEQ ID NO: 201491 - DNA, 333 bp, Gossypium hirsutum
ccaactaagctaagcgttttattttatcaatccccttatactcaacagcggtgggctcaatcattcatgcggctgccagcaaaccaaccaccttcgtcaccttcaatcctgcaatacaccagagctgactcattcaactaccatactacgaatgatcacaatttctctccaatactctacacacatgtacacaccatccacaaaatctaataagaaaaccacattatccttccaatcaaatctaaaatttttcccacactttttttcatccaataatcgataccgacttcttttatccaataatcatttaccatatcatacatcatcaatgct

SEQ ID NO: 201492 - DNA, 382 bp, Gossypium hirsutum
aatgcatgctttttgtccagtggtatcttaaaagaggttagcgatacatggagctatggctggccctcactgccactacttccagcagccaagttggtttggctgcatatctcctcccccatgttcctaagcatgtcctaacggccctcagcatcgaaattcttaacgctgctgatgaacgaagtgtgggatctcttgatggtgttgcttttctccttcactctgacttcttaagtgatgctgctgctacttatgctgtcgcagacagcattgcaaagtctgatgatgaggctgctgctcctaatctgatagcatttgttcaagatcactgatcaaatgcagctttcttgcatggattaaagcaagggcaagaacattacat

SEQ ID NO: 201493 - DNA, 252 bp, Gossypium hirsutum
ctaattatgttctgcactgttggagtagtcagaacgggcggtgttgtaccaaaagtgggttgtattactgtaccgccatcagacatgggtcacaatcttagagcttagttagaatccgaaattgggtgtgatataatgtttcaagtttgtgatgatacatttaaagcacataagttgatccttgctgcaccttcacctgtttttaaagcacaagtttttccggcttacttgataccctaacttggataaaat

SEQ ID NO: 201494 - DNA, 436 bp, Gossypium hirsutum
ctcaacttaaagaaaaagtgaagatgaccagatgggtaaggttaattgtatccagaaactgaaaaatcagcagcagcaggcaagtgcgagtagatcaatagataaagcatcaaaaggaacaaattcaagcaatcactcaacaaccatgtcgattgggaattcaagcaacagtgtttcaaagctatctgcgaaggctaaatatgggtttattgatgataacttctcaacccttcaccaggttacagcagcattaagaggttctggtcttgaatcatctaatctcataatcggcatcgatttcaccaaaagcaatgaatggacaggccaagtatcattcaataaccggagcctacatgcaattggtgctgcaccaaatccatatgagaaagccatctccataattgggaaaactctagctccattcgatgacgacaat

SEQ ID NO: 201495 - DNA, 409 bp, Gossypium hirsutum
attcaccacgagctatggattaaaaatgcgatgtccataagctctctatcattgttgcttcttacatcgatgtaccttgaaacaactgttgcttgccgacttgatttctagagaaagatgtccttgcaattatgacaggctgttttggattatctcttgattcctgcatattctattaccggcgatacattatttgatgttgacaccatgcaaccgatcctgactaactacgttgaatatcaaactgaatgccaccattttggatacaaacaagatgatgagtacattactcccctaccaattgacatcaaaatggtggaacagctaatgcagagctacctatctgaaatagcatctgaccatagtctacctatctcgaaattcatcggtcttgctgaactcattccgg

SEQ ID NO: 201496 - DNA, 431 bp, Gossypium hirsutum
ggaaccaccttcgtaagcaatggcttcgtcaagtgtcgtgactgctcaaatatcaaatcaacttggaaccactgattggaagaagtccatcccttcactctcccttggtaacttaaacttgaataaaaatctagctggtaagcagtttttatcattgtcagctcctcaaaaatctgggttgaactataaatccctacgtgtaaatggtctgttcggaggaaaaaaggaaaatggtgagaagggtgatgatgcaccttccaaggcaggaattcttgggaacatgcaaaacctatatgagacagtaaagaaagcacaaatggttgtccaggttgaggctgtgcgagtgcaaaaggaacttgccgcagcagagttcgatggctactgtgaaggcaactttatctggaaatcagcaacctgtacgcatagagatc

SEQ ID NO: 201497 - DNA, 416 bp, Gossypium hirsutum; identical to SEQ ID NO: 191196
  unsure (1)..(416): unsure at all n locations

SEQ ID NO: 201498 - DNA, 414 bp, Gossypium hirsutum
ggaatgcttgccagaaggattgtggagactgaaatgccaagcatggttcagatacagcaattgatccgaggagcgaaaaatgctgtgtcactcgctcagggagtggtttactggaaaccacccaaacaggcattggataaggttaaagcacttgtagaggagtcttcagttagttgttatggtgctgatgaaggtcttcctgaacttagagaagcattgataagaaagttacgtcaggagaacaatttgcagaggtcttcggtgatggtcactgcaggagcaaatcaggcatttgtgaatcttgttctaacactgtgtgatgcgggggactcggttgtcatgtttgctccatactatttcaattcctacatgtccttccagatgacaggtgtcactaagatattagtaggtcct

SEQ ID NO: 201499 - DNA, 344 bp, Gossypium hirsutum
agcgagagattaggaagaggaagtatgaggagtcattgcgggaggctataacgaattagcaaagtatggcaaatatgtgggccactttagctcatgattcaaatgttgcaactgcgcttggattggtgttctttgtgatattatataggacagagttgcttagttacagaaagcagaagaaggattacgaggataggttgaagattgagaaggcataagcataatacagaaaaacgatgagggagtttgagagggaaatggaaagaattgatggggatgatgatgatgctgagcacgggggatgtgagcagaatacttatttgaaaatggctatgcaattcatg

SEQ ID NO: 201500 - DNA, 426 bp, Gossypium hirsutum
ctgggacattctgatagctttaacgtattaaaagtggtggggaaggacattgttgaggcaattaagatgggtgttgatccacttcctgttcatagtggtctggggggtgcctactactttaggaatcccacaggtgagaatgttgctatcgtgaagccgacagatgaagaaccttttgcaccaaacaatccaaaaggctttgttggtaaagcccttggtcaaccaggtttgaaacgttcggatcgtgtgggggagactggtttcagagaagttgttgcctaccttctggaccatgattattttgccaatgtgccaccgaccgcgctggtgaagattactcactcagtcttcaacattaatggtggtgtgaacagaaataggcctcacacgaatctggttagcaagattgcatcgtgccatacagtt

SEQ ID NO: 201501 - DNA, 425 bp, Gossypium hirsutum
aacccatttccctctttctctgtccatccatttctccctcgtggttctttttcttctgtgttatcctctcaaagacctttttgtgttgcagaatttactcctttttagttttgtggactatgccaaaagctggggttcttcctggttaactaaggcctatttttgggtgggttgaacttatatcagtactagcagattagaggttctctcaagtttcagacatatttgagttcctatcttggaacaatgatgatgtttgacgagatgggaatttgtggggatatggatttcttcagtgctccacttggggaaaaagatgtggcagcctcacaaattgaaccagaggcgacggtggaagatgattatagtgatgaagaaattgatgtggatgaacttgagaggaggatgtggagggacaaaatgcg

SEQ ID NO: 201502 - DNA, 365 bp, Gossypium hirsutum
tttcattctttctagactgcccaacgcataagtatgcaatattgatgcttattgctatattcgaacgcacaatttcctgttataaatgaaattcaatacaaagctatatttctatcaaatggttactctcataacgaatgaatatactacaatgaagtgttatctccagatctgaaacatccgactattcttatattcctagccttgattacacaatatgatctttaactaactcatctttatgtgaagacctcgtttatacacaatgatttaataaacgatatctatatgactcatccagatttattcaaagtttctataaaatcataattatatttgcatactgacaaattcactttatatat

SEQ ID NO: 201503 - DNA, 368 bp, Gossypium hirsutum
ttcaacttcaactaatctcacttcaatggcggactctaatcttatagtctatctcaacgttccatttgatgataacttcaacataactcataacacaaagatccgtccactttttcccaccatcaattatttaatatttcatacctctaaattcatcctctctagtcattccaaactcccaataactgtcactcccaattacagtctataaacctcttattccaacgttatctgaactccttgtattccatgttaaaatcacaaatcactatattgtttaagacgcttacaaaatggtgtctacattacccaatacatttatatctctacttaataatcacaagctctacaagcattatcataacaat

SEQ ID NO: 201504 - DNA, 422 bp, Gossypium hirsutum
gggagttgtttagactgcccaagggaaagaagcaatgtgtgcaaatgggtatatgcggaggaagaatttcctggtaaaaatgaaattcgatacaaggctagattggtagcaaagggttacgctcagaaagaaggaatatactacaatgaactgttttctccagttgtgaagcattcgtctattcggattttgctagccttggttgcgcaatatgatcttgaactagttcatcttgatgtgaagaccgcgtttttacacggtgatttggaagatgaaatctatatgactcagccagatggattcaaggttgctggaaaagaaaattgaatttgcaaactgacaaagtcgctatatagattgaagcaatctcctatgcagtggtacaagcgatttgatcagttcatgaaagggcaaatgtacac

SEQ ID NO: 201505 - DNA, 416 bp, Gossypium hirsutum
gaactgcttaatatatggagaaatcccagagtatattggagatgtgaagaaattgaaaaccctggatctcagctataataacttgaccggagaaattcctggatcattccacaaattgacaaaagcagatttcttgtatttgaccggaaatcagctcactggttcagtgcctcagtggatcgtggaaagaaataaaaacgcggatttgtcttacaataatttcacatgggagcctgcaagtccaatagaatgtcctcgagggagtgtgaacttggttgagagctactcaacatcagtagataaattgctttcctatcttggtgcacaagtagggttccttcatgtctaaggcacaagttcccatgttctgtttcatctaaacaatataagtactcattgcacatcaattgtggagg

SEQ ID NO: 201506 - DNA, 422 bp, Gossypium hirsutum
  unsure (1)..(422): unsure at all n locations
ataacttcaatgttaatttgaaagggaacaagaacaggggggaagataatcatggaaccaagagtgggaagaagaacagcaacaagaaaaacaataacaacaacgacaataacaacgaaaacaaggatgggaaaagtgctgctgataaaaggtttaagacactgccaccatctgaatcattgccgagaaatgaaactgtcggcggctatatttttgtctgcaacaacgataccatggaggagaatctcagaagacagctctntggtttgcctcacgttaccgtgattcattccgggcaataactccgggcctgcctttgttcctctacaactactcaacccaccaactccatggtgtttttgaggctgcaggctttggtggaacaaacattgacccaactgcctgggaggacaggaaatgcc

SEQ ID NO: 201507 - DNA, 429 bp, Gossypium hirsutum
acaacatgttcgtgttcatgcaatggaagcagttatggctggttgggatcttgagcaatcacttcaaagtttaacaggtgtatctccaggtgaaggcactggtgcaaccatgtctgatgatgaagatgaagttgtagatagtgataccagcttgtttgatggaagttttgatgggattgacagcatggggtttggccccctcgtcccatccgagactgagagatcactaatggagcgtgttaggcaagaactgaagcacgagctgaaacagtgttacaaagagaaaattgtggacattagagaggaaattctacgtaagagacgagctggaaagctaccaggcgatacgacctcgtttttaaaagcttggtggcagtcacattccaaatggccttacccaactgaagaagacaaagcataattagtaca

SEQ ID NO: 201508 - DNA, 396 bp, Gossypium hirsutum
ctgggaacggttcatcatgagtttcacttcactgttcaagagggaattgatgccatcgaagatgtcatctaccacatagaaacctatgatgttaccacaatcagggcaagcactccaatgttcttgatgtcgcggaacatcaagtctttaggggtgaagatggttatatctggtgaaggctctgatgagattttcggtgggtatttgtacttccacaaggcaccaaataaggatgaattccaccacgaaacctgccgaaagatcaaggcccttcaccagtatgattgtttgagagctaacaaagcaacatcttgcatcgtgattggaggctcgagtcccattcttagacaagcaattcatcaatgttgccatgtctatagaccctgaatcaaagat

SEQ ID NO: 201509 - DNA, 433 bp, Gossypium hirsutum
tggctatcttttctacatcaatggctgctatgctccttcttctagggctcttggctgcaaacttggatcctactgctgcacagattggtgtttgctatgggatgcttggcaataatctcccaaattcatgggaagtcattcaactttacaaatcaaacaacatccggcgattgaggctctacgatccaaatcaacaagcattacaagctcttagaggctccaacattgaagtaatgttaggtgttccaaatgatcaacttcaaaacctcgctgacccttccaaagcacgatcatgggttcaatcaaatgttgtagcttactggccgagtgttcggttccgatacattgctgtcgggaatgaagtccctcattcatcttggttagctcaattcgttttgcccgccttagtgaatgtattcaacgcggttcgatc

SEQ ID NO: 201510 - DNA, 425 bp, Gossypium hirsutum
  unsure (1)..(425): unsure at all n locations
ccatttcccaaatctcctccctcctcttctttagcgtcctgttgatttccgctcatgcagcgcgctttgaaatccgcaatgagtgctcctacaccgtctgggcagcagcctctcctggtggtggccgtcgcctagaccctcggcaaagttggaccatcgatgtgcctgctggcactgctatggctcgtatttggggtcgaaccaattgcaatttcgatgccagtggtaggggtcattgccaaaccggtgattgtggtggactccttcaatgcaaaggttggggtgtacctccaaacaccctggctgaatatgcacttaaccaatttggaaacatggatttctacgacatttccttagttgatgggtttaacatccccatggtgtttggtccaactaatggcggntgtcacaacattcggtgcact

SEQ ID NO: 201511 - DNA, 422 bp, Gossypium hirsutum
  unsure (1)..(422): unsure at all n locations
tatgtctattcttttatacactttgtttccttgccatgttggtttaatgtgatattttggaagggtttttggtttctgttactttccatattgaaacttgtcttcaagtcatagctaacatctctaccagcaatttattgctgtacttgtgggatgtaacacataatgtatattgtgaaggatttttgactctaccaatgctgacttggagaattcaagagttccaagctcttctgagttaaaaactaagcctgatggttgggaaacaacatcaaaagctcctgatggaaacgtgtgggagatgtcacagagggaagaagatattctcctcccaagaatttgatcgccgaattgcttactgtaaattccagatagctagttntattaagactcacatatttagccggaggagacctattgat

SEQ ID NO: 201512 - DNA, 407 bp, Gossypium hirsutum
ctgggaacggttcatcatgagtttcacttcactgttcaagagggaattgatgccatcgaagatgtcatctaccacatagaaacctatgatgttaccacaatcagggcaagcactccaatgttcttgatgtcccggaagatcaagtctttaggggtgaagatggttatatctggtgaaggctctgatgagatttttggtgggtatttgtacttccacaaggcaccaaataaggatgaattccaccacgaaacctgccgaaagatcaaggcccttcaccagtatgattgtttgagagctaacaaagcaacatctgcatggggattggaggctcgagtcccattcttagacaagcaattcatcaatgttgccatgtctatagaccctgaatcaaagatgataaaaaggga

SEQ ID NO: 201513 - DNA, 433 bp, Gossypium hirsutum
attgcttcccacaacattttttctcatgttggtggcatgggtgggatgaaaaatggtggggtacactctcctcagcagatgtcccacctttaccctggcaggaaccctatgatttcaatgccgacgtctcttgattctcctaatgaacgtgttagaagcttctcacaccgtataaatgaactgaattctagtaatgctgataagaaacaatatgaacttgacattgaccgcatcatacatggggatgacagcagaacaacacttatgattaaaaacatacccaacaagtacacttcaaagatgcttctggcagccattgatgaacattgtcgaggaacttatgactttatttatttgccaattgacttcaagaacaaatgcaatgtgggctatgcgttcatcaacatgattgatccgcaacagatcattcctt

SEQ ID NO: 201514 - DNA, 379 bp, Gossypium hirsutum
cctgcttctgatgatatcaagtcttctgaatattccctcgatcgtatttatcaaaagaagataggaattgttccggtgttccccaaattctccagtcaaaaatttgacaactatatatctctttctaaaaaattacatcctcaatatgaattcatacatactttctatgctaaatacctttcccgtggcgagtcatcaatgactgaccctatacacagacttttcaaaccttttgattaactctctgctgacttcaaagattttaatgtatcatctctacagaagtttgttgcacaatctaactttactttatcgactctctataacaatgacccaaactatcacaccttcattatcaaattctattacaatccccttt

SEQ ID NO: 201515 - DNA, 345 bp, Gossypium hirsutum
aagaaaccatccaagccccaacaaacaaaacagctcctcggtatgtccaatttcaaaatcaaaatcaaaatcaaaatcaaaatccaaagatctaaatctaaatccgtctcctctcctttctctttctttaaccttacaattaaggaaagaagatgaagagagtcttcggcgttaagaaagacaaggaacccccgccttctatccaagatgctaccgttcggatcagtaaaagaggggatacggttgatgacaagttgaagaagctagatgctgagttgagtaagtataaagagcagataacaaagacaaggcctggccctgctcaagaggctcttaaatctcgag

SEQ ID NO: 201516 - DNA, 277 bp, Gossypium hirsutum
ctgggaacggttcatcatgagtttcacttcactgttcaagggggaattgatgccatcgaagatgtcatctaccacatagaaacctatgatgttaccacaatcagggcaagcactccaatgttcttgatgtcgcggaagatcaagtctttaggggtgaagatggctatatctggtgaaggctctgatgagattcttggggggtattagtacttgcacaaggcaccaaataaggatgaattccaccacgaaacctgccgaaagatcaaagcccttcacc

SEQ ID NO: 201517 - DNA, 427 bp, Gossypium hirsutum
  unsure (1)..(427): unsure at all n locations
ccgcatctttgaggtttgatggagccctgaatgtggatgggactgagttccagactaacctggtcccatatcccaggatccactttatgctttcttcttatgcccctgtcatttcagctgagaaggcttaccatgagcagctatcggtggctgagataaccaacagtgcttttgaaccctcttcaatgatggccaaatgtgacccacgacacgggaagtacatggcttgctgccttatgtaccgaggagatgttgtgcccaaagatgtgaatgcggctgtggccaccattaagaccaaacgcacaatccaatttgtggattggtgccctactggattcaagtgcggtatcaactaccagccaccaactgttgttccaggaggggaccttgccaaggttcanagagctgtctgcatgatctccaactc

SEQ ID NO: 201518 - DNA, 416 bp, Gossypium hirsutum
cttaaaacaaaaaccatggttcatgaaaagaagctagtccgttacttatctgattggctgagagtctatgatgatggctcagtcgacagaacctggactgttccccctgacgtcaagttcatggctgaaccagtctcaccccatgaacaattcattgatggtatagccactcgtgatctcaccatcgatcaaaattcaagcctccgggctcgaatttacttgccggaagacgaaaatcccacgtttccgatcatacttcatttccatggcggtggcttttgcatcagccaagctgattggttcatgtactatcagttctacactatgttagccaaatcgattccagctattgacgtctcgatttacctcaagccagcacccgagaacaagcttgcggcagcttgtgaccatggcta

SEQ ID NO: 201519 - DNA, 420 bp, Gossypium hirsutum
tctacaagtgggggatcccccctgctgcaataattcaccacgacggattatctattctaagcctacttctaaattcctctatcagtatacttaatcacgtgaagaccctcactaccaagaccatcacccttgatgtggaaagttctgataccatctacaatgtacagaccaagatccaatacaagtaaagcatcccaccacaccagcagaggcttatctttgctgataaacagctgtaagataaccgtacccttgctgactacaacatccacaaataatccacactccatttactcctcccactgacgtgtggtatgcaaatcattgtcaagaccctcaccgtatagaccatcacattgtaggtagagagttattatacgattgacaatgtcaaggccaatattcatgacaatgaatgca

SEQ ID NO: 201520 - DNA, 429 bp, Gossypium hirsutum
cttaaaacaaaaaccatggttcaagaaaagaagctagtccgttacttatctggttggctaggagtctatgatgatggctcagtctacagaacctggactgttccccctcaggtcaagttcatggctgaaccagtctcaccccatgaacaattcattgatggtatagccactcgtgatgtcaccatcgatcaaaattcaggcctccgggctcgaatttacttgccggaggaggaaaatcccaagtttccgatcatacttcatttccatggcggtggcttttgcatcagccaagctgattggttcatgtactatcagttttacactaagttagccaaatcgattccagctattgtcgtctcagtttacctcatgccagcacccgagaacaagcttccggcagcttgtgacgatggctacgccgctctcctt

SEQ ID NO: 201521 - DNA, 327 bp, Gossypium hirsutum
gtggaaggtcacatgactggactgagtgtccgtacgctcagcctggtgagaaggcccgaagaagggacccgcaaaagtttcattactctggaactgcttgccccgattttcgcaagggaagctgtaagaaaggcgattcatgtgaattcgctcacggcgtttttgagtgttggctccaccctgcttgttaccgtactcagccttgcaaagacggtaccagttgtcaaagaagggtttgttatttcgctcacacaccgtagcagcttcgcgtgttgtcgcagcagagtccgagtggaaatgggtccgcttcagctgatttggattatg

SEQ ID NO: 201522 - DNA, 429 bp, Gossypium hirsutum
gggaaatccaagttcataattggtgatggcaacaatgtatgtgagttcacttatgttgagaatgtggctcatgctcatatttgtgctgaacgagctctagcatctggaggagaagttgcagaaaaagctgcagggaaggcatattttataaccaatttggagcctatcaagttttgggagtttgtttctctaatacttgaaggtcttggctatcagaggccaaaaataaagattcctgccattgttgtaatgccaattgcacatattgtggagtggacatatcggctattaggcccatatggtatgaaggttccacagttgacaccttcaagagttagaattctgacttgcagcagatcatttgattgttcgagagcaaaggatcagattggctatacaccaattgtctcactcgaggatggtctgcgt

SEQ ID NO: 201523 - DNA, 402 bp, Gossypium hirsutum
cagttgtaaaagctgcagttgatgaaagattaagggggctggaaatttggagggaatcacagggccgggcatctaagctatatggttttaagcatgattctatgtcatcgcttaggaaaacaagtaagacaggagaattggttgattcaaaaactaatggagatctttcacgttccaagtccgaatcaatgaatgaggatgaaaatcttctttgtctgacaggagatgctaagtcggattctgttccagatcttcaacagcaggttgtacggttaaaggtcgagttgtgcaggttgctggaagagaaaagatcagctgttctcagatctgatgaactggagacagcattgatggagatggttaagcaggacaatcgacgccgattatgtgctagggtagagc

SEQ ID NO: 201524 - DNA, 425 bp, Gossypium hirsutum
  unsure (1)..(425): unsure at all n locations
gtagtctcgagttcactcattaatatgtatgtaaaatgtgggcagctagagattgctcgtactgtatttgatcaacttggttccaaggacttgatttcctggactgcaatcatgtcaggttatgccatgagtgggagaactagagaggcaagggaactctttaatatgatgccggaacggaatgtaatctcatggaatgcaatgctagcagggcatactcgtttgtctcagtgggaagatgccttagaatttatttttcttatgcggagaatgacttaaagatttgaccatgtgacgcttgntctaattttaaatgtctgtgctggcctgtcagacgttgaaatggggaaaaaggttcatggatttatctaccgacatgggttcttttccaatatatttgtaagtaatgcacttctggacatgta

SEQ ID NO: 201525 - DNA, 421 bp, Gossypium hirsutum
ctcctttcaacacatgagaatcttcatggtggtaaccaaaggcagtgtgctggtgttagtcatgatggtcatattttggtgactggggccgatgatggtttagtttctgtttggagaatcagtgaggacggcccccgtgcctctagacgactgctgttggaaaaagtgctttgtggtcatacagctaaaatcacatgtcttcgtgtcagtcagccttacatgctggttgtgagtggatcagatgactgcactgttatcatatgggacctaagctcattagtatttgttaggcagcttcctgagttcccagcaccagtttctgcagtttacgtgaatgatttatctggggaaattgtgacagctgcttggattctgcttgctgtttggagcatcaatggggactgtctagcagtaattaata

SEQ ID NO: 201526 - DNA, 407 bp, Gossypium hirsutum
ggatcccccctctgcaagaattccacacgagcctgctttttctgatatcaagtctgctaaatactccaatgatgttattgatgaaaagaagatcgtaattggtgagatgatccccaaattctccggtcaacattttgacaactatatggctcttgctgagaaattgcgtcctgattatgaatttggtcatactttggatgctaagtaccttccccacagcgagtcatcagtgactggccctgtcatcagacttttcaagccttttgatcaactctttgatgacttcaaggattttaatgtctaaactctagagaagtttgcttaagaatctagcattcctattgtgactctctttaacaatgacccaagcaatcaccccttcattatcaaattctataacagtcccc

SEQ ID NO: 201527 - DNA, 417 bp, Gossypium hirsutum
  unsure (1)..(417): unsure at all n locations
gcgacttccaccatgaaaacaagcttcatagccattatcctagcgggaatggttgctggaatggtgaaagctcaatgcggcaacacttgctcggcgaccgagtgttgcagtcggttcgggttttgcgggacgggagacgatttctgcggagtgaattgccgagggggtccttgtgttaacaatggggtctccatagctgccattgttacgcaggaattcttcgatgggatattgaaccaggcggcttccacttgtgtaggaaggagcttttactcgagaggggtgttccttgatgctctcaattctttcactcagttcgcaaggattgggtcggttgaggattctaagcgtgagatcgctgctntctttgctcatgctacccatgaaactggaagtaagcatctctttttgctctta

SEQ ID NO: 201528 - DNA, 432 bp, Gossypium hirsutum
ggttgagcttgaaaatggtgttgtttgttcatgttcttgttgtggtagggtttggtatcaatggagtttatggattattatcttcttctacattgagaaatattgataatataaacatggaagggccatatttaggtataatagtgccaaattcctttgagatgaatcctttgttgcaaactggtagctttctggaagatcataagatgccttacttggattttgcagggagaaggtttcgaataggtcggttggaaaatgaaagggttattatcgttatgacagggttgagcatgctaaatgcaaggatagctacacaattgctaattactatattcaaggtgaaaggaattttgcactatggaatagccaggaaatgcaaagtcacagcttcaaattggagatgtaacaatccctcagttttgggctcat

SEQ ID NO: 201529 - DNA, 426 bp, Gossypium hirsutum
ctgtgtttgagccctcaagcatgatggcgaagtgcgatccgaggcatgggaagtacatggcatgctgcctgatgtatcgaggagatgttgtgcctaaggatgttaatgctgctgttgctactattaaaacaaagaggactgtgcagtttgttgactggtgcccaactggtttcaaatgcggtattaactatcagcccccaactgttgtacctggaggagatcttgctaaggtgcagcgagctgtttgcatgataagcaataatacagcagtggctgaggtgtttgcacgcattgaccacaagtttgatctcatgtactcaaagagagcttttgtgcattggtatgttggcgaaggcatggaagaaggtgaattctcagaagcccgtgaggatctggctgctcttgagaaggattatgaagaagttg

SEQ ID NO: 201530 - DNA, 432 bp, Gossypium hirsutum
gcggcggctgctgcttctcaggcagccgcagcctccgttggcgtctctgatgacgtggcggttgtagaaggttgtattgacaacgatagtgtacagattggggattcatatgattccaagacatcgtttttgatctccgatgggagcatcactgttcatgctggtgaaagattaggtcgcggtatagttactgatgcaattactactccagtggttaatacttctgcatatttctttaagaaaactcaggagcttattgacttcaaggaaaaacgccatacaagttttgaatatgggcggtatggaaatccaacaaaatttattggtggacacaatgatgtccttgctggttgtataagtggttctgagaaagtggttacagaaattcgtactttgcatcatattttgggtggtactctcaacccaaatgct

SEQ ID NO: 201531 - DNA, 440 bp, Gossypium hirsutum
cttatgcgtgatttatgcttgtcaaaggccaaacaacaaaattttatgcatattattggttctctcccatcttctacgtattctagaccaacacctgtaagcaagatccgtagatgtgctatccatttggatcaaaacaaccaagatcctggtttgccagaataccagaaaaatcctaaccttaggtccttattctttttccgtccaaaaaaacatagaatacataatgagcgccttttgaaatctgtgtttgacaaattcaaattgcttaaagtgttggatcttgaaagaattaaaggacttgaggagaaattacctgaagatataggatttcttgttcagatgagatttttaagtctgaagaaaacacgtataagagaattgccgacatctttggtcaatctgattggcttgcagactctgaacttgcaaacaattga

SEQ ID NO: 201532 - DNA, 419 bp, Gossypium hirsutum
aaagactcaaagacaaagaaagcggccatggagaaggaaagagagcaacaagtttacttggcaaggctcgctgagcaagctgaaagatacgatgagatggttgaggccatgaagagtgttgctaagttggatgttgagctgactgtggaggagaggaatctgttatctgtgggatataagaatgtgattggagcaagaagggcatactggcggatacgtgtcttcaattgaacagaaggaggaggccaacggtaatgaacaaaatgtgaagaggataaaggattataggcaaagggttgaagatgagctctcaaaaatatgcaatgacattctctcagtcattgataagcacctgattccatcttcctccaccggggaatcaactgttatctactataagatgaatggagattattttc

SEQ ID NO: 201533 - DNA, 242 bp, Gossypium hirsutum
atccaatacaagacacggattgcaccaaatcagcacatatggatggttcacgtaaagctgctaggggtatctaagacacttgcggattctatcatccaaaatgagtcaaccctacacttggtgctgcgaatgcgtagctgaatgcagattatagtgaaaacttttactggaaaaactattacattgaatgagcaaagactcacatcatatgataacgtgaatgccattgatcagaacaagga

SEQ ID NO: 201534 - DNA, 427 bp, Gossypium hirsutum
gttgagaaagtgaggattaagtgtctggggtatcaagaaagggctaagatttctaagaatccaactgggaaaaagctgtttgagattatggttaagaaagagagtaatctctgtttggcggctgatgttgccactgctgctgagttgcttgatattgctgagaaggttggacctgaaatttgcctattgaagacccatgttgacatattccctgatttcactccagagttcggatctaagcttcgcgcgattgcagaaaaacataacttcatgatatttgaagaccgtaaatttgcagacatcggtaacacagtaacaatgcagtatgaagggggtatcttccgtattttggaatgggctgatattgataatgctcatataatctctggtcctggaattgttgatggtttgaaattgaagggtctgc

SEQ ID NO: 201535 - DNA, 382 bp, Gossypium hirsutum
agccaaatttgaacatcaataataaggggaaagcaagtttggaaaaacagagtaaaagggggaaaaagttgagaacaaatgggagatgttattttgtttgtcgataatttctcatcgaattcttcaatttcactctgtagaatttgccatgaagaagagttggaaagctttaagagcttggaagttccttgtgcttgttcaggcactgttaagtttgctcatagagattgtatacagagatggtgtaacgagaagggaaacacaacttgtgaaatttgtcttcaagaatatgaaccatgatatacagtaacagttccttcaaagaaggctcagctgattgaagatgctgtaaccatcagagatagcctacaaattccaagaa

SEQ ID NO: 201536 - DNA, 355 bp, Gossypium hirsutum
gttgacaaagtgtggattaagtgtctcaggtatcaacaaagtgcgcatatttctaagagtccgactggtaaaaagctgtttgagattatggttaataaagagagtgatctctgtttagcggctgatgttgccactgatgctgaattgctcgatattgctgataatgttggacctgtaatttgcctattgaagacccatgttgacatattccctgatttcactccagagttctgatctaagcttctcgcgattgcacaaaaacataacttcatgatatttgaagaccgtaaattttctgacatctgtgacacagtaacaatgcagattgaagggggtattttccgcatttttgaat

SEQ ID NO: 201537 - DNA, 333 bp, Gossypium hirsutum
aacacaccccgtattattatcatggacgttgcttcaattgggggggttcccatactaattgcttgctccatctgcatcattcagagggccataaagaccccacatcaattactcaaaactgatcatgatgaggttattatggctgactgcttgcagctcgactttgacactgatcgtacagcaactaataactttactgatgcacataatgcttgtccaatagtaggatatcgagctgtttacaatgctcaacttccaaatggagaagaggttgctgtgaaacgactagtctgagattctgtacaaggtgacctgtaattgcagaatgaactc

SEQ ID NO: 201538 - DNA, 329 bp, Gossypium hirsutum
gcggcttccacttgtgtaggaaggagcttttactcgagagggggggtccttgatgctctcaattctttcactcagttcgcaaggattgcctcggttgaggattctaggcgtgagatcgctgctacctttgctcatgcttcccatgtaactggacgtaagcatctcttcatgctcgtaatcttctgattaaaacctgtctagacacgtcacgtatagggtttgaagtgcctatgctgggatttatgtctaatgttgactattacacttgtcgacaacatgaggaagtgactggctcacaaggtctttttcttaatgagcgactacacgcc

SEQ ID NO: 201539 - DNA, 318 bp, Gossypium hirsutum
aacacactgacctcagaaagagcacccaaaagaaaaagcactgatcaacgaaggatctctagggttttttttcggtatcagcaagcgatggcaatggctgctctcagacgcgaagggaggcgtttcgcccctctgatctctccccgtccaattactgctgtccgatcctctcctatcgttcccactcacgaatatgagggtccgattggtgtacgttatatttcaacccaagtcgttagataccggatgaacagtgataagaatattcagaaaattacataggctatgaagatggttgctgcctcagagttgagagca

SEQ ID NO: 201540 - DNA, 225 bp, Gossypium hirsutum
gtcttttagaggaggaaatgcatcatcgggcatgggagtggctgaacacagcataagcacgtacctggaactgcatagaaagaaggtgttccgatatgtcatcttcaagattgatgagaagaaaaaggaggtcatagttgaaaagactggacgtccgacagagagctatgatgatttcgcagcctcattgccggagagtgactgtcgctatcatgttatgacttc

SEQ ID NO: 201541 - DNA, 435 bp, Gossypium hirsutum
gttccattttccctaacaaacctgcatcagatccgatcagatttagctcagatccatccgtatcgggtcttctaaattccagatctttacttttctcgagtaaaggaagaaagaggaagggagagatgagagagattattagcgtccacattggccaagctgggattcaggttgggaattcatgctgggagctttactgtcttgaacatgtaatccaccccgatggaacaatgccgagcgacacctcaatgggcgtcgcacacgatgctttcaacactttcttcagcgaaacgggttcgggaaagcatgtgcctagagctgtctttgttgatctggaacccactgttatcgatgaagtccggaccggcccttatcgccaacttttccaccctgagcagcttatttccggcaaggaagatgctgctaataattttg

SEQ ID NO: 201542 - DNA, 422 bp, Gossypium hirsutum
  unsure (1)..(422): unsure at all n locations
aaaagattgaggatgttgccaaactcctttgctgggagaagaagcatgagaagggtgaaattgccatttggcaaaagagagtcaatgatgagtcttgtcgtggtagagaagatgattctcaagccaaattctgcaaggctgaagaggctaacgatgtctggtacaagaaaatggatgtgtgcgttactccataccctgatgttagtagttcgagtgaagttgctggtggggaattgaagccattcccagagaggctatttgctgtccctcctagaattgctagtggaagtgttcctggagtttcagttgagacatatgaagaggacaataacatatggaagaaacatgtcaatgcatataagaaaatcaatagacttattgactctgggaggtatcgtaatatnttggatatgaatgcctga

SEQ ID NO: 201543 - DNA, 430 bp, Gossypium hirsutum
accattttccgtgaaaaaaagggatgcaactgtagttgcaaagctaaagaaagggaagaagcatgaatatccatggcctgcagatccagatccaaatgtgaaaggcggggtcctaactcatctctcccatttcaagcctttgaaagaaaagcaaaagcccgttactttggattttgagaagccccttgttgaaatcgagaagaagatgattgacgtgaggagaatggcaaatgaaactggtttggatttcagtgatcagattatattgttggagaataagtatcaacaggctctaaaggacttatacacacatctgacccctatacaacgtgtacacattgcccgacaccccaatagacctacattccttgatcatatatttagcattaccgataagtttgtggaacttcatggagatcgatcagggtat

SEQ ID NO: 201544 - DNA, 407 bp, Gossypium hirsutum
gttgaagtctgaagaatgcttgagaaaggaaagggagagagtgtgtgattacctgcattcaagcagtgagacaaaattgttagagaaagtgcaacatgagttgttggtcacatatgcaaatcggctacttgaaaaggagcattcaggatgcatggccttgcttagagatgacaaggtggaggatctttctaggatgtacaggctttattggaaaatacctcgaggcttggagcccgttactaatgtattcaagcagcatgttactgctgagggtacagccttggttcaacaggcagaagatgctgcttcaaatgctcccggtgtgcaggaacagggccttataagggaaataatcaagctgcacgacaagtatatggcatatgtgaccgactgttttcaaaccatac

SEQ ID NO: 201545 - DNA, 228 bp, Gossypium hirsutum
gctggatttgggtgctacgaggtccctagtcgagacatggttccgtaatcttcccatggttcaacctttctatgcagtcaaatccaaccctaaccccgctttcctcaaagaaatggcagctctcggcaccggctttgactgtgcaagccttcctgagattgaaaccattttatcgcttggggtttcgcctgatcgaatcggtttcgcaaacacatgccaacccgagtc

SEQ ID NO: 201546 - DNA, 425 bp, Gossypium hirsutum
  unsure (1)..(425): unsure at all n locations
gagctacttaaccatttcccaaatctcctccctcctcttctttagcgtccttttcatttccgctcatgcagcgcgctttgaaatccgcaatgagtgctcctacaccgtctgtgcagcagcctctcctcgtggtggccgtcgcctagaccctcggcaaagttggaccatcgatgtgcctgctggcactgctatggctcgtatttggggtcgaaccaattgcaatttcgatgccagtggtaggggtcattgccaaaccggtgattgtggtggactccttcaatgcaaagggtggggtgtaccttcaaacaccctggctgaatatgcacttaaccaatttggaaacatggatgtctacgacatttccttaggtgatgggttttacatncccatggtgtttggtccaactaatggcgggtggcacaaca

SEQ ID NO: 201547 - DNA, 426 bp, Gossypium hirsutum
gctacttaaccatttcccaaatctcctccctggtcttctgtagcgtccttttcatttccgctcatgcagcgcgctttgaaatccgcaatgagtgctcctacaccgtctgggcagcagcctctcctggtggtggccgtcgcctagaccctcggcaaagttggaccatcgatgtgcctgctggcactgctatggctcgtatttggggtcgaaccaattgcaatttcgatgccagtggtaggggtcattgccaaaccggtgattgtggtggactccttcaatgcaaaggttggggtgtacctccaaacaccctggctgaatatgcacttaaccaatttggaaacatggatttctacgacatttccttagttgatgggtttaacatccccatggtgtttggtccaactaatggcggttgtcacaacattc

SEQ ID NO: 201548 - DNA, 430 bp, Gossypium hirsutum
gccatgtgcacattcatcacataacggtctatgcttcggcaggatcaccatatactgttggtatagtcccagattcttcggataacatttgcattgaggactgtagcattagtatgggtcatgatgcaattgccctcaaaagtggctgggatgaatatggcattgcttatggcatacctaccgcaaatgtccatatcaggagggtccaacttcagtcattctcaggctcttctcttgccttcggtagtcaaatgtccggtggcatttcggacgttcaagtgcagcagctccacctctatgactcattaactggtattgagtttagaacatcaaagggtagaggtggttatattaaagagattgctatatcagatgttgacatgctgaacattaaaacggcattttgtgccaatgggcattttggatccca

SEQ ID NO: 201549 - DNA, 408 bp, Gossypium hirsutum
cagtatagtaatataccaagcgtttgctgaaatggaggttaagctatggaacgacaagcgcgagagagaaatgtatgagaattttgcggagctgtatgccattatcaaggcaacagagaaacttgaaaaagcttatgtgagggatattatatcatcatctgaatatgagactgaatgccaaaagcttattgcccatttcaagaccttggcttcaacactcaaagatactgtccctagtattgaacgttttgcagatacatataaaatggactgtccggctgctataaatcgtttggtgacctctggggttccagccacggtggagcaccgggccgcggcggctgcctcagcgactacctcggctgccattgtggctgaatgtgtgcagaattttattactgccatgga

SEQ ID NO: 201550 - DNA, 429 bp, Gossypium hirsutum
gagattttaacatacaaaaaaaaaaccaaaaggaaaactgaggctctaatttccaaactccattacagattagatataacggagagcagtttttgataagaaaagagacggtaaaaggaaattaaagatgtcaacagcttcttcattgtgttcatcaactcaagttaatggctttggagggggacttaggcttctaagaacccatctttctcaacccagttccttttcttttactaggaggagaactgctacagtagtgaaggcaactgctcgagtcgataaattttcgaaaagcgatatcattgtttccccatctatactctctgctaatttcgctaagttggaggagcaggtgaaagccgtagaagtggcaggctgtgattggatccatgttgatgtaatggatggcccgattgtccaaacaatacg

SEQ ID NO: 201551 - DNA, 305 bp, Gossypium hirsutum
ctgcggcgtattgcttctcggcaccaaggccagggtgtagcaacaacacatgtggcgtcacacctgataattccgtcacccacgtcgccacttccggtgaggttgctcaagatgttgtgtctatccaatcgactgacgggaaaaatcctggcagagtagttagtgtacctaggttccttttcgcatgtgcgccgagtttcttgcttcaaggtctggctaccggcgttgtgggcatggctggactcggtcgaactcgaattgcgcttccttcacaattcgctgcagctttcattttccataggaaa

SEQ ID NO: 201552 - DNA, 430 bp, Gossypium hirsutum
aaactctgaaaagtttcatagctttttcatctgtctaatggcgtacgcttttgtgcccattcgcaatgcatagaattgtattgcaaagagaaatcagaagcagagcttcccacaaggctctttcttggttcagttcttctaatctttttaggtctgttcattctttaccttttgcaactgtggaagccgaagggatatcgggttctcaacctgctgaagtacaaaacttggtgcaaggtaaatggactggatctgcagcgtggaacacacttgtggatcctctgaatggagaaccgttcattaaagttgcagaagttgatggaaatggaattcagccatttgttgagagcttgtccaagtgcccaaaacatggtttacacaatccattcaaatcacccgagagatacttgttatatggagatatatctgc

SEQ ID NO: 201553 - DNA, 230 bp, Gossypium hirsutum
gtgttggatgtggtttatagagattgcttccttaatggggcatgggaacagggattcagcggatacttaccactgaaatagtgaaatcaaatcttcctacccagactgtaataagcacatctcgataaacattcaactatctaataatgatcactgcaacttgttccacagttataatgtagacagattttggctatgaaattgctgcttccaaaaacatcattgaccat

SEQ ID NO: 201554 - DNA, 440 bp, Gossypium hirsutum
  unsure (1)..(440): unsure at all n locations
atccatagctcatcaaagcattaattgataactgaaaacgtgttgttgagtgctcgactgctagttgccaatggtgaagactgatctgcagaagattcaagttcaaccacaaccatcaaagcaaatgaaggcattaacatcacccacaccaccaccaccatcctcatcagcatgcaaaaagaagaaatataagggtgtaagaatgaggagctggggttcttgggtgtcagagattagggctccaaatcaaaaaacaagaatctggttagggtcttattctacaccagaagctgctgcaagagcctatgatgctgcacttctttgcctcaaaggttcctcagctaatctcaacttcccaatcacatcctcacattacatccctgaccctgacacccctttgtctcccaagtcaatacanagagtggctgctgcagctgcta

SEQ ID NO: 201555 - DNA, 356 bp, Gossypium hirsutum
catttgtgttgcttgatacccgagacaacagctacattgttgcgggagatgctattggggtcgcatccctctacattggctggggacttgacgggtcggtttggatatcttcctaaatgaacggattaaatgatgactgtgaacactttgagtgctttccttctggtcacttgtactccagcaaatctggaggatttagaatatggaacaatccatcatggatctctgaggccattccatcagatccatatgatccacttgttctaagacgtgcttctgaccatgctgtgatcaaatgactgatgactgctgaaccatttggagtaattgtatctcaacttatttcaacttcttaa

SEQ ID NO: 201556 - DNA, 304 bp, Gossypium hirsutum
aaaattgaagcacgtttaaggaatgttttgaaaggagatgacgatattcgtagcgcgaaaaccacggtttctatggccgtaactcataccgaaagaaggttgcatcaaatgatgttcgcagatcgtgattactaacggaaaccgattttggaacataagtcggagttctcagctgtcaccgtgcaaaactgtgtagaaaggggttattctgttgtgtatgctcaatacagggtccgaactcaatttcaactttatgatgtttgcatatttccagactttagcatttttcacaatcctatcattt

SEQ ID NO: 201557 - DNA, 436 bp, Gossypium hirsutum
gccttaagcatcattcttttaaagacgctgcagagcatgagaaagcttcgaaacctgcatggcttttggctcttgaaattgctacaggaattatggctgggtctctctttcttgtcgcgattcttactgctttccaaagatgcagaagcaagcctgcaattataatcccttggaagaaatcagggagtgaaaaggaacatttgatggtgtacgtagattcggagttgttgaaagacgttacaaaatttggcagacaagagcttgaggtatcttgtgaagacttcagcaacattattggttcctcaccagacagtattgtctacaaagggaccatgagaggtggtcctgaaatcgctgtgatatccctctgtattaaagagcagcactggacaggctatcttgagctctatttccagagagaaggtgcagatttggc

SEQ ID NO: 201558 - DNA, 392 bp, Gossypium hirsutum
gagcaggtagggagaatctgagagctgctaagaaggagttcaacaaaacagaagatgatttgaagtctcttcagagtgttgggcagatcattggtgaagttctcaggcctcttgataatgaacgcttgattgttaaagcaagcagtggccctcgttatgttgttggttgccgcagtaaagttgataaggagaaactgacttcaggaactagagtggttcttgacatgacaacacttactatcatgcgggcacttcctcgtgaagttgatccagttgtttacaacatgttgcacgaggatcctggtaatgttagctactcggctgttggtggtttatctgatcaaattcgagagcttagggaatctattgagctcccttctatgaatgctgag

SEQ ID NO: 201559 - DNA, 416 bp, Gossypium hirsutum
gcggcggctgctgcttctcaggcagccgcagcctccgtgcccgtctctgatgacgtggcggttgtagaaggttgtattgacaacgatagtgtacagattggggattcatatgattccaagacatcgtttttgatctccgatgggagcatcactgttcatgctggtgaaagattaggtcgcggtatagttactgatgcaattactactccagtggttaatacttctgcatatttctttaagaaaactcaggagcttattgacttcaaggaaaaacgccatacaagttttgaatatgggcggtatggaaatccaacaaaatttattggtggacacaatgatgtccttgctggttgtataagtggttctgagaagttggttacagaaattcgtactttgcatcatattttgggtggtac

SEQ ID NO: 201560 - DNA, 422 bp, Gossypium hirsutum
ctctttcaaggattctgcttgtaggtgctttgggtacatggtttccaagaagaaatacatctataccattgatgatgactgctttgttgctaaagatccatctggcaaagacatcaatgcattggaacagcacatacagaacctactgagtccatccactccatttttctttaacactctttatgacccataccgatccggtgctgacttcgttcgtggctaccctttcagtctccgtgagggtgttcccactgccgtcttacacggtctctggctcaacatcccggattatgatgctcccacacagcttgtcaagccactcgagaggaacaccaggtatgtcgacgctataatgacgattccgaaaggaaccctttgtcccatgtgcggaatgaatctggcatttaaccgagaaatgatcg

SEQ ID NO: 201561 - DNA, 429 bp, Gossypium hirsutum
cacctctcttagcggtgaaataaaaagttgtcaaaaccaaggaatcaaggtcatgctctcccttggaggtggcgcgggaagctactcactcgcttctcaagaagacgccaaaagcgtagctgattatctatggaacaacttcttgggcggtacctcgtcttctcgtccgttgggtgatgctgtgttggacggaattgattttgatattgaggctgggtcaggtcaatattgggatgaccttgctcgttctttatcagcttatagtagccaaggaagaaaggtgtatttaacagcagctcctcagtgtccatttcctgatgctcacttgggaactgccattaatacaggtctctttgactacgtatggattcagttttataacaatcccctggctcaatgccaatacgcttcgggcaacaccaaagacat

SEQ ID NO: 201562 - DNA, 435 bp, Gossypium hirsutum
  unsure (1)..(435): unsure at all n locations
gagaggttgtgtttccaagagttcctgatgtattgcaacgactctgtgtttcttgtacacaaatcttcagaggccctggatttgtccctcctgcttctgatgtaaacaagctatgcgatattcttgataagatgaagccagaagatgttgggcttagcaaaagtctgcagttcttcaagccaacgggtgctgtgaatgggactccaagggtcacttatactaccatttaccaatgtgaccagttctcgttgtgcattttctttcttccggaaacggctgttattcctctccataaccatccagagatgactgttttcagcaagcttttactggggaaaatgcatataaaatcatatgattgggtcgagcctaaagactcaataccaccctccaaattgaggttggcaaggttgaaagccaatancgtgtacacgg

SEQ ID NO: 201563 - DNA, 435 bp, Gossypium hirsutum; identical to SEQ ID NO: 190406

SEQ ID NO: 201564 - DNA, 396 bp, Gossypium hirsutum
cttaactttctctccaaagcaaaccgtctcgtttactctacaatcatcgcaaatggcgtcttttactacgttatctcaatcgcctccaaagctattgtttcgtcagttgttcgagaaagaatcatctacttatacttaccttcttgctgattgttcccaccctgataaaccagcgcttttgattgaccctgtagacaggactgttgatagagatttaaatttggttaaagaattggggctgaagcttatttatgctatgaacactcatgtacatgctgatcatgttactggaactggcctcatcaagggcaaggtgcctggtgtcaaatccgttatttcaaaggccagtggttccaaggctgatgtttttgttgaagctggtgacaaaatctcttt

SEQ ID NO: 201565 - DNA, 431 bp, Gossypium hirsutum
gctttagatctgaagtaaagtaaaagcccagaaatctgtgcttaaaataagatctgggttgcgacttctgctgctaggtgtatgtcatttagtctggtaaagtgctgtttctagctggtcaagaaggctaggttgaagtggtcgagtaaatggcagtaatggatgcacaaaaccctcttctaggagaaaccacttgtggcactttactgcagaaactgcaagaaatatgggatgaagttggtgaaagtgatgaagagagagacaagatgcttcttcagatagagcaagagtgcttggatgtgtataaaaggaaggttgagcaggctgcaaaatcaagagcagaacttcttgtgaccttgtcagatgccaaactagaactttccacacttgtatcagctcttggagacaaaagttttcttggtgttgatact

SEQ ID NO: 201566 - DNA, 429 bp, Gossypium hirsutum
ctctgctcgccgccttcacttctctctctctggctctcgctctctaatctcactcagcctgctaaaacagagcattaccctttcgagttcaagacttcaagctggcgatcgaaaatcaagaatccactgtccgtgaaattaagcctaagaacagaagaatcatgggtgctggtggacctgatgaagaagacaataggtggccgccatggttgaaacctttattaggagaacatttcttcgttcaatgcaagcttcatgctgattctcacaagagtgaatgcaatatgtactgcttagattgtatgaatggcgctctctgctctctctgccttgctcatcacaaggatcatcgttatattcagattaggaggtcctcataccatgatgtgacaagggtatctgagatacagaaatacccggatatttctg

SEQ ID NO: 201567 - DNA, 433 bp, Gossypium hirsutum
aaaaaatcttctgatttttctgagtctttttcttatcttctgtttggctcctgagaaagtgttttaagaagaacaatgaatgcattagtggcaaccaacagaaacttcaagctagcagccaggcttcttggtttggattctaagcttgaaaagagtctcctcattcccttcagggaaatcaaggttgaatgcaccatacccaaagatgatggcacattggcaacttttgttggctttaggattcaacatgacaatgctagaggtcctatgaaaggaggaatcagatatcaccctgaggttgaccctgatgaagtgaatgcattggcgcaactaatgacatggaagacagcagttgcaaacatcccatatggtggggctaaaggtggtataggatgtaaccctggagagttgagcaaatccgaactagaacgcc

SEQ ID NO: 201568 - DNA, 426 bp, Gossypium hirsutum
  unsure (1)..(426): unsure at all n locations
gttttgctctcgatctctccgcccaaatcttgtagacgccaagcagataaattttgtgattactcttttctttctcagatcccttcgaaagcgattcttcttcttctttttattctttttaaattgaattgaagttgctgattcgaaatgagtacggccgaccttctcagcatcgagcctttagagctcaagtttccttttgaactgaggaagcagatctcgtgtgctcttcaattgtcgaataaaactgataattatgtagctttcaaggtgaaaacgacaaatccaaagaagtactgcgttcgtcccaatacgggggtcgttttgcctcgatccacatgcgatgttgttgttaccatgcaagcgcaaaaagaggctccttctgatatgccaatgcaggacaaattcctncttcaaagtgtaaag

SEQ ID NO: 201569 - DNA, 410 bp, Gossypium hirsutum
gtgtaacatgttcgactcaaggagactatagagttgttgctgaactggaagtctatgcagtatccatcattggtccttttcctattgctgtaactaatttattggatttaacaagattggatctccataacaacatgctgactggcccaattcctgcacaaattggccggctaagacgacttagaatgttaaatttgaggtggaataagctccaagatgtccttcctccggagattggggagcttaaaaaactagcccatctgtcattgagctttaataattttaagggcgagatcccgaaagagcttgcaaatctaccctagctccaatatctctatcttcaagaaaaccgtgtcactgggctaattccacccgaattgggcactttacaaaaccttacgcacttggat

SEQ ID NO: 201570 - DNA, 439 bp, Gossypium hirsutum; identical to SEQ ID NO: 190766

SEQ ID NO: 201571 - DNA, 426 bp, Gossypium hirsutum
  unsure (1)..(426): unsure at all n locations
tgaggtttctaagatgaagtgtagtattagctttttcaaattccagattcatgttcagaattcatcattttttaggtgatagaatcaagaggatacagggatcagtgactcagtcctgcagaaatgatgactgaagaagatgatctatatccatctagtgttaagatgagataccccattttcattttcttcaaggatgtcagacatgttttcaaactggacgaactgggatcagagatagcacaaattgctttgcctgcggcactggctttgacagccgaccctattgcttctcttgttgacacagcattcattggccaaataggtgctgtggaactggctgctgtaggagtctctattgccttattcaatcaagtctcaagaattgcgatattcccgctggttagcgtcacaaccctncttcgt

SEQ ID NO: 201572 - DNA, 317 bp, Gossypium hirsutum
accagttgtttgtctcgttggtctcggtctctatgcacgaggcttgccattggtaatttttctttgaacactttaatgcttggttgggacaaataatatgctgatataaataatgcagttaatgtatgatacatcttggtaactgcgtggaaatcggcctgcctatgcttattctactgattatatctcaacagtacctgaagcgtgtccactcgagagcccatctaatactcgagaggtttgccttgcttatttgaattggaattgtgtgggcttttgctgctatcctaaccttgacaggtgcttacaacaacatt

SEQ ID NO: 201573 - DNA, 441 bp, Gossypium hirsutum
gcttgtttatgagtacgttgacaatgggaatttagaacgatggcttcacggagatgttgggccttgcagttctcttacatgggagatccgtatgaatatagtgcttggaactgcaaaagggtaaacgtttggttaactgataatgttagcacagcttgaattgtccttggttttttcctccatgtttgctgacaatgatgttgtctgccaaatttgaaacttgatttaggttgacatatctgcacgagggactcgagcctaaagttgttcatcgcgatatcaagtcgagcaatattttgcttgacaagcagtggaatccaaaagtatctgactttggcctagcgaagcttttgggttcggaaaggagctatgtgacaactcgcgtgatgggaacatttggatttgtggctcctgaatatgctagcactggcatgttaaatg

SEQ ID NO: 201574 - DNA, 426 bp, Gossypium hirsutum
agtaacactaatggttgtgatgatatcaacgaagatgagccagatgctaaaagatggtaagcttggatcatagccaaaaatgaaaaacagattctcccattaatgggttcttgttttagcttacgcttttgtgattttttttttttgcaggaaaggtgaaaatgagaatgagggtatggtaggttgtggtagcaaaactgtgaaagagcctagaatagtggtgcaaacaacaagtgatattgatattcttgatgatgggtatagatggaggaaatatggacagaaagtagtcaagggaaaccccaatccaaggttagtcattattctccacctaattgtctactaataggaaacctggatgtgcagtttattcaactaaaattgttgacttcgtcaaaatcttttatacaggagctactacaaatg

SEQ ID NO: 201575 - DNA, 429 bp, Gossypium hirsutum
gccattggtgattgaattgagtttgccacatggggatggggatcaactaggtgctgttagcaaggtttacacacctacagaacatggagttgaaggttcaatatggcagttggctaaagcttatgttgctgtaaatgactctggtgttcatcaactcataagccattggctgaacactcatgcaacaatggagccattcgtgattgcaacgaaccgacaacttagtgtagttcatccaatttataagcttctctatcctcacttccgggacacgatgaacatcaatgcttttgctaggcagattctgattaatggaggtggtgtcctggaattaacagtttttcctggaaagtatgcaatggaaatgtcatctataatttacaagagttggaatttgtttgaccaggcactcttagagatcttaagaaa

SEQ ID NO: 201576 - DNA, 422 bp, Gossypium hirsutum
  unsure (1)..(422): unsure at all n locations
tttgcgtgtcttctcatctctgctttttccccctttttatctttcttcttctttttcttcttcttcttcttcttcttcttactccagccgactttttccggcaaaacggtgtcagatctttgtgatctatagccggaagtttcatttcgagttcgacgatctcatccttcgatctttccactttcttcagcctaccatgaatcccgaatatgactatcttttcaagctacttcttattggagattccggtgttggaaaatcttgccttcttttgagatttgctgatgattcatatgtagaaagttacataagcaccatttgggttgattntaaaatacgcactgtggagcaggatgggaagaccattaaacttcaaatttgggacactgctggtcaagaaagatttaggacaattactagca

SEQ ID NO: 201577 - DNA, 424 bp, Gossypium hirsutum
ggaaaaggcttttggtactggctacagtttgggtactggtcacggttattcaagtcatcaagaatgatgtggttccctgtaccactttgtattgggtattgtttagcttacagttccccatagcaacactggtttttggatatgaagcaactaaattatacaaagaacataagaagagaatgagcactgggaatgctgaaacagtttgtggagcttcaattcaatggagtccattgaacattgcattttgtgcactttgtggcatcttgggaggcactgttggtggattgcttggttctggtggtggattcattttgggtcctctcctccttgaaattggtgtgattccacaggttgctagtgcaacagcaacattcgtgatgatgatctcttcatacttgtgcgttggtgaattctatttgct

SEQ ID NO: 201578 - DNA, 338 bp, Gossypium hirsutum
ttgagagtggaaggacatggttgccataaaaattgaaggctgagttcagaagtatcgagaggcagacatgatagagattgagacgttgcatcagcttatacatcatgacaaaggcggcaaccgttgtgtgcaaatactgtactggtatgactatcgtaaccatatttgtattgtgttcgaaaagctcgctccacacttatactatagtctacgcattaacaattatcgatcatttaccatagaatttgtccgcgagattggcagacaactattgaaatgtgtaacattcatgcttgatttgaacctgatacacacagacttgaagccataaaacattc

SEQ ID NO: 201579 - DNA, 427 bp, Gossypium hirsutum
ccaccctccaatcctccggatcttaacacacaggtccataattgttgtgtgtgggaaaacgaaataggggattcatggaagagaggcatattctgtttgggaaatatgagatggggagattgcttgggaaaggcactttcgccaaagtctactacgcgaaggaattaaaatcgggtgaaagcgtcgcgataaaggtcatcaacaaagctgaggtaaagaaagaaggcatgatggagcagatcaagagggaaatctctgtgacgcgtctagttcggcatccaaacgtagtggaactcaaagaagtcatggcgaccaaaaccaagatcttctttgttatggagtacgtccgtggcggtgaactattcgccaaagttttcaaaggcaaactcagagaagaggctgctcgtaagtactttcaacaactgat

SEQ ID NO: 201580 - DNA, 448 bp, Gossypium hirsutum
ggattaagcatcaagggatcctgatttgaacaagctttttagtaatgggcttgcttgttcatccaaggtcatcactagtgtaatcctgtcgagttacaaacaagggttgagctccattggatcattggttgatgttggaggtgggattggaggcttaatatcagagatcgtcaaagcatatccacacatcaaaggtgttaattttgatttgccgcatgtcgtctcgacagcaccaacatacaatgcagtctcccatattggtggtgacatgtttcatgacgccattccaaatgctgacgcagtcattatgaagtggatattgcatgattggactgacgaggaatgcataaaaatattaaggaattgtaagaaagcaataccaagagagaatggaaaagtgatacttgttgaaataattttgaaagaagatggaagtggagtgtttgat

SEQ ID NO: 201581 - DNA, 268 bp, Gossypium hirsutum
agaaactgatggcagaacatggaaaagtgcaacttgtgaatgttactgttgatatggtcattggtggaatgagaggaatgacagggttgctttgggaaacctcattacttgacccatatgagggaattcgctttaggggcttgtcaattcccgaatgtcaaaaactattaccagctgcaaagcctgatggagagcctttacctgagggtctttaatggcttcttttgactggaaagatgccaagcaaagctcaggttgatgctttatc

SEQ ID NO: 201582 - DNA, 442 bp, Gossypium hirsutum
gcccctcaactctcttctctctttccccttcactgtttcagctcaaagaaatggcggaggagaagaaggctcaatctgctggggtttggcctacggttaaaccttttgtcaatggtggtgcctctggtatgcttgctacctgtgtcatccaacccatcgatatgatcaaggtaagaatccaactgggtcaaggatcggcagcaactgttaccaagaacatgcttagggaggagggtgttggtgccttttacaagggtctatcagcaggactgctcaggcaagctacatacactactgctcgattgggatcattcaaaatgttgacaaacaaagcaattgaagccaatgatgggaagcccttacctctatatcagaaggctttgtgtggtctgactgctggtgctattggagcctgtgttggcagcccggctgatttggcact

SEQ ID NO: 201583 - DNA, 244 bp, Gossypium hirsutum
ctatggtccttattaagatgcgtgaaatcgctgaggcttacgttggtggtacagttaagaatgccgttgttaccgtccctgcatacttcaatgactctcagcgtcaagcaacaaaagatgctggtgtcattgccggactcaacgtcatgcgaatcatcaatgaaccaactgctgcagccattgcttacggtcttgacacgaatgcaaccagtgttgttgaaacgaatgccttgatctttgatct

SEQ ID NO: 201584 - DNA, 442 bp, Gossypium hirsutum
cccaactcttatgttcatagcaacatcgccggtctcgtcacgcttctcgaaatttgcaaatccgctaatccccagccagccgttgtctgggcctcctccagttccgtttacggtctcaacgaaaaggttcctttctctgaggccgacaggaccgaccagccggctagtttgtatgccgccaccaagaaggcaggcgaagaaataacccacacttataatcatatctacgggctttcagttactggattaagatttttcaccgtgtacggtccatggggaaggcctgatatggcgtatttttcgtttacgagaaatattctgcaggggaagcccatcaccatttatcggggaaagaatcgggttgatttggcacgagattttacctacattgacgatatcgtgaaaggctgtttgggatcgttggatacatctgggaaaagca

SEQ ID NO: 201585 - DNA, 420 bp, Gossypium hirsutum
gccggcggctgctggttctcaagccagtcgcaaccctcgtttcggtctctgattacgtggccggtgtaaaaaggtggattggcaaccatagtgtacagattggggattcatatgattcccagacatcggttttgatctccgatgggagcatcactgttcatgctggtgaaagattaggtcgcggtatagttactgattcaattactactccagtggttaatacttctgcatatttctttaagaaaactcaggagcttattgacttcaaggaaaaacgccatacaagttttgaatatgggcggtatggaaatccaacaaaatttattggtggacacaatgatgtccttgctggttgtataaatggttctgagaagttggttacagaaattcgtactttgcatcatattttgggtggtactc

SEQ ID NO: 201586 - DNA, 443 bp, Gossypium hirsutum
gttttgttcaagaaatatgtgcaagctacctagcaagaaactttatgtgggccatgtctaataaaattttcaaagacacgccttatgagttgttgttactttgcataaagcatccccatttgactatagacggtgagaagcacctttctgatgcactattaatttggcttcattctaatacagaacagttggaaagatcaagtaagacagaatgtgaattttttgacattttaaagcagatccgcattagccttttgccattatggtttgctgcgggaaaaagaagttctatcagtttttctgagcttgcaaatgagagtgttgactcaatttttaaactaatgaaagttacaccaaaaggatcaatgaatgttttaagcgatggtgacttgagtcatctcagaattcgattgaccaaatattccaaggtctttccttatcta

SEQ ID NO: 201587 - DNA, 369 bp, Gossypium hirsutum
cagattcagaaagaaataaaggaagaagaagcaatggccacgtcttacagtgcccacgacagttccttcggtgtctgaagattgtgaacagctaagaaaagccttttcaggatggggaactaatgagggcttaatcatagatatattgggtcacagaaatgccgagcaacgaaacttgattcgaaaaacctacgctgaaacctatggagaggatctcctcaaggcactagacaaggagctctcgaatgactttgagaggctggttttgctttgggctcttgatcctgctgaacgtgattcccttttggctaatgaagccaccaaaaggtggactttaagcaatcaggtccttatggaaatagcttgcac

SEQ ID NO: 201588 - DNA, 343 bp, Gossypium hirsutum
  unsure (1)..(343): unsure at all n locations
cttcgatgtgatagcagggaccagcaccggcggcttggtgacagccatgctaacttgtccgaacgaaaagaatcgaccattatttgctgccaaagacatcaaagacttctacctaactaattgtcctaacatatttcctcaaccaggatgtccattgttttctcgaacaacaaaagttatcaaagctctatcgggaccaaaatatgatggcaagttcttacataaagttgttagagacaggctaggagaaacaaggttgcaccagacattaactaacgttgttatcccaacatntgatgtcatgcatctncagccagctcatttttcaagctatcangtgaag

SEQ ID NO: 201589 - DNA, 428 bp, Gossypium hirsutum
ctcacctttatactcaggctatgaatcagcaaaaactctcggtccaagctggcaaacgccatggccttgaaaaaatttatcagtggatttggagacaacaagagggaggatcaagagtaacaacaatggatacccctttgtctttgttgttaatatttttgacattgaatgacgaagtacttcctctttttctctgtcaattatgtttttttacagtatttatcatgcagaactctctggtctgttaaatctttatctgtttgtaattctatcttagactcttatcagaagataaacaacatttgaatcaactcatgcatgcttcttatttctatctaaatgattttgcagctagttttgagttttgacaagtagtagacaaacttgaaagttggaaaaaaacgttgtactcttttgacattgtttaa

SEQ ID NO: 201590 - DNA, 447 bp, Gossypium hirsutum
  unsure (1)..(447): unsure at all n locations
cttaaaacaaaaaccatggttcaagaaaagaagctagtccaggacgtatctggttggctaagagtctatgatgatggctcagtcgacagaacctggactgttccccctgaggtcaagttcatggctgaaccagtctcaccccatgaacaattcattgatggtatagccactcgtgatgtcaccatcgatcaaaattcaggcctccgggctcgaatttacttgccggaggaggaaaatcccaagtttccgatcatacttcatttccatggcggtggcttttgcatcagccaagctgattggttcatgtactatcagttttacactaggttagccaaatcgattccagctattgtcgtctcggtttacctcaggccagcacccgagaacaagcttncggcagcttgtgacgatggctacgccgctctcctttggcttaaatcgntatct

SEQ ID NO: 201591 - DNA, 277 bp, Gossypium hirsutum
gccattggtgattgaattgagtatgccacattcggatggggatcaactaggtgctgatagcaaggtttacacacctacagaacatggagttgaaggttcaatatggcatgatggctaaagcttatgatgccgaaaatgactattgagttcatcaacttcataatccatttgctgatcactaatgcaacaatggaaccactcgtgattgcatcgaaccgacatcttagcgtaatccattcaatttataagctagtgaatcctgacttccgggacacga

SEQ ID NO: 201592 - DNA, 339 bp, Gossypium hirsutum
ggatcatatacggtgcagcagaactacacttgcggatacagacatgtagggcaatcatattcgtttctgctaaccacggatcagaatgcaagtagcgattactacattgtagcaagtgccaggtttgtgaatgaatcgcaatggaaacgagttaccgttgttgccattttgcgttattctaattcaaaaggaaaggcatccgttcccttccctgatccaccgcaggatgaattcaacaaaaccttttcaatgaaccaacctggaccttataaatggaatgattctgccattggtgctggcccaaacccccaggaaccgtttaaatatggtccaattaat

SEQ ID NO: 201593 - DNA, 398 bp, Gossypium hirsutum
gttttgcaaaaataccaagaattggtattgttatgggaaggcagtggcagaacaagcagcctgggaaacagccaaggaaaaaggggtggaccttgtggcgattaccccagttttggtgctgggtccattgctgcatccaactgtgaatgccagcattgttcacatcctcaagtacttaaccggctcggcaaagacctatgccaattcagttcaagcctatgttcacgtcagagatgtcgcattagcacaccttctcgtgtatgagaatccctctgccttcggccgctacctctgcgctgagagcgtcctccaccgtggtgaagtggtggagattttagccaagttcttccccgagtatcccatccctaccaagtgctcaaatgagaataacccaagag

SEQ ID NO: 201594 - DNA, 320 bp, Gossypium hirsutum
acaagaaaaaaaaacaagtgatctgataaattgaagactggatttctgttaacatgcattatgagtactgctggtcaagtcatccgttgcaaagctgccgtagcatgggagtcggggaagccactgtcaatagaggaagtgtatgtggcaccacctcagaaagatgaagtccgtattaagatactcttcacttatgtatgtcacaccgatgtctacttctgggaatgctagggacaaaaccctctgtttccttgcatactatgtcattaagcttgagggattgtggacagtgtaagctaggaggtgcctgatctaaagcc

SEQ ID NO: 201595 - DNA, 371 bp, Gossypium hirsutum
tctctctctgtcgccggcaaatggcatcaacagcatctccggggtctgaacattcacgaatatcatggtgctggcttgatgaacaaatatggaattaacgtgcctaaaggagttgcggtcttttacaatgatccactttatgaatcaatcatatgcccatatcttgagacatatgtataaatactcttatgtatgagtggctgattatctttaatattagtaaagcctcttattgtttgtcatcaatcaagtgactgacaccacattttagtgaatacttttttaaaaaaaagcatgttaaatcttagtatatataagaaatactttatataccttttaactgcatgtgttgaaaggcatgttatgatctt

SEQ ID NO: 201596 - DNA, 430 bp, Gossypium hirsutum
gccattcctacctttcttctagttcggttgactcactttggattattgcttttacagcacatccaataacaagctctttttccaattccaaccggcaaaagcctctctttcccacaaaaaaacactccccttttgctgttctaaaaattgggactttaaactgctcgagagtagctgtggagatggaaatcggaaagggtattgctgcatcaggaaaacccattgttgatcttcatggtattgatgacagcttgattcaaaagattgtatatgatgctcttgtttggagttctcttcatggccttgatgttggttacagaaatgatcatagatctgggaaactacctggtgttggcatagttcacgctccaattgcttatgatgccacctcattttcagaatctcacttgaaacatgcatgtgaactatc

SEQ ID NO: 201597 - DNA, 386 bp, Gossypium hirsutum
gtcagaagaaagcaataacatgtgcgaactgcttaggatcaactgcgaccgaggtgttatgcttgctgatgggaaaaccagattttccatcaacggcaagcctatctaccactttgttggaacctcgacttttagccaatatactgtcgtccatgttggccaggttgccaagatcagtccaaccgtcccgcttgataaagtctgtcccattagctgtgggatatgtacaggttttggggccactgtaaatgttgccaaacccaaaaagggtcaaactggtgcagtttttggactgggtgccgttggtcttgccgtcgctgaaggtgcaagggtttgtggggcttctcggatcatcgctgttgatgtgaaccccataagatttgaag

SEQ ID NO: 201598 - DNA, 385 bp, Gossypium hirsutum
aagaagaaaaggcggaagcaaaatgctgcagctaaggatcatctatcccgactgtaccatacttgcgaaaccatggaccgggataggcagcaccgccaagactatctaaatctaaggtggaacatccccatttaggcattttccagtcgtccatgggacccaaataacgatgatcaattcaacggcccggcttgatacagccagtcccataagctgtggaatatgaacagatttcaatgccacggaaaatgttgccaaacccaaaagggttcaaacggatgcacttttagcactgggagccgtaggtcttgcctactttgaaggtccatggatttgtggggcttctcgattcatccctgttgatgtgaaccccataagatttgaa

SEQ ID NO: 201599 - DNA, 438 bp, Gossypium hirsutum
tcgattagaggctggaaaaagtcctgtgaaggattcatttgttcctagtatttttagtgtatgcaatacagttccgaggcatgtaattactctagatgagaaataccttcgtcgttgcctggaattgatttgtatcaatgcagcaaaagccgatcaatgcaacatatcctagagcttgagctccgtagaaatgagcattttatccgatggattgaattcacctaacatcggggatgaagatgcttgtgacttccaaaggtttgtttttgaccgtccactagcagttgggactgttggagtagtcattcgtcctgtatgacagtgtgctcgaagttcaaaaactgtcagccggagtatggcgaatatattgaagagcccgttgttacagaaattcggtgcatcggatgtcagtccaagttcgaatgctttaaaagatca

SEQ ID NO: 201600 - DNA, 316 bp, Gossypium hirsutum
gaactattctcggacctgctgataatattaggacgatcaccgaagagcatttgcaaagctatattcagacacactatactgctcctagaatggtcattgctgcatccggtgctgttaagcatgaggaaattgttgaccaagtgaagaagttgcttaccaagttatcgtctgatccaaccactggttctcagttagttatgaacgaaccagcatcttttactggttctgaggttagaatgatcaatgatgatgttcctctggcgcaatttgctggtgcttctgagggagcttcttggacagatccagattccattgc

SEQ ID NO: 201601 - DNA, 411 bp, Gossypium hirsutum
gggatttactctggttctacttgcaaacaaggagagatcgaagctgtggttattgccaccggtgtccatactttcttcgggaaggcggctcaccttgttgataccactaaccaagttggtcatttccagaaggtcttgacagcaatagggaacttctgcatatgttctattgcagttgggatggtaatagagataattgtgatgtatccaattcaagaccgggattaccgtcctggaattgacaatcttcttgtccttctcattggtgggatcccgattgccatgcctacagttttgtcagttacaatggctatcggttctcataggctatcccagcaaggggcaatcacaaagagaatgactgcaattgaagaaatggcggtcatggatgttctttgtagtgataagact

SEQ ID NO: 201602 - DNA, 438 bp, Gossypium hirsutum
ctcatatccactttggaggaaatttctgttgtgggctccgaataaacatgcagagactccaacaattgcgttcaacaggcgagtacagtgacattagcatttacattgagggtcaaggtctcattgctcgggctcataaagtcattctcgggttatatagtgtcccatttacaaagatgttcacgaatggaatgtgtgagagcaactcacctgaggtttgtttaagggatgtgtctccagcagcattgaaggctatgcttgaattcatgtactgcggggatctcaggattgaggataatgaggactttggtaccttgttactccagctccttctgttatctgacaaattcggaatctctcttcttcatcaggaatgctgcaaaatgcttttagaatgcctctcagagggacggagttctagtggaagatggtcataca

SEQ ID NO: 201603 - DNA, 442 bp, Gossypium hirsutum
ataatgttggtaacaacaacaaatctaggggtcttggttatggaaaagagaatatggatggtttaaatgagctgaacaaaggacccagagtaaaagggagtaacaacaaggatggttttggaactgcaacactagctgttaaagatcagaaccttccattgactgagagcaataaggagaacagtgtttctcttgttccagatctgggacagtacaacaaagaggattttcctgatagttattcaaacgccaagttttttgttattaaatcatatagtgaggatgatgtccacaaaagtgtcaaatacaatgtgtgggccagtacatctaatggcaacaagaagcttgatgcagcattcggtgaggccaaggagaagcctgatggctgtcctgtatttctattgttctcggttaataccaatggtcaatttgttggggtagc

SEQ ID NO: 201604 - DNA, 403 bp, Gossypium hirsutum
gtttggtgttgaactccttggtttttgttgcccatggtggggacttttaccaggatttcgacctaacatggggtgactaaagaggcatgattttcaatggtggcaagctcttgtctttgtctttagacagggtttcagggtctggttttaaatccaagaaagagtatttgtttggaaggattgatatgcaactcaagcttgttgctggcaactcaactggcactgtcactgcttattatctgtcatctcaagggccaacccatgatgagatagacttcgaattcttagggaatctgagtggtgacccttacattttacacaccaatgtcttcacacatggcaaaggcaacagataacaacagttttatctttggtttgaccctacgagaaactttcacaccta

SEQ ID NO: 201605 - DNA, 395 bp, Gossypium hirsutum
tacaacccttatttttctgctaacaataatgctgggttcggcaaatgctcaactcagtgccaccttttatgccaaaacctgccctaatatgtccaccattgttagtaatgtgctgcaacaagctcaaggaaatgatatttggatattccctaagatcgttcgccttcattatcatgattgctttgttcatggttgtgatgcttcattactgctgaacggtacggacggtgagaaaactgcgaccccaaacctttcgactgatggatatgaagttatcgatgatatcaaaacggcgttggaaaaagcttgacctcgtgtcgtctcatgttccgatgttttggcacttgctgctcaaatttctgtttctttgagtggaagtccgacatggcaagttc

SEQ ID NO: 201606 - DNA, 405 bp, Gossypium hirsutum
  unsure (1)..(405): unsure at all n locations
agttcccataggttcaagaaattgtatcagaaaatantttggcaagggctccaagcaaanggggttaaatcctgatgaggcagttgcaatgggagctgctattcaaggtggtatccttcgaggtgatgttaaggagctgcttctgttggatgtaactcctctgtcacttggtatagaaacacttggaggaattttcaccaggttgatcaacagaaatacaactatccctacaaaaaaatcacaggttttctctactgcagcagacaaccagactcaagttggaattaaagttcttcaaggtgaacgtcacatggcagctgacaataagattttgggtgagttagatcttgttggtattccacctgcacctagagggatgccacaaattgaagtcacattcgacat

SEQ ID NO: 201607 - DNA, 418 bp, Gossypium hirsutum
gttcatttagaattccccgagataatcttcttaatcgattgggtgatgtcacccgatatggaaaatacacaagtagtctccctacaataaacaaacgttttgctgctactcttggtgaacttgtaagttggagggttggccttgcacattcttcagatggtatcctcaagattgctgtcactattgcagtacgatactccttactacgtcagcatattggtccttcaaatcagactgaagtcagcattcttgattatcaatctcatcagcacaagctcatgccaatgttggctacaacttattcatatcattctgccactcattatttgagagagaaatattcagagatgaagatgacactatatgaacaactcattggagatttgcattctctttatgcacgcctgtagttctatgt

SEQ ID NO: 201608 - DNA, 422 bp, Gossypium hirsutum
  unsure (1)..(422): unsure at all n locations
cactgaactagtattagcagcaatggaagttaatgcaatagggttgctgctgctattgccttgctcctttcctggtttcctcatttcatcatgcatgggaaaccagattgactacctcaacaggttggttgcatcacgcagatcctcgaaccctcctcgcccagagtcatgggctcagctagatgatcaaggaaatagtcatagctctccagtgtttgtaggatctcagaaagggttgatgcaagctgacaagatcgacaaactgccgggtcagcctgaaggggtggattttgatcaatatgcaggctatgtaacagtagatccggtggctgatcgagcattgntctattatttcgtggagtcaccggtaacttctccaaataagcctctggttttatggttaaatggaggtccaagatgct

SEQ ID NO: 201609 - DNA, 436 bp, Gossypium hirsutum
  unsure (1)..(436): unsure at all n locations
tgaaagtggctttagccaatattcaaagatgcccacctgactcagatggtcgggcagttgacactggatgtttcctaagatactcagactcccccttctttggtgctaactacaccattgacctgaaacccttcttgaaaaccagaaatacaactaaaagggatgctctgattggaggactggttggaggtggaggtcttctgttgcttataactttattattgttttgggttagaaaatcaagaaacaatatggcagttcctcaagaggatgtagaggcgccacctgagttacaaggtccgttgacttacacttacaaagaattgaattttgcaacgacaagatttagtcaacanaataaattaggagaaggtggttttggtgaagtatacaagggtatattgaagaatggaagggtggtagcagtgaagaaact

SEQ ID NO: 201610 - DNA, 384 bp, Gossypium hirsutum
accagttgtttgtctcgttggtctcggtctctcggcacgaggcttcccattggtaatgtgactctgaacactttaatgctaggttgggacagataatatgctgatataaataatgcagttaatgtatgatacagcttggtaactgcgtgtaaatcggactgcctatgctcatcctactgattatttctcaacagtacctgaagcgtgtccaattgagagcccatctaatactcgagaggtctgccttgcttatttgcattgaaattgtgtgggcttatgctgctatcctaaccgtgtctggtgcttacatcatcgttaatactgctactaaactaagatgccgtacggatcgatcttacctaatgacttctgcaccttggtatg

SEQ ID NO: 201611 - DNA, 443 bp, Gossypium hirsutum
gatgagtgggctattgatttaagaaagcttaatatgggtacagcttttgctcaaggtgcttttgggaagttatacagaggtacatataatggtgaggatgttgcgattaagatattggaaaggccagaaaatagccctgagaaggcacaagttatggaacagcagtttcagcaggaacttatgatgcttgcaacactaaagcatcctaatattgtgcgatttattggggcttgtcgtaagccaatggtttggtgtattgtcacggagtatgctaagggaggctcagttcgacagtttctaacaaggaggcagaaccgtgctgtgccattgaagttggccgtcaagcaggcattggatgttgctagagggatggcctatgtgcatggacttgggtttattcaccgggatttgaagtcagataaccttctgattgctgctgataa

SEQ ID NO: 201612 - DNA, 263 bp, Gossypium hirsutum
ctctcacattacctacaaaatctttgctttccctttatttgttttttgccaatggcttcttcaccaaaattcatctcttacttcttccttttagccctcttctccgttgaaatacatggtagggatttttttagcaaaatcccaagtgttaacacaaatgagaaagaggtgaccaacaaagaagaacaaaccactttggggaagaaggagcaagagccaaggttagtccccgagacccataatggctatgggctttacggtca

SEQ ID NO: 201613 - DNA, 443 bp, Gossypium hirsutum
ccaaaacgccaatattgtaatgggagaaatataagtcctcctacggtttctcttcgcggactcgccctcgatctcagcgaaccgatctccagagggaagaatatactcataagtataagcaaattagatcgaggttctctgataaggtcttcaatttgatattggcttggcacttggcttctccaaaaattcaatatggttgtacttgcggcttctgttttaagcaagtctggcaaagtgcttgtctctaggcaatttgtggacatgactcgcataagaattgaaggtcttcttgcagcttttcccaagttggtgggcacggggaagcaacacacatatgttgagactgagaatgttcgatatgtttatcaaccaatagaagctctttatttgctacttgtaaccaacaaacagagcaatattcttgaagaattggagactct

SEQ ID NO: 201614 - DNA, 442 bp, Gossypium hirsutum
ctaaagttcagtgctgataaggttgatacaatgattgttcgggccattggtttgcttgatgaccttgataaagagctcaacacatatgcaatgagggttcgtgaatggtatggttggcattttccagagcttactaagatcatacaagacaatatcatgtatgccaaggcagtaaaactaatgggtgaccgtgctaatgctgctaagctcgacttctcagaggtattaccagaagagtttgagacagaattaaaggaggcagcagtcatatccatggggactgaaattagtgaccttgatctgacaaatatcaaagatttatgtgatcaggttctcaatctttctgaataccgagctcagctatatgattatttaaagagcatgatgaacactgttgcaccaaactagactgctctcgtcggtgaacttgttggtgctcgtc

SEQ ID NO: 201615 - DNA, 442 bp, Gossypium hirsutum
acctaaccctatcaaaggaacccagctttccatcgggctaccagacgacgatgtctcgaactccttcttcaccggtttctctactccccttcttcttctgctctccaatggctatccccgccgcaaacgtttaacaaaaaacacctttttgtttatacccaatgccagtatatccacgcacgttatgtctttttaatttgtaaccaagactatcaaggtccctgaaggcttcgattatgagctttacaataggaacgacatcaacaggattttgggtcctaaggattcttctatctctttcaaggattctgcttgtaggtgcttttggtacatggtttccaagaagaaatacatctataccattgatgatgactgctttgcttcttgtggttctccttgtagcattctgctcatttgttgttattggtggtttcctgttctt

SEQ ID NO: 201616 - DNA, 393 bp, Gossypium hirsutum
gtgtacttgaacaatattgtgaaaggctctggtgcaaatagtgctggcaagcttgagatcatggaaccatgttgcaatgtgaaggacaggatagggtacagtatgatttctgatgctgagcaaagaggacttataacacctggaaaagagtattcttgtggaacctacaagtggaaacacaggcattggccttgccttcatagctgcctcaaaaggatatagactgatcttgacaatgccagcatcaatgagtttggagagaagagttctactgaaagcatttggagctgagcttgttttaactgattcagctaaaggcatgaagggggctgttcagaaagctgaagagattgtgaaaagcacacacaacgcctacatgcttcaacaatttga

SEQ ID NO: 201617 - DNA, 427 bp, Gossypium hirsutum
catcagcgttacaatcagttgaaaaatggtggagatgaaggggcagcaacccttgttttcgtgtggacggaccgtggttattacaggagaagaaggcctaagattctctctttccttttactttctcttcttgcttgtggcttcatattggctcctcacttctttagcttttcttctgctttatctcatctctatttttttggtgtacaaaatgacggccttgctggtgatttatatgtaaatgctcctctttgttcttcaatctctaatggttcagtttgctgtgacagaagacattttcgatctgatatttgctttatgaaaggtgacataagaacacattctcccagctcttcggttttcctttattcaccaaaaaatagcgacgatgacgcttcaagtacggttgatggtgatgaacttcaac

SEQ ID NO: 201618 - DNA, 432 bp, Gossypium hirsutum
ctcggattttgcgctgccgggaaaccaaagtttgaaagcggcgatggccaagacgccgatagggctagaaccagtggtgggatccctatcatcctctaagaagaaagaatacagagtcactaatcgactccaagagggcaaacgccccctgtacgccgtcgttttcaacttcatcgactctcgttacttcaacgtgtttgccactgtcggtggtaatcgggtgacggtataccaatgcctcgaaggaggtgttatagctgatttgcagtcttatgttgatgaagataatgatgagtctttctacactgtaagttgggcctgcaacattgatggtacaccatttgtggatgctggaggtattaatggcataatccgtgtaattgatgcgagcactgagaaaatacacatgagtttctgtggacatggtgactc

SEQ ID NO: 201619 - DNA, 437 bp, Gossypium hirsutum
agttccgacaaaagaaaacgaaaaaaatagaagagatacggtcgttttctttttgaagtcgggttttagtttttggggagaaaaaaatgttgggagtatttagcagtgcgatagtgtctccgccggacgagctggtggcggccggttgccgaactccatcacctaagataacggcggatgctctggtgaaacggttccttgagacgaactcctccggcgtgtccatgcagatcggagaccatgtccaattcgcttattctcaccataaagagtctcctttacggcccaggtaaaaaaaaaatcatatatggtattggctgttggatgatctcaatcgttgaaaattaattatgaattcaaacttcagttgatcatcgagtgctttcgaacgaacctaagaattactataatttgtttaatcgaataatttacgattt

SEQ ID NO: 201620 - DNA, 411 bp, Gossypium hirsutum
gccagtggttggtttaggtgtttggcgtatggatggaaaagacgttagagacctcatcatcaactccatcaagcttggttatcgtcattttgattgtgctgctgactacaagaatgaagcagaagttggtgaggcattgtctgaagcattcaaaactgggcttgttaagagagaggacctctttattacaaccaagctttggaattctgatcacgggcatgttcttgaggcctgtaaagacagtcttaagaagcttcaattggattatctggatttggatctagttcactttcccgttgctgtaaagcacactggagtcggtcaaacggacagtcctttggacaaggatggagtcctggacatagacacgactatatcgttggagactacctggcacgcgatggaagattt

SEQ ID NO: 201621 - DNA, 433 bp, Gossypium hirsutum
ccttccagggagtaatcttcaactgattcgcctacggtcggctcttaatgctagagacattccagctgaagacttcaacctgctgcctgattttggtgtgcagcagcaacagctggtgaacgagttatctagcctcagtcagccatctatgagttctaattctatgaatcgatctggtcgattgaaaaccctgaccccatcaaatctcgaagatctattttccaccgagagctcttcaccccagtactctgatcaagcattggcagcagttgttttctcaccttctcataaatctgccgttctcaatcaatttcagcagcagtcaagcatgctatcacccattaatacaaatttttctcctaaaagtcaggagcatccgctattgcaggtgtctctatctggtaggatgtctcctcggaatgtggaacctatc

SEQ ID NO: 201622 - DNA, 414 bp, Gossypium hirsutum
gaactattctcggacctgctgataatattaggacgatcaggagaagagcatttgcaaagctatattcagacacactatactgctcctagaatggtcattgctgcatccggtgctgttaagcatgaggaaattgttgaccaagtgaagaagttgtttaccaagttatcgtctgatccaaccactggttctcagttagttatgaacgaaccagcaacttttactggttctgaggttagaatgatcaatgatgatgttcctctggcgcaatttgctgttgcttttgagggagcttcttggacagatccagattccattgcgctcatggttatgcaggcaatgttgggttcgtggagcaaaaatgctgagggtggaaaacacatgggctctgaactggcacaaagagtcggcattaat

SEQ ID NO: 201623 - DNA, 417 bp, Gossypium hirsutum
  unsure (1)..(417): unsure at all n locations
ttcttaatcaagtaaatcttggtaataaaagatatcatacatttactgaatcaaggaaatcttgtaatgaactcaaagcaataagccttagagaaaaacttttgagcaggttccaacaatagacgtatcacttgcttctcataatccacacacagcaagccagactcggatagaagatcataaaatgtgtgtgatgatatgatagcatgcagttttgtcctattaatagtattaccacacacccctgctgtcataaggcgtaataaatatgtgaagactttgatgtaaactaataaataaggttcttctgagtgaccatcaccctgaaaactatggagggtggttagcagaagagaaaatccagtggctttaccaaagactctctgagcaccattatntactcctagaatgcgccac

SEQ ID NO: 201624 - DNA, 426 bp, Gossypium hirsutum
aagcagcttagtgcagaaggaaattaccatggaggaagaggtgtgaggagtacatgcaatctcacaagagactgatgattgattcattatggaagcttaatgtagctgacatagaagctactctttctcgtgtttgtcaaatggttctccatgatcaaaaatgcaaaaaggaagagcttcgagcacgagcaaaagggttgaaaactcttggtaaaatcttccagagtgtcaagtcaacaaatggaaatgagagtgatcctgtgctaggcaataatgcaagacataaattagatggagttgagccaagttataacagtggttctccaaatgtatcaacaaagtcctcatcccgggaagaactatctacttctccattggcaccacagagcccatacgtggaggcccctaactatgttaatgctcaat

SEQ ID NO: 201625 - DNA, 419 bp, Gossypium hirsutum
  unsure (1)..(419): unsure at all n locations
ctaagatctgaccccatttctctttccttcgccaaaaaccgtttttgctctaaaaagggtctccttatcctcccttattaatctccctaaagggtttttcattttctagtggtcgatgggtgttgaagttgtgggatcagaaatggctaaagtatctgttgacaaagcaactgaagttgagaaatcacttgttcatgataaggaaaatgggaaacttgacaaggatccggttcatagcgagcccattaaattcggttccaatattgaggaatcaaataagggagaagagaaaaatgcatctgatgccaactttccgagcgatgcagttgttgagtggcctgcgcctaagcagatccactctttttattttgttaggtatcgcccttatgatgatccgaagataaaggccanaattgatc

SEQ ID NO: 201626 - DNA, 447 bp, Gossypium hirsutum
gaaaactttagaatcatgggagtgccggaaactgatccatgggctcaattgagcttgccgccggggtttcggttttatccaactgatgaagagcttttagtgcaatatttatgcaggaaagttgcagggcatcatttttctctgcaaatcattggcgaaatcgatttatacaaatttaatccatgggatttaccgagtaaagctttgtttggtgaaaaagagttgtattttttcagtcctagagacagaaaatatccgaacgggtcacgacctaatagagttgcagggtccgggtactggaaagctaccggaactgataaaattattacaacggaaggccgtaaagtgggtataaaaaaagctctggttttttacgttggaaaagctcccaaaggaactaaaactaattggattatgcatgaatatcgactcattgaaacttctcgt

SEQ ID NO: 201627 - DNA, 434 bp, Gossypium hirsutum
gctacttaaccatttcccaaatctcctccctcctgttcttgagcgtccttttcatttccgctcatgcagcgcgctttgaaatccgcaatgagtgctcctacaccgtctgggcagcagcctctcctggtggtggccgtcgcctagaccctcggcaaagttggaccatcgatgtgcctgctggcactgctatggctcgtatttggggtcgaaccaattgcaatttcgatgccagtggtaggggtcattgccaaaccggtgattgtggtggactccttcaatgcaaaggttggggtgtacctccaaacaccctggctgaatatgcacttaaccaatttggaaacatggatttctacgacatttccttagttgatgggtttaacatccccatggtgtttggtccaactaatggcggttgtcacaacattcggtgcact

SEQ ID NO: 201628 - DNA, 432 bp, Gossypium hirsutum
aaaagagcctctcgacatcgaggaaaagtgaaggctttcggcaaagatgatcctactaagccatgcagattaactgcgttcttgggttataaagctggaatgacccatattgtgagggaagttgaaaagcctggatcgaagcttcacaagaaggaaacttgcgaagcagttaccattatcgagacaccgcctatggttgttgttggagttgttggatatgtcaaaacaccgcgtggtcttcgtactttaggcactgtatgggctcagcatttgagtgaggaggtgaagcgaaggttctataagcactggtgcaagtctaagaagaaagctttcaccaagtattccaagaagtttgaatccgaagatggtaaaaaagatatccagtcacagcttgaaaaactgaagaaatattgcactgtgattcgtgttttg

SEQ ID NO: 201629 - DNA, 442 bp, Gossypium hirsutum
gttgattggaagaaaaacaggcggaatatcagtttatccagttacgtcatctatacgaggcaaggaagatcccagtagccatatcattgtccgaggcaaatcaatggctgggcgtgctgatgacctatttaatctgattaattgtgttcttcaagaagtacagtttacagaccaacaacggttcaagcagtttgtgtcccaaagcaaagccagaatggagaaccggttgagaggtggaggtcatggaattgccgcagctaggatggatgcgaagttaaatgttgctggctggatttctgagcaaatgggtggagtcagttacctggagtttcttcaagcactggaagaaaaagtggataatgactgggcaggaatttcatcatctctcgaggagatccgtaaatccttactttccaaggaagggtgcttggtaaacatgact

SEQ ID NO: 201630 - DNA, 362 bp, Gossypium hirsutum
ataaagcgaaaaaggaaagagcaaccagcgaccgacgttggatggcaccttcctcctactctgaattatttccaaattttttttttcttttcgggcaattctatttccttttaggcttaacaaaattctgatcttagggtttcgaatttctctcaagatctgccttccattatcacacctttttagcttcgcgttattctgctcaggagcaggtggggatgatagaatgcagtgtttgccattctaaaatagcaccaccggctagcaaatccatatccagggcttacgacaagcaccgtacctttgtttcttccaaaactcgtttcctcaatgttattttggttgctggtgactgccttttg

SEQ ID NO: 201631 - DNA, 425 bp, Gossypium hirsutum
aagaaacccaccgggaggaaaattattttcttttttctcaggatggtgctcctcatcagaacagattatggctattacttcgatctcgacgaattggtcagctcttttccgcttctcaaaccactcgaaacattcactctatttaccccaaagtaccatttctttacggttttcccgatccagtctcagctgcggaaaacccctttcaattcgagcaaccgccgttccagcggctcctacagcggaggggttggcaccggctattacgttgaccgataatgctttgaggcacttgaataaaatgagagcatagcgtgatgaggatttgtgcttaagaattggggttaagcaaggtgggtgttcgggcatgtcttatacgatggattttgagaagaggtctaatgctagagccgatgactctatca

SEQ ID NO: 201632 - DNA, 408 bp, Gossypium hirsutum
ggaatgcttgccagaaggattgtggagactgaaatgccagtcatggttcagatacagcaattgatccgaggagcgaaaaatgctgtgtcactcgctcagggagtggtttactggaaaccacccaaacaggcattggataaggttaaagcacttgtagaggagtcttcagttagttgttatggtgctgatgaaggtcttcctgaacttagagaagcattgataagaaagttacgtcaggagaacaatttgcagaggtcttcggtgatggtcactgcaagagcaaatcaggcatttgtgaatcttgttctaacactgtgtgatgcgggggactcggttgtcatgtttgctccatactatttcaattcctacatgtccttccagatgacaggtgtcactaagatattagta

SEQ ID NO: 201633 - DNA, 432 bp, Gossypium hirsutum
gttgattggaagaaaaacaggcggaatatcagtttatccagggacgtcatctatacgaggcaaggaagatcccagtagccatatcattgtccgaggcaaatcaatggctgggcgtgctgatgacctatttaatctgattaattgtgttcttcaagaagtacagtttacagaccaacaacggttcaagcagtttgtgtcccaaagcaaagccagaatggagaaccggttgagaggtggaggtcatggaattgccgcagctaggatggatgcgaagttaaatgttgctggctggatttctgagcaaatgggtggagtcagttacctggagtttcttcaagcactggaagaaaaagtggataatgactgggcaggaatttcatcatctctcgaggagatccgtaaatccttactttccaaggaaggttgcttggt

SEQ ID NO: 201634 - DNA, 452 bp, Gossypium hirsutum
  unsure (1)..(452): unsure at all n locations
ggattatcaatttgaagccttcttcgaaattcctctttcagagatgcggattttcgtcaagaccctcactggcaagaccatcacccttgaggtggaaagttctgataccatcgacaatgtaaagaccaagatccaagacaaggaagggatcccaccagaccagcagaggcttatctttgctggtaaacagctggaggatggccgtacccttgctgactacaacatccagaaggaatccacactccatttggtcctccgattgaggggtggtatgcaaatttttgtcaagaccctcaccggaaagaccatcacattggaagtggagagttctgatacgattgacaatgtcaaggccaagattcangacaaggaaggcatccccccagaccagcaaaggctgatcttcgctggtaagcaacttgaggatggccgcacattggctgattacaaca

SEQ ID NO: 201635 - DNA, 448 bp, Gossypium hirsutum; identical to SEQ ID NO: 191276

SEQ ID NO: 201636 - DNA, 433 bp, Gossypium hirsutum
  unsure (1)..(433): unsure at all n locations
ggaaagcagcttcaacttcagcttttgggagtgcaaattcagccccatgtcttattgctaatccaatccaccacctacagaccaaacacttctccataggaatcctccctgatggggtcaatcgtagctccgacaattttgtccagaattccgatgccatggaacgtctcttgtctgaccttcaatcccatatcaacaaggttcttgctggaggaggagaaactgctgtgaaaaggaacaggagcagaaataagcttctccctagggaacgaatcgatcgtcttcttgaccctggttcttctttcctcgaattgtctcagcttgcagggcatgaattatacgaagaccctntaccatcaggtggaataataacaggaattggtccagttcatgggagactttgtatgtttgtggctaatgacccgactgttaa

SEQ ID NO: 201637 - DNA, 444 bp, Gossypium hirsutum
cgttagccggtgacggtttcgacaccgtcatcaaggcgaagcaagcggtcgatgcggttccgagttgtagaaacaaggtttcatgtgctgatattttggcaatggcgactcgtgatgtcattgctctgtcaggtggaccatcttatgcagttgaattggggaggttggatgggttaagctccacagcagctagtgtcaatggcaagctgcctcatccagatttcaacttgaaccagctcaactctatgtttgcagcacatggactcacccaaactgacatgattgctctttcagctgcacacaccgttggattctctcattgcagcaagttttcaaaccggatatacaatttcagccgtcaaagtgcagtagacccgacattgaaccgagcatatgcgacccaactacaacaaatgtgtcctaaaaatgttgatcccaggatag

SEQ ID NO: 201638 - DNA, 410 bp, Gossypium hirsutum
gttgaagtctgaagaatgcttgagaaaggaaagggagagagtgtctgattacctgcattcaagcagtgagacaaaattgttagagaaagtgcaacatgagttgttggtcacatatgcaaatcggctacttgaaaaggagcattcaggatgcagggccttgcttagagatgacaaggtggaggatctttctaggatgtacaggctttattgtaaaatacctcgaggcttggagcccgttactaatgtattcaagcagcatgttactgctgagggtacagccttggttcaacaggcagaagatgctgcttcaaatgctccgggtgtgcaggaacaggtccttataaggaaaataatcaagctgcacgacaagtatatggcatatgtgaccgactgttttcaaaaccatactc

SEQ ID NO: 201639 - DNA, 428 bp, Gossypium hirsutum
cggagacgggatcggacctttggtgacgaacgcggtggagcaagtgatggaagtgatgcacgcaccggtttacttcgagaagtacgacgttcacggcgacatgaaacgggtaccacaagaagtgttggattcgataaagaagaacaaggtttgtttgaaaggagggttaagaacacccatgggaggtggagtcagttcattgaatatgcaattgaggaaagaactggatctatacgcttcattggtcaactgttgtaacttacccggattgccgacccgccatgaaaacgtggatatcgtcgtaattagagagaacactgaaggggaatactcgggtcttgaacatgaggtggtgcctggtgttgttgaaagccttaaggttataacgaagttttgttccgagcggattgcgaaatatgctttcgagt

SEQ ID NO: 201640 - DNA, 432 bp, Gossypium hirsutum
ctcttttacactcccttcatttttggtctttgaaaccccagaggccctttttcactcctttttatactctcattttacgtttatttcttctttctttcatagatccaggccttcttcttcttcttcttcttcttcttctatcaaagttaatataggcaaatataagagaagaaatcgaattaaagtttatctgtggaactagataaagaacagtacgatttgttttgatccaaagcacattcgagccatgtcgtttattggtacccaacagaaatgcaaggcttgtgagaagactgtttatccagttgaacttttgtctgcagatggagttccttaccataaatcttgcttcaagtgcagtcattgcaaagggacactaaagttggctaattactcctcaatggaacgtgttctttactgcaagcctcattt

SEQ ID NO: 201641 - DNA, 449 bp, Gossypium hirsutum
cttggtggcagtatcagttctgtgatattttcatcgaagcggtcaaaccttactttgctggtgataatccagctttttcctctgaaaggaaatttgcacaagatgctctttgggcttgtttggaaataggcctgcgtttgcttcatccatttatgccattcgttacagaagaactgtggcagcgcctttcaggagtaaagagccacacaaagaaagaatctataatgatatgtgattacccatcaccaattgagagctggacaaatgaaagggtggaatatgaaatggaccttgtagagtccactgtaaggtctcttaggtcacttcgggccgagctgcttgctaagcagaagaatgaaaggttacctgcttttgcattatgtcaaaatgatgaagtggcgaaaatcataagatcttgtgaattagagatcttaacccttgccacgtta

SEQ ID NO: 201642 - DNA, 430 bp, Gossypium hirsutum
gaagattgcagggaagctgtctcatctctaatgtttgcagcgtgctagattttctgatttgccagagttgcgtgagcttaggcatatatttcatgaaagatatgaaaattcactggacgtattcgccaataaacagcttgttgagaattcagcttcaaatccttccacaatggagaggaaagttatggtaatgcatgatatagcatcagagttttccataaaatgggattcaaaagctttcgagcgaagaatgtctgaacctgttgtgatcccacagccacaggaccgaactaaaaaatacgggtctttccatgtcaatggtgaagataataaatcaaattatggaaaacaggaccgacttaaaaaatacgggtctttccatgtcaatggtgatgataataaatcaaatgatggaaaacaggaccgactt

SEQ ID NO: 201643 - DNA, 449 bp, Gossypium hirsutum
gttttggtaatagctatcttgttaaagatgatcatgaaacggcggtgttctatcattcagtgggaggctcttgctttgttgcttattggaattagcataaaccagttgcggtctttaccagagggtactacttcatttggtcttacggttgcaactggcgcatacttgtatacactaattttcgttactgttccatccctagcatctgtctttaatgaatatgctttaaagagtcagtttgagacaagcatttaccatcagaacttgtttctttatggatatggtgccattttcaatttcctagccattcttggaactgcaatttttaaaggtcccaatagcttggatatcctgcagggacattcaaaggctaccgtgctcttaatatgcaacaatgcagcccaagggatcttatcatctatcttcttcaaatatgcagatacaatctt

SEQ ID NO: 201644 - DNA, 419 bp, Gossypium hirsutum
  unsure (1)..(419): unsure at all n locations
gaagcttccttttccgttttagatctcaaaattcaaaagggtctctttttcatctcatggctgctactattgtctccgtcaaagctaggcagatcttcgacagccgtggaaatcctacggttgaggttgatgtggaaatatcgaacggtataaaggctagggccgcagttcctagcggtgcatccactggaatttacgaggctcttgagttgagagatggaggttccgattacctcggtaaaggtgtatcgaaggctgttgctaatgttaacacaatcatcggccctgcattgattggaaaggacccaaccgagcagactgcaattgacaatttcatggttcaacaactggatggaacccanaatgagtggcgttggtgcaaacaaaagctcggtgcaaatgccattcttgcccggtcc

SEQ ID NO: 201645 - DNA, 429 bp, Gossypium hirsutum
ctatcgtcgtaatgcctcatcattatataaatgggggttgggatgatccttctcaccatattgctcatattaggtctccaagttctctgcatataactgatgaacctgcaaagttagcaaccatgctagctgagcttcatcgacgcagtattgcacatatgaggattaacaatcgatcgatccaagacatgcaaatctttggagatccttcaagagttcctattgtaattatcgaacgtctaataaatgcacctactactactgttagtgatatatcattcttgaataattttgacgacatgcatttagctaccacaagcactgttcttcaagctgcgaagagccaatctagtacaattgctgcacagactggccaatacttgaaaatcgttgactctaagcatggttttcatgtgcatcatctggatc

SEQ ID NO: 201646 - DNA, 436 bp, Gossypium hirsutum
atttagtctaagaaaacatttccttagagcatagataaagataaaataaaaattaagaacatgggtgtcaatgctgaaattgtagtcccagtcattgagttcctgtcatcggatttagagcgaggaactgatgggtggcaccatttgtgcaagagggttcgagaggcttgtgaaacttacggttgtttcgaggtggtgtacgaaagggtatcaaagaaagtccgagaggagatgttcggattggtgaaagaattggtccaggtcccattggagaggaaacaaaagaacgctagtcccttgccttaccatggctgggttggaccatgcagtcaagtttctttgttgtatgaaggctttggacttggagatgcctctaattatgactcagttaaaagatttgctcaacttatgtggcctgatgatcacccacgctttt

SEQ ID NO: 201647 - DNA, 444 bp, Gossypium hirsutum
gtataaggggagcagggagctgctatccatattggtctaggtgactccaacactgcgcgtgttgtaacaaccggacctgaagcctctatgaagctagatgttgtggtgcttgaaggtgattttagcaatgaggatgatgaagattggacacaggaggaatttgatagccatttggtaaaagagcgtccaggaaaaagaccactgctgacgggtgacttgcaagtgaccctgaaagagggggttggaacactaggagacctcacttttactgacaattcaagttggataagaagcaggaaattcaggcttggcttgaaggttgcttctggatactgtgagggtatacgtgttcgggaagctaagacagaggcttttactgtcaaggatcacagaggggaattggattagaagcactacccacctgcactgaatgatgaaatatgg

SEQ ID NO: 201648 - DNA, 423 bp, Gossypium hirsutum
gcggagtttgtgaagcagtggattcaaaggggcctagaagttgggaccagataaaagtgccgggacttcacccttctatgtccatgagtgatcttatgaaccacattggacaccgtctttcagaacacatgacctccgaaaatccatcctctgaaaatagaccagactgccatgaaatgctggaggatattgcacaataccttctgagtgacactcaatttacaacagcctctgatgagaaatccctcatgtcaagggtgaattctctgtgttgtcttttgcaaaaggacaatacaacaggcacaagctcacaggcaaatggagaaaattacgatggaggtgatgatggaaaagatgttcagctaaacagaagtcatgggtttgagtttaatattacgggcaaggatgatgtgaaggcttttg

SEQ ID NO: 201649 - DNA, 425 bp, Gossypium hirsutum
ctatggtccttattaagatgcgtgaaatcgctgaggcttagcttggttttacagttaagaatgccgttgttaccgtccctgcatacttcaatgactctcagcgtcaagcaacaaaagatgctggtgtcattgccggactcaacgtcatgcgaatcatcaatgaaccaacggctgcagccattgcttacggtcttgacaagaaggcaaccagtgttggtgaaaagaatgtcttgatctttgatctcggtggcggtacttttgatgtctcccttctcaccattgaagaaggtatctttgaagtgaaggccactgccggagacactcacctcggaggcgaagatttcgacaaccgaatggtgaaccatttcgtgcaagagttcaagagaaagaacaagaaagacattagtggtaaccctagagctctt

SEQ ID NO: 201650 - DNA, 451 bp, Gossypium hirsutum
ctaccaaagatattgaggttgttagtgaagatcatttaactgatggtggccaaaattctgattcccaaacttcagatgtcccttcgaagactgaccaagagaggccacaacaccctcaaaaagagagttcacaacatgtaattgctgattctcatgataacttcgaagctaagttgaaagaagttgatgttaaagtcgaaactcctgtgaatcaaaagaaatcacaggagcaaaatgctggtactccacaaacggtagtccaggaccaacttgatgaggctcaaggactgcttaaaaccaccaattctactggtcaatcaaaagaggcaagactagctcgggtttgtgctggactttcatcccgtctccaagaatacaaatccgagaatgcacagcttgaagagcttctaattgctgagagggagctgagtaaatcttatgaggctcgtat

SEQ ID NO: 201651 - DNA, 437 bp, Gossypium hirsutum
  unsure (1)..(437): unsure at all n locations
cacgtttcagaatatgcatcatggatatccaactgaaacagtagtccggtttctcaaggcgagagattggaatgttcagaaagctcataaaatgttaattgattgcttacaatggcgactacagaatgagattgacaacatattatcgaaaccaattatccccgtcgacttatatagagcggtgcgagattctcaactagtaggagtgtcaggttactcaaaggagggtcatcctatcattgccattggtattgggcttagcacatacgataaagcttccgtgaattattatgtacaatcacacattcaaatgaatgaatatagagatcgtgtagtattgcctatggccacagaaaagtatggacgacatattagcacttgtttgaaaatcttggatatgactggctngaaactttcggcgttgaaccaaataaagc

SEQ ID NO: 201652 - DNA, 450 bp, Gossypium hirsutum
gtctcctaatgggcaatctgaacaaactgcaaatggtgggttctcttcatatacaaacaacctctcatctgggcggaatcagaaccttcatcccttccctcatgtcatgaatatgcacaacgcaagaccatcatcaggtgtaggccaatcatatggatacatgaaccacatgtaccctaacaatgtgacctatggtcattatgggaatgccattagaggcggttctgggtttggatcatatggatatgatgcccggaagaaaggtctagggtggtataatgttggtaacaacaaatctaggttccgtggttatggaaaagagaatattgatggtttcaatgagctaaacaaaggacccagagtaaaagggtataagaataaggatggttctggaaatgcaactctagctgtcaaagatcagaaccttccattgatcaagagcaatgatga

SEQ ID NO: 201653 - DNA, 325 bp, Gossypium hirsutum
gcttactggacgggattcaagtcacctgaacaaattggaggtgttcggaacactggggttaaacccgagatattgaagaatgttggcaaagcaatcacaacccttacagataatcctaagcctcatagagcggtgaagaaggtttatgagcaacgtgcacagatgattgagacaggggagggccttgactgggctatggctgaagcacttgcatttgctacattactggtcgaacgtaaccacgttaggttgagtggtcaggatgttgaaaggggtacatccagtcatcggcattctgcgattcatgatcaagaaaccggggaac

SEQ ID NO: 201654 - DNA, 382 bp, Gossypium hirsutum
ccaaagcctgccattgacccttaacaattcattcatcaaagagagcgtttcctctccattttccattccatatttgttctgcgctctctgtttctgttgttgtgttttaggatttgagagatcatggcgtcgcaagaatacttggacaagatgaaggtccgtcaggagtatcggaatctctggcacacggatctcatgagcaccattcaacgcgaccctccttattgctgcttggctttttggtgtggcccatgtgtatcctacatgctccggaaacgagctctttataatgacatgtcaaggtatacatgttgtgctggttatatgccatgcagtggtaggtgtggtgaaagtaaatgtcccgagttttgcctttgcactg

SEQ ID NO: 201655 - DNA, 432 bp, Gossypium hirsutum
  unsure (1)..(432): unsure at all n locations
agagaagggaaaaagggaaggtgcctgctttccgtcattcgcgattccatggcttgtaaaatctcaaattccctgttcctttgcttgggtcctagtcaaaggccaattaggagccaaacaattgctattcattcttctactgcaagtatctgtcatttgaattgggacaatcttcttgttaagggaattaaccataggaagggtataattcccttaagaaggaataaagtcatacaagctgtggcggttccagtaagaccatcttcagcagacagtgctgagtacagaaaacagttagcggaaacttatggattcaagcaaattggagagcctcttcctgataatgttacattaaaggatgttatagacacccttccaagaaaggtgtttgagattgacgatgtgaaagcatggacttcagttntaatatct

SEQ ID NO: 201656 - DNA, 415 bp, Gossypium hirsutum
  unsure (1)..(415): unsure at all n locations
gtggaaggtcacatgactggactgagtgtccgtacgctcagcctggtgagaaggcccgaagaagggacccgcaaaagtttcattactctggaactgcttgccccgattttcgcaagggaagctgtaagaaaggcgattcatgtgaattcgctcacggcgtttttgagtgttggctccaccctgctcgttaccgtactcagccttgcaaagacggtaccagttgtcaaagaagggtttgttttttcgctcacacaccggagcagcttcgcgtgttgccgcagcagagtccgagaggaaatgggtccgcttcagctgatttggattatgttggttcgcccatgcgccatcgtctagagtttggttcttcaccaacttctattctggcttcacctncaatatccccaccttctgagtc

SEQ ID NO: 201657 - DNA, 428 bp, Gossypium hirsutum
  unsure (1)..(428): unsure at all n locations
cgatcatatgccgtgcgaggatcctaggcgtaatagtcaggtcagtnaggagatgaatttctatagagaaaggcattgccctttgcctgatgaaacgcctctttgcttgatccctcctactcttggctacaagattcccgttcagtggcctgaaagcttgcacaagatatggcattccaacatgccacacaacaaaattgctgataggaaaggtcaccaaggatggatgaaagaggaaggtccttactttattttccctggtggtggaacaatgttccctgatggagctgcatcgtatatagagaaacttggacagtacattcccataaccggtggaactcttaggacggccctcgatatgggctgtggggttgctagttttgggggttcaatgttaaaagaaggcattttgacactctcatttgctc

SEQ ID NO: 201658 - DNA, 448 bp, Gossypium hirsutum
ccaaagcctgccattgacccttaacaattcattcatcaaagaaagggtttcctctccattttgcattccatatttgttctgcgctctctgtctctgttgttgtgttttaggatttgagagatcatggcgtcgcaagaatacttggacaagatgaaggtccgtcacgagtatcgcaatctctggcacacggatctcatgagcaccattcaacgcgaccctccttattgctgcttggctttttggtgtggcccatgtgtatcctacatgctcctgaaacgagctctttataatgacatgtcaaggtatacatgttgtgctggttatatgccatgcagtggtaggtgtggcgaaagtaaatgtcccgagttttgcctttgcactgaagttatcctctgctgaagtaacttcgtggcttcaacccggtttctgctgcatgatgaattcaaca

SEQ ID NO: 201659 - DNA, 430 bp, Gossypium hirsutum
tctaagtccaaggagcggtagctgcaaggttatggggaagaagctagacgcgttgcttggaagagggttcaagccctacaagttgaaatcacttattagtgttgccctttctcgtctttccgttttcaagaatcggcgtcagattcgcagcaaccaagctcgctctgatgttgtggagctccttcagctcggccaccatgatcgtgctcttcttagagcggagcaggtggtgaaggagcaaaacatgttggacgtgtttgttatcctggaagggtattgtaatctcctcattgaaagactccatctcattgaggaagacagagaatgccctgatgagctgaaggaggcaatatgtggcttgctctttgcatcttcaaggtgtggagattttcccgagcttcaaaagattcgtgcaatcttcacgtctcgc

SEQ ID NO: 201660 - DNA, 446 bp, Gossypium hirsutum
aaaatttctccatttttttcaccttttcctccttttatttgttttgatttctttttcgttttcaaattaaatttctcactttctatatgtactcctaatcttccaccaccctcacttgctactatagccttccattgcccttttcttctcttcaactccacctgctaaaatgcaccaatttccggtgcttctcagcctcatcgcagtgtctgtactgctgatggtaactccagtcattggataccgtccatggcctcacttaaaacccaacagctccgatttaacgtttggaagctccaagaaattcgagggctcatcagagttcgtccaaatgagataccatatgggaccagttctcaccgccaacatcaccgtacacatagtttggtacggccgatggcaaaaatctcagaagaagatcatccgtgagttcatcaactcaatct

SEQ ID NO: 201661 - DNA, 439 bp, Gossypium hirsutum
gttaaggaaagtatgcgttatcaagatgcttagcggtgctgctttggataaagtatatagtcttcgccgtcaagaagtacgagaaaccataggttatttatatagtaaggccggttcgcctgtaaacgtgggagagcagatgtttttaactatcttgaatgtggtgaccaatatgatatggggcgggtccatggaaggggaggccagggcgagccttggtgcagagttcaggcaagtcatctcagaagtaacagaacttttgggtctacctaatgtttcggatttcttcccggcgttggccccgcttgatttgcaaggtgcagtgaaacgtgtccgaaaatcaacggagaagttggacgcaattattgataagataatcaatcaaaggttggaggagaagcaaagtgggcacacagtagaggaattcaaggactttcta

SEQ ID NO: 201662 - DNA, 446 bp, Gossypium hirsutum
ctcggattttgtgctgccgggaaaccaaagtttgaaagcggcaatggccaagacgccgatagggctagaaccagtggtgggatccctatcatcctctaagaagaaagaatacagagtcactaatcgactccaagagggcaaacgccccctgtacgccgtcgttttcaacttcatcgactctcgttacttcaacgtgtttgccactgtcggtggtaatcgggtgacggtataccaatgcctcgaaggaggtgttatagctgttttgcagtcttatgttgatgaagataaggatgagtctttctacactgtaagttgggcctgcaacattgatggtacaccatttgtggttgctggaggtattaatggcataatccgtgtaattgatgcgagcaatgagaaaatacacaagagttttgttggacatggtgactttataaacgaaatca

SEQ ID NO: 201663 - DNA, 439 bp, Gossypium hirsutum
gtgtaacatgttcgactcaaggagactatagagttgttactgaactggaagtctatgcagtatccatcattggtccttttcctattgctgtaactaatttattggatttaacaagattggatctccataacaacaagctgactggcccaattcctccacaaattggccggctaagacgacttagaatgttaaatttgaggtggaataagctccaagatgtccttcctccggagattggggagcttaaaaaactagcccatctgtcattgagctttaataattttaagggcgagatcccgaaagagcttgcaaatctacccgagctccgttatctctatcttcaagaaaaccgtttcactgggcgaattccacccgaattgggcactttacaaaaccttaggcacttggatgttggtaataaccatttggttggtaccat

SEQ ID NO: 201664 - DNA, 451 bp, Gossypium hirsutum
  unsure (1)..(451): unsure at all n locations
gttgaacaaattagcagcagaaccaaatgcatgaagcttgaagcaaacagactatatctatacactagtactgatatcaaggtaaatggacttcttggatcctgtgtaggcgttgtgtttatctagctcaaccatttctatgcttgtgaatggaatctgagcaagcggattctcacaaaatggattttaacgcgacggaggaagaggaatttggattctcaagaaactatttcttagcaaaagaaatgggcagttctgggaagaaatctgctcctaaactcagtgatatcaatgtcgttgacgaacaggtattttgcctcattgaatccccatctcaaaaaaagctttgctttttttattcttttaaattttgctgatttaaaattgcatcanaacgacattgcagatttaataaatagttacaaaagtttatacccaaaatgggtttttg

SEQ ID NO: 201665 - DNA, 442 bp, Gossypium hirsutum
ggcttgcaatcatgacggcttggatctctatcttgtcggactatttggtggataccattgagggggcatctgatgcgtgggatgtgccgattgcttttattagtgttatattgctccctataattgggaatgctgctgagcatgcaagcgccatcatgtttgccatgaaagataagctcgacatatccttgggagtggccatagggtcatcaactcagatttctatgtttgggatacctttttgtgtggttattgggtggatgatggggcaagaaatggacttaaacttccaacttttcgagacagcaactctgttcattaccgttatagtcgtagccttttttctgcaggaagggacgtctaactacttcaaaggactaatgcttatactttgctatctgatagttgctgcgaagttcttcgtacatgaagatcctcccac

SEQ ID NO: 201666 - DNA, 432 bp, Gossypium hirsutum
  unsure (1)..(432): unsure at all n locations
tcaagttcaaggattacaattgtaccgttgagtactaccgggactcctttccttgttgtacaaagcangccgcctgccgggtctccgcaaaacatcaagacaacccttaagttggatcgaatggattggaattcatttaggtggaaagatgccgatttgttggtcttcaacaccggccattggtggaactacgagaagaccgttagagggggatgttactttcaagtcggggaaaaaatcgaaaccaagatgaccatagaacatgcgtatcagaggtctttggagactgtgatgcagtggctacgcaacgaggtgaatatgagtaagaccaaggtctacttccgcactttcgctcccgtacatttcagaggaggggattggagaaccgggggaagctgccacctcgagactttgccggagctgggaacaaca

SEQ ID NO: 201667 - DNA, 423 bp, Gossypium hirsutum
cttcactctcctttacttttaagttcttttctttgcttgagttcattttgtagccaaaaaaaacatggggttctcactgaaacttcagtattgcctagtttctgtcatggtgctattacctgcagtgtgttactctcaggactatttcgtcaagtccagagcaacttactacggcagtcctgactgcttaggcactccaagtggagcttgcggatttggagaatatggaagaagtgtcaatgatgccaatgtcgccggggtttccaggctctacaagaatggaactggctgcggtgcttgttatcaggttaggtgcactaaccctcaaatatgtgctgataatggggtgaacatagtggtgaccgactatggcgaaggcgacaacaccgatttcatccttagtccccccgcatatgcaaggat

SEQ ID NO: 201668 - DNA, 429 bp, Gossypium hirsutum
aaaaaatcttctgatttttctgagtctttttcttatcttcggtttggctcctgagaaagtgttttaagaagaacaatgaatgcattagtggcaaccaacagaaacttcaagctagcagccaggcttcttggtttggattctaagcttgaaaagagtctcctcattcccttcagggaaatcaaggttgaatgcaccatacccaaagatgatggcacattggcaacttttgttggctttaggattcaacatgacaatgctagaggtcctatgaaaggaggaatcagatatcaccctgaggttgaccctgatgaagtgaatgcattggcgcaactaatgacatggaagacagcagttgcaaacatcccatatggtggggctaaaggtggtataggatgtaaccctggagagttgagcaaatccgaactagaa

SEQ ID NO: 201669 - DNA, 430 bp, Gossypium hirsutum
gaatattgcagggaagctgtctcatctctaatggatgcaggtgctatattttctgatttgccagagttgcgtgagcttaagcatatatctcatgaaagatatgaaaattcactggacgtattcgccaataatcagcttgttgagaattcaactacaaatccttccacaatggaaaggaaagttatggtaatgcatgatatagcatcaaagttttccataaaatgggattcaatagctttcgagcgaagaatgtctgaacctgttgtgatcccacatccacaggaccgaactaaaaaatacggcactttccatgtctatggtgatgataataaatcagattatggaatacaggaccgacttaaaaaattcgggtctatccatgtcaatggtgatgataataaatcaaatgatggacaacaggaccgactta

SEQ ID NO: 201670 - DNA, 436 bp, Gossypium hirsutum
ctcactcaacattcccatttccaatctccagctcccaaggtgaatatgccgatcagaaacatagcggttggccggcccgaagaggctactcaccccgatgctctcaaggctgctttggctgagttcatctcaaccttgatcttcgttttcgctggatcgggctcaggaatggcctttaacaagttgactgacaacggagcaaccaccccggctggtctcgtagccgccgctctagctcatggcttcggtcttttcgtcgctgtctccgttggcgccaacatctcaggtggccacgtcaaccctgccgtcaccttcggtgcttttgttggcgggaacatcactctcttgcgcggcattctttactggatcgcccaactcctaggctcaaccgtcgcttgcctgttgcttaagttcgctaccggcgacctggctgtac

SEQ ID NO: 201671 - DNA, 422 bp, Gossypium hirsutum
ataaagcgaaaatggaaagagcaaccagcgaccgacgttgcgtcgcaccttactactactctgaattatgtccaaattttatatgtcttttcgggcaattctatttccttttaggcttaacaaaatactgatcttagggtttcgaatttctctcaagatctgtcttccattatcacacctttgtagcttcacgttattctgctcacgagcaggtggcgatgatagaatgcagtgtttgccattctaaaatagcaccaccggctatcaaatccatatccagtgcttacgacaagcaccgtacctttgtttcttccaaaactcgtttcctcaatgttcattacggtgctggtgactgccttttggtcggttttcaacccatattggtttatatgtcaaaggtggatggtggcttcaagtatagt

SEQ ID NO: 201672 - DNA, 444 bp, Gossypium hirsutum
gttaaggaaagtatgcgttatcaagatgcttagcaatgctgctttggagtaaagtatatagtcttcgccgtcaagaagtacgagaaaccataggttatttatatagtaaggccggttcgcctgtaaacgtgggagagcagatgtttttaactatcttgaatgtggtgaccaatatgatatggggcgggtccatggaaggggaggccagggcgagccttggtgcagagttcaggcaagtcatctcagaagtaacagaacttttgggtctacctaatgtttcggatttcttcccggcgttggccccgcttgatttgcaaggtgcagtgaaacgtgtccgaaaatcaacggagaagttggacgcaattattgataagataatcaatcaaaggttggaggagaagcaaagtgggcacacagtagaggaattcaaggactttctacaat

SEQ ID NO: 201673 - DNA, 431 bp, Gossypium hirsutum
ttaggtttcttttttttttttttgattttattaattgaactacggctgggttcaactgcaattgggttaaagacgaaagaaggtgttgtgttggctgtcgagaagcgtattacttcgccattgttggagcccagcagtgttgagaagattatggaaattgatgaacatataggatgtgctatgagtggcttgattgctgatgcccgtacacttgttgaacatgcacgagttgagactcagaaccacagattctcatatggcgagccaatgactgtagagtccacaacacaggctctttgtgacctggcccttcgatttggtgaaagagatgaagaatccatgtaccgtccatttggggtgtctcttctcattgctggtcatgatgagaatgggcctagcttgtaagtatcagatgagtgttcgttatgttg

SEQ ID NO: 201674 - DNA, 438 bp, Gossypium hirsutum
ctggatttccctaacatagttatcaagggaagtgagctgcggctccgattccaggcttgcttgaaaattgagaaatttggtgatctaattctgaaagctacagagccacaaatggttttgttcaacatctatgatgactggttgaagagtatctcatcatacactgcattctcccgactcattctgatccttcgtgcgcttcacgtgaacaatgagaaggctaagatgttactgaaacctgataagacaatcgttactgagcctcaccatatttggccttctctaactgatgatcaatggatgaaggtcgaagttgctttaagagatctgatactttccgactatgccaaaaagaacaatgtgaatacatcagccctgacacagtctgagattcgtgacatcatccttggagctgagattactccaccctctcaacag

SEQ ID NO: 201675 - DNA, 396 bp, Gossypium hirsutum
gagcaggtagggagaatctgagagctgctaagaaggagtggaacaaaacagaagatgatttgaagtctcttcagagtgttgggcagatcattggtgaagttctcaggcctcttgataatgaacgcttgattgttaaagcaagcagtggccctcgttatgttgttggttgccgcagtaaagttgataaggagaaactgacttcaggaactagagtggttcttgacatgacaacacttactatcatgcgggcacttcctcgtgaagttgatccagttgtttacaacatgttgcacgaggatcctggtaatgttagctactcggctgttggtggtttatctgatcaaattcgagagctgaaggaatctattgagctccctctcatgaatcctgagcttt

SEQ ID NO: 201676 - DNA, 389 bp, Gossypium hirsutum
tgcttgatacgcagcttgacataggctcttgctggagaggggggcattgcgctgatatatgtgctcgaggtccgccaatggatgctatatgctctgagatgagagatagatcaaagttgggatgcatcgactatcttcggtactgaatattactacggcacagtgaccaattaccaatctatgagccaggtattactgaagtggtgaaacaatgactgggaaggaacctgttctttagcaccgacatagaaaaacatgtctgcaaagcagacataatctttggttctgtaaacacgcccaccaaaacccgacgtctcagtgctggcaaagctgcggaccttacatattgggaaagcgcaacaaggatgattgctgatgtatcaaaatcc

SEQ ID NO: 201677 - DNA, 391 bp, Gossypium hirsutum
ggcatttgctttaattcagttgttcagtatcatcatccttatgtcccatgttgcctggcaaatcttccttctcttccttgccatcctcagtatctccttctggtatcagaactattatattacgactgctagggagctagccaggatggttggaattagaaaggctcctattttacatcatttctcagaatctatcacaggcgcaacaacaattcgttgttttggccaggaagacaggttcatggagaaaaacttgagcttaatcgatgattactctcgtgtagccttccataactccagcacaatggaatggatgtgtgttcgaatcaattttcttttcaacttcgttttcttcctggtgttggtcatcctggttagcttgccgcggtct

SEQ ID NO: 201678 - DNA, 421 bp, Gossypium hirsutum
ctggcacctgatttgccgatgtttgctattggtgatgggggacggcttatgcaaactattctaaatgttgagggtaatgctgtgaagttcacaaaggagggttacatttcaattatagcttctgttgcaaaaccggagactttaagagactggcgaccttcagaattttacccagtgtctaccgaaggccacttctatctaagagtgcaggttaaggattcaggctgtggtgttctcctacaagatataccaattctctttaccaaatttgcacagactcaaagtggaaatagcggtggtgcgtagcttggacttgccatttgtagaatgattgtaaatttgatgggacgccacatatggattgagagtgagggccttgactaaggttgctcattaacgttccttgtcaaactttggatct

SEQ ID NO: 201679 - DNA, 365 bp, Gossypium hirsutum
ccaaaacttcaatattgaaatgggagaaatataagggctggtactgtttctcactgcggactctccctcgatctcagcgaaccgatctccagagggaagaatatactcatatgtataagcaaattatatcgaggttctctgataaggtcaacaatttgatatcgtcttgatacttgcttatccaaaattcaatatggttatactcacggcttcaggattaagcacgtctggcaaagtgctagactctaggcaatttgtggacattacttgtataagaattgaaagtcgtactgcacctttgcccaagttggtcgtcactgctaaacaacacacatatgtctagactgagaatgttcgatatgttt

SEQ ID NO: 201680 - DNA, 415 bp, Gossypium hirsutum
acaacatgttcgtgttcatgcaatggaagcagatattagttgttgtgatcttgagcagggacttcaaagtttaacaggtgtatctccaggtgaaggcactggtgcaaccatgtctgatgatgaagatgaagttgtagatagtgataccagcttgtttgatggaagctctgatgggattgacaccatggtgttatggacccctacgtcccatccgagactgatagatcactaatgtaacgtgttacgcaagaactgaagcacgagctgatacagtgttacaaagagaaaattgtggacattacagaggaaattctacgtaagagactagctggaaagctactcaggcgatacgactctctttctaaaagcttggttgcagtcacattccaaatggccttacccaactgaagaagac

SEQ ID NO: 201681 - DNA, 455 bp, Gossypium hirsutum
  unsure (1)..(455): unsure at all n locations
cctcaacacattaaaaaaaagcaagtcaacagaatacaaaagggccaacgttgctccgggaaatgccggcggtcacttcggagattttccggcgtttcatacctacggcggtcaatttattcagtacagtatttttggaaacttatttgagatcacgtctaaatatcggccctccatcacgccaatcggtcgtggagcctacggcatcggctgctcggtgttgaattcggaaacaaatgaaatggtagcgggtaaagaaaatagccaacgctttcgataatcacatggacgctaagcgtacgcttcgtgaaattaagcttctccgacatttggatcacgagaatgttatcgcaattagagatgtcattcctccgcctttgcggagagantttaatgatgtctacattgccttggagctcatggataccgatcttcaccaaataattcgctccaat

SEQ ID NO: 201682 - DNA, 410 bp, Gossypium hirsutum
cctaagcgctttagaatcaagcgagtcttcacaatacattcgagccaccgttactccatgaaatgccgacgatcacttatcatattttccctagattcatacactaccacagtcaatttatccagtacagctttttcggaaacttatttcgagatcacgtatcaatatcgacctaccatcacgccaatcgttcctgaaacctactgcatcgcctgatctatgttgaattcggagactaatgaactggtaacggttaagaaaatacccaacgctttccataatcacatggacgcttagcgtacgcttcgtgaaatcaagcttctccgacatttggataaccagactgttatcgatattaaaaatgtcattcctcctcctttgcggatagattttaatgatgactacatttc

SEQ ID NO: 201683 - DNA, 446 bp, Gossypium hirsutum
atccatagctcatcaaagcattaattgataactggaaactggtgttgagtgctcgactgctagttgccaatggtgaagactgatctgcagaagattcaagttcaaccacaaccatcaaagctaatgaaggcattaacatcacccacaccaccaccaccatcctcatcagcatgcaaaaagaatgaaatataagggtgtaagaatgaggagctggggttcttgggtgtcagagattagggctccaaatcaaaaaacaagaatctggttagggtcttattctacaccagaagctgctgcaagagcctatgatgctgcacttctttgccttaaaggttcctcagctaatctcaacttcccaatcacatcctgacattacatccctgaccctgacacccttttgtctcccaagtcaatacatagagtggctgctgcagctgctaatagtt

SEQ ID NO: 201684 - DNA, 390 bp, Gossypium hirsutum
tctatatctagcgggtccatccggctggctgaattaattacgagcatataagctatcaaatactctttcacaaataggaaatactgtcggtatttaattgacacaggggtatgttcttcatgttgaaaaagctcatcttgttttagatagccttagtgaccaatgactaaaaatgtgggaattcttgctatggaaatatacttcccttctacctgtctttatcaagaagcatttgccgctaatgatgtgcctagtaaggtgaaatacaccattggactctgacatgattgcatcgccttctgtacagacacggaagatgttatcatctatgagtctaacagctgttactatactccttgcagaatatgatatagaccccaaacaaatcgg

SEQ ID NO: 201685 - DNA, 311 bp, Gossypium hirsutum
accagttgtttgtctcgttggtctcggtctctttgcacgaggcttcccattggtaatttttctttgaacactttaatgcttggttgggacaaataatatgctgatataaataatgcagttaatgtatgatacagcttggtaactgcgtggaaatcggcctgcctatgcttattctactgattatttctcaacagtacctgaagcgtgtcccctcgagagcccatctaatactcgagaggtttgccttgcttatttgcattggaattgtgtgggcttttgctgctatcctaaccgtgtctggtgcttacaac

SEQ ID NO: 201686 - DNA, 341 bp, Gossypium hirsutum
gagcaggtagggagaatctgagagctgctaagaaggaggggaacaaaacagaagatgatttgaagtctcttcagagtgttgggcagatcattggtgaagttctcaggcctcttgataatgaacgcttgattgttaaagcaagcagtggccctcgttatgttgttggttgccgcagtaaagttgataaggagaaactgacttcaggaactagagtggttcttgacatgacaacacttactatcatgcgggcacttcctcgtgaagttgatccagttgtttacaacatgttgcacgaggatcctggtaatgttagctactcggctgttggtggtttatctgat

SEQ ID NO: 201687 - DNA, 391 bp, Gossypium hirsutum
gccggatggctacaaggaagttggggattccggtgagatgggagttccttccgttgctgcgaaagcgtcaagagcgaatagcgagaggaggggttcgaatcgagggatttattccaattcaacaaaggagaaagggcctgggagcatggaattcacgatggaggaaattttgaaggccacgaggaacttctcccctgctttcaagattggacagggtggatttgtgacggtttataagggaagacttgatgatggaacctgtgttgctattaagcgtgctaaacagagtgtatactgatagcatttaggtgtggaattccagagtgaaataagaacactggcacaagtggaacacttgcatttggttaaattttgggggtatttaaaacat

SEQ ID NO: 201688 - DNA, 316 bp, Gossypium hirsutum
ctggcgtggacttaacgggaggttactacgacgccggggaggacgtaaagtttgggttcccaatggcgtttaccacgactctattagcttggagtatcatagatttcgggaggaacatgaggccggagttaaagaacgccgttaaagcggtgaagtggtcgacggattatctgttgaaagcaacggcaaagcctggagtggtgtatgtacaagttggagatgcgtactcagatcatagctgttgggaaaagccggaggacatggacacgcttcgcacggtgtacaaaatcgacaatgcgcaccctggttctgatgt

SEQ ID NO: 201689 - DNA, 450 bp, Gossypium hirsutum
gagagagagatacacagagagggagaaatggtttctctgaggctacagaagcggctctccgcgagcgttctaaagtgtggaaaaggaaaggtttggctcgatcctaatgaagtcaacgagatctctatggccaactcccggcagaacataaggaagttggttaaagatggttttatcatcaggaagcctaccaagattcactctcgatctcgtgctcgtcgcatgaaggaagccaagagaaagggacgtcactctggatatggtaagcgcaagggtacaagggaggcaaggttgcccacatagatcttatggatgagaaggatgcgtgtacttagacgcctactgcgcaagtacagggaatcaaagaagattgacaagcacatgtaccatgacatgtacatgaaagtcaaaggtaatgtgtttatgaacaagagagtcctcatggagagc

SEQ ID NO: 201690 - DNA, 437 bp, Gossypium hirsutum
ggatggtcttgttttccgtcagaacttctcgattaggtctgatgagataggtgctgatcagacagcttccatagagacagtaatgaatcatttacaggaaacagcacttaatcatgttagaagtgctggactgcttgtagatggttttggttcaaccccagagatgtgcaagaagaatctaatatgggttgtcactcggatgcaagtcgtggttgatcgctatcactacttgggtaatgttgttcaagtagatactcgggtcagtgcatccggaaagaattgcatgcgaaaggattggcttgtaagagatagtaaaactggtgaagttctaacaagagcttcaagtatctgggtgatgatgaataaagtgactagaacgttatctaaaatgccagaagaggtccgaggtgaaatagaaccttatttcatgaattctg

SEQ ID NO: 201691 - DNA, 326 bp, Gossypium hirsutum
gacctctataaagacacaacttccttattcatagtattccgtccctttctgtccaccaaaaaagatagttgacagtgcagaaaatctcggggaagtgcttcgtggtgaccgtattgaaaactctccttatgtgtttaaaatgcgtgagccacaaatgtgttctgttctttgccggattacacttgatgccaaggctgcaaagcagtttcaggagaagattgatgatgaatatcgagtcaatatgatcctggataacctgccccttgttgttcccattagaagattagatcagggttcttctactgtttatcagcttgggtaccatg

SEQ ID NO: 201692 - DNA, 433 bp, Gossypium hirsutum
gaactattctcggacctgctgataatattaggacgatcacgaaagagcatttgcaaagctatattcagacacactatactgctcctagaatggtcattgctgcatccggtgctgttaagcatgaggaaattgttgaccaagtgaagaagttgtttaccaagttatcgtctgatccaaccactggttctcagttagttatgaacgaaccagcaacttttactggttctgaggttagaatgatcaatgatgatgttcctctggcgcaatttgctgttgcttttgagggagcttcttggacagatccagattccattgcgctcatggttatgcaggcaatgttgggttcgtggagcaaaaaatgctggggtggaaaacacatgggctctgagctggcacaaagagtcggcattaatgaaattgcagaaagcatgat

SEQ ID NO: 201693 - DNA, 442 bp, Gossypium hirsutum
atttcggggatcaaatactctttcacaaaaaggagagaatgtgagtaattaattaacacaactttttttcgttgttgttgaaaaagctcatcttttttttgatagttagagtgagcaatggctaagaatgtgggaattcttgctatggaaatctacttccctcctacctgtgttcaacaggaagcattggaggctcatgatggtgctagtaaggggaaatacaccattggacttggacaagattgcatggccttttgtacagaagtggaagatgttatctctatgagtttaacagctgttacttcactccttgcaaaatataagattgaccccaaacaaatcggccgtcttgaagttggtagtgagactgtgatcgacaagagcaagtccattaagaccttcttgatgcatatctttgagaaatctggaaacactgacatcg

SEQ ID NO: 201694 - DNA, 388 bp, Gossypium hirsutum
aagaaaaaggagaccataaaccactggtatagatggagacgacgaagaaaacaatggacattatcacgattgatagcttctaattaaagtttggaaagtggttatgaataattccagccaaaagaatggaaattacaagcatattaccagaagagtgcctgtgtctgatcatatcgttgacttcgccggaagatgcatgtcgatcggccatgatttctcacgcttccagatcggttgcaaaccgtgatgaagtgtgggaaaggtttctgccgtctgattgtagatcaatcatttcaggatcatcatcatcatcattgctttcgctgggaaagaaggatgtatatttccatctctggtttcatcccattctcattcaaaatggtaccat

SEQ ID NO: 201695 - DNA, 422 bp, Gossypium hirsutum
ccaaaacgccaatattgtaatgggagaaatataagtgctggtacggtttctcttcgcggactcgccctcgatctcagcgaaccgatctccagagggaagaatatactcataagtataagcaaattagatcgaggttctctgataaggtcttcaatttgatattggcttggtacttgcttctccaaaattcaatatggttgtacttgcggcttctgttttaagcaagtctggcaaagtgcttgtctctaggcaatttgtggacatgactcgcataagaattgaaagacttcttgcagcttttcccaagttggtgggcaccgagaagcaacacacatatgttgagactgagaatgttcgatatgtttatcaaccaatagaagcgtcttatttgctacttgtaaccaacaaacagagcaatattc

SEQ ID NO: 201696 - DNA, 432 bp, Gossypium hirsutum
  unsure (1)..(432): unsure at all n locations
ccatgatattgatgttgatgatttaaaaaataatacacggtgtactggtggctattctgagggaagtcgaactgttaaacttttctgggaggttatgaatgattttgagcccaaagaacgttgcatgctgctaaaatttgtgaccagctgttcgcgagctcctttattggggttcaaatacttgcagccggctttcacaattcataaggttgcaagtgatgctcctctttgggctgcaatcggaggttcagatgtggagcgacttccatcagcttctacatgctataacactctcaagcttccaacatacaagcggtcaagtactctgaaagcaaagcttcgttatgcaattaattctaatgctggatttgaactttcttaaggacctgagattnttaactggcgcagaataggtggtttaccattatcact

SEQ ID NO: 201697 - DNA, 277 bp, Gossypium hirsutum
ctcttacattacctacaaaatctttgctttccctttttttggtttttgccaatggcttcttcaccaaaattcatctcttacttcttccttttagccctcttctccgttgaaatacatggtagggatttttttagcaaaatcccaagtgttaacacaaatgagaaagaggtgaccaacatagaagaacaaaccactttggggaagaaggagcaagagccaaggtttgtccccgagacccaaaatggctatgggctttacggtcacgagtctggtcagc

SEQ ID NO: 201698 - DNA, 444 bp, Gossypium hirsutum
gttttggtaatagctatcttgttaaagatgatcatgaaacggcggttttctatcattcagtgggaggctcttgctttgttgcttattggaattagcataaaccagttgcggtctttaccagagggtactacttcatttggtcttccggttgcaactggcgcatacttgtatacactaattttcgttactgttccatccctagcatctgtctttaatgaatatgctttaaagagtcagtttgagacaagcatttaccatcagaacttgtttctttatggatatggtgccattttcaatttcctagccattcttggaactgcaatttttaaaggtcccaatagcttggatatcctgcagggacattcaaaggctaccgtgctcttaatatgcaacaatgcagcccaagggatcttatcatctttcttcttcaaatatgcagataca

SEQ ID NO: 201699 - DNA, 414 bp, Gossypium hirsutum
gttaaggaaagtatgcgttatcaagatgcttaggggtgctggtttgtataaagtatatagtcttcgccgtcaagaagtacgagaaaccataggttatttatatagtaaggccggttcgcctgtaaacgtgggagagcagatgtttttaactatcttgaatgtggtgaccaatatgatatggggcgggtccatggaaggggaggccagtgcgagccttggtgcacagttcaggcaagtcatctcagaagtaacagaacttttgggtctacctaatgtttcggatttcttcccggcgttggcccagctagatttgcaaggtgcagtgaaacgtgtccgaaaatcaacggataagttggacgcaattattgataagataatcaatcaaaggttggaggataagcaaagtgggcacac

SEQ ID NO: 201700 - DNA, 397 bp, Gossypium hirsutum
gtgacgccacaatggatgatgtgcttgccaactttgggcgaaccttggcatcccctatagctccctgcttaatgatgctgtccgtgtcagctatgctgctcacctcatgctcgtatttcccattgtcttctatccactgcgactcaacatggatggcctcctcttcccttattcaagtcctctagctcagtctaatacaaggtttgcttgtattactgccggactcatagcagttatcttcttgggtgcgaatttcatacccagcatctgggatgctttccagttcactggagcaactgctgctgtttgccttggcttcatttttcctgctgcggttactcttaggaatcaccacttcatagcaacaaagaaggacaagatggtagctcttttcatg

SEQ ID NO: 201701 - DNA, 403 bp, Gossypium hirsutum
attccactcacagaattcaaagttgtagattccgaagctggggaaatcctcccacctggctccaagggcattataaaggtcaggggaccgccagtgatgaaaggttactataagaatccattggctacgaggcaagccctagacgaatatggttggctaaatactggtgatataggttggattgctcctcatcattcagtagggcgaagtcgtcgatgtggaggtgtgatagttttcgaaggacgtgccaaggacactattgttctttcttctggtgaaaatgttgaacctttagagatcgaagaagctgccttaaggagtactcttattcaacagatcgttgtcatcggccaggatcaacgacgccttggcgctgtcattgtcccaaacaaagatgaagcac

SEQ ID NO: 201702 - DNA, 397 bp, Gossypium hirsutum
gttaagagcttgcggtgaaaggtggaaactaggcactagaggatttagtactcaaggagcaacaactgctgatgctccacaggcacctcctcctcctccaccgcctgaaaaaacccattttggtggtctaaaagatgaagaccgtattttcaccaacttatatgggttgcatgacccttttctcaaaggtgccatgaaacgtggtgactggtatagaaccaaggatttagtactcaagggtgctgattggattgtgaatgaaatgaagaaatctggacttcgaggacgtggtggtgctggatttccatcgggcctcaaatggtcttttatgccaaaagtatctgatggtcgtccttcttatcttgttgtcaatgctgatgaaagtgaacctggaacc

SEQ ID NO: 201703 - DNA, 390 bp, Gossypium hirsutum
attgagactacctcttgagtcagaccaagttcttctgaaagtcatttatgctggtgtaaacgcaggtgatgtgaactttagcgcaggccgttattttcaaggaaccaagaaagaccctggatttgaggcagtgggaataattgctgccattggagattctgtaagaaatttggaagttggaactcctgctgcagtcatgactattggatgttatgctgaattcatgaaggttccttcaaagcaaatacttccaattccaagacctgacccggaaagttgtgctctgcttacttcaggattaacagcatcaatcgctttggaagagcttggtcagatgaaatctggaaaagttgtccttgtaactgctgctgctggaaggactggacaatt

SEQ ID NO: 201704 - DNA, 442 bp, Gossypium hirsutum
  unsure (1)..(442): unsure at all n locations
ccggaaactgatcctaccgttttattcattcactcttttcggcattattctcccgatgaccatgttcgttccagaggctgagcttcctgcatgggttgtttgttacatccctgctacaatgtcgttccttaacatccttccggcaccaaaatccttcccgttcattgttccttaccttcttttcgagaataccatgtcggtgaccaagttcaatgctatgatatctggtcttttccaactcggcagtgcatacgagtgggtcgttacgaaaaaatccggacgatcttcggagggtgatcttgattcattggttgagaaaaagccataacaccatcgggttggatcagaacccaatcttgaggaaatgaaagctgatctccagcaagatcaggaacaaaaggctcgtanaaggaagcataatagaatatacacgaaagagctc

SEQ ID NO: 201705 - DNA, 428 bp, Gossypium hirsutum
  unsure (1)..(428): unsure at all n locations
atttggagtatgtgaagagagaaaaaaatggacaattccgggcatttcttctgaaatatgtaaatagttgggttgtaagcatctattgccataaggtaattaggttgtccgctgccacccaggattaccccagatccatcatctgcaatgttcatggagttaatcccaagttccttgagataggcaaggaaaggtttgagcaacatcatatcagtatccaccaggccttcaccaaaggtgcttactacattgggaagatgatttggaacaaaggctatggggagctacttaaactacttaatgatcaccaaaaggagctcgctggtcttgagattgatctatacggcaatgganaggactccgatcaagttaaagaagctgctaacaagctgaaactgacaagtagagttcatcccggtcgtgatcat

SEQ ID NO: 201706 - DNA, 427 bp, Gossypium hirsutum
cacagattgagacggagaaactactggcgcaccttgtagagaatgaaattaataagcgcctgaaagcaggcacttacaaggggaagaaatttaatgctatttgccacttctttggctatcaagctcgtggatccttaccatcaaaatttgattgtgactatgcctatgttcttggacatatctgctatcatattcttgcagctggtctaaatggttatatggcaactataaccaacctaaagaatcctgtgaacaagtggcgttgtggtgctgcacctcttccagcaatgatgactgtgaagcgctggtctcaaaatcccaatgccgcgtcaattggaaaacctgctatacattcaactactgtagatttgaaaggcaaagcatacgagatgctgagacaaaatgcaacaaggtttttgctggatga

SEQ ID NO: 201707 - DNA, 444 bp, Gossypium hirsutum
ccaaagcctgccattgacccttaacaattcattcatcaaagaaagcttttcctctccattttccattccatatttgttctgcgctctctgtttctgttgttgtgttttaggatttgagagatcatggcgtcgcaagaatacttggacaagatgaaggtccgtcaggagtatcggaatctctggcacacggatctcatgagcaccattcaacgcgaccctccttattgctgcttggctttttggtgtggcccatgtgtatcctacatgctccggaaacgagctctttataatgacatgtcaaggtatacatgttgtgctggttatatgccatgcagtggtaggtgtggtgaaagtaaatgtcccgagttttgcctttgcactgaggttttcctctgctgttgtaactccgtggcttcaacccggtttctgctgcaagatgaattc

SEQ ID NO: 201708 - DNA, 335 bp, Gossypium hirsutum
gttgaacaatttagcagcagaaccaaatgcatgaagctttgacggacagactatatgtatgcgctagtactgatatcaaggtaaatggacttcttggatcctgtgtaggcgttgtgtttatctagctcaaccatttctatgcttgtgaatggaatctgagcaagcggattctcacaaaatggattttaacgcgactgaggaagaggaatttggattctcaagaaactatttcttagcaaaagaaatgggcagttctgggaagaaatctgctcctaaactcagtgatatcaatgtcgatgacgaacaggtattttgcctcattgaatccccatctc

SEQ ID NO: 201709 - DNA, 402 bp, Gossypium hirsutum
cctcaacacattaaaaaaaagcaagtcaacagaatacaaaatggccaacgttgctccgggaaatgccggcggtcacttcggagattttccggcgtttcatacctacggcggtcaatttattcagtacagtatttttggaaacttatttgagatcacgtctaaatatcggcctcccatcacgccaatcggtcgtggagcctacggcatcgtctgctcggtgttgaattcggagacgaatgaaatggtagcggtaaagaaaatagccaacgctttcgataatcacatggacgctaagcgtacgcttcgtgaaattaagcttctccgacatttggatcacgagaatgttatcgcaattagagatgtcattcctccgcctttgcggaaagatttaatgatgtctac

SEQ ID NO: 201710 - DNA, 421 bp, Gossypium hirsutum
gtaccccggatcataaacaactagccttggaagctgctaggcaaggcatagttttgttgaagaactctgggtctttgccgttgtctacttcacgtcatcgtaccatcgcggttattgggccgaattcagatgtcacggaaacaatgataggaaactatgcaggggtggcatgcgattacacgagtcccttgaaaggcatttcaagatacgtgaggactgttcatcaagtaggctgttcaaacgttgcttgcaaagcaaacaatctgtttggattcgccgaggtcgctgcccgccatgctgatgcgacagttctcataatggggcttgaccaatcgatagaagcagaattcaaggacaggaccgggttgctcttgcctggataccaacaagagctagttaccagggtggctcaagcatcgaa

SEQ ID NO: 201711 - DNA, 423 bp, Gossypium hirsutum
atttactgttttataccattgtctccatatcatgccggagcaaaaagcaggtcctgatgccagtgtgaagaaaactgatttatgggtcccaggaagtaccaagaaccctgaagcttatatcttgaaggatcaggaaactcgctatcttcaacggtatctcgatttgatgttaaacctgcaggttcgtcatatattcaagaccagatctaagatcatttcttatgtcaggagttttcttgacaatcttgatttcttggatgttgaaactcccatgatgaacatgattgctggaggtgcatctgcccgtacatttgaaacccatcacagtgaattaaacatgaagctctacatgcgtattgcaccagagctatatcttaaggagctagtaattggtggactgaatcgtgtctatgaaattggaaa

SEQ ID NO: 201712 - DNA, 366 bp, Gossypium hirsutum
  unsure (1)..(366): unsure at all n locations
gaaagctgctggtttttcatactttgacatatgcactgagagttgaagccaaactatgtgcgtgcttgggcaaacatgggtatcagttacgccaaccaggtttgagtttttgttggatgcatggtccaggattagctgaattcatgcatagtgacgacttgtttgagctaattgctgatcttaaagtgtacattctatcattattttgttctatttgtattttgttagatttctggtgtagtatgataagtccggtattttgtttgattgttattgataaactttttatttggtgggatatatatttatatcatagatgttattcttcttttcaatattttgataatgaattttaattntttttat

SEQ ID NO: 201713 - DNA, 447 bp, Gossypium hirsutum
ggcaaacggataaagctccaaatttgggacacagctgggcaggagcggttcaggacaatcacaactgcttactatcgtggagccatgggcatcttgctggtctatgatgtcacggatgaatcctcgttcaacaatattaggaattggattcgcaacattgaacagcatgcatcagataatgttaacaagatattggtcggaaacaaggcagacatggatgaaagcaaaagggctgtgccaacctcaaagggacaagctcttgcggacgagtatggaatcaaatttttcgaaacaagtgcaaaaactaacctaaatgtggaagaagttttcttttcaatagcaagggacataaagcaaagactcgtcgatactgacttaaaggctgagccttcaacaattaagatcaataaacctgaccaggcagcttgggctggtcaagctgcacaa

SEQ ID NO: 201714 - DNA, 407 bp, Gossypium hirsutum
  unsure (1)..(407): unsure at all n locations
attcgccgcacggcatcagtctcatcaggcggngaagaatgtgtcacaggaagtttgaacacccaaggcatggctcccttggatttcttccgaggaagcgagcttctcgtcacagagggaaagtgaaggcatttcctaaggatgacccaagcaaaccttgcaagctcactgcctttttgggctacaaggcaggcatgacacacattgtccgagaggtcgaaaaacctggatctaagcttcacaagaaagagacatgtgaagctgttacgatcgttgaaacccctcctatggtgattgttggggttgttggttatgtcaagacaccacgtggtcttcgcagcttgaacaccgtttgggctcagcatctgagcgaggaagtcaaacgtaggttctacaagcattggtgc

SEQ ID NO: 201715 - DNA, 399 bp, Gossypium hirsutum
agggaatagggttaaagcagttgtgataggtcttggtgcgggcttacttcctatgtttcttcatggatgtatgcaatctatgcaaattgagggagtggagctagatcctgttatgcttaaccttgcaagagactattttggttttactgaagataaacgaatgaaggtacatattgctgatggcatccagtttgtccgggactacagaaacttattttcagctggcaatgaagtgctcctttcttccaacggaagttgcaaactttcagatgctgaaagcagaagtaccgctattgacataattattggtgatgtggactcttctgactcaagctctggactgagatgtcctgctgctgattttgtggaagattcttttcttcaaaacgtaaaagatac

SEQ ID NO: 201716 - DNA, 446 bp, Gossypium hirsutum
gtttaaggttgttcttgtgtttctttctctttactgcaagtgctgtcaacattgtatgcagccgtagtctgcaaaaagatcatatcgccttgtttgtctttggggattcagtgtatgatcctggaaataataactacatcgacacgattgctcgggcaaattattatccatatggtgaaaccttcttcaaataccccactgggaggttttctgatggtcgtttaattccagactttattgccgagtatgcaaatttaccactaattccaccatatcttcaacctgggaatcatgaagttactactggggtcaactttgcttcagctggagctggtgctttgtctgaaactaatcaaggattcgtgatagatttgaaaacccagctaagttatttcaagaaggtggcaaagcagttgagacaggaactaggtgatgcggaagccatg

SEQ ID NO: 201717 - DNA, 447 bp, Gossypium hirsutum
attgcatatgcacgttccaacaataaggttgttattggccgagctaccgtcggaggaattcaggctgcagcttttaagattggtgacactgctggaacaattgacaacattgttcaatgcaagctgtacaggcctggatctgttggctttgtctccaaatctggtggtatgtcaaatgaaatgtacaacacaattgcccgtgttacagatggaatctatgaaggtattgcaattggaggagatgtcttccctggctccactttatctgaccatattttgcgatttaacaatattccacaggtaaagatgatggttgtgctcggagagcttggtggacgagatgagtattccttggttgaagccctgaaacagggaaaagtgaacaagccagtggttgcttgggtcagtggaacttgtgcacgactcttcaagtcagaagtacagttt

SEQ ID NO: 201718 - DNA, 434 bp, Gossypium hirsutum
ccatgatattgatgttgatgatttaaaaaataatgcacggggtactggtggctattctgagggaagtcgaactgttaaacttttctgggaggttatgaatgattttgagcccaaagaacgttgcatgctgctaaaatttgtgaccagctgttcgcgagctcctttattggggttcaaatacttgcagccggctttcacaattcataaggttgcaagtgatgctcctctttgggctgcaatcggaggttcagatgtggagcgacttccatcagcttctacatgctataacactctcaagcttccaacatacaagcggtcaagtactctgaaagcatagcttcgttatgcaattaattctaatgctggatttgaactttcttaaggacctgagatttttaactggcgcataataggtggtttaccattatcactag

SEQ ID NO: 201719 - DNA, 443 bp, Gossypium hirsutum
  unsure (1)..(443): unsure at all n locations
gtgacgccacaatggatgatgtgcttgccaactgtgatacgaaccttggcatcccctatagctccctgcttaatgatgctgtccgtgtcagctatgctgctcacctcatgctcgtatttcccattgtcttctatccactgcgactcaacatggatggcctcctcttcccttattcaagtcctctagctcagtctaatacaaggtttgcttgtattactgccggactcatagcagttatcttcttgggtgcgaatttcatacccagcatctgggatgctntgcagntcactggagcaactgctgctgttagccttggcttcttttttcctgctgcggttactcttaggaatcaccacttcatagcaacaaggaaggacatgatgttagctcttttcatgatggtccttgccgtattctcaaatgcggtagccatatacagcgat

SEQ ID NO: 201720 - DNA, 405 bp, Gossypium hirsutum
  unsure (1)..(405): unsure at all n locations
gcttactggacgggattcaagtcacctgaacaaatttcagaggttcggaacactggggtgagacccgagatattgaagaatgttggcaaagcaatcacaacccttccagataattttaagcctcatagagcggtgaagaaggtttatgagcaacgtgcacagatgattgagacaggggagggccttgactgggctatgggtgaagcacttgcatttgctacattactggtagaaggtaaccacgttaggttgagtggtcaggatgttgaaaggggtacattcagtcatcggcattctgcgattcatgatcaggaaaccggngaacagtattgccctctggaccatgttatcatcaaccaaaatgaggagatgtttactgtcagcaatagttctctttctgagttt

SEQ ID NO: 201721 - DNA, 421 bp, Gossypium hirsutum
cttactttgggtgaacaccatgaaccaaattcccaaggtgactagttggtcactcgattgtcttgacatcatatccttattcagatcctcagtattgtggaattctgacttcatatgggccacaaatgatggtgtcaccacatctatatggaatgcatcatgctagaatgcctttgcctcttaaaatggaagaggagcctgtttatgtaaatgcaaagcaatatcatggcattttgaggcgaagacagatacgtgctaaggctgagcttgaaaagaaagccattaaagttagaaagccataccttcatgagtcccggcatctacatgctatgagaagggctaagggttgtggaggtcgttttcttaatacaaagaagcatggtgatgatgttaccagccccactttacaaaaggcatgaat

SEQ ID NO: 201722 - DNA, 410 bp, Gossypium hirsutum
cttacgcgcaaccctaataggtttcccaacacttcagccagacctgagccggacccaactgtcccggttctctccaaagatgtcactatcaaccaaacgacacacacatgggctcgtgtgttcctccccaggcagaagccgcttgatacgaacaagttccctctcatagtttattaccatgcaggaggcttcatccactgcagtgcggcatccacgatcttccatgttttttgctcaaacatggcgttggaactccaagccatcgtcgtgtccgtcgactatcgtcttgctcctgagcataggcttcctgctgcttacgacgacgctattgaagcgttgctctggatcaaaaccacccaagaagagtggttgacacaatacgcaaatttcaccacttggttcgttatggg

SEQ ID NO: 201723 - DNA, 409 bp, Gossypium hirsutum
gaaggtccttcaactttctgtgctttcattccttattgtgagagtgtcattgaatggggcaactttagctcatccttatggagatttccttcattgcctttctcttcgtatatcaaactcttctactatttctaaagttatttacacccaaaataatccctcgtattcatcagttttgaatgcttctattcataatactaggttcgctacacccaccacccctaaaccctatgccattattacaccactcaaaacatcccatgtccaatcaacaatttattgttccaaaaaccatggcttccaacttaggattcgaagtggtggtcatgatgttgagggtgtttcttatgtttctcaagttccatttgtcgtccttgatttggtcaactttcgagatgttaaagttgac

SEQ ID NO: 201724 - DNA, 441 bp, Gossypium hirsutum
  unsure (1)..(441): unsure at all n locations
ggaattaaaggcaaaagctcaggtttctcatgcacaaccgggtgaccttattgacttttaccatttaaagagtcgaaagggtatgagtcagctggaattggaggatgaggttcaagatgatttaaaacgagcaactggagagtttgtcaaggatccagatgatgcaaataagctcaaccgcattcttcaactgacaggatttagtgatccggtatatgccgaagcatatgtcactgtccatcactatgatattgttcttgatattactgttatcaaccgaaccagggaaacccttcagaatttgtgcttggagttggctactatgggtgatctgaaacttgtggagcgtnctcaaattataccctagctcctgaatctagcaagcatataaagccaacatcaaggtgtctttaactgagactggagtcatatttggcaaca

SEQ ID NO: 201725 - DNA, 423 bp, Gossypium hirsutum
  unsure (1)..(423): unsure at all n locations
gaagcatggccgtcgggaagaacaagaggatttgcaaggggaagaagggaggaaagaagaaggcagcggatccttttgctaagaaggattggtacgatatcaaggctccttcagttttcactaccagaaatgtgggaaaaactctcgtcacccgtactcagggtaccaagattgcttctgaaggactcaaacaccgtgtgtttgaggtttccctggctgatcttcaaggtggtgatgaggatcatgcttacagaaagattcgtttgagagctgaagaggttcaaggaaaaaatgttctgaccaacttctggggaatgaattntacaactgacatactgaggtctttggttcgtaaatggcaaaccctgattgaagctcatgtngacgtgaagacaactgacaattacactttgagaaatgtct

SEQ ID NO: 201726 - DNA, 436 bp, Gossypium hirsutum
gtagtctcgagttcactcattaatatgtatgtaaaatgtgggcagctagagattgctcgtactgtatttgatcaacttggttccaaggacttgatttcctggactgcaatcatgtcaggttatgccatgagtgggagaactagagaggcaagggaactctttaatatgatgccggaacggaatgtaatctcatggaatgcaatgctagcagggcatactcgtttgtctcagtgggaagatgccttagaatttatttttcttatgcggagaatgactaaagattttgaccatgtgacgcttgttctaattttaaatgtctgtgctggcctgtcagacgttgaaatggggaaaaaggttcatggatttatctaccgacatgggttcttttccaatatatttgtaagtaatgcacttcttgacatgtacctgaaatgtg

SEQ ID NO: 201727 - DNA, 442 bp, Gossypium hirsutum
cagttgtaaaagctgcagttgatgaaagattaagggggctgcaaatttggagggaatcacagggccgggcatctaagctatatggttttaagcatgattctatgtcatcgcttaggaaaacaagtaagacaggagaattggttgattcaaaaactaatggagatctttcacgttccaagtccgaatcaatgaatgaggatgaaaatcttctttgtctgacaggagatgctaagtcggattctgttccagatcttcaacagcaggttgtagggttaaaggtcgagttgtgcaggttgctggaagagaaaagatcagctgttctcagatctgatgaactggagacagcattgatggagatggttaagcaggacaatcgacgccaattatgtgctagggtagagcaattagagcaagaagttggtgagcttcgtaaggcactgtt

SEQ ID NO: 201728 - DNA, 395 bp, Gossypium hirsutum
agttgctagtcgcctgaagatcacaatagtaggtggctctagacccgaacgctgtggtgataagttgtataatacttgttgtgtctttggtactgatggaaagctgaaagccaagcatcgcaagattcacctttttgatatcgatattcctgggaagattacctttatggaatccaaaacccttactgcaggggagactcctactgttgtggacacagatgttgggcggattggtataggcatctgttatgacattcgctttactgaattagcaatgatatatgctgcaagaggtgctcacttgatatgctatcctggagcatttaacatgacaaccggaccattgcattgggagttatcgcagagagcaagggctatggataatcagttatatg

SEQ ID NO: 201729 - DNA, 407 bp, Gossypium hirsutum
  unsure (1)..(407): unsure at all n locations
ctgggaacggttcatcatgagtttcacttcactgttgaggatggaattgatgccatcgaagatgtcatctaccacatagaaacctatgatgttaccacaatcagggcaagcactccaatgttcttgatgtcgcggaagatcaagtctttaggggtgaagatggttatatctggtgaaggctctgatgagatttttggtgggtatttgtacttccacaaggcaccaaataaggatgaattccaccacgaaacctgccgaaagatcaaggcccttcaccagtatgattgtttgagagctaacaaagcaacatctgcatggggattggaggctcgagtcccattcttagacaagcaattcatcaatgttgccatgtctatagaccctgaatcaaagatgatnaaaaggga

SEQ ID NO: 201730 - DNA, 434 bp, Gossypium hirsutum
acaacatgtcttattgggcatccggtggaagtccatgtgaggagcggatcaatttacactggaatatttcatgcaactgatgcataaaatgattttggaatcatcttgaaaatggctcgcttgataaaagatggttctttgtgtggttacaagtctactacagagtttgttagcaaggcaccctcaaagattttaattatacctgacaaagaacttgtgcaaattatagcaaaggatgtggctgtaaccagggatggatttgcaagtgatccccaaaatgaaaaatatcacgagattctgatagattctgcaatatcacagtcccgacatgttgaggttgatagggaattggagccctgcgttcctgacgaagatgatctgcagtgtcctgagctagaaaatatttttgatggaccatggaatatgaactggga

SEQ ID NO: 201731 - DNA, 396 bp, Gossypium hirsutum
attgagactacctcttgagtcagaccaagttcttctgaaagtcatttatgctggtgtaaacgcaggtgatgtgaactttagcgcaggccgttattttcaaggaaccaagaaagaccctggatttgaggcagtgggaataattgctgccattggagattctgtaagaaatttggaagttggaactcctgctgcagtcatgactattggatgttatgctgaattcatgaaggttccttcaaagcaaatacttccaattccaagacctgacccggaagttgttgctctgcttacttcaggattaacagcatcaatcgctttggaagagcttggtcagatgaaatctggaaaagttgtccttgtaactgctgctgctggaaggactgggacaattgcagt

SEQ ID NO: 201732 - DNA, 444 bp, Gossypium hirsutum
  unsure (1)..(444): unsure at all n locations
cctattgcaagtgatcttactttctcaaggtactggaattggttgaggaagcaaacatttgttttggaatcatatataagcacggctaattggctaatgaatagagcactgtttttaacccacttctatctgtcatggggatttgttgcaccgtacttcatggctatggttcatgttgcagcagcactacaaatctatataaaagattattcatatggcgaaacaacctgtacttctggtggattgttattggcaatttggctagctatatgtaccttcacggagctactttctatgtggaacttaacaaggattgaagttcaactatgcaacattttatcttcagaggcacctaagctctcactggattattacaactggagcatgatttttgttgcaatgctggttgataatnttctatacccgatctctgcattctggtcg

SEQ ID NO: 201733 - DNA, 442 bp, Gossypium hirsutum
attgagactacctcttgagtcagaccaagttcttctgaaagtcatttatgctggtgtaaacgcaggtgatgtgaactttagcgcaggccgttattttcaaggaaccaagaaagaccctggatttgaggcagtgggaataattgctgccattggagattctgtaagaaatttggaagttggaactcctgctgcagtcatgactattggatgttatgctgaattcatgaaggttccttcaaagcaaatacttccaattccaagacctgacccggaagttgttgctctgcttacttcaggattaacagcatcaatcgctttggaagagcttggtcagatgaaatctggaaaagttgtccttgtaactgctgctgctggagggactggacaatttgcagtccagcttgcaaaactggcaggaaataaagttgttgcaacttgcgga

SEQ ID NO: 201734 - DNA, 441 bp, Gossypium hirsutum
  unsure (1)..(441): unsure at all n locations
gtttaaggttgttcttgtgtttctttctctttactgcaagttctgtcaacattgtatgcagccgtagtctgcaaaaagatcatatcgccttgtttgtctttggggattcagtgtatgatcctggaaataataactacatcgacacgattgctcgggcaaattattatccatatggtgaaaccttcttcaaataccccactgggaggttttctgatggtcgtttaattccagactttattgccgagtatgcaaatttaccactaattccaccatatcttcaacctgngaatcatgaagttactactggggtcaactttgcttcagctggagctggtgctttgtctgaaactaatcaaggattcgtgatagatttgaaaacccagctaagttatttcaagaaggtggcaaagcagttgagacaggaactaggtgatgcggaag

SEQ ID NO: 201735 - DNA, 292 bp, Gossypium hirsutum
atccaagacaaggaagggattccaccagatcagcagagggggatttttgccggaaagcagctcgaggatgggaggacacttgcggattataacatccaaaaggagtcaaccctgcacttggtgctgcgactgcgtggtggaatgcagatttttgtgaaaactttgactggaaaaactattacattggaggtggagagctcagatacaattgataacgtgaaggccaagattcaggacaaggagggtatcccacctgaccagcagaggttgatttttgctggaaagcaactcg

SEQ ID NO: 201736 - DNA, 460 bp, Gossypium hirsutum
cgtcgagagagaataacagagggaaagcttaagcaatggcggccgaggaggacagcggagagttttacctccgctactacgtgggccacaaagggaaattcgggcacgagtttttggagttcgagttcaggccagatgggaagctccgatacgctaacaactccaactacaaaaacgacaccatgatccgcaaagaggtcttcctcactccttccgttcttaaggaatgccgccgcatcatcgccgacagcgagataatgaaggaagatgataacaattggccagaaccagaccgtgttgggcggcaagagcttgagatagtgatggggaatgagcacatgtctttcacaacttcaaagattgggtcccttggtgatgttcagagcattaaggatcctgaaggtcttcgcatattttattatctggttcacgatttgaagtgctttgtattctctcttat

SEQ ID NO: 201737 - DNA, 444 bp, Gossypium hirsutum
tatttacccgtgtgtttgcttcacttccagatgatgtaaagcttgatgaacaactttctgagaagatggctcttgttcagcaattcgttcggcctgagaacttggatattaagccggcctttcagaatgagacatcatggctgcttgcacagaaagagttgcaaaaaattaatatgtacaaggctccaagagacaagcttgtgtgtatcctcaattgttgcaaggttatcaataatttattgcttaatgcttcaattgcttcaaatgagaatcctcctggagctgatgattttcttcctgtgttgatttatgttaccataaaggcaaatcctccacagctgcactcgaatttattgtatatacaacgttatagacgtcagtctcgattagtttctgaagcagcctacttttttacgaacatgctgtctgctgaggctttcatct

SEQ ID NO: 201738 - DNA, 449 bp, Gossypium hirsutum
  unsure (1)..(449): unsure at all n locations
attttcttctcgttcccgttagccccccacgaacttaggcggagcagaggctagagagatgtcggcggcggcggcggcgacaagccgagcgactcgacggatgggagccgaggatgagaagctagtgttcgaaacgacggaaggaatcgagccgatattgagttttgatcagatgggactaaaagacgatctcctccgtggaatctacaattacggcttcgaaaagccatctgctatccagcagagagccgtcatgccgataatcaatggccgcgacgtcattgcccaagctcagtctggtaccggtaaaacttccatgattgccctcaccgtttgccaagtggttgacacagctagcagagaggttcaagcattgatactgtcacccacgagggaactggcttcacaaacggagaaagtgatacggacaatnggtgatttcatgaaca

SEQ ID NO: 201739 - DNA, 347 bp, Gossypium hirsutum
aaaagataacgatattcacaagaaaaaagttgaatgtgattggtacagcttggagggcccggctgggatgttaagcttggaagaagggattcaaagaccgccagcttttctgctgcgaatagtggtgtcatcccacctccgaccgccacccttagtcaactcatcaacagattccaagcgcgaggtctttctgccaaggacatggttgctttatctggtataatagaccattctttcctcccctgcactgcactactttattatatctatacatctcttctaagctaaattgctttatggtgccgagccaggggctcacacaattgggaaggcaaggtgcgtgcttt

SEQ ID NO: 201740 - DNA, 372 bp, Gossypium hirsutum
cagtgggatttttttctagtgggataatgtactacagtgtgccattataccgtggaaaggtatccctgaatctctatttgggcctcacattaaacaccttatcccaattgccaacgtcactcattacattcttccttatatggaaaatgaaaaggaaagactcattgttgggtttcacaatattaaaccgtgtgtgcaccatgttgtgtgttgttgttgggaaagtgtcaccaagtttacagatagcaatggagcttatatccttcttcaatgcctgcttcgccttcaacatgtcactgatatacacattatagctgtttcccacattccttaagaactccgcaatattaatagtgaatcaaacactttttt

SEQ ID NO: 201741 - DNA, 318 bp, Gossypium hirsutum
ggaaattcttgaggtgacccaagttaccccaacctttaactcaccaaaatgaacgactgagttccgtcttccactcactttctccgacataatctggttcaagtttcctcctgttgagcgcctcttcttttaccaattcgacgagttaacccctgcctgtttcaactcagttatcctcccaaaactcaagcgctctctttccctcacactcgtccattacctccccctcgctggcaatctcaagtggccaccaaacgaacctaaacccatcattttatacactccaaacgatggaatttcccttacagttgcccactc

SEQ ID NO: 201742 - DNA, 418 bp, Gossypium hirsutum
caaaagcctgatgtgtttaggggaactgtacgttatgcaagtgtgcatgctcatttgggtaggacaggcagtcgaagggatgaccttgagtcattggcttatacactaatatttttacttaggggagaacttccctggcaaggttacattggggagaacaaaggatttcttgtttgtaagaggaagatggcaacttctcctgagatgctttgttactagtgccttcatccttttcaacaatttcttgagattgtgaccaacatgaaatttgttgaagaaccaaattactcaaagctcatttctctattccgtattagcattgatttcaattgatcaatatgtcctatccaaattgatggagctattaagctgggtcaaaaaaggggatgagcaccttttgagctggaatatggtgagc

SEQ ID NO: 201743 - DNA, 412 bp, Gossypium hirsutum
gcaagcacgagtttcatcttcagtgcattcttgaatggtgtcaaaggagttctcagtgcccaatgtgctggcagccaatcagcctgaaagatccaaccagccaggagttgcttgaggctgttgaacgtgaaaggagttttaggtttaatccttctagaaatgcagccatatttcatcatccaacgctggtggattttgaactacagcatttgccaatggggacaaatgatgctgaacttgatgagcgcataatccagcacttggctgctgctgctgcaatgggacgagcacgtcacattgcatggagggaaggtatgaggaataggtcatcaattcaaggtcgtcctcaattcttggtattttcaacacatccaaatgcaccttctactgttcctatatcctcactagttgc

SEQ ID NO: 201744 - DNA, 438 bp, Gossypium hirsutum
  unsure (1)..(438): unsure at all n locations
gccattcctccctttcttcttgttcggttgacgcactttgtattattgcttttacagcacaaccaaaaacaagctctttttccaattccaaccggcaaaagcctctctttcccacaaaaaaacactccccttttgctgttctaaaaattgggactttaaactgcgcgagagtagctggggagatggaaatcggaaagggtattgctgcagcaggaaaacccattgttgatcttcatggtattgatgacggcttgattcanaagattgtatatgatgctctnngttggagttctcttcatgggccttgtgttggtgacagaaatgatcagagatcntggaaactacctggtgttggcatggtgcacgctccaattgctttgttgcccacgtcatttccagaatctcactgganacaagcatgtgaactagctccaattt

SEQ ID NO: 201745 - DNA, 435 bp, Gossypium hirsutum
aaaacacatcagtggtctgtcaaacttgaggagtctgacttttcggagaaacagtgcaatcactgcacaaggaatggcctagtaaacctgatgaagctggacctggaaaaatgtcctgggattcatggggggcttattcacatcaaaggtttgacaatgttagagtctcttagtattaaatggtgtaattgcataacagatgctgatatgaagcctctttcagggcttacaaacttgaaaagcttacagatttcctgtagtaaggttacagattttggcatcacttatttaaaaggtctgcaaaatctttctgttttgaacttggaaggctgcccagttacagcttcgtgctttgatactctttcagtgcttgtatctctggtatatttgaatcttagcagatgccaattatccgatgatggatgtgagaagctt

SEQ ID NO: 201746 - DNA, 378 bp, Gossypium hirsutum
  unsure (1)..(378): unsure at all n locations
gtttatgggagtttgattgtgatgctggtatttttgcctgtgaagcttgctatgaggatggtgccctctattttcccacttgatatatcggtatctgatccatataccgagattccagctgacatgcttctctttcaaatatgcattccttttgctgttgagcattttaaattgagggcaacaatcaagtctcttttgcgctattggttcactgcagttggctgggcattaggcttaacagactttttacttcccagacctgaggagaatggtggccaagacaatgttaatgtggaaccaggacaacaggatagactgcaggttgtgcaactaggtggacaggaacagnccatgggtgcatttgctgctgctgatgat

SEQ ID NO: 201747 - DNA, 427 bp, Gossypium hirsutum
  unsure (1)..(427): unsure at all n locations
gtgcgtgcttttatgagaacacggcttgggtggagtggcataacaaaaccggcagtgaatttggcggtggaactctacatataaaggtcagctacccccatagttggacttgtatggatctttatgtgttcgcaactccgtaccgcgtaacttgggattattattttttgtctcgagagcatacgctcgaaatcaaggaatggcaagataaagctgagtatgaatatgtgaaaaacagggggatttcaatttttctgatgcaagcagggatgcttggaacacttcaggctctatgggatgtgtttcccttgtttacanaataccgatggggtgagaattctaatattgggtttcttgagaaacatatgggggctacttttgaagaacgacctcagccgtggtttactaacatcagtgtcgatgatgt

SEQ ID NO: 201748 - DNA, 436 bp, Gossypium hirsutum
gtttcctgtttctttgtcatggatggatgtatttacaggactgagcaatgcctcccatacacaatttagcaattttggaagctctcattcttctaattcagctcagcatcagtcagtctctgtgaatgagcagttggaagagaagtggtatgctagtccagaggaaatcaatgaaggtgtttgcacaattttatctaatatatacagtttgggtgtgctgttttttgagttgctttgtcaatttgaatctgagagagcacatgctgctgcaatgttggatctatgccataggatttttcctccaacttttctatcagaaaatctcaaggaagctggattttgtcttagactacttcacccagaaccttctttgcgcccaacaaccaggtactacaaattgttcatcggtgctaaatgtgaagctctagaatcttat

SEQ ID NO: 201749 - DNA, 432 bp, Gossypium hirsutum
tcatcacggtccaaaatggcagcagcggaacacatgggatacaattatgccatgtttgggttctctccttatggacagtattggcgtgaaatgcgtaagataacaatgttagaggtgttatcgaaccataggattgatcagttgaaaaaagtttttgtatccgaaatagaaggttcgataaaagatctatacaagttttgggttaaggaaaaggatggtgaatcgggtttagctgccgttgagatgaagaaacggttcttggacttgacgttgaacgttattcttaagaccgttgctgggaagaggtattcgggtgtcggtaaagaagagcaacaagtggtgtcacgttaccgtaaggccttgagggattttttttacttgtcgggcatatttgtgataagcgatgccattcctttccttcgaaagcttgat

SEQ ID NO: 201750 - DNA, 426 bp, Gossypium hirsutum
gcaaattcccttcttttcccctccacccaagcctaaaaaatcatggcgacagctcaaatcagcaaaaaacgaaagttcgtcgctgatggagttttcttcgcggaactcaacgaggtattgaccagggaactggctgaggatggatactctggagtcgaagtcagagttactcctatgcgtaccgagatcatcatcagagccacccgcacccaaaacgttctcggtgaaaaaggtatgaagattagggagcttacctcaatggttcaaaagcgattcaagttcccagaaaacagcgtcgagctttacgctgagaaggtcaacaacagaagcctttgcgctattgcccaggccgagtctcttcgctacaagctactcggaggtcttgccgttcgcagggcctgctatggtgtactgagattcatcatg

SEQ ID NO: 201751 - DNA, 436 bp, Gossypium hirsutum
gttgctaacactttcgggtcatttgctttactcgtagtttttgcgttgggtggcttcgtcctgtcacgagaggacataaagggttggtggatatggggttactggatttcaccaatgatgtatgggcaaaatgcattgatggctaatgagttccttgggcaccagtggagtcgagtccttccgggttcaaacgtatcactaggagttgaagtcttaaattccaggagtttcttcccagattcatattggtattggatcggagtaaggggattgattggcttcgtattattgttcaactttgtctttactgtggctctttcctatctagccccctttgagaaagataaggccgtaatatcagatgaacctgaaagcgacgatcaagtcaatggggctggagttggtggaagcattcagttaacaaaccatgaaagca

SEQ ID NO: 201752 - DNA, 415 bp, Gossypium hirsutum; identical to SEQ ID NO: 191307
  unsure (1)..(415): unsure at all n locations

SEQ ID NO: 201753 - DNA, 333 bp, Gossypium hirsutum
ggacggaattcaacacaaaacggtgattgtcaatggcatcaacatgcacatagccgagaaaggggaaggtccattgattctcttccttcatggcttccctgagctctggtactcgtggcgcaaccagatcaacggtttagccgccctcggctaccgtgctttggcgcccgacctccgcggttacggcggaacagatgcaccagattccgtcgccgattacacttgctgccacgtggtgggagacctcatcgcgcttctggacacagtggcgccgccggagaaggaagataaggtgtttgtcgttgggcacgattggggtgccatcattgcttg

SEQ ID NO: 201754 - DNA, 341 bp, Gossypium hirsutum
atctctacttccatttcatctgccatcaatttgctgtgaagatcatgttggctatttttcacaaggcatttgctaatccaccagaggagctgaatagtccagcttctcataaatctaccaagaagcctaaacagcctgaagaaaccctaaatgatttcctatctcatcaccctcacaacactttctccatgagctttggcaacgctgctgttttggcttatgtccgccatgaacgtgctgcttcagttcatcagaggttgttttgtgggtttgatgacatatactgcctcttcttagggagcttgaacaatctatttatgctgaatagacaatatggtctt

SEQ ID NO: 201755 - DNA, 331 bp, Gossypium hirsutum
atatctttgagctttacacttgaggccgtaaattgggacaggtacagtttgaggggacttaggtatgtaccgagatttcgactgggattgaatatgctcgtaagtccatatcgaaaaggaagatgatttgcatggatgatgtggaggatgttaggagggagatccaaattatgcaccatctgtctggtcataagaatatcgtgacgatcaaaggcgcttacgaggatcctttattagtgcatatcgtgatggagctttgctccggaggcgaactgttagatagaattatccatagggggcattacacctagaggaaggcagcttagttgac

SEQ ID NO: 201756 - DNA, 423 bp, Gossypium hirsutum
  unsure (1)..(423): unsure at all n locations
tcccaattcagcaatccatttctgcaaccaaaaacacgaaggactccatcaatttataaactcgaagcaatttgaagaaatcccatcactcatttcacctccaatccttttaaaaacagggcattcaatatgcaggagaccaataattctcgagtcaaccaacgaattgcaacaatctcggctcatctcaacccacccagtttttcccacatggagggtagttcgggtttgggtcgagctgactgccgagccgaaggtgggtcaactggtttcaaggtggcgattttgggagcggcaggtgggatagggcaaccgttatcattgctgatgaagatgaaccctntggtttctgctcttcatctttatgatgtggttaacactcctggtgttactgctgatattagccacatggatactgtagct

SEQ ID NO: 201757 - DNA, 407 bp, Gossypium hirsutum
ggctgctggtggatttggaggcatcaggatcctcaggaggcccagaatcccggtccctttccccgaccctgccagcgatttcactgttcttatcggagactggttcaagactgaccataagaaactgcaagccaagctggataggggtcataaacttcccttccctgatggtattctaatcaatggtcatggtcctaatggtgcatttttcacagttgaacaaggcaaaacttacaggtttaggatctcaaatgtggggcttcaaaattcactaaatttcagaattcagggtcataaaatgaagctggtggaagtagagggaacccacaccgttcaaaccatgtatgagtcacttgatgtccatgtgggtcaatcctattctgtgcttgttaccatggatcaatctg

SEQ ID NO: 201758 - DNA, 419 bp, Gossypium hirsutum
  unsure (1)..(419): unsure at all n locations
gtctcctaatgggcaatctgaacaaactgcaaatggtgggttctcttcatatacaaacaacctctcatctgggcggaatcagaaccttcatcccttccctcatgtcatgaatatgcacaacgcangaccatcatcaggtgtaggccaatcatatggatacatgaaccacatgtaccctaacaatgtgacctatggtcattatgggaatgccattagaggcggttctgggtttggatcatatggatatgatgcccggaagaaaggtctagggtggtataatgttggtaacaacaaatctaggttccgtggttatggaaaagagaatatcgatggtttcaatgagctaaacanaggacccaaagtaaaagggtataagaataaggattgttctggaaatgcaactctagctgtcaaagatc

SEQ ID NO: 201759 - DNA, 433 bp, Gossypium hirsutum
cttaaattcaaactttgaatgatccatttcacttctcattagctttcgtttttttgttctttttaccctgttttcgtttctcattttcctctttgctagctctttgaatctctgagggaagatatggcggccaatgggaacggagtttcgacgacgccgaagagttcgttggcgaggattcagacgcagaagaacggtggaatctgtcatgacgatagcgggaagcctgttaaggctcagacgatcgacgagcttcactctttgcagaagaagagatcggcgccgacgactcctcttgacggcgttcagggtacctttgccaccatttctgaagatgagcgccagaggcagcagctccagtccatcagtgcatcgttggcgtcactcactcgaggaacagggccgaaagtggtgagaggggacccggcaggga

SEQ ID NO: 201760 - DNA, 328 bp, Gossypium hirsutum
cttaatgatgcagctgatgaattctttgatgttcccgaaccaacagactatgagcaatcagaagatggttggacttctgactttggtcctgaagtatctcaggatacacgtcatccaaagttatcaactgctgctgtttttgtgaagaagttacatggtcttgcagttcaaaaacgaggctacatggacttacaagacatgacgagggaagatggtatatgttgctcctatggaaacactcttaccaaggatccaacttgtacattgccttgtagttggacagctgcagaaccctcaacatttgtaattcgcggagagaattacctag

SEQ ID NO: 201761 - DNA, 435 bp, Gossypium hirsutum
  unsure (1)..(435): unsure at all n locations
cttcttcaatggcagtgtcagaaatctcgcgatgtacttatcatgtattcttgagttttagaggtgaagatacgcggaaaagtttcacggatcatctttacacagctttggtgcacttaggaattcgaacatttagagatgatgaggaaatcgagagagggaataacataaaagatgaaattgaaaaagcaatactacaccactccaaaatttctatcgttgttttctcaaagaattatgctgcatccacatggtgtcttaacgaactngtaatgatattggagcacaagaaatcctctaaacatattgtgttgccagttttctatgatgtggatcccagtcaagtcaagaaccagacgggaagttatgcagaagcatttacccaacatgaacaaaacttcgagtccatggtacanagatggaggaatgctttaa

SEQ ID NO: 201762 - DNA, 357 bp, Gossypium hirsutum
acacactcacacacacattcactgaatgggtcgagtgatccgagctcaacgtaagggtgctggttccgtcttcaaggcccacacccaccaccgcaagggtcctgctcgtttccgcagcctcgacttccgtgaacgaaatggctacctcaagggtgttgtcaccgatgtcatccacgaccctggtcgtggcgctcctttagcccgtgttgtcttccgtcaccctttccgttacaagaagcagaaggaacttttcgttgccgcagagggtatgtacactggacagttcgtctattgtggtaagaaggctactcttgtggtctgaaatgtattgcctcttagatctatccctgaaagagc

SEQ ID NO: 201763 - DNA, 398 bp, Gossypium hirsutum
agaaaccttatgttgtagagcttgatctccgagatgatggagctgaaatccagtatgtcatcctggatttggtaggtcgtggaactgttccacaagtgtttgtgaatggcaagcatattggaggctctgatgatctcagtgatgcagtccataatggtacattgcaaagccttctagctgcaagttaatgtaagaaagatggaaataaattgacttgtgaactgtaaagctgcctgtggattagaagatcatttctgggttgtgaacttagtacgttcactgcaagattttgttgagtgcgctgagataatggcatgtctctttgaagttatcttatatttcatcttcatcatggaagagaatgactatgttctaggtcttaagttcattgtaaatgt

SEQ ID NO: 201764 - DNA, 293 bp, Gossypium hirsutum
cttaaattcaaactttgaatgatccatttcacttcgcattagctttcgtttttttgttctttttaccctgttttcgtttctcattttcctctttgctagctctttgaatctctgagggaagatatggcggccaatgggaacggagtttcgacgacgccgaagagttcgttggcgaggattcagacgcagaagaacggtggaatctgtcatgacgatagcgggaagcctgttaaggctcagacgatcgacgagcttcactctttgcagaagaagagatcggcgccgacgacttc

SEQ ID NO: 201765 - DNA, 356 bp, Gossypium hirsutum
agtaataataaaaagtttctaaacagaaattgttttaagcaaagttacaattttcaaacacactaccatatgacatcgcctgatccaaccgtaatgtctaggcagggtttggggtgttacaaatggcctttgttaaagagtttgaagataaatgcattagattgagacactgtttggaattcccttgcccgtaagtccaccttcactagttggatacaacaatgtgtatggcatattgaccggaccaacacggttcttcaattgctcgtcattgttcatctctacaatccgttcctctatctcggtaagccgctttctgaattcatcaaaagctgcaagtggggtttcgtctgacg

SEQ ID NO: 201766 - DNA, 357 bp, Gossypium hirsutum
acatgctgttattgagttaactagaaaggctgaggaaataaccaaagctctgaatcttgaccatgttcttgaagtttctaacaaacagtgcccttgttacaattcaatgggagaagctgacattgacaacaataagctaaggaaagcagcttctcgagaagatgccactgacaactatttatattgtccaaaagctaaagatattgagagcggagatttgaaacatttccaaaagcactgggctaatggtgagcctgttattgtcagcaatgtccttgagaatgcatctggtttgagctgggagccaatggttatgtggcgtgcttttcgtcaagtaacaaattaaaaaagtgatca

SEQ ID NO: 201767 - DNA, 423 bp, Gossypium hirsutum
gctacttaaccatttcccaaatctcctccctcctcttggttagcgtccttttcatttccgctcatgcagcgcgctttgaaatccgcaatgagtgctcctacaccgtctgggcagcagcctctcctggtggtggccgtcgcctagaccctcggcaaagttggaccatcgatgtgcctgctggcactgctatggctcgtatttggggtcgaaccaattgcaatttcgatgccagtggtaggggtcattgccaaaccggtgattgtggtggactccttcaatgcaaaggttggggtgtaccttcaaacaccctggctgaatatgcacttaaccaatttggaaacatggatttctacgacatttccttagttgatgggtttaacatccgcatggtgtttggtccaactaatggcggttgtcacaaca

SEQ ID NO: 201768 - DNA, 418 bp, Gossypium hirsutum
ctagactcttcccttgtaactgttaaaatctttgtcactgtgatcattaatggccaccgctgaacctgaagttccagtcactgagcagcagccggcggcagcagaggagccaaagccggcggaaaagcctgtgaaggagaagagacccaaagctccaaaggagaaaaagcctaaacaacccaaatccacagcacgtcctccttattttcagatgatcaaggaggcgcttttggctttgaaagagaagagtggttcaagtccgtacgctatagccaaatacatggaagagaagcacaaggcggtgcttccagcgaatttcaggaaaatcttaggtcttcagcttaaaaactcagctgccagaggcaagctgataaagatcaaagcctcttacaagctctccgaagccggcaaaaaagag

SEQ ID NO: 201769 - DNA, 426 bp, Gossypium hirsutum
  unsure (1)..(426): unsure at all n locations
ccaaaacgccaatattgtaatgggagaaatataagtcctcctacggtttctcttcgcggactcgccctcgatctcagcgaaccgatctccagagggaagaatatactcataagtataagcaaattagatcgaggttctctgataaggtcttcaatttgatattggcttggtacttgcttctccaaaattcaatatggttgtacttgcggcttctgttttaagcaagtctggcaaagtgcttgtctctaggcaatttgtggacatgactcgcataagaattgaaggtcttcttgcagcttttcccaagttggtgggcacggngaagcaacacacatatgttgagactgagaatgttcgatatgtntatcaaccaatagaagctctntatttgctacttgtaaccaacaaacagagcaatattcttga

SEQ ID NO: 201770 - DNA, 357 bp, Gossypium hirsutum; identical to SEQ ID NO: 190626

SEQ ID NO: 201771 - DNA, 376 bp, Gossypium hirsutum
gaaagaagctgctgagatgaacaagaggtcattcaaggatgcttgggtgcttgacaagctcaaggctgaacgtgagcgtggtatcaccattgatattgccttgtggaaatttgagaccaccaaatactactgcactgtgattgatgcgcctggacaccgtgactttatcaagaacatgattactggtacctcgcaggctgactgtgctgttttgattattgattccaccactggtggttttgaggctggtatctccaaggatggtcagactcgtgagcatgctttgcttgcttttacccttggtgtcaagcaaatgatttgctgttgcaacaagatggatgccactacccctaaatactcgaaagctaggtatgat

SEQ ID NO: 201772 - DNA, 312 bp, Gossypium hirsutum
cacagattggtgtttgctatgggatgcttggcgatagtctcccaaattcatgggaagtcattcaactttacaaatcaaacaacatccggcgattgaggctctacgatccaaatcaacaagcattacaagctcttagaggctccaacattgaagtaatgttaggtgttccaaatgatcaacttcaaaacctcgctgacccttccaaagcacgatcatgggttcaatcaaatgttgtagcttactggccgagtgttcagatccgatacattgctgtcgggaatgaagtccctcattcatcttggctagctcaat

SEQ ID NO: 201773 - DNA, 426 bp, Gossypium hirsutum
gtagctctaactacctccgcctgtctttcaacgagaagagaacaagaaaagaaactaagaaatggcacgcaagaagatcagagagtacgattccaagagattgttgaagcagcacttcaaaaggttttccgcctacgatttgcccatcaaatctgcacaagtgacggagtcaactgatttcaatgagctagtagagaaggagccatggcttttgtcgcagaaactggttgtcaagcctgatatgttgtttggaaagcgtgggaagagtggtttggttggcttgaatcttcatttcgctcaagttactgcatttgtgaaagagcgcctcggcaaagaggtggaaatgagtggatgtaaaggacctgttacaacattcattgttgaacctttcatccctcacaatgaagagtactaccttaacatcgt

SEQ ID NO: 201774 - DNA, 340 bp, Gossypium hirsutum
  unsure (1)..(340): unsure at all n locations
agttccgacaaaagaaaacgaaagaaatagaagaaatacaatcgttttctttttgaagtcgggttttagtttttggggagaaaaaaatgttgggagtatttagcagtgcgatagtgtctccgccggacgagctggtggcggccggttgccgaactccatcacctaagataacggcggatgctctggtgaaacggttccttgagacgaactcctccggcgtgtccatgcagatcggagaccatgtccaattcgcttattctcaccataaagagtctnctttacggcccaggtaaaacaaaaatcatatatggtattggcttgtggatgatctcaatcgttg

SEQ ID NO: 201775 - DNA, 405 bp, Gossypium hirsutum
  unsure (1)..(405): unsure at all n locations
gctatcaagagccaccattgctgcctcagctttatctgtttgttattaccattactcctacagcttcattctgtcaaaggtaatctccagttgaactactatgctcaaagttgccccaatgctgaagagatcatcaaacaacaagtcatcaagctctacaacaaacatggaaacacagctgtttcttgggttcgaaatctcttccatgactgcatggttaagtcatgcgatgcatcgttattgttagagacggtgaatggaattgaatcggaacaaaaatcagataggagttttgggatgagaaatttcaagtacgttaagacaattaaagatgctctggagcaagaatgtccaaggacagtttcctgcgctgatatcngctctctttctgctagagatggcatt

SEQ ID NO: 201776 - DNA, 370 bp, Gossypium hirsutum
aaataaaaaatgagctttcttcggctcttgtcagtgttccttttgttcttatcctatgtagtcataggatcagctgagcagtgtggaaggcaagcaggcggtgctctttgccccggtggtctatgttgtagccaaattggttggtgtggcagtactgctaactactgcacagttccgggttgccaaagtcagtgcagcggtagtggccctgcccctgggcctggtgggctaaccaatcttatatcaagagagacgtttgatcggatgcttttgcatagggacgatgggggttgtcctgcccgtggcttctatacctatgatgctttcattgctgctgcacgttcttttactgcctttgctacaactgggt

SEQ ID NO: 201777 - DNA, 347 bp, Gossypium hirsutum
catatattttcattgcaatattcttagcagaatcaaacctgacatggagttttcaaaggtttctaccctagctcttacttgtctcgtggggttagtcttggtccttccctcccatgcccaagactcacaacaagactacctcaacgctcacaacacagctcgagcggctgtcggcgttggtcccatgacttgggacgacaccgtagctgcctatgcagagaaccatgctaagcagcgcatggctgattgcaaccttgtgcactccagtggacattatggtgagaaccttgctgggggcagtgctgacctctcgggaaccgatgctgtaaatatgtgggttaatgaga

SEQ ID NO: 201778 - DNA, 429 bp, Gossypium hirsutum
  unsure (1)..(429): unsure at all n locations
tgagagctatacgctgaatatcacttccgtacaaggatttgaaacctttatgtcaagcttaaagaataaaacatttcgcccaagtaaggaaggtagcggagtggatcttgttttaagttgtgtagacaattacgaagcaaggatggtggtcaaccaggcttgcactgagttgaatcaggcatggatggagtctggtgtatctgaggatgcagtttcaggtcatatacagttgctgattccgggagaaactgcttgttttgcatgtgcacctcctttggttgtagcatctggagtggatgaacgaacactcaagcgtgaaggggtttgtgccgcatctttgccaactaccatgggagttgntgctgggcttctagttcanaatacactaaagttccttgtgggatttggacacgtttctncctacttggg

SEQ ID NO: 201779 - DNA, 435 bp, Gossypium hirsutum
gcaagagggttcgagaggcttgtgaaacttatggttgttttgaggtggtgtaccaaagggtatcaaaaaaagtccgagaggagatgttcgggttggtgaaagaattggtccaggtcccattggagaggaaacaaaagaacgctagtccgttgccttaccatggctgggttggaccatgcagtcaagtttctttgttgtatgaaggctttggacttggagatgcctctaattatgactctgttaaaagatttgctcaacttatgtggcctgatggtcacccacgcttttgtgacactgtacacacattggcgacacaaatggaagagttgaacaagttaatttggttaatgatatttgaaagttacggattaggagagaaatttgagtcactaatgataaactataaaacattggtgcggatgatgaaatacatgg

SEQ ID NO: 201780 - DNA, 427 bp, Gossypium hirsutum
tattggaagaccatagccaactcgaatcaggtccatggagcttatatgaatcggggcctcacgggacatttgttggaatttacgatggtcatggtggtccggctactgctaggtttataaatgaacaccttttcggctatatcaagaagtttacaactgagaatggtggaatgtcagcagatgtaatcaacaaagcatttttggcaactgaggaggattttcttgctcttgtgaggaagcaatggctaaatgacccgcatatggcttctgtcggttcgtgcttgttggtaggaatagtttgtagcggaatgctatatattgcaaatgcaggagattctcgagtggtcttaagaagattggataatacgtataaagaggtcaaggcagttccattatcatcagagcacaatgcaagtgttgaatctgt

SEQ ID NO: 201781 - DNA, 380 bp, Gossypium hirsutum
ccaaagcctgccattgacccttaacaattcattcatgaaaaaaagcttttcctctccattttccattccatatttgttctgcgctctctgtttctgttgttgtgttttaggatttgagagatcatggcgtcgcaagaatacttggacaagatgaaggtccgtcaggagtatcggaatctctggcacacggatctcatgagcaccattcaacgcgaccctccttattgctgcttggctttttggtgtggcccatgtgtatcctacatgctccggaaacgagctctttataatgacatgtcaaggtatacatgttgtgctggttatatgccatgcagtggtaggtgtggtgaaagtaaatgtcccgagttttgcctttgcac

SEQ ID NO: 201782 - DNA, 313 bp, Gossypium hirsutum
aaagaacttttcctccccagcggatctttcagcatatgatggatttgagttgcgcttaaagggtgatggttgtcggtataaactaattgtacgcactagcactgattgggatacggtgggttatacagcaagctatgacaccattggaggccaatggcagtctattcgattgccattctctttactgaagcctgtatttcgagcacggactgtatctgatgctctacccttcaatccaagtaatgccgtatcatttcagctcatgttcagcaaggttgaatatgatgggaaactgaatcccacttttgtagaa

SEQ ID NO: 201783 - DNA, 432 bp, Gossypium hirsutum
acatgctgttattgagttaactagaaaggctgaggaaataacgcaaagctctgaatcttgaccatgttcttgaagtttctaacaaacagtgcccttgttacaattcaatgggagaagctgacattgacaacaataagctaaggaaagcagcttctcgagaagatgccactgacaactatttatattgtccaaaagctaaagatattgagagcggagatttgaaacatttccaaaagcactgggctaatggtgagcctgttattgtcagcaatgtccttgagaatgcatctggtttgagctgggagccaatggttatgtggcgtgcttttcgtcaagtaacaaataaaaaaagtgatcaccaattggaagttaaggcacttcattgcttagattggtctgaggtaagtgtcaatattcaccaattctttaaag

SEQ ID NO: 201784 - DNA, 383 bp, Gossypium hirsutum
atttcgatttgattgaagaagaagatttagcggttcgagtgcaagcgattcgtgggcttcctttgttttgtaaggatacaaaggagtacatttctaaaatagtagacattttagggcaactccttactgctgatgagattgtggagcgtgatgctgttcataaagccttaatgtctgtattaaggcaggatgtgaaggaacttattggaataattgaagggcaggctgatttagatgcacaatttgacgtctctgatgcagatcatattgataggttgatatcgtgtctgttcatggctattccattttttgtgaggggtgcacctggcagcaagtttctcaactacttaaacaaacacattatacctgtttttgataaactt

SEQ ID NO: 201785 - DNA, 338 bp, Gossypium hirsutum
cggaggctttgaatggtgtcaaaatggagttggtggatgctgcttttcctcttctaaagggtgttgttgctacaactgatgttgttgaggcatgcactggagtcaatgttgctgtcatggttggtggtttcccaaggaaggaaggaatggagaggaaagatgttatgtcaaagaatgtgtctatttacaagtctcaggcttctgccttggaacagcatgcagctcctaactgcaaggttttggttgttgctaaccctgccaacaccaatgcattgatcctgaaggaatttgcaccttcaatccctgcaaagaacattaccttgttgacaaggctggat

SEQ ID NO: 201786 - DNA, 373 bp, Gossypium hirsutum
acaggagccaaatgctgatactccacaaacggtagttcaggaccaacttgatgaggctcaaggactgcttaataccaccaactccaccggtcaatcaacagaggcaagactagctcgggtttgagctggactttcatcccgtcttcaagaatacaaatctgagaatgcacagcttgaggagcttctaattgctgagaaggagctgagtaaatcttatgaggctcgcataaaacaactgcagcaagatatatctctatctaaaagtgaagtcaccagggtagaagccaatatgcttgatgcattggcagcatataacttctggatagaagcacttggcaattctattgatgcactatataaacatgctgcttta

SEQ ID NO: 201787 - DNA, 245 bp, Gossypium hirsutum
gtgtacttgaacaatattgtgaaaggctctgatgcaggtattgctgccaagcttgagatcatggaaccatgttgcagtgtgaaggacaggatagggtacagtatgatttctgatgctgagcaaagaggacttataacacctggaaagagtattcttgtggaacctacaagtggaaacacaggcattggccttgccttcatagctgcctcaaaaggatatagactgatcttgacaatgccagcatc

SEQ ID NO: 201788 - DNA, 421 bp, Gossypium hirsutum
gaaaaccgagtttttcagtttgaactcgggtggtttgttgtcaaatggggccgaggttaacaaaaaggaagagaattccattggtgttcttgaggtttatgttcatcaggcaagagatatccataacatctgcatttaccacaagcaggatgtgtatgctaagctttgtctcacctctgaccccgaaagcacggtttccaccaagatcatcaatggtggtgggaggaacccggtgttcaatgataatctacgcctcaatgttcgaactgttgattcctacctcaaaatcgagatattcatgatgagtcgagtgaggaattatcttgaagaccagttgttgggatttgcattggtgccactgtctgaagtgctcctcatgaatgggaagttggagaaagaattctctctttcttcaactgat

SEQ ID NO: 201789 - DNA, 299 bp, Gossypium hirsutum
gtcgtacttagatcaatatagcgtaacggctctagcagcagatatggctccacaagctacgagatcataggaaccatgttgcaacgtgcatgacacgataaggtacagtatgatttctgatgctgaacaaagaggacttataacacctttaaagagtattcttgtggaacctacatgtggaaacacaagcattggccttgccttcatagctgcctcataaggatctacactgatcttgacaatgccagcatcaatcagtttatagagaaaagtactactgaaagcatttggagcttaac

SEQ ID NO: 201790 - DNA, 354 bp, Gossypium hirsutum
ccgcatctttgaggtttgatggagccctgaatgtggatgtgactgagttccagactaacctggtcccatatcccaggatccactttatgctttcttcttatgcccctgtcatttcagctgagaaggcttaccatgagcagctatcggtggctgagataaccaacagtgcttttgaaccctcttcaatgatggccaaatgtgacccacgacacgggaagtacatggcttgctgccttatgtaccgaggagatgttgtgcccaaagatgtgaatgcggctgtggccaccattaagaccaaacgcacaatccaatttgtggattggtgccctacttgattcaagtgcggtatcaact

SEQ ID NO: 201791 - DNA, 378 bp, Gossypium hirsutum
gcataatgggagcaaggagctgctatccatattgttctagtcgactgcaacactgcgcgtgtaggaacaaccggacctgaagcctctatgaagctagatgttgtggtgcttgaaggcgattatagcaatgaggatgatgaagattggacacaggaggaattatgatagccatctggtaaaagagcgtccaagaaaaagaccactgctgacgggtgacttgcaagcgaccctgaaagacggggctggaacactaggagaccttacttttactgacaattcaagatgcataagatgcaggaaattcacgcttggcttgaaggctgctttggatactgtgagggtatacgtgatcgggaagctttgacagatgcttttact

SEQ ID NO: 201792 - DNA, 364 bp, Gossypium hirsutum
aagcagcttgccttaaccacatttccagagaatcctctgacgttagacgccttgctaatttctacaaagaggtaatttctttagaaaatttctttaattctcttttgttttaaaggtttttagctgtttttatacgttaaaaaacgatcgagcatttatgtttttgctttagatctttgggttcgaggagattgagagcccagatttcggggagttcaaggtaatatggttgaatcttccgggatcttttcccatgcatttaattgaaaggaacccactcacgaaacttcccgaaggtccgtacagttccacggcggccgttgctgaccctagtaatcttcctagaggtcatcatatttgcttt

SEQ ID NO: 201793 - DNA, 345 bp, Gossypium hirsutum
cggagacgggatcggacctttggtgacgaacgcggtggaacaagtgatggaagtgatgcacgcaccggtttacttcgagaagtacgacgttcacggcgacatgaaacgggtaccacaagaagtgttggattcgataaagaagaacaaggtttgtttgaaaggagggttaagaacacccatgggaggtggagtcagttcattgaatatgcaattgaggaaagaactggatctatacgcttcattggtcaactgttgtaacttacccggattgccgacccgccatgaaaacgtggatatcgtcgtaattagagagaacactgaaagggaatactcgggtcttgaaca

SEQ ID NO: 201794 - DNA, 369 bp, Gossypium hirsutum
acatagtacgactggaccaacggcttcttgatgctgcagtggctgaagatggagagaattggagtgttggacaaagacagcttgtttgcctggctagggtcctcctaaagaaaaggagaattttggtgttggatgaggcaacagcttccattgatacagctacagacaatgtaattcaggagacaataaggaaagagacatgcagatgtacagtcatcactgtggcacatcggataccaactgtcatcgacaatgacttggttttggatcttgataatgggatgatagtcgaatacgatcagccaaagatattactcgaggacaaatcttcttggttctcgaaattggtggctgaatttttgagatcat

SEQ ID NO: 201795 - DNA, 410 bp, Gossypium hirsutum
gctgatgagagcgtcagctgagttgcttgggaggggaaccgtatggacgacgtacaaggcagtgcttgataatcgtacggtggtgacggtcaagaggctggatgccgggaaattagcagccacgacgaaggaaatgttcgagcaacacatggaatcagttggcggtttaaggcatcccaatttggtccccctcagggcttatttccaagccaaagaagagaggcttcttatctatgattttcagtccaatggcagtcttttctccctcattcacggatcgaaatcaacaagggcaaagccactccactggacgtcctgcttgaagatagccgaggacgtaacgcaaggtctctcctatattcaccaagcatggaggcttgtccacggcaatctcaagtccactaacgttc

SEQ ID NO: 201796 - DNA, 312 bp, Gossypium hirsutum
ccgcatctttgaggtttgatggagccctgaatgtggatgtgactgagttccagactaacctggtcccatatcccaggatccactttatgctttcttcttatgcccctgtcatttcagctgagaaggcttaccatgagcagctatcggtggctgagataaccaacagtgcttttgaaccctcttcaatgatggccaattgtgacctactacacgggaagtacatggcttgctgccttatgttccgaggagatgttgtgcccaaagatgcgaatgctgctgtggccaccattaataccaaacgcacaatccaat

SEQ ID NO: 201797 - DNA, 433 bp, Gossypium hirsutum
  unsure (1)..(433): unsure at all n locations
gttcagttagaattccccgagataatcttcttaatcgatttggggatgtcacccgagatggaaaatacacaagtagtctccctacaataaacaaacgttttgctgctactcttggtgaacttgtaggtgggagggttggccttgcacattcttcagttggtatcctcaagattgctgtcactattgcagtacgatactccttactacgtcagcagtttggtcctccaaaacagcctgaagtcagcattcttgattatcaatctcagcagcacaagctcatgccaatgttggcttcaacttatgcatttcattttgccactcagtatttggtagagaaatattcagagatgaagaagacacatgatgaacaactggttggagatgtgcatgctctttctgcaggcctgaagtcctatgtgacatcatntacagc

SEQ ID NO: 201798 - DNA, 404 bp, Gossypium hirsutum
caccagtaaggagtggatcagggccgtccatttctgctctggcgttttccaagatctgatatccgagggtttgctctcgcctcactccaagtctctctgcgtggagactcccttgggacaggaagtgttcgcgttgaaagagatcggtgtggagaactccatcggtattttcaagaaagcggccaagcctttggtggttaaaggtgaggggcatcagataccgttcgatgataattcttttgacttcatattctccggcggagctcgcctcgacacatctgctcgcccggcggatttcgcgtcggaaatagctcggaccctgaaacccgaaaggtttgtggtggtccacgttaaggctaatgatacatacaggttcaactcattacttgagttgtgcagatctt

SEQ ID NO: 201799 - DNA, 380 bp, Gossypium hirsutum
gttaaggaaagtatgcgttatcaagatgctgagcagtgctactttggataaagtatgtagtcttcgccgtcaagaagtacgagaaaccataggttatttatatagtaaggccggttcgcctgtaaacgtgggagagcagatgtttttaactatcttgaatgtggtgaccaatatgatatggggcgggtccatggaaggggaggccagggcgagccttggtgcagagttcaggcaagtcatctcagaagtaacagaacttttgggtctacctaatgtttcggatttcttcccggcgttggccccgcttgatttgcaaggtgcagtgaaacgtgtccgaaaatcaacggagaagttggacgcaattattgataagataatca

SEQ ID NO: 201800 - DNA, 381 bp, Gossypium hirsutum
tgggaggttttgggattgggatggtgtactacggcgtgccattaggccttggaaatctatccgtgaatctctatttgggcgtcacattaaacgccttatccgagttgccagcgtcactcattacattcttccttatagggaaaatgaaaaggaaagactcattgttgggtttcacaatattaagcggggtgtgcagcgtgttgtgtgtggttgtggggaaggtgtcgccaagtttacagatagcaatggagctgatatccttcttcagtgcctgctcggccttcaacatgtcactgatatacacattagagctgttccccacatgcgtgaagaactcggcaatatcaatggtgaagcaagcactggtgtttgggggggtgt

SEQ ID NO: 201801 - DNA, 357 bp, Gossypium hirsutum
ccgcatctttgaggtttgatggagccctgaatgtggatgtgactgagttccagactaacctggtcccatatcccaggatccactttatgctttcttcttatgcccctgtcatttcagctgagaaggcttaccatgagcagctatcggtggctgagataaccaacagtgcttttgaaccctcttcaatgatggccaaatgtgacccacgacacgggaagtacatggcttgctgccttatgtaccgaggagatgttgtgcccaaagatgtgaatgcggctgtggccaccattaagaccaaacgcacaatccaatttgtggattggtgccctactggattcaagtgcggtatcaactacc

SEQ ID NO: 201802 - DNA, 380 bp, Gossypium hirsutum
ggtgaacttccctgatgagactccacgtaccactccagagcatgctgttaaaatgaattctcagaaacctctttccgggtcaaatttgagttctgttcaatcaagtctcaacccagatttcagttactcgaacaaacttgagcagggctactatgataccgtgggtttcattgaagagaagtcactaatggatcagtttgcatatgcagaccctgttagagctgctgtagatgatgggttaaaaccctttgctgaacctgagaataccgcttcgtattttaactcagatcagggaagtaacaactttgacagttccgaccttgtctggggcgaacaaggtgcccagactcctgaaatatcatcctttcttgaacctactt

SEQ ID NO: 201803 - DNA, 278 bp, Gossypium hirsutum
  unsure (1)..(278): unsure at all n locations
cacaaggggaaaagcttattcaattggagcgtgggaaggggatcgtcattcggttcatgatcggccatagtgcaacatctaacagcattttagatcgagctattgattcggaggaagctcagcataaggatttttttagactggagcatgttgaaagatatcacgaattatcagcaaaaacaaaaattttcttttctactgcagntgcaaaatgggatgctgagttctatgtcaaggtggatgatgatgtccatgttaatcttggtatgctagctact

SEQ ID NO: 201804 - DNA, 419 bp, Gossypium hirsutum
  unsure (1)..(419): unsure at all n locations
aaaggttttcctcttgtctaattctataagttcttccggagcaaatattagtactggtgtttttaacatgactgttatcccaaaaccctggagggctagcatgttagcagcagctctacaacgcaccatgggtgttgggaacaaagggaatccctgtaatgggcagttacctagcttgtctcttcgaaatcttcttcttgggagaaaaattctaatcgtagatgacaacaatgtgaatctaaaagtagctgctggtgcattgaagaaatacggagcagatgtggttagtgctacaagaggaatagaagctattgagctgctcacaccancttaccagtttgatgcctggttcatggatatccaaatgccggaaatggatgggtttgaagctacaaggagaaattcgggatatggaacat

SEQ ID NO: 201805 - DNA, 382 bp, Gossypium hirsutum
gttaagagcttgcggtgaaaggtggaaactaggcacgagatcatttagtactcaaggagcaacaactgctgatgctccacaggcacctcctcctcctccaccgcctgaaaaaacccattttggtggtctaaaagatgaagaccgtattttcaccaacttatatgggttgcatgacccttttctcaaaggtgccatgaaacgtggtgactggtatagaaccaaggatttagtactcaagggtgctgattggattgtgaatgaaatgaagaaatctggacttcgaggacgtggtggtgctggatttccatcgggcctcaaatggtcttttatgccaaaagtatctgatggtcgtccttcttatcttggtgtcaatgctgatgaa

SEQ ID NO: 201806 - DNA, 389 bp, Gossypium hirsutum
gtttcaacacaaaccctctttgttgtctactataggccaaggacaagtcagttcattattgggttgaacaaatatttagaggctctgagcaataagtttacagttggcatgaggtttaagatgagatttgaaggagaggattctcctgagagaaggttttctggcacaatcgttggggttgaagacttttctccttactggaaagattcaaaatggcgttcattgaaggtacaatgggatgaacctgcctctataccaagacctgacagggtttcaccatgggagatagaacccttcgctgctcctattccaccaactctgggtcaacctgttgctgctaagaacaaaaggcctagaccaactgctgaaattcctgctctagatttatc

SEQ ID NO: 201807 - DNA, 288 bp, Gossypium hirsutum
ggcatgttcgatggtgaaccatcagctcaaccgtatgggcatgtcggtccgagacatgtgtgtaccccggatcataaacaactagccttggaagctgctaggcaaggcatagttttgttgaagaactctgggtctttaccgttgtctacttcacgtcatcgtaccgtcgcggttattgggccgaattcagatgtcacagaaacaatgataggaaactatgcatgggtggcatgtgattacacgagttccttgaaaggcatttcaagatacgtgaggactgttcatcaa

SEQ ID NO: 201808 - DNA, 358 bp, Gossypium hirsutum
caaacagggtcgaattacaattgagaaaaacgcaatgggtcaaaagatgatgatgatggcggtccttgtgatattagggacgatgatggcaacgttcacggttgcgcaagagacttgtgcgcagagcctggtgccttgtgctccttaccttaacaacgccactgcacaaccgcaggatgattgctgtaatcctatcagacaagccgtggatactcaacttacttgcctttgcaacctctttaacgaccctactttgctttcatcttttaacgtctccgtctctgaagctcttaggatcgctcgtgagtgtggtgtcactacaggtctcaacgcctgcaacaatgctaacttctccacg

SEQ ID NO: 201809 - DNA, 297 bp, Gossypium hirsutum
tagtggaattcatcgaactaacctccatatcgccattgagtatctgtaagcggaaagaagtgacctcatctccaataatgtgccagtatttttggtaaaataaagttagaagcccgtcttcctttggcgcttttgttgcccccatctcgaataccactgctcgaatttcttcattggtatacactgctgtaaattttacattatcttccttagacacacaatggtcaatactagataacacatgatcataattaccactatctccagttgtaaataaattattgaaataagatctag

SEQ ID NO: 201810 - DNA, 385 bp, Gossypium hirsutum
caaaagagttccatgtttttcgctgccatttcgaaaggcgattctactttagaaattttgatacaagtaaagtaatagaatcttaaagaaaaaaaagtgctaaaaaagctaactttttttttctttctattgttccttctttactctgggttcgtttttcaaagcataaaaacctaatttctaacagagcagctgcaactatcatcacccatggcggcaccgatctgggtatgggctttttacgtagccctaactctatttccttccgttttgggaaactcagaaggcgatgctctttatactttgagaagaagcctatcggatcctgataacgtgcttcagagctgggatcccacccttgttaacccttgtactttgttccaaa

SEQ ID NO: 201811 - DNA, 336 bp, Gossypium hirsutum
aagcagcttagtgcagaaggaaattacagtgaggaagagcttgaggagtacatgcaatctcacaagaaactgatgattgattcattatggaagcttaatgtagctgacatagaagctactctttctcgtgtttgtcaaatggttctccatgatcaaaaatgcaaaaaggaagagcttcgagcacgagcaaaagggttgaaaactcttggtaaaatcttccagagtgtcaagtcaacaaatggaaatgagagtgatcctgtgctaggcaataatgcaagacataaattagattgagttgagccaagttataacagtggttctccaaatgtattaaca

SEQ ID NO: 201812 - DNA, 314 bp, Gossypium hirsutum
gttgaagtctgaagaatgcttgagaaaggaaagggagagagtgtctcattacctgcattcaagcagtgagacaaaattgttagagaaagtgcaacatgagttgttggtcacatatgcaaatcggctacttgaaaaggagcattcaggatgcagggccttgcttagagatgacaaggtggaggatctttctaggatgtacaggctttattgtaaaatacctcgaggcttggagcccgttactaatgtattcaagcagcatgttactgctgagggtacagccttggttcaacaagcagaagatgctgcttcaaatg

SEQ ID NO: 201813 - DNA, 401 bp, Gossypium hirsutum
ctgtaactggctctcgcattaaacacctaggtgaggaaaattccagatcgcgatctgcccactttcactatcaatggcgaagccaaggctttcgcgcgttccggcccggaaatcttcatcgtcaaccatgtttctaactctgctcatcatgttcaccttcctggttttgattcttctggcgctcggaatcctttcaattcccagcagtaactcccgcagttcgcacaaacccaacgatttgagctcgattgtgcataacgtcggcgacaaaaacgattatgatgagggggtaggagagcaatgggttgaagtcatctcctgggagcctagagcttttatctatcacaatttcttgtccaaggaggaatttgaatacctaattgaccttggcaaaccttata

SEQ ID NO: 201814 - DNA, 375 bp, Gossypium hirsutum
gcaccaaaaagaaaaggtaacattcatttcaatggctgcttttgcttcttcttcgtgctcctctctcctcttctcatctccacctaccaagtttccttcaccttctctatatcctcctctacgcttgtctcttcccacttcttcttttctctcttcttctctttcactttctccttcctcccatgcctaccccaccagctctagacgatactctgcttcttctttcactatcagggcctctgctgcagagaagaagaaggtccttatagttaatacaaacagtggcggccatgcagttatcggtttctactttgccaaagagctgctgggttctggccatgaggttaccatcttcactgttggagaaaaaggctc

SEQ ID NO: 201815 - DNA, 259 bp, Gossypium hirsutum
gggatttcgagacgccaccgtccggcggcttcccaagcgaggcgatatccgatggagcccccgagatccccagctggagcacgaacggtacggtgaagcttgtgtccgccggtgaaaaagtgagcggcgggatgctactcatcgtaccccgaggcaggcacgccgtcagattgggcaacgacgcggagatcagtcaggaagtgacggttgagaaaggatcggcgtacgcgggtacgttcagtgcggcacgcacttgcgc

SEQ ID NO: 201816 - DNA, 354 bp, Gossypium hirsutum
gagctacttaaccatttcccaaatctcctccgtgctcgtctttagcgtgctggtcattgccgctcatgcagcgcgctttgaaatccgcaatgagtgctcctacaccgtctgggcagcagcctctcctggtggtggccgtcgcctagaccctcggcaaagttggaccatcgatgtgcctgctggcactgctatggctcgtatttggggtcgaaccaattgcaatttcgatgccagcggtaggggtcattgccaaaccggtgattgtggtggactccttcaatgcaaaggttggggtgcacctccaaacaccctggctgaatatgcacttaaccaatttggaaacatggatttcta

SEQ ID NO: 201817 - DNA, 270 bp, Gossypium hirsutum
aagaagaagaagaaggaaacaaaagatggcaatggagattcctagagtgaaactcggaactcaaggatttgaggcttcaaagctgggaatagggtgtatagagtcttacaggacacgatcattcagtgtcagatgaagatggcatagccatcattaaacatgcagtcgaaagaggagtcactcacatcgatacagccgactcatatggacccaaaactaacgaaattctggtcggacaggcattgaagcatctgccacgagagaaggtac

SEQ ID NO: 201818 - DNA, 356 bp, Gossypium hirsutum
cggagaatgataggggagaatatgtgcgttaattaatttaatcctgtaccaactgtcccggagacaatatgataggcaaaaatcagggcagatggtgctttgattgatgcaacatacacaaacatattactaaccaggttagtgacagtgtgttttagaagcttgtatgccatatggcatcgtcgccctccccgcatcgctgatgcacttcctgcatcctctccacggacttgcaaatgccactgcagctccaatcaaaagatgcaccacatggattccctgcttgagctttccactcgcaatccaagagagtaccacagcagaggcttcgttcgtcaatatgctcaacattaaga

SEQ ID NO: 201819 - DNA, 368 bp, Gossypium hirsutum
tatccacctgcattgcatgatgaagtgtggagattggacagaatagccaaagatggagcattacataagaagttgttgaaagctgaaattgtgacggttgaagattttcttcgacttcttgttcgggattcacaaaaactaagaaatatcttgggaagtgggatgtcaaatagaatgtgggagaacacggtggagcatgctaagacttgcatcttgggaggaaagctttatgtttattaccctgatcaaacacataacactggtgttgttttcaatcacatttatgaactcagaggtcttattgctgatggccagttcctatctttggaatcacttaaccacaatcaaaagctttttgttgattccct

SEQ ID NO: 201820 - DNA, 374 bp, Gossypium hirsutum
gccagtctcatcaggcttcacttccatgatggttgggttcaaggatgtgatgcgtcgattttattggacgatcctgtgaatggtgagaaagaagctattccaaataataattcagctaggggttatgaagttattgatgccatgaaggctgccttagagagtgcttgccccaacactgtttcctgcgctgatattctcgctattgcatctgagcaatctgtcagcaccctggcaggcggtccttcatgggcagttccactaggaagaagggatgggttcacagcaaaccggacactcgtcaactcaaacttgccaggtttcaacaatactctcgaccgattaaagaacaggtttatcaatgtggggcttaacac

SEQ ID NO: 201821 - DNA, 360 bp, Gossypium hirsutum
gttatcaagtcttcccctttatagcacacagctacgatcacaaataccatttagattctatatatatagatagatatatagatatggagggtgcaaaggaacaattacaagctcctacatatggagatttaatcaccatacttagcattgatggtggtggaataagagggatcatccctggaaccatacttggtttcttagaatctcaacttcaggaactggacggtgaagatgcaagactagcagattacttcgatgtgatagcagggaccagcaccggcggcttggtgacagccatgctaacttgttcgaacgaaaagaatcgaccattatttgctgccaaagacattaaagactttt

SEQ ID NO: 201822 - DNA, 332 bp, Gossypium hirsutum
ctgatattgagaagaaaggctgcagtgccgtggatttgttactcgagatgggtcgtgttctccgtccaagtggattcgttatcatccgggacaaacaaccagtgatagatttcgtaaagaaatatttatcagctttgcactgggaagcagtagcaacagctgattcagataatgaaggggatgacattgtttttatcatccaaaagaaattgtggctgacaagtgaaagcctcaggaattctgaatagagtatttcaaccctcacagtttccccctttcttatttcatctgcagctccaaagagattaagaaggccaggcattattaaaatg

SEQ ID NO: 201823 - DNA, 406 bp, Gossypium hirsutum
gacattaattccgtgccaaaggatgtcaagactgagcgacttgctgagaagaaagctacaagtaaaaaaccaaccggtcttggtgctcctccccctggccctccatcaactgttgatgcttacgagaagctgctttcatcaattcccgagttcgcaagctttggcaagctcttcaagtcctctgcacctgtggagttgacagaagcagaaacggaatatgcagttaatgttgtcaaacatatttttgacggtcatgttgtgtttcagtacaactgcagtaataccattccagagcaattattggagaacgtcactgttattgtggatgcttcagaggctgaggaatttgctgaagtagattcaaagcctttaagacaacttgcatatgattcaaccggacagaact

SEQ ID NO: 201824 - DNA, 329 bp, Gossypium hirsutum
ccaacaggaagtttatcagttcaatgtgccgactttcggccctggtgtggtgtttgatgtggattactcaataaggcaagagcagttccggttctttacggaggcccttcgagttaataaacttaagggttatgtagatcagatggttactgaagctgaagactacttctctaaatggggggatagtggtgaggtggacctcaaatatgagttggagcatctgattatcttgacggctagcaagtgtcttttgggtcgagaagtacgtgataagcttttcgatgatgtgtctgcactctttcatgatcttgataacggcatgctcccta

SEQ ID NO: 201825 - DNA, 362 bp, Gossypium hirsutum
gagatgcagagcggggggaagatgatggggttcttggttatcttgttggttttgtttatagagatggcagcacccactagtgctagcagaaacagcttttctacccaaattcttgaggttcaaaaccagttgaagctcttgaacaagcccgctgttaaatctattaagagtccagatggagatataattgactgcatcaaactttcacatcaaccagcttttgaccatccaatgctcaaaaaccataaaatccagatgaccccaaactttcatccggaaggtgtttttggtgaaaacaaagttgcttcaaagatgaaaccaggttcatcaaggaatgttacccagatgtggcacttgaatgg

SEQ ID NO: 201826 - DNA, 372 bp, Gossypium hirsutum
  unsure (1)..(372): unsure at all n locations
ggactcattgatgctataatgggttccactgcaattacgatctcaaacaactacttcacccaccacaacgaggtcagaatattcacatcggtttatcaatattgaactaaatttatgtttttaaacgactaaactaattcgtccaagtacttcgatgataggttatgttgttgggacatagtgattcttacgtaagagacangcagatgcaagtgaccgttgcttataaccatttcggtgagggtcttatccaaagaatgccaaggtaaaaaaaaaaatataaaagcatccttaaaattggtcgctactgtaatttctcttttttaaccttgactcaaccatctttgccaaattcatgggaagtcattcaac

SEQ ID NO: 201827 - DNA, 370 bp, Gossypium hirsutum
gctgatgagagcgtcagctgagttgcttgggaggggaaccgtagggacgacgtacaaggcagtgcttgataatcgtacggtggtgacggtcaagaggctggatgccgggaaattagcagccacgacgaaggaaatgttcgagcaacacatggaatcagttggcggtttaaggcatcccaatttggtccccctcagggcttatttccaagccaaagaagagaggcttcttatctatgattttcagtccaatggcagtcttttctccctcattcacggatcgaaatcaacaagggcaaagccactccactggacgtcctgcttgaagatagccgaggacgtagcgcaaggtctctcctatattcaccaagca

SEQ ID NO: 201828 - DNA, 410 bp, Gossypium hirsutum
gatccttgcacccttgagaagttcctcgggagaatgcccatggtgttcaatgtcgtgattcttacacctcacggttactttgctcaggacaatgttttggggtatcccgacaccggtggccaggttgtttacatcttggatcaagtccgtgccttggagaacgaaatgctcaaccgtatcaagcaacaaggactcaacattacccctcgtattctcatcattactcgacttctccctgatgccgtgggaacaacttgcggtcaacggctcgagaaagtatacgggacggagtactcggatattcttcgaatacccttcagaacagagaagggaatcgtacgtagatggatctcgagatttgaagtctggccttacttggaaacttacactgaggatgttgctcatgagat

SEQ ID NO: 201829 - DNA, 395 bp, Gossypium hirsutum
ggaatcccatattgagaaacaaaatagagatgtgcttcgaaaatctttcaaagagatgatatctactctccctaaagagaattgttggggtattcctgaagctctatatcaatatcagggtttttggctcacccccccttttctacaaggagcattgtcggctcaacaacaattccaggctcaacccactgatatcatcctttgtagctctccaagaacaggtgcagcctggttaaaatccctcactttcgccactattacaagaacttcatacaatgattccaccacccctttactttccaagatgcctcatgatgttgtgcctttcatggagttcgatcatgcccaagtttccactaatcgacatcttggaattcctcttttagccactcatc

SEQ ID NO: 201830 - DNA, 286 bp, Gossypium hirsutum
caggggaaatgtatacaaagcgatatttttacggttgtgcgctattatagggcgatttacccctaccccgaccgtcaaaatccccaggatagtgcgatgtatgtttacgtcttcattgccttggctacctacggtactgatgctccagcccttttcgagctcacccttgccgaccagagctccaaacggacccataacgttcatagtcactttgacagaccgctggatagtccgccttatacttccaactacagagcaagcatctggcgctacaaaccattcttta

SEQ ID NO: 201831 - DNA, 331 bp, Gossypium hirsutum
ggaatgtatgaccactagtccaatggcatgggaaggttgagttggcccaagggtgaagcaaatggagcaagctcagaattgtctccttcctatgggtattacgtcagagaacgttgctcatcgctttggtgtgacaaggcaggagcaggatcaggctgcggttgaatctcacaggaaagcagctgctgctacagcttctggtaaattcaaagatgaaatagtccctgtggccaccaagattgttgatccaaagactggtgatgagaaacctgtcacaatctctgttgatgatgggatccgagctaacacatcagtgtcagatctgggaaaa

SEQ ID NO: 201832 - DNA, 378 bp, Gossypium hirsutum
gagagaaccaatgcgttgcttgcccgtcaacaaacggattactcggttggagccagaattgtcagccgaagaaggtgaattgtaggccgaatggtttcagctactacaagctagaaggagttgaccatttcatgagccagtacaacgaaggagaagggataaaggagagtgattgtgggaggaaatgcacctctgattgcaagtgtttggggtacttttaccacagggaaacatccaaatgttggatcgctaatgagttgaaaacccttgctaaaacctctaactcttcccatgttggttatataaaggcacccaacaagtgacgggaatcctattaagtatttgtactttttcctctgtattttccagtttctttat

SEQ ID NO: 201833 - DNA, 371 bp, Gossypium hirsutum
ggatggtactaatgtgaggagttatttatactgcgaggatgtggctgaggcatttgaggtcattcttcacaagggtgaagttggtcatgtttataatgttggaacaaagaaggagaggagagtgattgatgtagccaaagatatatgcaaacttttttcaatggactcggatacaagcatcaagtttgttgaaaacagaccatttaacgaccagaggtattttcttgatgatcagaaattgaagaacttgggatggtctgagcgaactgtgtgggaagatggcttgaagaagaccatataatggtacacttaaaatcctgattggtgaggctatgtatctggtgcactgctttcacacccgagtatgctta

SEQ ID NO: 201834 - DNA, 408 bp, Gossypium hirsutum
  unsure (1)..(408): unsure at all n locations
gtcttttagaggaggaaatgcatcatcgggcatgggagtggctgaacacagcaaaagcacgtacctggaactgcagagaaagaaggtgttccgatatgttatcttcaagattgatgagaagaaaaaggaggtcatagttgaaaagactggaggtccgacagagagctatgatgatttcgcagcctcattgccggagagtgactgccgctatgcagtttatgacttcgattttgtgacttccgagaattgtcagaagagcaagatcttttttattgcgtggtctccttctgtttcgaggatccgttccaagatgctttatgcaacatcaaaggacaggttccgaaaggaattggagggcatncattacgaaatccaggcaaccgacccgactgaaatggatcttgagtg

SEQ ID NO: 201835 - DNA, 349 bp, Gossypium hirsutum
tggctatcttttctacatcaatggctgctatgctccttcttctagggctctgggctgcaaacttggatcctactgctgcacagattggtgtttgctatgggatgcttggcaataatctcccaaattcatgggaagtcattcaactttacaaatcaaacaacatccggcgattgaggctctacgatccaaatcaacaagcattacaagctcttagaggctccaacattgaagtaatgttaggtgttccaaatgatcaacttcaaaacctcgctgacccttccaaagcacgatcatgggttcaatcaaatgttgtagcttactggccgagtgttcggttccgatacattgc

SEQ ID NO: 201836 - DNA, 348 bp, Gossypium hirsutum
attgagactacctcttgagtcagaccaagttcttgtgaaagtcatttatgctggtgtaaacgcaggtgatgtgaactttagcgcaggccgttattttcaaggaaccaagaaagaccctggatttgaggcagtgggaataattgctgccattggagattctgtaagaaatttggaagttggaactcctgctgcagtcatgactattggatgttatgctgaattcatgaaggttccttcaaagcaaatacttccaattccaagacctgacccggaagttgttgctctgcttacttcaggattaacagcatcaatcgctttggaagagcttggtcagatgaaatctggaaa

SEQ ID NO: 201837 - DNA, 336 bp, Gossypium hirsutum
gagattttaacatacaaaaaaaaaaccaagggaaaagctaaggctctaatttccaaactccattacagattagatataacggagagcagtttttgataagaaaagagacggtaaaaggaaattaaagatgtcaacagcttcttcattgtgttcatcaactcaagttaatggctttggagggggacttaggcttctaagaacccatctttctcaacccagttccttttcttttactaggaggagaactgctacagtagtgaaggcaactgctcgagtcgataaattttcgaaaagcgatatcattggttccccatctatactctctgctaatttcgc

SEQ ID NO: 201838 - DNA, 375 bp, Gossypium hirsutum
atctctacttccatttcatctgccatcaatttgctctgaagatcatgttggctatttttcacaaggcatttgctaatccaccagaggagctgaatagtccagcttctcataaatctaccaagaagcctaaacagcctgaagaaaccctaaatgatttcctatctcatcaccctcacaacactttctccatgagctttggcaacgctgctgttttggcttatgtccgccatgaacgtgctgcttcagttcatcagaggttgttttgtgggtttgatgacatatactgcctcttcttagggagcttgaacaatctatttatgctgaatagacaatatggtctttccaaagggagcaatgaggcgatgtttgtgattg

SEQ ID NO: 201839 - DNA, 314 bp, Gossypium hirsutum
gcaagtttcaatggcaaaggcaaacattctcttggttgtgttgtgttcactgggattgctactgcttgggggtgttggagtggaaggaaatccgaattacagagatgcactacaaaaatcctttctcttcttccaaggccagagatcaggcaagctgcctgccaatcagaaagtttcatggaggtccaactctggtctttctgatggctcccttgaccatgtagatttgactggtggctactacgatgctggagacaatgtgaaatttaacttcccaatggcattcaccaccacaatgctttcatggggtacac

SEQ ID NO: 201840 - DNA, 314 bp, Gossypium hirsutum
gaaagaacggattatccaattagtcggcaccctgagttgcgtggcaagacagagttggagagccatgagcctgagtttgactacctgaaaagcttggaaatagaggaaacaatcaacaaaatcagatggtgccaaacagccaacagtgcactgtttctcctctacgtcaatgattaaaccatcaaattttggaaggtacaagaaaagaagatcaagaaaatttctaaaattattgctgacccttcgaaagctgttggaaatggaaatgtagctagttaaagtaattcatatagcccaaaatcttatgttgcaaa

SEQ ID NO: 201841 - DNA, 406 bp, Gossypium hirsutum
attgcatatgcacgttccaacaataaggttgttattggcccagctaccgtcggaggaattcaggctgcagcttttaagattggtgacactgctggaacaattgacaacattgttcaatgcaagctgtacaggcctggatctgttggctttgtctccaaatctggtggtatgtcaaatgaaatgtacaacacaattgcccgtgttacagatggaatctatgaaggtattgcaattggaggagatgtcttccctggctccactttatctgaccatattttgcgatttaacaatattccacaggtaaagatgatggttgtgctcggagagcttggtggacgagatgagtattccttggttgaaacccttaaacagggaaaagtgaacaaaccaatggttgcttgggtca

SEQ ID NO: 201842 - DNA, 375 bp, Gossypium hirsutum
tagagagaggaaggagatggttgccataaaaattgtccgtggagttaagaagtatcgtgaggcagccatgatagagattgagatgttgcaacagcttagaaaacatgataaaggtggcaaccgttgtgtgcaaatacggaactggtttgactatcgtaaccatatttgtattgtgtttgagaagcttggaccaagcttatacgattttctacgcaaaaacaattatcgctcatttcccattgatcttgtccgtgagattggcagacaactattggaatgtgtagcattcatgcatgatttgaacctgatacacacagacttgaaaccagaaaacattcttctagtctctccagagtacgttaaaattcctgatta

SEQ ID NO: 201843 - DNA, 353 bp, Gossypium hirsutum
ctcggattttgtgctgccgggaaaccaaagtttgaaagcggcaatggccaagacgccgatagggctagaaccagtggtgggatccctatcatcctctaagaagaaagaatacagagtcactaatcgactccaagagggcaaacgccccctgtacgccgtcgttttcaacttcatcgactctcgttacttcaacgtgtttgccactgtcggtggtaatcgggtgacggtataccaatgcctcgaaggaggtgttatagctgttttgcagtcttatgttgatgaagataaggatgagtctttctacactgtaagttgggcctgcaacattgatggtacaccatttgtggttgctg

SEQ ID NO: 201844 - DNA, 377 bp, Gossypium hirsutum; identical to SEQ ID NO: 191345

SEQ ID NO: 201845 - DNA, 341 bp, Gossypium hirsutum
ccgttgaatctgctttcaaagctattcatgatttttctaaaccgttgatcaacatgatgaaagctgctggctgggaccttgatgctgccgctgactcgatcgaacccaatgttgtatatgccaagagagctcataaaaaatacgcatttgagtcccatatttgccagagaatgttcagtgggtttcaagaggagaatttctcaattaatttagataatcttacagtcaataaagagagcttcttccaccaatacctggctctgagggagatggatccgttggacatgctaagccagaatcctgattccgtattcgggaaattctgcaggagcaagtaccct

SEQ ID NO: 201846 - DNA, 370 bp, Gossypium hirsutum
actttgcttttttgctttgtttgtttagtaagaaagatttactttcctgggaaaataaaaaaacaaaatatgggtagaggtagggttcaactaagacggatcgagaacaatattagcagacaagtaacattctcaaagagacgaagtggtttattaaagaaagccaatgagatctcagttttatgcgatgctgatgttgctttgattgttttctctaacaaaggaaagctctttgagttctcttctgatcccagcatggagaggatcctagaacgatacgaacgacaaatatatgccccaactggttctgaatcacaggcaaattggtctttggaatcttccaaactcatgtcaactattgaagtcttgc

SEQ ID NO: 201847 - DNA, 364 bp, Gossypium hirsutum
agcacatccgcgccacactctccaggaagctcatcaaccatgggggaacagaccgagaaagcatttttgaagcagcccaaagtgtttttaagctctaagaaaactggtaaagggaagagaccaggaaagggagggaaccgcttctggaagagcattggtttgggattcaagacccctcgtgaagctattgaaggaacttacatcgataagaaatgccctttcactggccctgtttcagtcaggggccgcatcttagctggtacttgccatagtgccaagatgatgaagacaatcattgttcgacggaactatcttcattatatcaagaaataccaaaggtacgagaagaggcattcaaacattc

SEQ ID NO: 201848 - DNA, 342 bp, Gossypium hirsutum
  unsure (1)..(342): unsure at all n locations
ccccagcaaagagcagnacatacacgattggtcctttggcaacattaagaagtgaaaaaccaaaattgaaggtcaaagttcgtttgaatttgcatggaattgtgtctgtggactcagctacactcttggaagaggaagaagttgaagttctagtttcaaaagagctggcaaaagaagatgctaagatggagacagatgaaaagcctaatgatacttctgcccctggtgccaacgagacagatgttaatatgcaagatgccaagggtacagccgaagcagctggggtcgaaaatggggttcctcagtcttgagacaagcctgggcagatggagactgatacca

SEQ ID NO: 201849 - DNA, 300 bp, Gossypium hirsutum
  unsure (1)..(300): unsure at all n locations
ggaaaaggaaagaggnagcccaagagctccaggagaggagggaacagggccaggcgcggcngaggcgagcncaaacacagcaaaggcccgacagncgcgaaaacancgagactacaagtggctattgctatcgacgaatggatggacatactcccgtaaaacagagaatggctttaatagatgaattcaacaactccgatgatatatttattgtcattttgactacgaaagtaggtggtttaggaacaaatttaactggagctaacagggtgatcatctttgaccctgattggaacccgt

SEQ ID NO: 201850 - DNA, 378 bp, Gossypium hirsutum
caaaagctttgaaatctttactctctttcccagagatacaggaaaaaaagagcttttttattattttctttaaatttcatcaatggcgttgaagaaaactttggtggagaagcttttcagtatttcgaaaatttcatcacaagctgttaccaattgccggatttcatcaacgactattcaaaatcgaatctcgaagaatgccgggaaaggtacggccgaaatggcaccggatccgggagatcttaacggtgccggtaatggtgtgttcaagcggtttcttcataaaggatctgcggtttcaccggcaatgaggacgttaccgagggggaaagatttgattgagaagttgaaagagattgatatgtcgaaagatcggat

SEQ ID NO: 201851 - DNA, 385 bp, Gossypium hirsutum
gcagtttggtgttacctacttagtgactcacaaagaagcgaatcagcaattcgcttgtaaatccatcgccacccgtaagcttatcaaccgtgatgacatcgaagacgtccgccgagaagtccagattatgtaccatctaaccggccacaggaatattgtggagctgaagggggcttatgaggatcgtcactccgtgaatctgataatggaattgtgtgcgggaggtgagttgtttgaccggattatagcgaaaggccattattcagagagggaggcggctaatttgtgccggcagatcgtgacggtggttcataattgtcattccatgggggttatgcatagggacttgaagcctgagaatttcttgttactgagtaaaagggga

SEQ ID NO: 201852 - DNA, 398 bp, Gossypium hirsutum
aagtatctcagggatgaactgtacaaagagtgtgttacagctttacaaggtggaattttgttgaacgaaggagatttcaacgctattaagaaggggttagcggaagcttttcaaaatgctgataaaaagttgctcaactggcttgaaaagattggagacggcgacgatgaatccggttcaaccgccacagtcatgttaattggaaatgaagtgctcttcatttctcatgttggtgattcttgtgtggttttgtcttgtgctggaaaagtacaagtcttgactgattctcatcgaccctatggcagcaacaaggcctctttgcaagaaattagaagaatcagagaagcaagtggatggattagcaatggtaggatttgtggtgaaacccatagctgtat

SEQ ID NO: 201853 - DNA, 374 bp, Gossypium hirsutum
gaaaaaggaaagggaaactatgacacacttcgttctagggcatggtatgtgtcatggagcttggtgttggtacaagattgtgtcgctgctcaaatcaggcggccaccgtgtcactcccttggatcttggtgccagtggaatcaaccccaagaccatcactgacttggcttccttgtccgattatgcggagccattaatggcattaatggcctctttgcctgaagacgagaaagtgatactagtgggtcacagttacggtggggttatcatttccttagccatggaaagcttccccatgaaagtattggccgctgtttatctcacagcttttatgccgaatcatgattcttctattgcgactggagtagctgagt

SEQ ID NO: 201854 - DNA, 405 bp, Gossypium hirsutum
  unsure (1)..(405): unsure at all n locations
gcggaattctacaggaagaagcttgctaggcgacttcggtttgaccgcagtgctaatgacgatcataaaaggagtattctgactaagctaaagcagcaatgtggtggacagttcacctcaaagatggagggcatggttacagatctgacattggcaagggaaaaccaggccaactatgaggactaccttaggagtaactcagctgctcatcctgggattgatttaacagttactgttcttaccacaggattctggccaagttataaatcatttgatcttaatcttcctgctgagatggttaagtgtgtggaggttttcaaaggattttatgaaacanaaacaaaacacagaaagcttacctggatttactctttgngaacttgccacattaatggcaagtttgag

SEQ ID NO: 201855 - DNA, 424 bp, Gossypium hirsutum
aggtagtcaatgtagatgatttcggagctaaagctaatggaagagacgattctcaggcatttaagaaagcttggaactatgcttgttcttcatctcaaggggctattatggtggtccccaagaagaagatttatcgtcttaagccaattaacttctcaggaccctgcaaatctcctcttctattgaagatctatggaacactcgaagccactgaggatcactcggattaccaagataatggaagacgatggctttactttgataatgttgaaaatttacgagtcgaaggtggaggcatcatcgatggtaatggcaaaacatggtgggaaaagtcctgcaaagtcaacaaagccctcccttgcaaggaagctccaactgctgtaaccttcaatgaatgcactaacctgagagtatcaagtcttcg

SEQ ID NO: 201856 - DNA, 425 bp, Gossypium hirsutum
ggaacatctactttccctttgatattgtggaagatacggcattggatgtggcaactgaaatggtgaaggagcttgagataaccgattgggatccacttgaaattgcagaaatgattgatggtgaaatttcagctctagtcccacaatggaaaaaatcagacctccctagacatcaagcccataatacatataactaccaggaagatgatgatgatgggtgtcatcatccgttttactctttctcctcctgttcttcatcccaaatgtctgtcttgatgtcacatggctgcgattggctccgagatgatgataccagctctcagagctcttcgcactcaggaatttattccaactttagttacttgtctggagatgaccacaatcctgatatgagccctacaacaacagcacgcaaacatgtcagc

SEQ ID NO: 201857 - DNA, 429 bp, Gossypium hirsutum
gggaaagtagaaacaaagaaaacatatggcaagtgaggcggcggaggaagctaacgtccctgcagcggctgcggcggaagcacccacaacagggaccgagaagcaaccacataagcttgaaagaaagtggaccttttggtttgataaccaatcaaagcctaaacaaggcgctgcttggggttcctctttacgcaaagtttacacttttgacactgtagaagaattttggtgtttgtatgatcaaatattcaagcctagcaagttgcctggaaatgctgatttccacttgtttaaggctggaattgagcccaaatgggaagatcctgagtgtgctaatggaagaaaatggtctgtcactagcaacagaaaggctaatcttgagaacatgtggcttgaaagtttgatggcattgatcggggagcaatttga

SEQ ID NO: 201858 - DNA, 428 bp, Gossypium hirsutum
  unsure (1)..(428): unsure at all n locations
ggaaagcagcttcaacttcagcttttgggagtgcaaatgcagccccatgtcttattgctaatccaatccaccacctacagaccaaacacttctccataggaatcctccctgatggggtcaatcgtagctccgacaattttgtccagaattccgatgccatggaacgtctcttgtctgaccttcaatcccatatcaacaaggttcttgctggaggaggagaaactgctgtgaaaaggaacaggagcagaaataagcttctccctagggaacgaatcgatcgtcttcttgaccctggttcttctttcctcgaattgtctcagcttgcagggcatgaattatacgaagaccctntaccatcaggtggaataataacaggaattggtccagttcatgggagactttgtatgtttgtggctaatgacccgact

SEQ ID NO: 201859 - DNA, 351 bp, Gossypium hirsutum
gcggcggctgctgcttctcaggcagccgcagcctccgggcccgtctctgatgacgtggcggttgtagaaggttgtattgacaacgatagtgtacagattggggattcatatgattccaagacatcgtttttgatctccgatgggagcatcactgttcatgctggtgaaagattaggtcgcggtatagttactgatgcaattactactccagtggttaatacttctgcatatttctttaagaaaactcaggagcttattgacttcaaggaaaaacgccatacaagttttgaatatgggcggtatggaaattcaacaaaatttattggtggacacaatgatgtccttgctggt

SEQ ID NO: 201860 - DNA, 413 bp, Gossypium hirsutum
  unsure (1)..(413): unsure at all n locations
aaaggttttcctcttgtctaattctataagttcttccggagcagatattagtactggtgtttttaacatgactgttatcccaaaaccctggagggctagcatgttagcagcagctctacaacgcaccatgggtgttgggaacaaagggaatccctgtaatgggcagttacctagcttgtctcttcgaaatcttcttcttgggagaaaaattctaatcgtagatgacaacaatgtgaatctaaaagtagctgctggtgcattgaagaaatacggagcagatgtggttagtgctacaagaggaatagaagctattgagctgctcacaccacctcaccagtttgatgcctgtttcatggatatccaaatgcccgaaatggatgggtttgaagctcaaggagaantncggatatgga

SEQ ID NO: 201861 - DNA, 423 bp, Gossypium hirsutum
cttccctgctcgtcgtctcccttgtttggttcctctctgggcgatcgcgcagcatatctaaacttgatagattgttgatgtgctggtgggctttcacgggacttacacacataattcttgaaggatattttgcattctcccctgaattctataaagacaagactggattttatctggctgaagtttggaaggaatatagcaaaggtgattcaagatatgcaggaagagactcagcaattgttgctgttgaaggaataacatcagttcttgaaggtccaccttgccttatagcagtgtatgctattgccaaaggaaaaggatatagctacatactccaatttgccatctctctgggacagttatatggcacatttgtatatttcataacagctttaaaccttaggagggtgataacttttctgc

SEQ ID NO: 201862 - DNA, 409 bp, Gossypium hirsutum
cgacgacccgagacgcgcacacctcgaccaatacatgcgccaactggagctcgcaggcaaaccagcgatttcagcgatgataaagagatacgccgagcaaaaccgccccgtttcttgcttcatcaacaaccctttcattccttgggcatctgatgttgctgaaagtctcggcatcccttctgcaatgctttgggtgcagtcttgcgcgtgtttcgccgcctattaccattacaatcatgggttagtgacgtttcctactgaaactgatcctgaatttgatgttcagttgccgtccatgccgcttctcaagcacgatgaagttcctagctttttgcacccttcaactccttttgcttacttgaggacggccattcttgggggtaagatttaagaaacttgataagcaatt

SEQ ID NO: 201863 - DNA, 411 bp, Gossypium hirsutum
  unsure (1)..(411): unsure at all n locations
gaagagtgtgggaagtgcagctttgaagatggttgaggaagtgcgcaggcaattcaacacaatcccaggtctcatggagggtactgctaaacctgactatgctacctgtgttaagatctctactgatgcttcaatcaaagaaatgatcccacctggtgcccttgttatgctcacaccccttgttgttgggatcttttttggcgtggaaactctctctggtgtcctcgctggatctcttgtctctggtgtccagattgctatctctgcatccaacacaggaggtgcttgggataatgccaagaagtatattgaggtatccataattntactgacttccatgagccgctcctttgattggcgtttcaaaacaatagttntatatttatgcttttggattttggtgttgaatgc

SEQ ID NO: 201864 - DNA, 409 bp, Gossypium hirsutum
  unsure (1)..(409): unsure at all n locations
gagctacttaaccatttcccaaatctcctccctcctcggcttgagcgtccttttcatttccgctcatgcagcgcgctttgaaatccgcaatgagtgctcctacaccgtctgggcagcagcctctcctggtggtggccgtcgcctagaccctcggcaaagttggaccatcgatgtgcctgctggcactgctatggctcgtatttggggtcgaaccaattgcaatttcgatgccagtggtaggggtcattgccaaaccggtgattgtggtggactccttcaatgcaaaggttggggtgtaccttcaaacaccctggctgaatatgcacttaaccaatttggaaacatggatttctacgacatttccttagttgatgggtttaacatccncatggtgtttggtccaactaat

SEQ ID NO: 201865 - DNA, 419 bp, Gossypium hirsutum
gtgtaacatgttcgactcaaggagactatagagttgttgctgaactggaagtctatgcagtatccatcattggtccttttcctattgctgtaactaatttattggatttaacaagattggatctccataacaacaagctgactggcccaattcctccacaaattggccggctaagacgacttagaatgttaaatttgaggtggaataagctccaagatgtccttcctccggagattggggagcttaaaaaactagcccatctgtcattgagctttaataattttaagggcgagatcccgaaagagcttgcaaatctacccgagctccgttatctctatcttcaagaaaaccgtttcactgggcgaattccacccgaattgggcactttacaaaaccttaggcacttggatgttggtaat

SEQ ID NO: 201866 - DNA, 426 bp, Gossypium hirsutum
  unsure (1)..(426): unsure at all n locations
agaaatagttcttcagatcaataaaccatggaagcagcagcagcatctttatctggatccaatatcttccatcgtatttcaaggtcgattattcggagcagatatattgcttctgggtcacgctatttctcaaattctgatttgaatactcaaaatcatagcgttttcaaaggacccaatctcagtaatgtacaaattcaaaagagaaatttgaggttacaaacgaattgcgctctgggtgtttgtactttccctgaaaatgttatggaatcttatcactcacatgttgtggaagagaaacttggggtcttgcttttgaaccttggaggtcccgagacacttaatgatgttcaaccctttttgtataactngtttgctgatcctgatattataaaggtgccctcgctatttgaggttcttcaacga

SEQ ID NO: 201867 - DNA, 434 bp, Gossypium hirsutum
gtcccccagaacttttgttgggttctacagattatactgcagctgtggatctttggagtgtcggctgcgtgtttgctgaacttcttctcgggaaacctatcctgcaaggacgaactgaggttgaacaactgcataaaatttttaagctctgcggttccccacccgacgattactggaaaaaatccagacttcctcatgcaactctattcaaaccacaacaaccttacaatagttgtcttcaggagacttttaaaattttaccggcaactgctgttaacctagtagaaactttgctttcagtggagccgtacaagcgtggaactgcttcctcagctcttgcattagagtatttcacaacaaagccttacgcatgtgatccatcaagcttgccagtatatccacctagcaaagagatagatgcaaaacatcgtgaa

SEQ ID NO: 201868 - DNA, 425 bp, Gossypium hirsutum
gtttggctctcaaccaagcttgcaattttgcagcctcttcttcaacccgttcaagccgattaaccctcagctttctgttttcggaagttactactttacctagtgatggcagacggtcacgagagtgacaagaatattgagatatggaagatcaagaagcttattaaagcacttgaagccgctagaggcaacggcaccagcatgatatctctcataatgcctccacgtgatcagatttcaagggttaccaagatgcttggagatgaatttggaacagcttcaaacatcaaaagcagagtcaaccgtcaatccgtgttaggtgctatcacatctgctcagcagaggctcaaactttatagtaaggttcctcccaacggacttgtgctctacactggaacaattgtgactgatgatgggaaagaaaa

SEQ ID NO: 201869 - DNA, 431 bp, Gossypium hirsutum
aaaggttttcctcttgtctaattctataagttcttccggagcaaatattagtactggtgtttttaacatgactgttatcccaaaaccctggagggctagcatgttagcagcagctctacaacgcaccatgggtgttgggaacaaagggaatccctgtaatgggcagttacctagcttgtctcttcgaaatcttcttcttgggagaaaaattctaatcgtagatgacaacaatgtgaatctaaaagtagctgctggtgcattgaagaaatacggagcagatgtggttagtgctacaagaggaatagaagctattgagctgctcacaccacctcaccagtttgatgcctgtttcatggatatccaaatgccggaaatggatgggtttgaagctacaaggagaattcgggatatggaacataatatcaataatc

SEQ ID NO: 201870 - DNA, 358 bp, Gossypium hirsutum
  unsure (1)..(358): unsure at all n locations
agttgctagtcgcctgaagatcacaatagtaggtggctgtatacccgaacgctgtggtgataagttgtataatacttgttgtgtctttggtactgatggaaagctgaaagccaagcatcgcaagattcacctttttgatatcgatattcctgggaagattacctttatggaatccaaaacccttactgcaggggagactcctactgttgtggacacagatgttgggcggattggtataggcatctgttatgacattcgctttactgaattagcaatgatatatgctgcaagaggtgctcacttgatatgctatcctggagcatttaacatgacaaccggaccattgcattgngagtta

SEQ ID NO: 201871 - DNA, 423 bp, Gossypium hirsutum
  unsure (1)..(423): unsure at all n locations
cttgcacactgactaaacttgttctgagactggaagaggtacagccttcaaaagttgaagttaacaaagcaaccacacaggcattgctgatctttgtctctatgctgcaattagggcaatctcctgttcttccacacccaattgataatgattcttgcgatagaattgttctgtgcataagattattgtgcaatactggtgatgagatcagaaaaatatggttgcagtcttgccgtcagagttttgttaaaatgctttcagagaaacaattgcaagaaactgaggaattaaaggcaaaagctcaggtttctcatgcacaaccggatgaccttattgacttttaccatttaaagagtcgaaagggtatgagtcagctggaattggaggatgaggttcaagatgatttanaacgagcaactggag

SEQ ID NO: 201872 - DNA, 438 bp, Gossypium hirsutum
  unsure (1)..(438): unsure at all n locations
cagcaatgtcccacgctgtgatatatgtgaaaatgcacctgctttcttttactgtgaagtggatggtagttccctttgcctgcaatgtgatatgattgtacatgttggaggtaaaaggacccatgggaggtatctcttgttgaggcagagagttgagtttccaggggataagcctggtcgtttggaggaaccaggtttacaaccgctcagtccggatgaagtaaggaaggatctgaatcagcagtcaaagcttgcagtgagagagaaccggcaaaaccgtggagtctctcatgttccattgcttgatgataatgctaagggtgatggagaggtaagaaatgaagtgattgatctaaatgccaggccacaacaggtgcangggcaagcttctatcaatcangagcaagccatggatgtttcgagtggcataatcatgac

SEQ ID NO: 201873 - DNA, 433 bp, Gossypium hirsutum
cttacaaaaggataaatagattgattggtactgcaagatacagaaacgtgatggacatgaatgccggtcttggaggatttgcagcagctctcgaatcacccaagtcttgggtgatgaatgttgtgcccacaattggcaaggacaccttaggtgtgatctatgagagaggtctaattggaatatatcatgactggtgcgaaggtttctctacgtatccaagaacatatgaccttattcatgctaatggtgtctttagcttgtatcaagataagtgtagctttgaagacatccttctggaaatggatcgcattttacggcctgaaggggctgtgatattccgggatgatgtcgatgtcctaaacaaggttaggaaaattgctggaggcatgagatgggacaccaagatgaatgatcacgaggatggtccccttgg

SEQ ID NO: 201874 - DNA, 432 bp, Gossypium hirsutum
acatagtacgactggaccaacggcttcttgatgctccagtggctgaagatggagagaattggagtgttggacaaagacagcttgtttgcctggctagggtcctcctaaagaaaaggagaattttggtgttggatgaggcaacagcttccattgatacagctacagacaatgtaattcaggagacaataaggaaagagacatgcagatgtacagtcatcactgtggcacatcggataccaactgtcatcgacaatgacttggttttggttcttgataatgggatgatagtcgaatacgataagccaaagatattactcgaggacaaatcttcttgggtctcgaaattggtggctgaatttttgagatcatccaagagcaaccaccctaagaatctggtttgaaggtatgtggacagcttttagaactcaaatg

SEQ ID NO: 201875 - DNA, 436 bp, Gossypium hirsutum
cgaagacgtggcaaaatacgaggtgcaaggcagagatattagcccaccctttgtacgagcagctactgtcggcgcacgtgtcgtgtcttaggatcgccacgccggtggaccagctcccgaggattgacgctcagctggatcagtcgcagcacgtggtggccaagtactccgctctcggcggcgcagcccagggcttggttgcggacgacaaagaactcgatcagttcatgacgcaatatgttgtattgctatgttcgtttaaagaacaattgcaacaacatgttcgggtccacgcaatggaagcagttatggcatgctgggaaattgaacaatccttacagagcttaacaggagtttcaccgggggaaggtacgggggcaacaatgtcagatgatgatgaagaccaagtggagagtgatgcaaatatgtttgatgc

SEQ ID NO: 201876 - DNA, 415 bp, Gossypium hirsutum
ccggaaactgatcctaccgttttattcattcactcttgtctgcattattctcccgatgaccatgttcgttccagaggctgagcttcctgcatgggttgtttgttacatccctgctacaatgtcgttccttaacatccttccggcaccaaaatccttcccgttcattgttccttaccttcttttcgagaataccatgtcggtgaccaagttcaatgctatgatatctggtcttttccaactcggcagtgcatacgagtgggtcgttacgaaaaaatccggacgatcttcggagggtgatcttgtttcattggttgagaaaaagccaaaacaccatcgggttggatcagaacccaatcttgaggaaatgaaagctgatctccagcaagaacaggaacaaaaggctcgtaaaaagaag

SEQ ID NO: 201877 - DNA, 418 bp, Gossypium hirsutum
  unsure (1)..(418): unsure at all n locations
tatctctggacgacataaaagtttatatagcatttattggaagatgttgaagaaaaagttgaccatggatgagatccacgatatctgcggactacgtgttattgttgaaaatgtggatgactgttacaaggcactgagagtagttcatcagttgtggtctgaagtacctggaaagctgaaggactatataactcgccctaaatttaatgggtatcagtccttgcacacagtagtgatgggtgatggcacagttccacttgaagttcaaattcgaacaaaggagatgcatttgcaagctgagtttggctttgcagctcattggagatataaggagggtgactgcaagcactcttcatttgtacttcagatggttcagtgggncttccgggcaaggttgtaacttggcactgtgaaacaa

SEQ ID NO: 201878 - DNA, 390 bp, Gossypium hirsutum
gccagcgccctctatttccagctccgtttctccaacagggccgttcccaccgccgcaccgtcgatttccacctcagtttctccgtccatggctgcaacggactctcctctaacgaccaaggtttgtatcattgggagtggccccgccgctcacacggccgctatctacgctgctcgtgctgagctcaagcctattctttttgagggatggatggctaacgatattgcgcctggtggtcagcttaccaccacttccgacgtcgagaacttccctggattcccggatggtatcatgggttcggagcttatggagcggtgccggaaccagtcgcttcggtttggtactactatctttaccgaaactgttgacaaggttggaaattttttcttc

SEQ ID NO: 201879 - DNA, 367 bp, Gossypium hirsutum
  unsure (1)..(367): unsure at all n locations
gagaagatgagtcatgtgagaaagatgatgaaggaaaggggcatgaaggtagtgcctgggtgtgcatcaattgaaattgatggctttgttcatgagtttgtgatgggagattggcatcatcccgaggcaaaggagataagacaggctttgagggttattgctgagcgagttagtgatgctgggtatgaatctcaggtttctgatgtgttacacaatgttggtaatgaagagaaaggaatttatttgtgtgagcatagtgagaggcttgctatngcttatggaatnttaaagacgaaagcaccagtgccaattagaatagtaaagaatctaagagtttgcatcgattgtcatgaagtgacaaagatca

SEQ ID NO: 201880 - DNA, 437 bp, Gossypium hirsutum
tttacctcttcgtcatgttcttcatcatcgccgccctcatcggcttcataatctttgcttatgcggtgactgataaaggctccgggcggccggtgttgaacaaaggttacttggagtattacttgcaggactactcagggtggctcaaagaccgcgtggtggatgagagctattgggctaagattagttcttgcatcagggattccaaagtttgtagcaagacgggcagaacctttaatggcgtccctgaaacttatgacatgttttctatgaggaagctttcccctattgagtctggttgttgcaagccacctacagaatgtggctacgtttatgtcaacgagacactatggaactccggtagtgggctagctgcgaccaacctcgactgctcgcggtggagcaatgaccaacagatgctgtgctaccaatgtgac

SEQ ID NO: 201881 - DNA, 425 bp, Gossypium hirsutum
agacaatcctgcatactcagttgttaagcaatattttggccatgtagatgacaccgttcctcaaaagattgttgttcacaagaatagtccaagaggagtacatttccgacgagctggaccacgtcaaaagatatatttcgactccgatgacgttcatgcctgtattgtaacgtgtggtggtctttgccctggactcaacaccgtgattagagagatagtatgcggcttgttccacatgtatggtgtgaagaaagtttcggggatagatggaggatatcggggtttttatgctaaaaatactgtgcatttagatcctaaggttgtcaatgatatccataaacgtggtggaactatccttggaacatcacgaggtggccatgatacctcaaagatggttgacagcattcaagatcgtggaattaatc

SEQ ID NO: 201882 - DNA, 382 bp, Gossypium hirsutum
ctactatccagcatactcgaaagttaagcagtgggctggccatgtacatgccaccgctcctaaaatgactgtcgaccaccagaatcgtccacgtggacttcatcatcgacgagctgggccacatcgatcgatctaatacgactacgatgacgttcattcctgtatcgtttcctgtgatggtcactgatgtaatctgagcaaccaacttagcgagatagtgtgcaacttatgtcacatgtatagcgtgaaaagcgatgctgggattgatgtactacatcgatctcatgatgctagatattctgtacatttagaccctgatgactgcaatgatattcatatacgacgaagtactattctcggaacatcatcaggaatgcatgat

SEQ ID NO: 201883 - DNA, 283 bp, Gossypium hirsutum
acacactcacacacacattcactgaatgggtcgagtcggccgagctcaacgtaagggtgctggttccgtcttcaaggcccacactcaccaccgcaagggtcctgctcgactccgcagcctagacttcggtgtacgaaatggctaccttaagggtgttgccaccgatgtcatccacgaccctggtcgcggcgctcttttagcccgtgttgtctaccgtcactctttccggtacaagatgcataatgtacttatcgttgccgcagatgatatgttcactggacag

SEQ ID NO: 201884 - DNA, 433 bp, Gossypium hirsutum
  unsure (1)..(433): unsure at all n locations
gggaaatgtatacaaagcgatatttttacggttggaggctacgattgggcgatttacttctaccccgacggtaaaaatccggaggatagtgcgatgtatgtttcggttttcattgccttggctagcgaaggtactgatgttcgagcgcttttcgagctcacccttgttgaccagagcgggaaagggaagcataaggttcatagtcactttgacagagcgttggagagtgggccttatacgttgaagtacagaggaagcatgtggggctacaaacgattctttagaagaacaactttagaaagttctgactacattaaggatgattgcctaatcatgaactgcacttgtggagtagtcagaactcgccttgagggaccaaaactgtcttctattcctgtaccgncatcagacatgggtcagaatcttagagctt

SEQ ID NO: 201885 - DNA, 415 bp, Gossypium hirsutum
  unsure (1)..(415): unsure at all n locations
gtctcccacatttcccttccagggaaagggaacagggagttttggtaaaagaaggaacaagacccacactctctgcgttaggtgtggccgccgtagcttccatctccagaagagccgttgctctgcctgtgctttccctgctgctcgtaagaggacatataactggagtgtgaaggcaatcagaagaaagaccactggaaccggtaaaatgaggtatttgcgccatgtccctcgcaagttcaagactggttttagagaaggtactgaagcagcaccgaagaagaaggttgtagcagcttctgcttgaggtattacaagatctgcaaattgcgcgagggtttgggcatagcaaccaataatgctgctgaatatcgtgccataattttttttaaggttacaggctngatggcttctt

SEQ ID NO: 201886 - DNA, 425 bp, Gossypium hirsutum
gaaaaccgagtttttcagtaggaactcgggtggtttgttgtcaaatgggtccgaggtgtaacaaaaaggaagagaattccattggtgttcttgaggtttatgttcatcaggcaagagatatccataacatctgcatttaccacaagcaggatgtgtatgctaagctttgtctcacctctgaccccgaaagcacggtttccaccaagatcatcaatggtggtgggaggaacccggtgttcaatgataatctacgcctcaatgttcgaactgttgattcctccctcaaaatcgagatattcatgatgagtagagtgaggaattatcttgaagaccagttgttgggatttgcattggtgccactgtctgaagtgctcctcaagaatgggaagttggaaggagaaagaattctctctttcttcaactga

SEQ ID NO: 201887 - DNA, 419 bp, Gossypium hirsutum
aggagatcgagatcaatagcaggaaagtgggggcgaatgcgagagggaataggaattatgcggtgatttttgatgcggggagttccgggagtcgagttcatgtttattgttttgatcagaatttggatcttgttccaattggctctgaattagagctttttgaacagcttaaaccgggtttgagctcctatgcaaaagatccacaggctgcagcgaagtctttactttctcttctagacaaggcagaaagtgttgtgccactagatttgcgatcaaaaactcctgttagagttggggcaactgcaggtcttgaggcactagaaagagatgcagctgacagaattttgcaagcggttagagaacttctgaaagatagaagtaccctcaaatctgaggcaaacggtgttaagattctggat

SEQ ID NO: 201888 - DNA, 432 bp, Gossypium hirsutum
gagagagaagcgagacgattcagaagacaagccaagtcactaaaaaggttgaaaagactcagcgaactcggaaaaacttttacagaggaataagacaaagaccatggggcaaatgggcagctgagattagagaccctcaaaaaggcgtccgagtttggctcggtacctataacacagccgaagaagcggctcgagcctacgatgaagccgccaagcgtatccgtggtgataaagccaagctcaacttccctcaaacgcccaccaaaaatcaagcagcttcaccagctcttactctgcttcctcctgctaagaaaaggtgcatcgttcccgagttaactcaaccgagtttccagactgactcaccaccttatcctatgggtcttgggtatggaagaagtgaagattataagccgattgaagtggtggagagtg

SEQ ID NO: 201889 - DNA, 406 bp, Gossypium hirsutum
  unsure (1)..(406): unsure at all n locations
gaaatggagaaaaattcccacgatggggttgtcgttaacggcggaaacgagggcgttttgggcctacatgccaagaggaagaagctcattatcgataccgatccaggaattgatgatagcatggcaatcttaatggcattccaaaatccggaggtggatatcttaggtttgacgactgtatttggaaatgttaggacggaagatgccactcgtaatgccttacttttgtgttagatcgcagggtgtccaagtgttcctgtagttgaaggcagccacgaacctcttaagggttggaagcccacgtgttgctgactttgatcatggctctgatggaatggggaatatatttcgacctgctncaaaaacagagaaatctgataagagtgcctctgaattttagttgaaa

SEQ ID NO: 201890 - DNA, 377 bp, Gossypium hirsutum
ctaaagttcagtgctgataaggttgatacaatgattgtggaagccattggtttgcttgatgaccttgataaagagctcaacacatatgcaatgagggttcgtgaatggtatggttggcattttccagagcttactaagatcatacaagacaatatcatgtatgccaaggcagtaaaactaatgggtgaccgtgctaatgctgctaagctcgacttctcagaggtattaccagaagagtttgagacagaattaaaggaggcagcagtcatatccatggggactgaaattagtgaccttgatctgacaaatatcaaagatttatgtgatcaagttctcaatctttctgaataccgagctcagctatatgattatttaaa

SEQ ID NO: 201891 - DNA, 357 bp, Gossypium hirsutum
  unsure (1)..(357): unsure at all n locations
ctcttacattacctacaaaatctttgctttccctttttgttttgtttgccaatggcttcttcaccaaaattcatctcttacttcttccttttagccctcttctccgttgaaatacatggtagggatttttttagcaaaatcccaagtgttaacacaaatgagaaagaggtgaccaacaaagaagaacaaaccactttggggaagaaggagcaagagccaaggtttgtccccgagacccaaaatggctatgggctttacggtcacgagtctggtcagctccctcctagcaccgncagtaccaaagaaacctatgaaccctatgtcacacctgttaaataccaccctgatgaaccctac

SEQ ID NO: 201892 - DNA, 408 bp, Gossypium hirsutum
gaaggtccttcaactttctgtgctttcattccttattgtgatattgtcattgaatggggcaactttagctcatccttatggagatttccttcattgcctttctcttcgtatatcaaactcttctactatttctaaagttatttacacccaaaataatccctcgtattcatcagttttgaatgcttctattcataatactaggttcgctacacccaccacccctaaaccctatgccattattacaccactcaaaacatcccatgtccaatcaacaatttattgttccaaaaaccatggcttccaacttaggattcgaagtggtggtcatgatgttgagggtgtttcttatgtttctcaagttccatttgtcgtccttgaatttttgggtcaactttcgagatgttaaag

SEQ ID NO: 201893 - DNA, 429 bp, Gossypium hirsutum
gcgagcaagaggcaaacaataggcttaccaggtatggtggagatggttgcaactatatgttcaacattggttctcaaataaatgatatgagccggttgattgaaggacaagcacgatattttattgatgcatccaaatacggaaatgtttcccggttcatcaatcatagctgctcgccaaatcttgtgaatcatcaagttcttgtggaccgcatggattgtcaccgagctcacattggtctctatgccagtcaagatatatctgtaggtgaagagctgacttttgactatcgatatgaactcctgcctggtcaaggatatccatgtcaatgtggagcttctacatgtcggggccgcctttactaaaccctcagtgagcactacgggatctctatggcatctaagggtttgctttttgagttcacaaatg

SEQ ID NO: 201894 - DNA, 434 bp, Gossypium hirsutum
cacctctcttagcggtgaaataaaaagttgtcaaaaccgaggaatcaaggtcatgctctcccttggaggtggcgcgggaagctactcactcgcttctcaagaagacgccaaaagcgtagctgattatctatggaacaacttcttgggcggtacctcgtcttctcgtccgttgggtgatgctgtgttggacggaattgattttgatattgaggctgggtcaggtcaatattgggatgaccttgctcgttctttatcagcttatagtagccaaggaagaaaggtgtatttaacagcagctcctcagtgtccatttcctgatgctcacttgggaactgccattaatacaggtctctttgactacgtatggattcagttttattacaatcccctggctcaatgccaatacgcttcgggcaacaccaaagacattttga

SEQ ID NO: 201895 - DNA, 325 bp, Gossypium hirsutum
ggcaactgtgttttattacaacaacaacaaaaacatcgttctttcgggtttattttttggcaatggagttagggagtgctcttcattttcttgatagcaagtccattttagtcactggtgctgctgggtttctggcaaaaatttttgtggagaaaatactgagggttcaaccaaatgtgaagaagttttatcttcttttacgtgctgcggatcataaatccgctatacaccgctttcacaatgagattataggaaaagatttgttcaaagtcctgaaagaaaaatgcgggaaaaatttcagttcattcatatccgagaaaattac

SEQ ID NO: 201896 - DNA, 422 bp, Gossypium hirsutum
gccattggtgattgaattgagtttgccacattcggatggggatcaactaggtgctgttagcaaggtttacacacctacagaacatggagttgaaggttcaatatggcagttggctaaagcttatgttgctgtaaatgactctggtgttcatcaactcataagccattggctgaacactcatgcaacaatggagccattcgtgattgcaacgaaccgacaacttagtgtagttcatccaatttataagcttctctatcctcacttccgggacacgatgaacatcaatgcttttgctaggcagattctgattaatggaagtggtgtcctggaattaacagtttttcctggaaagtatgcaatggaaatgtcatctataatttacaagagttggaatttgtttgaccaggcacttcttagagatc

SEQ ID NO: 201897 - DNA, 406 bp, Gossypium hirsutum
  unsure (1)..(406): unsure at all n locations
gcgacttccaccatgaaaacaagcttcatagccattatgctagcgggaatggttgctggaatggtgaaagctcaatgcggcaacacttgctcggcgaccgagtgttgcagtcggttcgggttttgcgggacgggagacgatttctgcggagtgaattgccgagggggtccttgtgttaacaatggggtctccatagctgccattgttacgcaggaattcttcgatgggatattgaaccaggcggcttccacttgtgtaggaaggagcttttactcgagaggggtgttccttgatgctctcaattctttcactcagttcgcaaggattgngtcggttgaggattctaggcgtgagatcgctgctttcttgctcatgctacccatgaaactgggagtttctgtcacat

SEQ ID NO: 201898 - DNA, 407 bp, Gossypium hirsutum
  unsure (1)..(407): unsure at all n locations
gggaggtcctccatttggttctggaggaaggcacagaggcggaagaggagggcatgatgctttggttggtactacagtgaaaattcgccagggtccttataagggttaccgtggacgtgttgtagatattaaaggtcaatcagttcgagttgagctggagtctcaaatgaaggttgttacagttgatcgcgattccatatctgataacgtggttatttcaacaccccaccgtgagtcatcccggtatggtatgggaagtgaaacttctatgcacccttcacgaactccattacatccatacatgactcctatgagagatcctggagcaacacctgtccatgatggcatgagaacacctatgcgtgacagggcctggnaaattatnttatgcacctatgagtccaccc

SEQ ID NO: 201899 - DNA, 380 bp, Gossypium hirsutum
  unsure (1)..(380): unsure at all n locations
catgatgaaaggagtcatggcaatagcttcacagaaggttgaggaatacactaaagatggcatgaactggaaaaatgatggtaactggcaacgaaacgatagcgagaagaatggatattatcaggagtttaaacaggagaataagggatggaattctacttctggtggacaaacctcctctggtgtaaattataattcttataactcaaattcttgggatgattgggacacataagacaataggaaggaacatactacaaaagtgactgcttctcatagcaatgatggttgngctggttgggatgaccccaaggatgatggatatgatagtttctataatggtgcatctgataaaaattgccgtggtcgtaatggaaaat

SEQ ID NO: 201900 - DNA, 367 bp, Gossypium hirsutum
acctccatttactgaaggctagaagagtccacaagttggtctgaaaaaagacgcaggagagtctcgttccattgtcctctgcaaacccaccatagccaataggacaatcatattatctttacaaccctaacctcgtacccctctcacaacaatagatggttctcttcgattcttcaatatctcccttaacccactctgccaaactctcttctccactgcttctctcttctctctcccatcgtcctctcagatatgcagttcttggtgctggttttgctggtctcttcgttgcttggcatttactcaaggagagtcctaaggatttgaacctgcacattgacttgtatgatgaaatgggcattggtgg

SEQ ID NO: 201901 - DNA, 422 bp, Gossypium hirsutum
accagttgtttgtctcgttggtctcggtctctgtgcacgaggcttcccattggtaattgttctttgaacactttaatgcttggttgggacaaataatatgctgatataaataatgcagttaatgtatgatacagcttggtaactgcgtggaaatcggcctgcctatgcttattctactgattatttctcaacagtacctgaagcgtgtcccctcgagagcccatctaatactcgagaggtttgccttgcttatttgcattggaattgtgtgggcttttgctgctatcctaaccgtgtctggtgcttacaacaacgttaagactgctactaaactgagttgccgcacggatcgtatctacctaattgtctctgcaccctggtatggtcataacgtgctgttctggctgctttaatcgcgttcg

SEQ ID NO: 201902 - DNA, 432 bp, Gossypium hirsutum
  unsure (1)..(432): unsure at all n locations
gcaaagccgcctcttcttttccactggactttgttttgatccgtagcttctcctcttacataaattaataaagcagtagtggcttttatggagaattatcaaatgttcttccctatctcggccccatcaacagcagctcaatcattaccgttaaacatggcacctaattcccaagcttttaacagttttcatgggaattcggttgatgggttcttaggtttgaagagtaccgaagacttgattcagaaaccagaagctaaggacttcatgaaatcaagtcaaaaaatggaaaagaagattaagaagcctagatatgcttttcaaacaaggagtcaagttgatatacttgacgatggatatcgttggaagaaatatgggcaaaaagctgntaagaacaacaaattcccaagaagctattaccgatgcacacat

SEQ ID NO: 201903 - DNA, 414 bp, Gossypium hirsutum
  unsure (1)..(414): unsure at all n locations
agagcattgatccagggaattttgaacgccactggggtgttttgtattttgatggacaggttaaataccctctcaaccttggaactacaaacagtggagcattaattcctgcaaaaggtgtacagtacttggaaaggaagtggtgcgtgatgaagccttcagccccacttgatgacccacaagtggcacaaagtgtgagctatgcatgtggccttgctgactgcactagcctcggttatgggacatcttgtggaaacctagatgctaggggaaacatttcttatgcctttaacagttattttcagaagaataaccagtttgaaaaagcctgcgaatttccaaatgtttcagttataacgaaaacggatcccacccctacgngggatgggaaattgcaaatttccaataatgatc

SEQ ID NO: 201904 - DNA, 426 bp, Gossypium hirsutum
gagaggagatagacgaaggagttaggttgatgtacttggccaacgaaggtgatttggacggcattcgcgagctcttggactcggggatcaatgttaatttccgcgacatcgatgatcggacggctctccatattgcagcttgtcaaggacagaccgatgtcgtttccttgctccttcagcgcggcgctgacgtcgaatctacagatcgatggggaagcactcctttggcggatgctgtatattataagaatcatgatgtgattaaacttctggagaaacatggatctaagccttttatggctccaatgcatgtaaatcacgcgcgtgaagttccagaatatgagattgatccaaaagaacttgattttactaacagcatcaacattacaaagggaaccttctgtattgcattatggcgtggaacac

SEQ ID NO: 201905 - DNA, 405 bp, Gossypium hirsutum
aattgaatgggtctgtaataccttcagaacgtccaaatgcatatgatgttggagatgtggaatccccttggaattgttggtgtaattacggcatttaatttcccatgtgctgttcttggatggaatgcctgcattgcactggtgtgtggaaactgtgttgtttggaaaggtgctccaaccactcctctggttacaatagcaacaacaaaattagtggctgaagttttggaaaagaataacttacctggtgcaattttcacatcattttgtggcggtgctgaaattggggaagcaattgcaaaagatcgacgcattaatctagtttcatttacagggagttcgaaggtgggtgtcaaagtacaacaaacagtaaaaaatgaggaggtttggtaaatgcttgcttga

SEQ ID NO: 201906 - DNA, 406 bp, Gossypium hirsutum
gttgctaacactttcgggtcatttgctttactcgtactgtttgcgttgggtggcttcgtcctgtcacgagaggacataaagggttggtggatatggggttactggatttcaccaatgatgtatgggcaaaatgcattgatggctaatgagttccttgggcaccagtggagtcgagtccttccgggttcaaacgtatcactaggagttgaagtcttaaattccaggagtttcttcccagattcatattggtattggatcggagtacggggattgattggcttcgtattattgttcaactttgtctttactgtggctctttcctatctagccccctttgagaagaataaggccgtaatatcagatgaacctgaaagcggtaacctatcaagtcaatgaggcttgagtt

SEQ ID NO: 201907 - DNA, 369 bp, Gossypium hirsutum
  unsure (1)..(369): unsure at all n locations
gccttttattgttgaatatggtgcagattaccgtgtcataagcatagctaatgcccccttccagcttgcgttttataacaccacccctaatgccttcacccttgcgttacgcatggctacaacgcgttcggagtcgctcttccgatgggtttgggaggccaacagggggaaccctgttcgcgagaacgccacgttctctctcgggactgacgggaaccttgtcttggctgatgccgatggtcggattgcttggcaaagttacactgccaacaaaggtgtggtagggtaccaattggtgcctaatggtaacatggtgttacacgattccaatggcaagttcattggcaaaggtttgatcatncaactgat

SEQ ID NO: 201908 - DNA, 416 bp, Gossypium hirsutum; identical to SEQ ID NO: 190686

SEQ ID NO: 201909 - DNA, 428 bp, Gossypium hirsutum
cgtcgagagagaataacagagggaaagcttaagcaatggcggccgaggaggacagcggagagttttacctccgctactacgtgggccacaaagggaaattcgggcacgagtttttggagttcgagttcaggccagatgggaagctccgatacgctaacaactccaactacaaaaacgacaccatgatccgcaaagaggtcttcctcactccttccgttcttaaggaatgccgccgcatcatcgccgacagcgagataatgaaggaagatgataacaattggccagaaccagaccgtgttgggcggcaagagcttgagatagtgatggggaatgagcacatctctttcacaacttcaaagattgggtcccttgttgatgttcagagcagtaagggggaaatcctgaaggtcttcgcatattttattatc

SEQ ID NO: 201910 - DNA, 411 bp, Gossypium hirsutum
cttctcaggaccctgcaaatctcctcttctattgaagagctatggaacactcgaagccactgaggatcactcggattaccaagataatggaagacgatggctttactttgataatgttgaaaatttacgagtcgaaggtggaggcatcatcgatggtaatggcaaaacatggtgggaaaagtcctgcaaagtcaacaaagccctcccttgcaaggaagctccaactgctgtaaccttcaatgaatgcactaacctgagagtatcaagtcttcgtataaaagatgcacaacaaatgcacgttatatttcaaaaatgtgtgaatgtaaaagcatttaaccttttggtgacggcacctgggaacagtcccaacactgatgggcccaaatgcatgtgaccggaacccagaatatt

SEQ ID NO: 201911 - DNA, 419 bp, Gossypium hirsutum
cttacgcgcaaccctaataggtttcccaacacttcagccgcacctgatccggacccaactgtcccggttctctccaaagatgtcactatcaaccaaacgacacacacatgggctcgtgtgttcctccccaggcagaagccgcttgatacgaacaagttccctctcatagtttattaccatgcaggaggcttcatccactgcagtgcggcatccacgatcttccatgttttttgctcaaacatggcgttggaactccaagccatcgtcgtgtccgtcgactatcgtcttgctcctgagcataggcttcctgctgcttacgacgacgctattgaagcgttgctctggatcaaaaccacccaagaagagtggttgacacaatacgcaaatttcaccacttgtttcgttatggggtcgagttc

SEQ ID NO: 201912 - DNA, 263 bp, Gossypium hirsutum
atttacttttcactcgagtacccagtatgtatggcatttttcataggtatgcttttgcacatcttgattttccattttccattggctcgtgtagagggtttagctacaaagaagccagtccttgcactttatgacataatctaagtatgtgcaatacctgctcttgccactgctatattcagcacagtatctttcttgctcggtgctgtcacttcagtagtttctggctttcttgggatgaaaattgctacctattctaatgc

SEQ ID NO: 201913 - DNA, 417 bp, Gossypium hirsutum
gttaaggaaagtatgcgttatcaagatgcttagcaatggtactgtggataaagtatatagtcttcgccgtcaagaagtacgagaaaccataggttatttatatagtaaggccggttcgcctgtaaacgtgggagagcagatgtttttaactatcttgaatgtggtgaccaatatgatatggggcgggtccatggaaggggaggccagggcgagccttggtgcagagttcaggcaagtcatctcagaagtaacagaacttttgggtctacctaatgtttcggatttcttcccggcgttggccccgcttgatttgcaaggtgcagtgaaacgtgtccgaaaatcaacggagaagttggacgcaattattgataagataatcaatcaaaggttggaggagaagcaaagtgggcacacagt

SEQ ID NO: 201914 - DNA, 383 bp, Gossypium hirsutum
tcaagttcaaggattacaattgtaccgttgagtactaccgatctcctttccttgttgtacaaagcaggccgcctgccgggtctccgcaaaacatcaagacaacccttaagttggatcgaatggattggaattcatttaggtggaaagatgccgatttgttggtcttcaacaccggccattggtggaactacgagaagaccgttagagggggatgttactttcaagtcggggaaaaaatcgaaaccaagatgaccatagaacatgcgtatcagaggtctttggagactgtgatgcagtggctacgcaacgaggtgaatatgagtaagaccaaggtctacttccgcactttcgctcccgtacatttcagaggaggggattggaga

SEQ ID NO: 201915 - DNA, 412 bp, Gossypium hirsutum
atctctacttccatttcatctgccatcaatttgctctgaagatcatgttggctatttttcacaaggcatttgctaatccaccagaggagctgaatagtccagcttctcataaatctaccaagaagcctaaacagcctgaagaaaccctaaatgatttcctatctcatcaccctcacaacactttctccatgagctttggcaacgctgctgttttggcttatgtccgccatgaacgtgctgcttcagttcatcagaggttgttttgtgggtttgatgacatatactgcctcttcttagggagcttgaacaatctatttatgctgaatagacaatatggtctttccaaagggagcaatgaggcgatgtttgtgattgaagcatataggacgctgagggataggggtccataccc

SEQ ID NO: 201916 - DNA, 412 bp, Gossypium hirsutum
gttgattggaagaaaaacaggcggaatatcagtttatccatttacgtcatctatacgaggcaaggaagatcccagtagccatatcattgtccgaggcaaatcaatggctgggcgtgctgatgacctatttaatctgattaattgtgttcttcaagaagtacagtttacagaccaacaacggttcaagcagtttgtgtcccaaagcaaagccagaatggagaaccggttgagaggtggaggtcatggaattgccgcagctaggatggatgcgaagttaaatgttgctggctggatttctgagcaaatgggtggagtcagttacctggagtttcttcaagcactggaagaaaaagtggataatgactgggcaggaatttcatcatctctcgaggagatccgtaaatccttactt

SEQ ID NO: 201917 - DNA, 405 bp, Gossypium hirsutum
aaaataccccaaaaaaataggaaaaaaaaagttgacattgagagatggtgagcaaaacagaggagacccaattgaataggcttgaaaaccaggtagataatggaggaggaggtgcttgggagtacctttgccttgtgagaaagctcaaagttaggcgttcagagaaagtcttgaaatatggtttatccatcttaaatgatcccaagaaaagatctgctcttggccctgaagaatggactttgtatgagcaggtagctattgctgctatggattgccaatgtctcaacgttgcaaaggattgtataaaggctttactgaaaaaatttcctgagagcaaaagggttggcaggctggatggcatgttgcttgaagcccaaaaatggatcgtgggctgaagctgaaaaa

SEQ ID NO: 201918 - DNA, 375 bp, Gossypium hirsutum
gcgaagtctacggttacggcaagatattcgacatcagcgataggtacaccgtcgacatgccgtcttgggaatccaaggacggcgtgtgacagttcctatggttgcctaaaagcatgaagaacggttccctcgctaataattctgagatgaaacttccaactcacaccggcacccaccttgacgctcccggacacgtcatcgatcggtacttcgatgccggcttcgatgtcgataccctagatttggaagtacttaatggtcctgccctgttgatagatgttccaaggggtaaaaacattactgccgaggttatggagtctttgaaaataccaataggagtacgtagagttcttttcagagcattaaatactgaca

SEQ ID NO: 201919 - DNA, 407 bp, Gossypium hirsutum
cagagggaaagcttaagcaatggcggccgaggaggacagcggagagttttacctccgctactacgtgggccacaaagggaaattcgggcacgagtttttggagttcgagttcaggccagatgggaagctccgatacgctaacaactccaactacaaaaacgacaccatgatccgcaaagaggtcttcctcactccttccgttcttaaggaatgccgccgcatcatcgccgacagcgagataatgaaggaagatgataacaattggccagaaccagaccgtgttgggcggcaagagcttgagatagtgatggggaatgagcacatctctttcacaacttcaaagattgggtcccttggtgatgttcagagcagtaaggatcctgaaggtcttcgcatattttattatc

SEQ ID NO: 201920 - DNA, 389 bp, Gossypium hirsutum
gttgattggaagaaaaacaggcggaatatcagtttatcgatttgcgtcatctatacgaggcaaggaagatcccagtagccatatcattgtccgaggcaaatcaatggctgggcgtgctgatgacctatttaatctgattaattgtgttcttcaagaagtacagtttacagaccaacaacggttcaagcagtttgtgtcccaaagcaaagccagaatggagaaccggttgagaggtggaggtcatggaattgccgcagctaggatggatgcgaagttaaatgttgctggctggatttctgagcaaatgggtggagtcagttacctggagtttcttcaagcactggaagaaaaagtggataatgactgggcatgaatgtcatcatctctcg

SEQ ID NO: 201921 - DNA, 412 bp, Gossypium hirsutum
attgagactacctcttgagtcagaccaagttcttctgagagtcatttatgctggtgtaaacgcaggtgatgtgaactttagcgcaggccgttattttcaaggaaccaagaaagaccctggatttgaggcagtgggaataattgctgccattggagattctgtaagaaatttggaagttggaactcctgctgcagtcatgactattggatgttatgctgaattcatgaaggttccttcaaagcaaatacttccaattccaagacctgacccggaagttgttgctctgcttacttcaggattaacagcatcaatcgctttggaagagcttggtcagatgaaatctggaaaagttgtccttgtaactgctgctgctggagggactggacaatttgcagtccagcttgcaaaactg

SEQ ID NO: 201922 - DNA, 400 bp, Gossypium hirsutum
tttttaagtccactttcagtcgttcctttggtatctctagttggttttgggctttacgaatttggctttcctggggttgccaaatgtgtggagattggactgcctcagctaattcttatagtatttgtctcacagtacgtgcctcatgtgataaagtctggaagaaatgtctttgatcgatttgctgtcttgttttcagtggtgattgtttggatttatgctcatttactcactgtgggtggagcttataatggtacagcaccaaaaacacaaacaagctgtagaactgatcgttctggtctaatagatgctgctccatggataagagttccttatccctttcaatggggagcgccatcatttgatgctggtgaagcctttgctatgatgatggcttctt

SEQ ID NO: 201923 - DNA, 209 bp, Gossypium hirsutum
acttgatcggtcctacaccgcacactttacaagaacttgaagatacaactcttggttctcttttatctgcactgatgcagcactgggatccaacttaaaagccggttcccttaaagaaagggggtccttcggcctggtgggctaacggaacccaagaatggtgggccgaacttggggtatccaaagaaccaaggccttccttcttatag

SEQ ID NO: 201924 - DNA, 411 bp, Gossypium hirsutum
attactttttatttttttcagagcctccttcaccaacctccgctctgttcagcccgtgatcttttgatctttctccatggctaccatttccaagctcgctaaccccaacccagtcgcttctctttcattatctttcaaacccagatcttcttcatcgcttaaatgcttcgttgggttccctaccaggcctgctttcagctctaagctggtttcatcttctagcttgtcctcgataaacacccaccctttcaggggctccttggttgtcaggtgttctcttgctgatggaaacggtagttcagtgaagacgactactttgcatgatctgtatgaaaaagaagggcagagtccatggtatgacaacctttgcagggccaaggttgaccgatttgctgccactgattgcaagtg

SEQ ID NO: 201925 - DNA, 405 bp, Gossypium hirsutum
  unsure (1)..(405): unsure at all n locations
gcaccttaatgggtatattgtatcagattgtgagtcggttggtgtaatgtatgatactcaacatttcactgttacaccagaagagtctgctgcagctactattaaagcaggtttggatttggattgcgggccgtttttggccatatatacggatttggctataaggaggggtttgttaactgtaactgatgttgacatggctttagcgaataccgttactgtccaaatgaggcttggcatgttcgatggtgaaccatcggctcaaccgtatgggcatcttggtccgagacatgtgtgtaccccggatcataaacaactagccttggaagctgctaggcaaggcatagttttgttgaagaactctgggtcnttttttggccgttgtctacttcacgtcatcgtacc

SEQ ID NO: 201926 - DNA, 417 bp, Gossypium hirsutum
cagttggagtgttgcctttgtctctgcagtatggttttgcaatagtagaaaagttcttaaagggggcttcaagtattgatgagcatttccgttcagctccttttgagaagaatatacctgtacttttgggtttgctaagcgtatggaacgtttcatttcttggatatcctgcaagagctattttaccatactcccaggccctcgagaaatttgctccacacattcaacaggtcagcatggagagtaatggcaagggggtgtcaattgatggtgtgccacttccttatgaggctggtgaaattgattttggtgaacctggaacgaatggccagcacagcttttatcaactaatccaccagggacgtgtaattccttgtgatttcattggtattgtgaagagccagcaacctgtgaacc

SEQ ID NO: 201927 - DNA, 373 bp, Gossypium hirsutum
atttcttccattttctctcttttacttccttgcttttcgccaattgcaaccatgggtttgaaaggtttcgttgagggaggcattgcatctatcgtcgccggcgcttcaactcatcctctcgaccttatcaaggtccgtatgcaacttcaaggtgaatcccatctccctaatccttcccttcaactttatcgtccggcacttgccgtcaactctgctgccgttgggaatgtttcgatctcgcaacctcgtgttggtcccatttctatcggtgtccgtatcatccaattggaaagtgtagcggctcttttctccggtgtctacgccacgatgcttcgacaaacggtgtattctactacccgtatgggactttatg

SEQ ID NO: 201928 - DNA, 424 bp, Gossypium hirsutum
gattacgccggcgccgccgtgctcggctggggagacgggtattacaaaggggaagaagataaagagaaagcaaagtcaaaagcttctttatctacaatcgccgagcaacagcatcgtaaaaaggttctcagagaactcaactctttgatttccggttcaaccgccaacactgacgacgccgtcgatgaagaagtcaccgacaccgaatggttctttttagtttccatgacccaatctttcgttaacggcaacggacttccgggacaagcttttttcaattcatgtccagtatgggtcgctggatcggaccgcttagccaattctacgtgtgaaagagcgaaacaaggactggttttcggtttacaaacgatagtttgtataccgttggcgaatggtgtcgtggaattggggtcatcggaattca

SEQ ID NO: 201929 - DNA, 411 bp, Gossypium hirsutum
tctaaaggagtttctgatatgggagtccatgccttcattgtgccaataagggatctaaaaactcaccagccacttcccggaattgaaataaatgattgtggccacaaaattggcctgaatggggtggataatggagcactgagattccgttcagttagaattccccgagataatcttcttaatcgatttggggatgtcacccgagatggaaaatacacaagtagtctccctacaataaataaacgttttgctgctactcttggtgaacttgtaggtgggaaggttggcctcgcacattcttcagttggtatcctcaagattgctgtcactattgcagtacgatactccttactacgttagcagtttggtcctacaaaacagcctgaagtcagcattcttgattatcaatct

SEQ ID NO: 201930 - DNA, 412 bp, Gossypium hirsutum
gaataagctacaaggaatagagaaagaaatggaggggggtgtcttttgctaagctgtttagtcggctgtttgccaagaaagagatgctaattcttatggtgggtcttgatgctgctggtaagactaccatcttgtataatctcatgctcggtgagattgtcactaccattcccaccattggctataacgtggagaccgtagaatataagaacattagcttcactgcttgggatgttggtggtcaggacaagattcgacactttgtggaggcactacttctaaaacactcatggcctaatcttacctgttaatcgcaatgaccgtgaccgtatggttgcagccagcgatgatcttcatcgaatgctaaatgaggacaagctgagggatgctgtgcttcttgtgtttgcaaaca

SEQ ID NO: 201931 - DNA, 412 bp, Gossypium hirsutum
gttccattttccctaacaaacctgcatcagatccgatcagatttaactcagatccatccgtatcgggtcttctaaattccagatctttacttttctcgagtaaaggaagaaagaggaagggagagatgagagagattattagcgtccacattggccaagctgggattcaggttgggaattcatgctgggagctttactgtcttgaacatgtaatccaccccgatggaacaatgccgagcgacacctcaatgggcgtcgcacacgatgctttcaacactttcttcagcgaaacgggttcgggaaagcatgtgcctagagctgtctttgttgatctggaacccactgttatcgatgaagtccggaccggcccttatcgccaacttttccaccctgagcagcttatttccggcaa

SEQ ID NO: 201932 - DNA, 420 bp, Gossypium hirsutum
ctaagatattcaaccaccatgaatgattcttcactgttgtgcagttcatcaaatcacgaagaagaagctgacgttttgcaagccatgcatttagcttccatttcatcactccctttcactttgaaagtcgccgtcgatctcggcttgttagatattatagccgaagccgccgacactcctcctggtatggtgtcggttgctgagatcgtctctaagcttcccaccaataatccaaacgccccttccattgttgatcgaatgctcaggcttttggccgctcactccatcttgacctgtgatcaaatcactggccaagatggcctgacccaaagatcgtatggtcttgcatcaatcggtaaatacttcgttcaaaatgaagatggagtctcctttgctgctttgcttcgtctccatctcgaa

SEQ ID NO: 201933 - DNA, 398 bp, Gossypium hirsutum
aagcagcttgccttaaccacatttccagagaatcctctgacattagacgccttgctaatttctacaaagaggtaatttctttagaaaatttctttaattctcttttgttttaaaggtttttagctgtttttatacgttaaaaaacgatcgagcatttatgtttttgctttagatctttgggttcgaggagattgagagcccagatttcggggagttcaaggtaatatggttgaatcttccgggatcttttcccatgcatttaattgaaaggaacccactcacgaaacttcccgaaagtccgtacagttccacggcggccgttgctgaccctagtaatcttcctagaggtcatcatatttgcttcaccgtttccaatttcgattcttttgttcagtctc

SEQ ID NO: 201934 - DNA, 399 bp, Gossypium hirsutum
gcgagagagaatttcaggctgaagttgagatcattagcggcgtccatcacaaacatctcgtctcattggtcggatactgtatttctgggacaataagaatgcttgtttatgagtttgttccaaacaacaccttggagtttcacttgcatgggaaggggcgactgaccatggattggccgacaaggatgaaaattgctttaggatctgcaaaaggactggcatatcttcatgaagattgtcatcctaagatcattcaccgtgatattaaggccgctaatattctgttggatttcaagtttgaagcaaaagttgctgattatggactagcgaaaattgcttccgatgtcaacacgcacgtcttcaccagggtgaattgggggtactttcgggtatttagcc

SEQ ID NO: 201935 - DNA, 409 bp, Gossypium hirsutum
ataaaacccagcattgttaaccctcctccccactctccagctccaaacatcaccagggtttggccaatctataggagcataaggtaatccttcgccggaagtacacggtggaaccggtggagtagggaaatcgttctctttaattacaggaggaaaaccattatctccattcggaaaatcgttcctcgaaggctcttctttcggaatagacggaatggaagccggtccaccatagtaatctgggaatagatcttggtgaagatcaatatgaagaggactatccatatcagaacgagtttcatggattgaggatgcagtaggcatatgaggaggggtacccatacgaggaggtgaaggaattgacatcattagaacccgggagaattcctcgttgacaattttattaatt

SEQ ID NO: 201936 - DNA, 408 bp, Gossypium hirsutum
  unsure (1)..(408): unsure at all n locations
actagttcgaccttggcttctctgagtaagggatgtgcagagctttcaactgatgggcagtttctgcaaatgcgctcaaagcaggagaatcactggggtaggtgacggaattattcaaggagcagaagctcttgcccagggtgttgcttttggtgtggttggggttgtgagaaaaccggtggaaaatgccagacagtatggtctcctaggacttgcacagggaataggacgtgctttcctaggaatctttgttcaacctgtcagcggggtattagatttcttctcattgacagttgatggaattggtgctagttgttccaaatgtttggaggttttgaataacaaaagcacctttcagagaattagaaatccccncccggaactattcgtgctgatggtatacttaga

SEQ ID NO: 201937 - DNA, 413 bp, Gossypium hirsutum
atccaagacaaggaagggattccaccagatcagcagagggtgatgttttgccggaaagcagctcgaggatgggaggacacttgcggattataacatccaaaaggagtcaaccctgcacttggtgctgcgactgcgtggtggaatgcagatttttgtgaaaactttgactggaaaaactattacattggaggtggagagctcagatacaattgataacgtgaaggccaagattcaggacaaggagggtatcccacctgaccagcagaggttgatttttgctggaaagcaactcgaggatgggaggacgcttgcggattatagcatccaaaaggagtcaaccctgcacttggttctgcgccttcgaggaaggatgcagatattcgctaagaccttgactggtaaaaccataacac

SEQ ID NO: 201938 - DNA, 406 bp, Gossypium hirsutum
acacctcctctttccacccccaccaaaaaaaaaaaaagagcaaagtcctctctgaaagaaaatcttcaataaacgacgctctttatccgcaacttcaaagatccgtttaagatccgaattccctgcccgtattttccctctcgtgattccacctcagtacgtaccgatttcttgacccgcttggtaatttcttgagtttttttggggctgattttaaaaggagcttgatattcgactgaggatctgtgagattatcgctttttgctttttagtttagtccgatggcttctataggtatggcgcctacttctgggttaagagaacctagtgggaatgcagttggtgttgatagattacctgatgaaatgaatgatatgaaaattaaggatgacaaggaaatggaagc

SEQ ID NO: 201939 - DNA, 399 bp, Gossypium hirsutum
ggaaagcagcttcaacttcagcttttgggagtgcaaatggagcgccatgtcttattgctaatccaatccaccacctacagaccaaacacttctccataggaatcctccctgatggggtcaatcgtagctccgacaattttgtccagaattccgatgccatggaacgtctcttgtctgaccttcaatcccatatcaacaaggttcttgctggaggaggagaaactgctgtgaaaaggaacaggagcagaaataagcttctccctagggaacgaatcgatcgtcttcttgaccctggttcttctttcctcgaattgtctcagcttgcagggcatgaattatacgaagaccctttaccatcaggtggaataataacaggaattggtccagttcatgggagac

SEQ ID NO: 201940 - DNA, 422 bp, Gossypium hirsutum
cggaactctcgagtcgtctcccactgatggcaccatgacggtccagtgggttcgaaagtttcccttcttctgcagtgacagagaatacttgataggtcgtcggatttggtcgtgtggtcggacatattactgtgttacaaagggagtaccatatccctctattcctagaaaaaccaaacctaggcgcgttgatttatactattcaagttggtgcattcgtgcagctgaatcaaggaaaggggatggccagctgactgcatgcgaggtattactttttcaccatgaaaatatgggtataccatgggaaattgcaaagcttggggtcaagctaggcatgtggggaactgttaggaagattgaccctggcttacgtgcatatcaaaccgaaagagcatcgggagcgcccctttctcattcagctt

SEQ ID NO: 201941 - DNA, 414 bp, Gossypium hirsutum
gtcagaagaaagcaataacatgtgcgaactgcttaggagcaactgcgaccgaggtgttatgcttgctgatgggaaaaccagattttccatcaacggcaagcctatctaccactttgttggaacctcgacttttagccaatatactgtcgtccatgttggccaggttgccaagatcagtccaaccgccccgcttgataaagtctgtcccattagctgtgggatatgtacaggttttggggccactgtaaatgttgccaaacccaaaaagggtcaaactgttgcagtttttggactgggtgccgttggtcttgccgccgctgaaggtgcaagggtttgtggggcttctcggatcatcgctgttgatgtgaaccccagaagatttgaagaagctaagaggtttgggattacagaatt

SEQ ID NO: 201942 - DNA, 372 bp, Gossypium hirsutum
gctggatttgggtgctacgaggtccctagtcgagacatggttccataatcttcccatggttcaacctttctatgcagtcaaatccaaccctaaccccgctttcctcaaagaaatggcagctctcggcaccggctttgactgtgcaagccttcctgagattgaaaccattttatcgcttggggtttcgcctgatcgaatcgttttcgcaaacacatgcaaacccgagtctcacatcaagtatgcaactaaagttggcgttaacttagccactttcgactccaactgtgagctcgaaaagataaagaagtggcacccgaaatgtgaactgttgatccgaatcaaagtcccggaagccagtggttcagcattcat

SEQ ID NO: 201943 - DNA, 413 bp, Gossypium hirsutum
gtggggcggaggcacaggtggcaaggctattggctttgaattccggggccgaggttaagcccgataggccttatgctgagttttggatgggaacacatgactcggggccaagttttttggctgatggctatggagaaggtcaaaatgtgggtttaaaagagtggattcggaagaatccgaatgtgcttggtcataaggttttggaaaaatgggggcccgatcttccttttctcttcaaggtactttcagtggcaaaagccctttcaatacaggctcatccggataaagaattggccaaagaattgcttaagttgaagccaaatctctataaggatgggaatcacaaacctgagatggctttggcaattacagagttcagggccctttgtggattcattactctcgaggagctt

SEQ ID NO: 201944 - DNA, 408 bp, Gossypium hirsutum
gccattgttatcttctctgttttctttcttcactctgtgcagaacaagttaattaagaaagaagaatgactaaccaacaaaatgtggtggttgtggatgtgaaaccccatggtggggttaagccaccattatcattgccagtggccaagtccttttcaccacaagacctgaagttattgttaatgaagaaaaggtttgaaactgagaatgcttgggtactggattccatgagagcttcttcacctagtcgtatcagcaaccctactacgacttccttacctgaaactgatgtcaaaagttcctggattgtacatcatccctcagctttgaacatgtttgaacaaatagtgactgcttcaaaagggaaacagattgcccgttttgttccttgactacgatggcacactg

SEQ ID NO: 201945 - DNA, 418 bp, Gossypium hirsutum
cccaaatctcctccctcctcttctttagcgtccttttcgtttccgctcatgcagcgcgctttgaaatccgcaatgagtgctcctacaccgtctgggcagcagcctctcctggtggtggccgtcgcctagaccctcggcaaagttggaccatcgatgtgcctgctggcactgctatggctcgtatttggggtcgaaccaattgcaatttcgatgccagtggtaggggtcattgccaaaccggtgattgtggtggactccttcaatgcaaaggttggggtgtacctccaaacaccctggctgaatatgcacttaaccaatttggaaacatggatttctacgacatttccttagttgatgggtttaacatccccatggtgtttggtccaactaatggcggttgtcacaacattcggtgcac

SEQ ID NO: 201946 - DNA, 403 bp, Gossypium hirsutum
ctcttttacactcccttcatttttggtctttgaaacccgataagcccttttcactcctttttatactctcattttacgtttatttcttctttctttcatagatccaggccttcttcttcttcttcttcttcttcttctatcaaagttaatataggcaaatataagagaagaaatcgaattaaagtttatctgtggaactagataaagaacagtacgatttgttttgatccaaagcacattcgagccatgtcgtttattggtacccaacagaaatgcaaggcttgtgagaagactgtttatccagttgaacttttgtctgcagatggagttccttaccataaatcttgcttcaagtgcagtcattgcaaagggacactaaagttggctaattactcctcaatgg

SEQ ID NO: 201947 - DNA, 355 bp, Gossypium hirsutum
gtaccccggatcataaacaactagccttggaagctgctaggcaaggcatagttttgttgaagaactctgggtctttgccgttgtctacttcacgtcatcgtaccatcgcggttattgggccgaattcagatgtcacggaaacaatgataggaaactatgcaggggtggcatgcgattacacgagtcccttgaaaggcatttcaagatacgtgaggactgttcatcaagtaggctgttcaaacgttgcttgcaaagcaaacaatctgtttggattcgccgaggtcgctgcccgccatgctgatgcgacagttctcataatggggcttgaccaatcgatagaagcagaattcaagga

SEQ ID NO: 201948 - DNA, 412 bp, Gossypium hirsutum
gaaagaacggattatccaattagtcggcaccctgagtggcgttacaagacagagttccagagccatgagcctgagtttgactacctcaaaagcttggaaatagaggaaaaaatcaacaaaatcagatggtgccaaacagccaacagtgcactgtttctcctctccgccaatgataaaaccatcaaattttggaaggtacaagaaaagaagatcaagataatttctaaaattattgctgacccttcgaaagctgttggaaatggaaatgttgctagttcaagtaattcaaatagcccaaaatcttttcttgcaaatggagtctcccccgacagatcctgcaaccatttgggcaatgacatctctttcccaccaggaggccttccatcgctatgtttacctgtggtaacaagtc

SEQ ID NO: 201949 - DNA, 424 bp, Gossypium hirsutum
agtaacactaatggttgtgatgatatcaacgaaaatgaaccagatgctaaaagatggtaagcttggatcatagccaaaaatgaaaaacagattctcccattaatgggttcttgttttagcttacgcttttgtgattttttttttttgcaggaaaggtgaaaatgagaatgagggtatggtaggttgtggtagcaaaactgtgaaagagcctagaatagtggtgcaaacaacaagtgatattgatattcttgatgatgggtatagatggaggaaatatggacagaaagtagtcaagggaaaccccaatccaaggttagtcattattctccacctaattgtctactaataggaagcctggatgtgcagtttattcaactaaaattgttgacttcgtcaaaatcttttatacaggagctactacaaa

SEQ ID NO: 201950 - DNA, 416 bp, Gossypium hirsutum
gtcttgtgcaaggtccatcatgcaaatctggtagagttgatcggctatgctgcaagtgatgatgaactcttccttatttatgaatatgctcaaaagggttcccttagaagccatttacatgatcccttgaacaaaggtcataccccactttcgtggataatgagagttcagattgcactcgatgctgctagaggcctggagtacatccatgagcataccaaaacacattatgttcatcgagatatcaagtcaagcaacatcttgcttgatggttctttcagggcaaagatttcagattttggtttgtcaaagcttgttgggaagacaaatgatgaggaagcaacagcaacgaaagttgttggtacatttggttatttggcaccagaatatttgagtgatggacttgcatcatcaaa

SEQ ID NO: 201951 - DNA, 421 bp, Gossypium hirsutum
aagaaaaggcaaaggcgagggtctattttcttcacaaactacaatggcttccgagtctttagtaaccaagaggctagatggtaaggtggcactgataactggtggtgccagtggtttaggagagtgttcagccaggctatttctcaaacatggagccaaggttctgattgctgatattcaagacgaattgggccactccctttgcaaagagcttggaactgaaaacttcagctatgtccattgtgatgtaacatgcgaatctgatgtcgaaaatgccgtaaacttagcggtctccaagtatggaaaactcgatatcatgttcaacaatgcaggccttattggtgatggtgaagtcagagttacagacgccagcactgacaacttcaagagagtgttcgatatcaatgtcttgggtggattc

SEQ ID NO: 201952 - DNA, 419 bp, Gossypium hirsutum
gattacgccggcgccgccgtgctcggctggggagacgggtattacaaaggggaagaagataaagagaaagcaaagtcaaaagcttctttatctacaatcgccgagcaacagcatcgtaaaaaggttctcagagaactcaactctttgatttccggttcaaccgccaacactgacgacgccgtcgatgaagaagtcaccgacaccgaatggttctttttagtttccatgacccaatctttcgttaacggcaacggacttccgggacaagcttttttcaattcatgtccagtatgggtcgctggatcggaccgcttagccaattctacgtgtgaaagagcgaaacaaggacgggttttcggtttacaaacgatagtttgtataccgttggcgaatggtgtcgtggaattggggtcatcgga

SEQ ID NO: 201953 - DNA, 406 bp, Gossypium hirsutum
  unsure (1)..(406): unsure at all n locations
ctcttgctctctttagagtaaatttcttttgcaatcctgtgtagagctccgggatccattgtcaccatgtcttgctcaaatctgacaatgtgggtgtcctcaaaaccctctctttctgacacttcttcactctctttccgttctttcatcagcccttttcagctcccatctcagagctcaacccccggtaacccttccaggtcctcatctgtaaccccagttcactgtggtcttcgtgagcttagagaccgtattgattcagtaaagaacacgcagaagatcactgaagccatgaaacttgtggctgctgctaaagttaggagagcacaagaagctgttgtcaatggcagacctttctctgagtccctggttngggaaagttctttacaacatcaatgaacagctc

SEQ ID NO: 201954 - DNA, 407 bp, Gossypium hirsutum
  unsure (1)..(407): unsure at all n locations
gaattggttaatgtactttgttttctacttgatattgtgtcaagctttccttttgatcacaagaaggaaattggtaagatcccataagcttccgcccggtccaccaacaattccgatcttcgggaaccttttccaggttggtgataaaccccataggttccttgccaaacttgccaagattcatggggacatcatgactctgaaacttggccacactactaccgtagttttttcatctgcaacaatggccaaagaaatcctccaaaagcatgatgccgtatcttgtaaccgaaccattcccgatgcccttcgtgcccttcaacatcacgaagccggattgccttggatgcctgtttcaaccacatggaganaatttcccttaggaaaatctgcaatttgcatatttt

SEQ ID NO: 201955 - DNA, 371 bp, Gossypium hirsutum
cagagggcagtcgataatgcaaaaggggtggatgaacatctgaagggtgttggccttcgtatgttaggtctttgtttgggaaagcaagataaagtttcttcctctgactttgaaaggtcccgtcttcagaatgaagcacttaaatatttagattcagcactttcctttgagcaggataatcctgatataatctttgagttgggagctcattatgcagagcagtggaatttgaatgctgctttgcgttttgcgaagaagtacattgatataaccggtggttctgtaatgaagggttggagattgcttgctctaattttgtcggctcaacagcgtttcacagaggctgaggtggtcactgatgctgcattgga

SEQ ID NO: 201956 - DNA, 418 bp, Gossypium hirsutum
atcgaagattatattcattaaaatcacatgattgcgcacgtcttaatgcaagatttactcccagttgctttacggtactgcatgtcaaaaaatgtgacgtcctgtataattgaactatccaatataacgaaagctatttgtggcaaagttttggatgttgaagaacttaagaaagtgcaggatcgagctgttttgactttatgcaatttggagaagatctttccaccttccttcttcactattatagtgcacttggttcctaagcaaattgaaatcttattgtcgcaataagcgttatccagaaggatcaattgctgaaggctacttggcagaggagtgcatgacattctgttctagatatttagaagatgttgaaacacgattgaatagaccaaatagaaatgctgggctcaatgat

SEQ ID NO: 201957 - DNA, 418 bp, Gossypium hirsutum
  unsure (1)..(418): unsure at all n locations
ctcttacattacctacaaaatctttgctttcccgttttgttttttttgccaatggcttcttcaccaaaattcatctcttacttcttccttttagccctcttctccgttgaaatacatggtagggatttttttagcaaaatcccaagtgttaacacaaatgagaaagaggtgaccaacaaagaagaacaaaccactttggggaagaaggagcaagagccaaggtttgtccccgagacccaaaatggctatgggctttacggtcacgagtctggtcagctccctcctagcaccgncagtaccaaagaaacctatgaaccctatgtcacacctgttaaataccaccctgatgaaccctacaatagcatcccagcgtccaaaaccaacaacaaagactcttacttttatagcaagacaaatg

SEQ ID NO: 201958 - DNA, 408 bp, Gossypium hirsutum
  unsure (1)..(408): unsure at all n locations
gtagaaggggagcagggagctgctatccatattgttctagttgactccaacactgcgcgtgttgtaacaaccggacctgaagcctctatgaagctagatgttgtggtgcttgaaggtgattttagcaatgaggatgatgaagattggacacaggaggaatttgatagccatttggtaaaagagcgtccaggaaaaagaccactgctgacgggtgacttgcaagtgaccctgaaagagggggttggaacactaggagacctcacttttactgacaattcaagttggataagaagcaggaaattcaggcttggcttgaaggttgcttctggatactgtgagggtatacgtgttcgggaagctaagacagaggctttntttttnatgtcaaggatcacagaggggaattgt

SEQ ID NO: 201959 - DNA, 378 bp, Gossypium hirsutum
aaaaaatcttctgatttttctgagtctttttcttatctgctgtttggctcctgagaaagtgttttaagaagaacaatgaatgcattagtggcaaccaacagaaacttcaagctagcagccaggcttcttggtttggattctaagcttgaaaagagtctcctcattcccttcagggaaatcaaggttgaatgcaccatacccaaagatgatggcacattggcaacttttgttggctttaggattcaacatgacaatgctagaggtcctatgaaaggaggaatcagatatcaccctgaggttgaccctgatgaagtgaatgcattggcgcaactaatgacatggaagacagcagttgcaaacatcccatatggtggggct

SEQ ID NO: 201960 - DNA, 417 bp, Gossypium hirsutum
  unsure (1)..(417): unsure at all n locations
atctctacttccatttcatctgccatcaatttgctctggagatcatgttggctatttttcacaaggcatttgctaatccaccagaggagctgaatagtccagcttctcataaatctaccaagaagcctaaacagcctgaagaaaccctaaatgatttcctatctcatcaccctcacaacactttctccatgagctttggcaacgctgctgttttggcttatgtccgccatgaacgtgctgcttcagttcatcagaggttgttttgtgggtttgatgacatatactgcctcttcttagggagcttgaacaatctatttatgctgaatagacaatatggtctttccaaagggagcaatgaagcgatgtttgtgattgaagcatataggacgctganggataagggtccataccctgctg

SEQ ID NO: 201961 - DNA, 397 bp, Gossypium hirsutum
  unsure (1)..(397): unsure at all n locations
ctgctgtgaaaccttggtctaccgggctaagcggacagcttcagaaagcatttgtaaccggtgtaccaaagctgaagagatcagagctggaagcagcctgcgaagatttcagcaatgtgattagttcttcaacagttggcactgtgtacaaagggacactgtctagtgggattgaaatatccgtggcctacantccctgtgaaattgccaaagattggtcaaggaatttagaagcacagttcagaaacaagattganacattatcaaaggtgaaccataaaaatttcgtcaacctagttggatattgtgaggaagacgagccttttacgaggatgatggtttttggatatgctccgaatggaaacacttttgagcatttacacattaaagaatccga

SEQ ID NO: 201962 - DNA, 420 bp, Gossypium hirsutum
  unsure (1)..(420): unsure at all n locations
atctctacttccatttcatctgccatcaatttgctctgaagatcatgttggctatttttcacaaggcatttgctaatccaccagaggagctgaatagtccagcttctcataaatctaccaagaagcctaaacagcctgaagaaaccctaaatgatttcctatctcatcaccctcacaacactttctccatgagctttggcaacgctgctgttttggcttatgtccgccatgaacgtgctgcttcagttcatcagaggttgttttgtgggtttgatgacatatactgcctcttcttagggagcttgaacaatctatttatgctgaatagacaatatggtctttccaaagggagcaatgaggcgatgtttgtgattgaagcatataggacgctgagggatangggtccataccctgctgatc

SEQ ID NO: 201963 - DNA, 412 bp, Gossypium hirsutum
aactagtctcgtgttttttttttttttttttttggatggatatatatccatgaattggtcatcatctaatgtaatcagcacatcttggtttaacaaaattcatgtctgcattttctattatctgaaactggcattgccttgccttcaatcccaacccacctctgtttccaatttttttattcaatttaaacttttgctgcaaacttaatagtttcagttcacaaaccccatttaaatgtgcagcaaccacggttatgaaatatttcgtcaaactccgcaaccatacactacacagcctaatcactgttttgcgccgatcaagttcctgatgacatactgcagaatgcctccgtggttgaaatatgccagttccacctctgtatcaaatcgtacagtgcaggtgaatgacctg

SEQ ID NO: 201964 - DNA, 328 bp, Gossypium hirsutum
ctcttttacactcccttcatttttggtctttgaagcccgataagcccttttcactcctttttatactctcattttacgtatatttcttctttctttcatagatccaggccttcttcttcttcttcttcttcttcttctatcaaagttaatataggcaaatataagagaagaaatcgaattaaagtttatctgtggaactagatcaagaacagtacgatgtgttttgatccaaagcacattcgagccatgtcgtttattggtacgcaacagaaatgcatggcttgtgagaagactgtttatccagttgaacttttgtctgcagatggag

SEQ ID NO: 201965 - DNA, 406 bp, Gossypium hirsutum
ggaatgtcctggagttgtttcttgtgctgatatccttggtctgtctgctagagaaggcatcgtttcgttgggaggcccttacattcctctcaaaactggaagaagagacggtagaaggagcagagcagatgttgtggaggagtatcttccggaccacaatgagaccatctctggcgttctcgacaggtttgccgccatgggtattgacacccctggagtcgttgccctcctaggagctcacagtgtcggcagaactcactgtgtgaagctggtgcatcggttgtacccagaggttgaccctgccctcagccccgaccatgttccacacatgctccataaatgccctgatcaaatcccagaccccaaggccgtccccaagggatgtgagaaacgatcgtgggacacc

SEQ ID NO: 201966 - DNA, 409 bp, Gossypium hirsutum
gtgggtcgcttttaagagagaaaatggtggaaggagcatgcaagaaatttgtttgtattgttgacgaatccaaattggttaaacatttgggagggagcggtttggctttgcctgttgaaatcgttcccttttgctggaaatttactgcaaataagctccaaaagttgttccaagggtcggattgcgtggccaagctgaggaatgatggtgaagggaagccatttgtgacagataacgggaattacatcgtggatttgtatttgaagaaagaaatgggggatttgcaggttgcaagcgatgctattttgaggattgcgggtgtggttgaacatgggatgtttcttgatatggccaccactgttattgttgcagatttaccttttggcatctatattgattgatgatggga

SEQ ID NO: 201967 - DNA, 358 bp, Gossypium hirsutum
  unsure (1)..(358): unsure at all n locations
attcgccgcacggcatcagtctcatcaggcggngaagaatgtctcacaggaagtttgaacacccaaggcatggctcccttggatttcttccgaggaagcgagcttctcgtcacagagggaaagtgaaggcatttcctaaggatgacccaagcaaaccttgcaagctcactgcctttttgggctacaaggcaggcatgacacacattgtccgagaggtcgaaaaacctggatctaagcttcacaagaaagagacatgtgaagctgttacgatcgttgaaacccctcctatggtgattgttggggttgttggttatgtcaagacaccacgtggtcttcgcagcttgaacaccgtttgggc

SEQ ID NO: 201968 - DNA, 370 bp, Gossypium hirsutum
cttaaaccattaaagcttggaacaagcttaaggaagtgcacaagtggccccaaagagaggtgtaaaggttgctgccccggccaagaagaaacaagagaaggttgtgaatccactgttcgagaagcgtccaaagcagtttggtattgtcggggcactacctccaaagaaggatctacatcgatttgtaaagtggcctaaggttgtccgcattcaaaggaaaaagaggatccttaagcagaggttgaacgtcccaccagcattgaaccagtttaccaagactcttgataagaaccttgctacgagtctattcaagctgcttctcaagtacagaccggaggacatggcagccaagaacgaacgtgtactgaaa

SEQ ID NO: 201969 - DNA, 276 bp, Gossypium hirsutum
ctgacacttttttaacatagaacatgcttgaatgagcaggcaaggttatctggtagtattgtggactaatccatattggttaaacatttgtgagggagcaggttggctttgcctgttgaaatcgctcccttttgctggaaatttactgcaaataatctccacaagttgttcccaggatcgcattgcttagccaacctgaggaatgatggttaatggaagccatatgtgacagattacaggaattacatcgtacatttgtatatcaagaatgacatg

SEQ ID NO: 201970 - DNA, 417 bp, Gossypium hirsutum
ctcttacattacctacaaaatctttgctttccctgtttggtttttttgccaatggcttcttcaccaaaattcatctcttacttcttccttttagccctcttctccgttgaaatacatggtagggatttttttagcaaaatcccaagtgttaacacaaatgagaaagaggtgaccaacaaagaagaacaaaccactttggggaagaaggagcaagagccaaggtttgtccccgagacccaaaatggctatgggctttacggtcacgagtctggtcagctccctcctagcaccgccagtaccaaagaaacctatgaaccctatgtcacacctgttaaataccaccctgatgaaccctacaatagcatcccagcgtccaaaaccaacaacaaagactcttacttttatagcaagacaaat

SEQ ID NO: 201971 - DNA, 423 bp, Gossypium hirsutum
acatgctgttattgagttaactagaaaggctgaggaaataaccaaagctctgaatcttgaccatgttcttgaagtttctaacaaacagtgcccttgttacaattcaatgggagaagctgacattgacaacaataagctaaggaaagcagcttctcgagaagatgccactgacaactatttatattgtccaaaagctaaagatattgagagcggagatttgaaacatttccaaaagcactgggctaatggtgagcctgttattgtcagcaatgtccttgagaatgcatctggtttgagctgggagccaatggttatgtggcgtgcttttcgtcaagtaacaaataaaaaaagtgatcaccaattggaagttaaggcacttcattgcttagattggtctgaggtagtggtcaatattcaccaatt

SEQ ID NO: 201972 - DNA, 418 bp, Gossypium hirsutum
atttcgatttgattgaagaagaagatttagcggttcgagtgcaagcgattcgtgggcttcctttgttttgtaaggatacaaaggagtacatttctaaaatagtagacattttagggcaactccttactgctgatgagattgtggagcgtgatgctgttcataaagccttaatgtctgtattaaggcaggatgtgaaggaacttattggaataattgaagggcaggctgatttagatgcacaatttgacgtctctgatgcagatcatattgataggttgatatcgtgtctgttcatggctattccattttttgtgaggggtgcacctggcagcaagtttctcaactacttaaacaaacacattatacctgtttttgataagcttcccgaggaacggaagctggatttgctcaaagcttt

SEQ ID NO: 201973 - DNA, 399 bp, Gossypium hirsutum
caaacttcgatgtgcaagagctcaaacccgggagtctagattcatctgatttgagtgtggatcgaatgagggccatccaacaaccaccttattctattaagggagaagttgtcaataatttggactctatgcgaaagaggaaaccacgcaatgattcaaacatcatggaacataagatctacaaatgcgagttcgtccaatgtccctatagtgaacatcgcttaggttttcatgacaggattgccagggacaatcatcaattaacatgtccgtatcgaaactcctctgcactgtttagtggttcaagttttaatgttaacgaggtgaaacctgtaattttgcctcaagcatttgcgcaatccaagccaactgcaacagccgttacttgcgtctcaacac

SEQ ID NO: 201974 - DNA, 407 bp, Gossypium hirsutum
cgactcctaaggtagtcaatgtagatgatctcggagctgaatctaatggaagagatgattctcaggcatttaagaaagcttggaattatgcttgttcttcatctcaaggagctattatggtggtctccaagaagaagatttatcgtcttaagccaattaacttctcaggaccctgcaaatctcctcttctattgaagatctatggaacactcgaagccactgaggatcactcggattaccaagataatggaagacgatggctttactttgataacgttgaaaatttacgactcgaaggtggaggcatcatcgatggtaatggcaaaacatggtgggaaaagtcctgcaaagtcaataaagccctcccttgcaagtggacaagctccaactgctgtaaccttcaatga

SEQ ID NO: 201975 - DNA, 423 bp, Gossypium hirsutum
ggcagctgcagaagctggtttgactgttgctgaagttactgggagcaatgttgtgtcggttgctgaggatgagctaatgagaattcttattcttgttcggaattttgtacctggttatcatcaagttattactggagattggaatgtcgcaggcattgcttatagagcttatgatctcgaagggaagacagttggaactataggtgctggccgtatcggcaagctcttactccaacgattgaagccattcaactgtaatctcctatatcatgatcgagtcaagatagatccagaattggagaaacagaccggagctaaattcgaggaggatcttgatgcaatgctttcaaaatgtgacattattgtcataaatatgcctctaactgagaagacaagagggatgtttgacaaagatcggatcgc

SEQ ID NO: 201976 - DNA, 427 bp, Gossypium hirsutum
  unsure (1)..(427): unsure at all n locations
ctagcacatttcattgaagctttgaaagaaggtgcatcagcaaaggaagtggggaacattantaaggggattggggcgcttaatgaagagatgactttgagaatggttttggggaatgtgaagaagtatgagggatttaacctcaaggagcttattgatgagcttactcacatagcaggagctttcaatcttgcagatgttgttccttttctgggtgctttcgacctacagggactcaaagcacgtacaaagaaactcggtgaaaaacttgacaaagccctcgagacgatcattgacgaccatgaacaacataagcaggatgatttcgtcggtacactgcttaaagagttaaatcaaccaatgaacaatgatggtgatataatggatcgggataacatcaaagccataacaatagatttgatggtgg

SEQ ID NO: 201977 - DNA, 357 bp, Gossypium hirsutum
acatgctgttattgagttaactagaaaggctgaggaaagaaccaaagctctgagtcttgaccatgttcttgaagtttctaacaaacagtgcccttgttacaattcaatgggagaagctgacattgacaacaataagctaaggaaagcagcttctcgagaagatgccactgacaactatttatattgtccaaaagctaaagatattgagagcggagatttgaaacatttccaaaagcactgggctaatggtgagcctgttattgtcagcaatgtccttgagaatgcatctggtttgagctgggagccaatggttatgtggcgtgcttttcgtcaagtaacaaataaaaaaagtgatca

SEQ ID NO: 201978 - DNA, 214 bp, Gossypium hirsutum
ggaatgtcctggagttgtttgttgtgctgatatccttgttgtgtctgctagagagggcagcgtttcgttgggaggcccttacattcctctcaaaactggaagaagagactgtagaaggagcagagcagatgttgtggaggagtatctttctgaccacaatgagaccatctctggcgttctcgacaggtttgccgccatgggtattgacacccct

SEQ ID NO: 201979 - DNA, 350 bp, Gossypium hirsutum
atttggagtatgtgaagagagaaaaaaatggacaattccaggcatggcttctgaaggatggaaatagttgggttgtaagcatctattgccataaggtaattaggttgtccgctgccacccaggattaccccagatccatcatctgcaatgttcatggagttaatcccaagttccttgagataggcaaggaaaggtttgagcaacaacatagcagtatccaccaggccttcaccaaaggtgcttactacattgggaagatgatttggaacaaaggctatggggagctacttaaactacttaatgatcaccaaaaggagctcgctggtcttgagattgatctatacggcaat

SEQ ID NO: 201980 - DNA, 388 bp, Gossypium hirsutum
ccacatgggctcatcgccaccagttaatactacatggtgggacaatctggatccgtatatctgagagtctcctgaaacttcatattttccccttgaatctcttacaagcgtatgctttactaattactcgatatcacatccactgaaatattctttccacaacatattatctcatgttggaagaaattgcatactatttgacataaactgatcgggtacgctctactcaacagattcgccaccttttacctcgcatgaaccctattatacccacatatcatgattctcctaatgatcaaatcatacacttttcataccgaagaaattaatcaaactctacttatgctaattgacaacaatatgaactatatatctactccatcataca

SEQ ID NO: 201981 - DNA, 416 bp, Gossypium hirsutum
gtgtttgtcatacatttcacaactccacttcctggggatagccactgctggtttgtttgcccaaagaaatcccattgtttttatttagagattccttgtacaacttttcttgtttctcaaagaaggtccaagttgagtcagagaggatgttggagatgtgcacaaggccgttagagatgtgctttggaggatgtggaggtggaggcgatgagctcttatggcatatggatttgaagccctacgtttctggggactattccatagcagttgttcaagccaattcctctttggaagatcaaggtcaggtgtttacttccccttccgtcacttacgtcggcgtctactacggccatggtggacctgatgctttctcgttcatcactcaacattttgtcccttttcttcataagtttgca

SEQ ID NO: 201982 - DNA, 358 bp, Gossypium hirsutum
cactgtgattcccatgttgagcaacataacgaagattagtttcagaaatcttgcagggagatgatttctactctccctaaagggaacagctggggtcttcccgatcatctatatcagtatcaagatttttggttcacctcacctttcctacaaggagtcctgttagctcaacaacagtttgaggctcaacccactgatatcatactttctagtgcccctagaaccggcacagcctggttaaaatctctcactttcgctactattacaagaacttcatacgatgattctaccacccctttgcttttcaggatgcctcatgatgttgtgcctttcatggaacttgatcatgctcattttt

SEQ ID NO: 201983 - DNA, 363 bp, Gossypium hirsutum
gggcagtgaaaaggagggatctcttgttgcggcgctatgggagaagagaagatgatggaacatatgttatcctctaccactcagtgtttcacaagaattgtcccccgcagaaaagctatgtccgtgcctgccttaaaagtggtggatatgtcatatctcctgtgaatgaaggaaaacagtctgttgtaaaacacatgcttgcaattgattggaaattctggaaatcttatcttcgaacttcagcagctcggcctattaccattaggatgcttgagagagttgctgcattacgagaattattcagagcaaaacaagtaaaatatccttcggacaatctttcttctggagagttgatactgaaag

SEQ ID NO: 201984 - DNA, 399 bp, Gossypium hirsutum
  unsure (1)..(399): unsure at all n locations
cacaagagcattaaatataatgtctggtcttcaacacgggatgggaataggagactggacagtgcttttgaagatgcacagaaaatagctgcaggaaaacctagtggctgccccatcttcctcttcttttctgttaatgtcagtggacaattttgtggcgtagcagagatgattggtccagttgactttcagaaggatatggatttttggcagcaagataagtggagcggaagcttccctgtcaagtggcacatcattaaagatgttcccaacagccattttagacacatcatattaggcaacaatgaaaacaagccagtgactaatagcanggatacgcaagagataatgtacaaagcagggtatggagatgctgaaagtattcaaaaatcatgcgat

SEQ ID NO: 201985 - DNA, 328 bp, Gossypium hirsutum
aggtagtcaatgtagatgatttcggagctaaagctaatggaagagacgattctgaggcatttaagaaagcttggaactatgcttgttcttcatctcaaggggctattatggtggtccccaagaagaagatttatcgtcttaagccaattaacttctcaggaccctgcaaatctcctcttctattgaagatctatggaacactcgaagccactgaggatcactcggattaccaagataatggaagacgatggctttactttgataatgttgaaaatttacgagtcgaaagtggaggcatcatcgatggtaatggcaaaacatggtggga

SEQ ID NO: 201986 - DNA, 408 bp, Gossypium hirsutum
ctgctgggaaaccttggtctaccgggctaagcggagagcggcagaaagcgtttgggaccggtgtaccaaagctgaagagatcagagctggaagcagcctgcgaagatttcagcaatgtgattagttcttcaacagttggcactgtgtacaaagggacactgtctagtgggattgaaatatccgtggcctacatccctgtgaaatttgccaaagattggtcaaggaatttagaagcacagttcataaacaagattgaaacattatcaaaggtgaaccataaaaatttcgtcaacctagttggatattgtgaggaagactagccttttactaggatgatggtttttgaatatgctccgaatggaacactttttgagcatttacacattaaagaatccgaacactttgact

SEQ ID NO: 201987 - DNA, 422 bp, Gossypium hirsutum
gttttcctcatttccctttactcgttgaccgaaatttctcgactcaccgtgttgacaacctctagaggtgttacttcctaggcccgatttcataatttcaagatctgcttccagcatctaaacgcgaccgtttccggaactcaactcggagattcaatttttaagggtttcgaatttggatgtgcttgtcttttatttggtctactggaaatgtcgattttgcccaaaggtgattcagttcatattcgagaagtttggaacgataatctagaagaagagtttgctttgatccgtgaaattgttgatacctataattacgtagctatggatactgagttcccgggtgtagttctacgtcctgttggttctttcaagaatatcagtgattataactaccaaactttgaaagatacgtggatatg

SEQ ID NO: 201988 - DNA, 438 bp, Gossypium hirsutum
gaagcatggccgtcgggaagaacaagaggatttccaagggggagaagggaggaaagaagaaggcagcggatccttttgctaagaaggattggtacgatatcaaggctccttcagttttcactaccagaaatgtgggaaaaactctcgtcacccgtactcagggtaccaagattgcttctgaaggactcaaacaccgtgtgtttgaggtttccctggctgatcttcaaggtggtgatgaggatcatgcttacagaaagattcgtttgagagctgaagaggttcaaggaaaaaatgttttgaccaacttctggggaatgaattttacaactgacaaactgaggtctttggttcgtaaatggcaaaccctgattgaagctcatgttgacgtgaagacaactgacaattacactttgagaatgttctgcattggattcacta

SEQ ID NO: 201989 - DNA, 331 bp, Gossypium hirsutum
acgaatggcaattgctgaattgttgttggctagaaagggggaaagaggcagagaagaaatcagacatgttgcagtgcatatttcttctatctgattctggagaggtgatgctagagaaacagctaactgggcatcgcgttgacagatcaatatgtgattggttttgggatcatgttatttctcaaggcgattccttcaagccagtgattgcttcacctactcattatcttttccaagtatttcgagaggggattacatttttagcttgcacccaagttgaaatgcctgctttaatgggcatcgaggtaattccttttcatagtttctgatg

SEQ ID NO: 201990 - DNA, 383 bp, Gossypium hirsutum
  unsure (1)..(383): unsure at all n locations
gcttgagccagaagcagcatggcatatcgaaaatcgccgtccccctgcaaatgggccttcccatggcaatgttgagctcaaagacctccaggttagataccttccaagcacgcctcttgtgcttaaaggcattactctgagcattaatggtggtgaaaagattggtgttgtgggtcggactgggagtggaaagtcaactttaatccaagttttctttagactggttgagccaacaggagggaaaataataattgatggcatagatatctgcatgctgggacttcatgatcttaggtcacgctttgggatcatccctcaagaacctgtcctttttgaaagaactgtgagaagcaacattgatcctatangacagttctctgatg

SEQ ID NO: 201991 - DNA, 414 bp, Gossypium hirsutum
gtgtagcatgttcgactcaaggagactatagagttgttgctgaactggaagtggatgcagtatccatcattggtccttttcctattgctgtaactaatttattggatttaacaagattggatctccataacaacaagctgactggcccaattcctccacaaattggccggctaagacgacttagaatgttaaatttgaggtggaataagctccaagatgtccttcctccggagattggggagcttaaaaaactagcccatctgtcattgagctttaataattttaagggcgagatcccgaaagagcttgcaaatctacccgagctccgttatctctatcttcaagaaaaccgtttcactgggcgaattccacccgaattgggcactttacaaaaccttaagcactttgatgttg

SEQ ID NO: 201992 - DNA, 371 bp, Gossypium hirsutum
taaaaaaataagtacaccaatgggagcaacgaagaacatgtggaccgccatggaagcaaaccatgctaaacaaagccacaacggcaattcaaccttcgatgatcattcaatccttcactctaatctctcagttgataccgcccttccttttccccttatggtccctcgcgtcatcgccttgtgcaaggatctgtttcggaaatgggctaagttgaacgattcttgcttctccgtcgacactgtatcaggcggcatcacgaatcttctgctgaaggtttctgtcaaggaagaaaatggagaatatgtgtctgtaacagttagattgtatggacccaacactgaatatgtcatcaatcgggaacgttagttac

SEQ ID NO: 201993 - DNA, 453 bp, Gossypium hirsutum
caaagctgcaccgctaatccgtcgataccgaaccttttgaagaacgaaaagcagtggctgcattcgagcaagcgccgcccggaaatgcgaaagctggggagaagatcttcaaaaccaagtgcgcgcagtgtcacaccgtagataaaggcgctggtcacaagcaagggccaaatttgaatgggcttttcgggaggcagtccggcacaactgcgggatactcttattccgctgctaacaaaaatatggctgtgatttggtcagagaacacattgtatgactacttgcttaatcctaagaagtatattcctgggacaaagatggttttccccggattgaagaagccacaggatcgtgccgatctcattgcttatctcaaggaatcaactgcctgatgggggtgctttttatcagctattttggaacaaatgaaagagtttttgatcaatgattttt

SEQ ID NO: 201994 - DNA, 456 bp, Gossypium hirsutum
  unsure (1)..(456): unsure at all n locations
cagcaatgtcccacgctgtgatatatgtgaaaatgcacctgctttcttggactgtgaagtggatggtgggtgcctttgcctgcaatgtgatatgattgtacatgttggaggtaaaaggacccatgggaggtatctcttgttgaggcagagagttgagtttccaggggataagcctggtcgtttggaggaaccaggtttacaaccgctcagtccggatgaagtaaggaaggatctgaatcagcagtcaaagcttgcagtgagagagaaccggcaaaaccgtggagtctctcatgttccattgcttgatgataatgctaagggtgatggagaggtaagaaatgagttgattgatctaaatgccaggccacaacaggtgcatgggcaagcttctatcaatcaggagcaagccatggatgtttcgagtggcaataatcatgactctancagtgggatccc

SEQ ID NO: 201995 - DNA, 426 bp, Gossypium hirsutum
  unsure (1)..(426): unsure at all n locations
cttactttgggtgaacaccatgaaccaaattcccaaatgggactagttggtcacgcgattgtcttgacatcatatccttattcagatcctcagtattgtggaattctgacttcatatgggccacaaatgatggtgtcaccacatctatatggaatgcatcatgctagaatgcctttgcctcttaaaatggaagaggagcctgtttatgtaaatgcaaagcaatatcatggcattttgaggcgaagacagatacgtgctaaggctgagcttgaaaagaaagccattaaagttagaaagccataccttcatgagtcccggcatctacatgctatgagaagggctaggggttgtggaggtcgttttcttaatacaaagaagcagggtgatgatgttaccagccccacttcacanaaaggcatgaattca

SEQ ID NO: 201996 - DNA, 415 bp, Gossypium hirsutum
gtcagaggaaagcaataacatgtgcgaactgcttaggatcgactgcgaccgaggggttatgcttgctgatgggaaaaccagattttccatcaacggcaagcctatctaccactttgttggaacctcgacttttagccaatatactgtcgtccatgttggccaggttgccaagatcagtccaaccgccccgcttgataaagtctgtcccattagctgtgggatatgtacaggttttggggccactgtaaatgttgccaaacccaaaaagggtcaaactgttgcagtttttggactgggtgccgttggtcttgccgccgctgaaggtgcaagggtttgtggggcttctcggatcatcgctgttgatgtgaaccccagaagatttgaagaagctaagaggtttgggattacagaattt

SEQ ID NO: 201997 - DNA, 343 bp, Gossypium hirsutum
attgaagtttcctttctcgattttctatttagccaaacgagatgcagatcttggttaagactctaaccggcaagacgatcactctcgaggtcgagagctccgatacgatcgacaacgtgaaggccaaaatccaagataaggaaagcatcccttcagaccagcagcgtctgatcttcgccggaaaacagctcgaagacggccggaccttggccgattacaacatccaaaaggagtcaactcttcacctcgtgcttcgtctgcgcggtgggatgcaaatcttcgtgaaaaccttgactggcaagacaatcactctcgaggtcgagagctccgacacgatcgacaa

SEQ ID NO: 201998 - DNA, 403 bp, Gossypium hirsutum
tgcaaacgattacaccgcatatgatcttgataattggaatggtgtggaccgatacgattggaatgccagggttagcaagcaagacctggctgatacatatgatgtgccattcaagtcttgtgtggtggaagggaaagttgcaagtgtaatgtgttcttacaatcaagttaatggcaagcccacttgtgctgaccctgatctactcaagggtacaatccgaggtcaatggggccttagtgggtatattgtatcagattgtgattcagttggggtaatgtatgatactcaacatttcacggctactccagaagagtctgctgcagctgccattaaagcaggtttggatttggattgtggaccatttttggcaatccacacagacttggcagtgaggagggggttg

SEQ ID NO: 201999 - DNA, 370 bp, Gossypium hirsutum
cgggtgtagcgttgtttatacgtttggttgttgttgaagaagtgcgtactaccgtggctacaaagaagagcgttggggacttgaaggaagctgatttgaagggaaagaaagtgtttgttagagtcgatctgaacgttccattggatgataacttcaacataactgatgacacaaggatccgtgccgctgttcccaccatcaagtatttgatgggtcatggctctaaagtcatcctctctagtcatttgggacgcccaaagggtgtcactcccaagtacagtttgaagcctcttgtgccaaagttatctgaactccttggagtcgaggttaaaatggcaaatgactgtattggtgaagaagttgagaaaat

SEQ ID NO: 202000 - DNA, 402 bp, Gossypium hirsutum
gaacatgctgtaaagacatttgaaggtgaaagccagaagggatatcgtagatatgcctggaaacggtgacgttccattcactcatgcgaatatcagtttggcccaaagagaattcgggtacaagccctcaaccgatttgcaaaccgggttgaagaagtttgttagatggtatttatcttattatggttataacaaccgcaaaggtctacaataaaatttatttttggttttaaatgtaaggattttcttggtttcccattagaatgaaatagaaggtaacgggaaaaccgaaggaaccgcaagttaaaaacaagataaagacgaggattccgtattcttttcttgggggagcagtgaaaaaaacacttgccggtatttcttgtcagttctttatttttttct

SEQ ID NO: 202001 - DNA, 444 bp, Gossypium hirsutum
  unsure (1)..(444): unsure at all n locations
gtggaaggtcacatgactggactgagtgtccgtacgctcaccctggtgagaaggcccgaagaagggacccgcaaaagtttcattactctggaactgcttgccccgattttcgcaagggaagctgtaagaaaggcgattcatgtgaattcgctcacggcgtttttgagtgttggctccaccctgctcgttaccgtactcagccttgcaaagacggtaccagttgtcaaagaagggtttgttttttcgctcacacaccggagcagcttcgcgtgttgccgcagcagagtccgagaggaaatgggtccgcttcagctgatttggattatgttggttcgcccatgcgccatcgtctagagtttgtttcttcaccaacttctattctggcttcacctncaatatccccaccttctgagtcacctnctatgtcacccagtggctcattta

SEQ ID NO: 202002 - DNA, 336 bp, Gossypium hirsutum
tagcgtctagttcttttagttgcgtctatttcaagtgagtcaggttgttttaggaagggactcacattaacattgttgtcatcggccacgtctattctttgaaatcaaccaccactttccaccttatttacaagcttggtggtatttacaatcttgtgattgaaaggttctataaagaagcttcttatatgaacaatatgtcattcaagtattctttgtttcttgacaagctcaatgcttatctttatctttatatcaccatttattttgccttttggaatatttagaccaccatattatttactttttcaacaatatttattccattacccctaa

SEQ ID NO: 202003 - DNA, 319 bp, Gossypium hirsutum
ctggatttccctaacatagttatcaagggaagtgagctgtaactcccattccaggcttgcttgaaaattgagaaatttggtgatctaattctgaaagctacagagccacaaatggttttgttcaacatctatgatgactggttgaagagtatctcatcatacactgcattctcccgactcattctgatccttcgtgcgcttcacgtgaacaatgataaggctaatatgttactgaaacctgataagactaatcgtactgagtctcaccatatttgtccttcttttactgattatcaattgatgaatgttttatttgctt

SEQ ID NO: 202004 - DNA, 422 bp, Gossypium hirsutum
ctggattgccctaacatagtgatcaagggaagtgagctgcggctcgcattccaggcttgcttgaaaattgagaaatttggtgatctaattctgaaagctacagagccacaaatggttttgttcaacatctatgatgactggttgaagagtatctcatcatacactgcattctcccgactcattctgatccttcgtgcgcttcacgtgaacaatgagaaggctaagatgttactgaaacctgataagacaatcgttactgagcctcaccatatttggccttctctaactgatgatcaatggatgaaggtcgaagttgctttaagagatctgatactttccgactatgccaaaaagaacaatgtgaatacatcagccctgacacagtctgagattcgtgacatcatccttggagctgagaatac

SEQ ID NO: 202005 - DNA, 366 bp, Gossypium hirsutum
atcaagttgaagccttcttcgaaattcctctttcaagatgcaaattgtcgtcgagaccctcactggcaagaccatcacccttgaggtggaaagttctgataccatcgacaatgtaaagaccaagatccaagacaaggaagggatcccaccagaccaacagaggcttatctttgctggtaaacagctggaggatggccgtacccttgctgactacaacatccagaaggaatccacactccatttggtcctccgattgaggggtggtatgcaaatttttgtcaagaccctcaccgggaagaccatcacccttgaggtggaaagttctgataccatcgacaatgtaaaggccaagatccaagacaaaga

SEQ ID NO: 202006 - DNA, 436 bp, Gossypium hirsutum
gtagtcgcgagtgcactcattaatatgtatgtaaaatgtgggcaggtagagattgctcggactgtatttgatcaacttggttccaaggacttgatttcctggactgcaatcatgtcaggttatgccatgagtgggagaactagagaggcaagggaactctttaatatgatgccggaacggaatgtaatctcatggaatgcaatgctagcagggcatactcgtttgtctcagtgggaagatgccttagaatttatttttcttatgcggagaatgactaaagattttgaccatgtgacgcttgttctaattttaaatgtctgtgctggcctgtcagacgttgaaatggggaaaaaggttcatggatttatctaccgacatgggttcttttccaatataattgtaagtaatgcacttctggacatgtaccgaaaatgtg

SEQ ID NO: 202007 - DNA, 439 bp, Gossypium hirsutum
  unsure (1)..(439): unsure at all n locations
agcaatgcagatcattttgggaatggcttgtcgaggatgcgtagagtgcttgttgaagctcttgaactttttgatgactcttgctggtttggcaatggttggatacgggatctatttgtttgttgagtacaaaaatgctgccgatactgcaatgcttttgtcacctgttggtagtgatcaagatttgatacagtttcgtcgccccatgctcatggctgtgtctctttcgtctagtatttttgataatctgccaaaagcatggtttatatatttatttattggagtaggggcggttctctttgttatctcttgttttggttgtattggagctgcaacacggaatttatgctgcttgacttgntattcagttttggtgatcttgctgatcttgtggagctggtatgtgcagctttcatattctttgacnaaaactggaaag

SEQ ID NO: 202008 - DNA, 449 bp, Gossypium hirsutum
gttttcgtaaggtaaagggtgaggattgttaagcgacacgcctctgtcactcagagcctattctttttcccaatttctcgaatctagggttttagattctccttttcctctccaaatcaaccttatttcattttttttcttctcttagaaataatatcgtcaatgagcaacgaaggagttaacttcaacatgtccggtcttggcgatgctcttaacgccgaagcacgagctggtctcgttaacgctctcaagaataaacttcaaagtcttgctggggatcactccgatgtgctggagagtctatcaccgattgtcaggaagcgtgtcgaggttcttagggagatccaggcatgttctttttccctaagctttttcgatactctgttaagttttattctgatatcactgatggtttagttgtttttgtagcccggtctactctattatgg

SEQ ID NO: 202009 - DNA, 426 bp, Gossypium hirsutum
aagaggaccccaatctggggactgaatttcatgctgaaaactgtcagccaacaagtgaaggtcaaattggcttggttcccaatggcttttccgacttgcagggtatccatatgagaattaaagctattgaaaaagcagttctggaaatggaaaagcttgcaatgctggagaacttaaatctcaattccaaactagtgactgctacaagacagattgaagaattaagatatggaagcagctctagtggagaaagtgttagagcaaagaggcacgtaagtgctagacaagaagaggaggaacttggcaatgggctcagtaacaatgtcaacatgcagagaccaacacctgaaatatctgaagaaaatgagatgatgacaaaagacattatacttgatcaggtatctgagtgctcgtcttatgggttaa

SEQ ID NO: 202010 - DNA, 310 bp, Gossypium hirsutum
agaacattgagttgaaggttcaatatggcagttggctagagcttatgttgctggaaatgactctggtgttcatcaactcataagccattggctgaacactcatgccacaatggaaccattcctgattgcaacgaaccgaccacttaatggaggtcattccatttataaacctctctatcctcacttccgggacacgatgaacatcaatgcttttgctaggcagattctgattaatggaggtggtgtcctggaattaacagtttttcctggaaagtgtgcaatggaaatgtcatctataatttacaagagt

SEQ ID NO: 202011 - DNA, 234 bp, Gossypium hirsutum
ggcaacggtcagcttgaaaagtgccaagactgctccattcgtagagaagttggtgcaaagagacattgaggttctctatttagttgagcctatcgatgaggttgccattcagaacctgcagacctacatagagaagaaatttgttgatcttatcaaggaagacttggaacttggtgatgaatatctattaaaagagagatataccaaccttgttttcaaacatcactgttattg

SEQ ID NO: 202012 - DNA, 414 bp, Gossypium hirsutum
gttgaacaaattagcagcagaaccaaatgcatgaagctttgagcaggcagactagatctatacactagtactgatatcaaggtaaatggacttcttggatcctgtgtaggcgttgtgtttatctagctcaaccatttctatgcttgtgaatggaatctgagcaagcggattctcacaaaatggattttaacgcgacggaggaagaggaatttggattctcaagaaactatttcttagcaaaagaaatgggcagttctgggaagaaatctgctcctaaactcagtgatatcaatgtcgttgacgaacaggtattttgcctcattgaatccccatctcaaaaaaagcttttgtttttttattcttttaaaatttggtggtttaaaattgcatcaaaacgacattgcagatttaata

SEQ ID NO: 202013 - DNA, 445 bp, Gossypium hirsutum
gttaggttgctgaaggaggatggtgaagtggttgctatgaccggggatggagtgaacgatgctcctgccttgaagttggctgatattggagtggcaatgggcattgcggggactgaggtatccactaccctttcctattatatccatgatgtccatatggttacttgctaattgtatattgtcagctctccttgtgaaatagcattatgggtgatgattcagagacccggttgaatgcaatgcagtatgcatggttgggctgctttttattcagaatgtatatatgttggaacagctatacaactataccactatttccagacattctatagatattgatctgagtcacctacttattctagacatttgataggatttcatctgtagttcttttaaaaatcttagtacttcattgcctattaccaggcaattatagtaaaaattc

SEQ ID NO: 202014 - DNA, 433 bp, Gossypium hirsutum
gccgtatgtccggagagttgggtcgcggagacttgcgttgggaagtaacgcaggtggtggcgctacccaagtatctaagaaggttgatttgtctcaggttttgtcagcaatgcttccttttgttgtcgctattaccgctgttgctgctcttgttcaaccttccactttcacctgggtatctaaggacttgtatgctcctgcacttggtgggatcatgttgtccattggaattagactttcatttgatgatttaacacttgcattcaaaagacctttaccgctatctgttggatttattgcacagtatttgctcaaaccggcacttgggtttttagttgcaaaggcattttgtttgtctccgacattctatgcaggctttatcctcacatcttgtgttgcaagggctcaactgtctagctatgctagctttttg

SEQ ID NO: 202015 - DNA, 450 bp, Gossypium hirsutum
caccaataagttttttagaaattaaaaacttgtctgggttgccaaattgcaaatgaaatttcgattgaatcagacacaatttcttttttcaattttataatgaagaacaaaagggcgagaacgagtgtggacaaggcggtggttgatgtttggcaacgggaagttggggaactctccactaggaatttcgcccaccggcttgccgcttctgaggatcttgtgctccgactcgagatttacaagaaactcaaaaagcaccgaggttgtgtgaacactgtgagctttaatgctgatggtaacattttagtatctggttctgacgataagagggttatactatgggattgggaaactgggaatgctaagcttactttccagtcaggccatgtcaacaatgttttccaagcaaaaatcatgccttactctgatgatcgcagcttggttacctgt

SEQ ID NO: 202016 - DNA, 436 bp, Gossypium hirsutum
  unsure (1)..(436): unsure at all n locations
ggaatcgatgacgcactaatccaatggcatgggaaggttcaggtaagccaanggtgaagcggatggagcaagctcagaattgtctccttcctatgggtattacgtcagagaacgttgctcatcgctttggtgtgacaaggcaggagcaggatcaggctgcggttgaatctcacaggaaagcagctgctgctacagcttctggtaaattcaaagatgaaatagtccctgtggccaccaagattgttgatccaaagactggtgatgagaaacctgtcacaatctctgttgatgatgggatccgagctaacacatcagtgtcagatctgggaaaattgaaacctgtattcaagaaaaatgggaccactactgctggaaattctagtcaagtgagtgatggtgctggagctgttctgcttatgaaaagaatgttgcgatg

SEQ ID NO: 202017 - DNA, 343 bp, Gossypium hirsutum
ggcatgtgctttaattcagttgttcagtatcatcatccgtatgtcccatgttgcctggcaaatcttccttctcttccttgccatcctcagtatctccttctggtatcagaactattatattacgactgctaaggagctagccaggatggttggaattagaaaggctcctattttacatcatttctcagaatctatcacaggcgcaacaacaattcgttgttttggccaagaagacaagttcatggagaaaaacttgagcttaatcgatgattactctcgtgtagccttccataactccagcacaatggaatggttgtgtgttcgaatcaattttcttttcaac

SEQ ID NO: 202018 - DNA, 390 bp, Gossypium hirsutum
ctaccacacacttgctaatattgctacttggagtggtgggtctcgccactccgtcttttggtacctatgagtctcccaactatgggaagccccctactcctgtttataaacctcctaaggtgaaacccccaccttatgaacatcctgtttataaacctcctaaggtgaaacccccaccttatgaacataagccccctgtctatgaaccaccaaagaaggaaaagcctgagcctaagccaccagtttatacacctccaaagaaagagaagcctgaacccaaaccaccagtatatgaacctccaaagaaggaaaagcctgagcctaagccaccagtttatacaccaccaaagaaagagaagcctgagcccaaaccaccagtatatgaacccc

SEQ ID NO: 202019 - DNA, 436 bp, Gossypium hirsutum
gccaagacccattctctttgcccttcttttcattacgacgaccgtttttctgggtttttttatttcgtcggcggaatctcgtccgccatttgcatgcgatcctaggaatgggttgacgaggagtttgaagttttgccgggcgaatttgccgattcacgtgagggccagggacttgattgggaggttgacgttggcggagaagatccggctgttggttaacaatgcggcggcggtgccgaggctggggattcaagggtacgagtggtggtcggaggctcttcacggcgtttccaatgttggtccgggaacaaagttcggcggcgctttccctggtgccaccagcttccctcaagtcatcaccaccgctgcttctttcaatgaatcactatgggagcaaatcggacgggtaatcagaataatattatcttatggtggg

SEQ ID NO: 202020 - DNA, 447 bp, Gossypium hirsutum
  unsure (1)..(447): unsure at all n locations
gcggcggctgctgcttctcaggcagccgcagcctgcgttcgcgtctctgatgacgtggcggttgtagaaggttgtattgacaacgatagtgtacagattggggattcatatgattccaagacatcgtttttgatctccgatgggagcatcactgttcatgctggtgaaagattaggtcgcggtatagttactgatgcaattactactccagtggttaatacttctgcatatttctttaagaaaactcaggagcttattgacttcaaggaaaaacgccatacaagttttgaatatgggcggtatggaaatccaacaaaatttattggtggacacaatgatgtccttgctggttgtataagtggttctgagaagttggttacagaaattcgtactttgcatcatattttgggtggtactctcaacccanatgctgcgtatctaatcatc

SEQ ID NO: 202021 - DNA, 415 bp, Gossypium hirsutum
aaagaacttttcctccccagtggatctttcagcatatgatggttttgagttgcgcttaaagggtgatggttgtcggtataaactaattgttcgcactagcactgattgggatacggtgggttatacagcaagctttgacaccattggaggccaatggcagtctattcgtttgccattctcttcactgaggcctgtatttcgagcacggactgtatctgatgctctacccttcaatccaagtaatgtcgtatcatttcagctcatgttcagcaagtttgaatatgatgggaaactgaatcccacttttgtagaaggaccttttgagcttccactctctaccataaaagcatacataaaggatcctatcactcccagggttgtacacgtgagctttgcaggagttactagaccggac

SEQ ID NO: 202022 - DNA, 412 bp, Gossypium hirsutum
acacagtcacacacacattcactgaatgggtcgagtcatgcgagctcaacgtaggggtgctggttccgtcttcaaggcccacacccaccaccgcaagggtcctgctcgtttccgcagcctcgacttcggtgaacgaaatggctacctcaagggtgttgtcaccgatgtcatccacgaccctggtcgtggcgctcctttagcccgtgttgtcttccgtcaccctttccgttacaagaagcagaaggaacttttcgttgccgcagagggtatgtacactggacagttcgtctattgtggtaagaaggctactcttgtggtcggaaatgtattgcctcttagatctatccctgaaggagctgtcgtttgcaacgtcgagcatcatgtccgtgatcgtggggttttcgctagggct

SEQ ID NO: 202023 - DNA, 445 bp, Gossypium hirsutum
  unsure (1)..(445): unsure at all n locations
ctcgagggttttgtttttttggttgggtttctcaaatttggctgaggataanagtgatagttaacaaatctccacattgactcatattttcacaacgccatctttgccaaagcccgccacgagcctatattaaactatgcatggaattaactgagtcgaatttgtgcttagaaactgaaagacttctagccttcgacttgtacactgccaaatcaaaactaacccgagtctgattttcacgaacacagtgccctaacttttcaaaacctgcatccaaaagagaacttctcttcaacgaaacggtcatacatttttccctcctatgaccaagttgcctccgctccaaacaagttgacttcaactccgtaacggacgagggacgtccgatttcaccggtcactatataaccttccagaatataaagactgtcgattctttacctttt

SEQ ID NO: 202024 - DNA, 372 bp, Gossypium hirsutum
gttggcaatattcagcaaagggttagtgaatccaccccgagagctgcagagtcgagcttcactcacttcatcaatgaagcctaagcttccctttgaaatccttaatggttttgtctcttcaaatcccaccaacgctttttcaatgcggtttggatcttcggcttctttggcttatgttccaccccacaatccttcctccacttataaaaggttgtttagtggagtggatgaaatgcattgcatattcatgggtaatttgaacaatctatgtagcctcttaaagcaatatggtctatcaaggggcaccaatgaagcaatgttcatcattgaggcatataggacccttagagaccgtggtccatacccaccaca

SEQ ID NO: 202025 - DNA, 371 bp, Gossypium hirsutum
  unsure (1)..(371): unsure at all n locations
gctgatgagagcgtcagctgagttgcttgggaggggaaccgtagggacgacgtagaaggcagtgcttgataatcgtacggtggtgacggtcaagaggctggatgccgggaaattagcagccacgacgaaggaaatgttcgagcaacacatggaatcagttggcggtttaaggcatcccaatttggtccccctcagggcttatttccaagccaaagaagagaggcttcttatctatgattttcagtccaatggcagtcttttctccctcattcacggatcgaaatcaacaagggcaaagccactccactggacgtcctgcttgaagatagccgaggacgtancgcaaggtctctcctatattcaccaagcat

SEQ ID NO: 202026 - DNA, 439 bp, Gossypium hirsutum
  unsure (1)..(439): unsure at all n locations
cttgttgtatcttcatttgcaggacatcaaacaaggttttgcaaggttttggcagtctgggtctttttctaatttgtggtcgatgggggaatcagaggaaaagaagagcacgaagagggataaaattaggtggagatgggtgattggagcttccattacaattgttcttgctattgctttggcttcaaggactaaaccagagatctctccgaattttggagacacaaacaagtcttgtcaatgttctcagggaaaacacaggcataaggggactgtagaggattgttgttgtgattatgaaactgtggaccatcttaatggtgaagtattacatccaatacttcaggaacttgtcaaaaccccattntttcggtactacaaggttaaatngtggtgtgattgcccattttggcctgaagatcatatgtgccgtttgcgg

SEQ ID NO: 202027 - DNA, 448 bp, Gossypium hirsutum
  unsure (1)..(448): unsure at all n locations
ctttagcttttcttctgctgtatctcatctctattttttgggtgtacaaaatgacggccttgctggtgatttatatgtaaatgctcctctttgttcttcaatctctaatggttcagtttgctgtgacagaagacattttcgatctgatatttgttttatgaaaggtgacataagaacacattctcccagctcttcggttttcctttattcaccaaaaaaatagcgacgatgacgcttcaagtacggttgatggtgatgaacttcaacacgaaaagatcaaaccttatacccgaaaatgggaaacgagtgtaatggccaccattgatgaattgaaccttatctcanagagacgaaattcggacgttgaccattcttgtgacgtaattcatgatgttcccaacagtatcttcttaactggaagctatacagngcacgtttatcatgaatt

SEQ ID NO: 202028 - DNA, 432 bp, Gossypium hirsutum
  unsure (1)..(432): unsure at all n locations
cccatgtggtgttatggaccaaatgacttcagcatgtggtgaggcaaataaactacttgcaatggtttgtcagcctgctgagataattggtcttgtaacaattccaagtcatatccgattttggggaatcgattcaggaatacgacacagtgttggaggtgcagactatggatctgttcgaataggagcctttatgggtcgaaagattataaaagctacagcatcaactaggttgtctcaatcaatgtctactgctaatggggcatcccctgatgaagtggacaatgatggactagaattacttgaagccgaagcttcattagattatttatgcaacttgtcacctcacagatacgaagctctttatgccaatctacttnctcaatcaatgctttgtgaggtgtttttggagaaatatgttgatcatggtga

SEQ ID NO: 202029 - DNA, 445 bp, Gossypium hirsutum
  unsure (1)..(445): unsure at all n locations
ggaatgtcctggagttgtgtcttgtgctgatatccttggtctgtctgctagagaaggcatcgtttcgttgggaggcccttacattcctctcaaaactggaagaagagacggtagaaggagcagagcagatgttgtggaggagtatcttccggaccacaatgagaccatctctggcgttctcgacaggtttgccgccatgggtattgacacccctggagtcgttgccctcctaggagctcacagtgtcggcagaactcactgtgtgaagctggtgcatcggttgtacccagaggttgaccctgccctcagccccgaccatgttccacacatgctccataaatgccctgatcaaatcccagaccccaaggccgtccagtatgtgagaaacgatcgtgggacacccatggntttggacaacaactactacaggaacatactggacaac

SEQ ID NO: 202030 - DNA, 377 bp, Gossypium hirsutum
tgggaggttttgggattgggatggtgtactacggcatgccattaggccttggaaatctatccgtgaatctctatttgggcgtcacattaaacgccttatccgagttgccagcgtcactcattacattcttccttatagggaaaatgaaaaggaaagactcattgttgggtttcacaatattaagcggggtgtgcagcgtgttgtgtgtggttgtggggaaggtgtcgccaagtttacagatagcaatggagctgatatccttcttcagtgcctgctcggccttcaacatgtcactgatatacacattagagctgttccccacatgcgtgaggaactcggcaatatcaatggtgaggcaagcactggtgtttgggggg

SEQ ID NO: 202031 - DNA, 359 bp, Gossypium hirsutum
taaaaaaataagtacaccaatgggagcaacggagaacatctggaccgccatggaagcaaaccatgctaaacaaagccacaacggcaattcaaccttcgatgatcattcaatccttcactctaatctctcagttgataccgcccttccttttccccttatggtccctcgcgtcatcgccttgtgcaaggatctgtttcggaaatgggctaagttgaacgattcttgcttctccgtcgacactgtatcaggcggcatcacgaatcttctgctgaaggtttctgtcaaggaagaaaatggagaatatgtgtctgtaacagttagattgtatggacccaacactgaatatgtcatcaatcggg

SEQ ID NO: 202032 - DNA, 398 bp, Gossypium hirsutum
gttaggttgctgaaggaggatggtgaagtggttgctatgaccggggatggagttaacgatgctcctgccttgaagttggctgatattggagtggcaatgggcattgcggggactgaggtatccactaccctttcctattatatccatgatgtccatatggttacttgctaattgtatattgtcagctctccttgtgaaatagcattatgggtgatgattcagagacccggttgaatgcaatgcagtatgcatggatgggctgctttttattcagaatgtatatatgttggaacagctatacaactataccactatttccagacattctatagatattgatctgagtcacctacttattctagacatttgataagatttcatctggagttcttttaaaa

SEQ ID NO: 202033 - DNA, 370 bp, Gossypium hirsutum
attcgatcacatttcccctaaattccgtcttttttcttcaaattccccacaaatggccatcactttctcagatctccacacggaatctggccttaaatcccttaatgacttcctcaccggcaaatcttacatctctggggataagctgactaaggatgacataaaagtttatgctgctgttttgaaaaatcctggtggttcatttcccaatgtgagccaatggtataattgtgtgtcttcccatctcgcttctagcttccctgggaaagctgttggcgtttcacttggtggcaaagctgatccagctcaatctgctgaagctaagtctcctgctgcggacgatgaccatgatgacttggatctgtttggc

SEQ ID NO: 202034 - DNA, 376 bp, Gossypium hirsutum
gaaacaccatacagacaaataaaatatgaagagttcattgctagtatctgttgtaatcagcttggtaatagttgcttcagccgccaactttaaccaagacatcgacgttacttggggagatgggaggggcaagattctcgaaaacggaaaccttctcactctcaccctcgacaaattctccgggtctggttttcaatccaagaaccaatatctgtttgggaagatcgatatgaacattaagctggttccaggcaactctgctggcactgttaccacttactatgtaagttttatcatcatacttgtctcttattaacattagaactctgtgttgatatgtggggtgacaattgcagcttcgttcggaaaggtcgac

SEQ ID NO: 202035 - DNA, 402 bp, Gossypium hirsutum
ctttttcaatctccagctttgattgattcctacgggttatcttccttatcttgctctgcattgggacacaatcatgggcgatagtatgttgaaccatatattgagtgaatactacatcccaaattatatacttgttcctgaatcagaagcaaagaaaccaccgtgtgtaccttcttgtccagtcttagtctttatcaactccaaaagtggtggacagcttggagggaatcttctttctacatatcgttctgttcttaacaccaaccaggtttttgatttgggagagacgaaacctgataaggtgctacaccaaatttatgccactttgggatcacttaagcagcgtggagatggttttgctttagctattgagagtagcttgagaataatcgttgcaagttg

SEQ ID NO: 202036 - DNA, 379 bp, Gossypium hirsutum
ggatattcaacccctcgtctgtgataatggaactggaatggtgaaggccggttttgctggtgatgatgctccaagggcagtttttcccagtatcgttggtcgtccccgacacactggtgttatggttgggatgggtcagaaggatgcctatgtaggagatgaagcacaatctaaaagaggtatccttactttgaaatatcctattgagcatggtattgtgagcaactgggatgatatggaaaagatctggcatcatacattctacaatgaactccgtgttgctcctgaggagcaccctgtgctttttaacgaagcacctttcaaccccaaggcccattgagaaaagatgactcagatcatgtttgagacctttaacgta

SEQ ID NO: 202037 - DNA, 415 bp, Gossypium hirsutum
  unsure (1)..(415): unsure at all n locations
gtgagtttaaaaaatcaacacttggaaaaggtttcgctgttaatacttgcgcaactaaagaatttgaattgtttataatacgccatccttgcttagctaaaagtgaaacattaaattgagccatatttctgaagcccaatccaccctcttctttaggacggcataagtacttccactgacaccaatgaatacctctcataccatgcgttttttgccaccaaaatttagcaaaaatattctcaaattctcctcaaagagtctttggtaataagaagcatgacatagcgtacgttggaatggcctgtaacaccgatttaataaagacttctttacctncttgagataacattctagtactccacccatcaatcctggtagcaatcttttcttttaaatgctgaaaggattttttctt

SEQ ID NO: 202038 - DNA, 360 bp, Gossypium hirsutum; identical to SEQ ID NO: 190417

SEQ ID NO: 202039 - DNA, 378 bp, Gossypium hirsutum
aacacgttcgcccccatggttctttctccggctcggctgggtgctgatgtggttctccatagtatctctaagttcataagcggtggggccgatgttatagcaggtgctgtttgtggccctgcaagcctggtgaactcaatgatggatcttcatcaaggtgcgttgatgcttctaggcccaaccatgaacgccaaagttgccttcgaactctccgagaggattcctcacttgggcctgagaatgaaggagcattgccgaagagccatggaatatgccattagaatgaagaaattggggctcaaggtcatatacccaggcctcgaggatcacccccagcatgagctattgaagtccatggccaacaaggaatatgggtat

SEQ ID NO: 202040 - DNA, 403 bp, Gossypium hirsutum
ggctgctgttggatttggaggcatcatgatggtcaataggcccaggatcccggtccctttccccgaccctgccagcgatttcactgttcttatcggagactggttcaagactgaccataagaaactgcaagccaagctggataggggtcataaacttcccttccctgatggtattctaatcaatggtcatggtcctaatggtgcattcttcacagttgaacaaggcaaaacttacaggtttaggatctcaaatgtggggcttcaaaattcactaaatttcagaattcacggtcataaaatgaagctggtggcagtagagggaacccacaccgttcaaaccatgtatgagtcacttgatgtacatgtgggtcaatcctattctgagcttgttaccatggatcaa

SEQ ID NO: 202041 - DNA, 304 bp, Gossypium hirsutum
actttgcttttttgctttgtttgtttagtaagaaaaatttactttcctgggaaaataaaaaaacaaaatatgggtagaggtagggttcaactaagacggatcgagaacaatattagcagacaagtaacattctcaaagagacgaagtggtttattaaagaaagccaatgagatctcaggtgtatgctatgctgatgttgctttgattgttttctctaaacaaggaaagctctttgagttctcttctgatcccaacatggagaggatcctagaacgatacgaacgaacaatatatgccccaaact

SEQ ID NO: 202042 - DNA, 259 bp, Gossypium hirsutum
cactcatgcaacaatggagccattcgtgattgcagggaaccgacaacttagtgtagttcatccaatttataagcttctctatcctcacttccgggacacgatgaacatcaatgcttttgctaggcagattctgattaatggatgtggtgtcctggaattaactagtttttcctggaaagtatgcaatggaaatggcatctataatttacaaggattggaattcgtttgaccaggcacattttaaagatctcaagaaaag

SEQ ID NO: 202043 - DNA, 288 bp, Gossypium hirsutum
ttccattgagtgctgttgaaaaccagaacttagtgtctggagcttcgaactttcgactatcctggtatcatggacccaatctgttagacgcgattgattccttccaacctcctactagggagttttcaaagcctctaattatgcctatatgtgatgttataaagtcaccttcacagggtcaggtgtctgcattgtgcaagtttgaagcttgagcttgtagaagcggatcaaaggttttaggtatgccatctgcaactatagcaaccgtgctttccttggagcgtgatt

SEQ ID NO: 202044 - DNA, 353 bp, Gossypium hirsutum
aaacaaccaaacacagtcctacattttaggagtttttggttttcgaatctgcggcggagataatgatgcacagatttatttcggtcaggaggttattttcggaaactaaatgttctcttccttgccaactacgactacgttgcttctctcaggtggctcgaaatgagattgataacagggatgatcttgttcgtaaaatgcctccttttgattactctccgcctccttacaccggtccttccgccgacgagatcctttccaaacgcatggagtatcttagcccctacatgttttacttttacaccagaccgttgaacatagtggactggaggatgcagtacttgttcgatgat

SEQ ID NO: 202045 - DNA, 362 bp, Gossypium hirsutum
cccctctgtgccgtgtcttgcgggtttcacgtcacagctagcagaggatctgcaagatggaaagcatgaatagcttttggcagttaggagatgatctccggggacaatctaaagcctcagaggatcacaaatggttgatggttgcctccaaactggctgaacagacgaggataaagggtgagcgaatgaacaatctcgatctttcaaagggtccagctgaagtaaggacaagggataaatttgggttccatgaagacaacaaattcgagaaccttaacttcaatatgttgaacttggactccaagatcggagatagtgtaagcaaaagtacctttcgaaatggtatttacaacaccgatgct

SEQ ID NO: 202046 - DNA, 365 bp, Gossypium hirsutum
tcagcactactaaacgaattagtacttcaatgggagcaaccaataacaggtgaaccgtcatagaggcaaaccattctaaacaaatccacaacggcaattcaaccttccatgatcattcaatccttcactctaatctctcagatcatacctgccttacttttccccttatcgtccctcacctcatcgccttattcaaagatctcatactgaaatccactaagctaaaccattcttgcttcttcgtcaacactctatcacgcttcatcaccaatcttctgcttaatgtttctttcaacgaacaaaatggataatatatttctataacacctagattgtatagacccaacacttaatatgtcatcaat

SEQ ID NO: 202047 - DNA, 252 bp, Gossypium hirsutum
gcttgtttatgagtacgtatgcaatgggaatttagaacaagggctgcacggatatgttgggccttgcagttctcttacatgggatatccgtatgaatatagtgcttggaactgcaaaagggtaaacgtttggttaactgataatgttagcacaccttgaattgttcttggtgatttcctccatgtttgctgacaatgatgttgtcttccaaaatttaaacttgatttatgttgacatatttgcacgagggac

SEQ ID NO: 202048 - DNA, 257 bp, Gossypium hirsutum
gaaaggttcgagaaagaagctgctgagatgaacaagaggtgattcaagtatgcttgggtgcttgacaagctcaaggctgatcgtgagcgtggtatcaccattgatattgccttgtggaaatttgagaccacgaaatactactgcactgtgattgatgcacctggacaccgtgactttatcaagaatatgattactggttcgttacaggctgactgtgctgttttgattattgattccaccactggtgtgtttgaggc

SEQ ID NO: 202049 - DNA, 152 bp, Gossypium hirsutum
gcttgtttatgagtacgttgacaatgggaatttagaacaagggcttcacggaaatgttgggccttgcagttctcttacatgggagatccgtatgaatataaggcttggaacttgcaaaggggtaacgtttggttaactgataatgttagcac

SEQ ID NO: 202050 - DNA, 300 bp, Gossypium hirsutum
gcagtttggtgttacctacttagtgactcacaaagaaaccaatcagcaattcgcttgtaaatccatcgccacccgtaagcttatcaaccgtgatgacatcgaagacgtccgccgagaagtccagattatgtaccatctaaccggccacaggaatattgtggagctgaagggggcttatgaggatcgtcactccgtgaatctgataatggaattgtgtgcgggaggtgagttgtttgaccggattatagcgaaaggccattattcagagagggaggcggctaatttgtgccggcagatcgt

SEQ ID NO: 202051 - DNA, 435 bp, Gossypium hirsutum
caagaggctgtttcagcagtgagaaaaaacagaggaagaaagaaaagaaaaagaaatagagaaaaggagaacagaagggtcaaagtaactcagatatcaaccgttatttctcatattcatttctgattcctaccaaactgtttctggaggcttaacatctcatttgcaaattggatgtgactgcttcactgtagattgtcaggattaattgtcgatgtctttggagatttagcagtggtagcatcatctgctgcttgggttgagaaatacaaatcaaaagttaaagcatgcatcagtagcattgatgagattaatcatatacactggagaccttctgttgaaattttaaaagaagaaggaatggatgcagcagatctgaaagaattgcatccatccacttgtccccaaagaactaaagttatagaaaatggaata

SEQ ID NO: 202052 - DNA, 369 bp, Gossypium hirsutum
ccgcatctttgaggtttgatggagccctgagtgtggatgtgactgagttccagactaacctggtcccatatcccaggatccactttatgctttcttcttatgcccctgtcatttcagctgagaaggcttaccatgagcagctatcggtggctgagataaccaacagtgcttttgaaccctcttcaatgatggccaaatgtgacccacgacacgggaagtacatggcttgctgccttatgtaccgaggagatgttgtgcccaaagatgtgaatgcggctgtggccaccattaagaccaaacgcacaatccaatttgtggattggtgccctactggattcaagtgcggtatcaactaccagccaccaactg

SEQ ID NO: 202053 - DNA, 234 bp, Gossypium hirsutum
gtgaagttccggcactatgctgggtacgtcaagctccgacctcaagactccaaagccttgttctactggtttttcgaagcccaagatggagtttccgacaagcccctagttctttggcttaatggaggacctggttgctcatcagtggcctacggagcagcacaagaacttggtcctttccttattcgtagcaatggcactcgccttacttttaacaaatttttcttggaacaa

SEQ ID NO: 202054 - DNA, 208 bp, Gossypium hirsutum
atctctcttctgcacctgcaatacaaaaacaaatcgaaagggcatgcccgtgcttttgcttccttacttgtcagtcatgattattccagagaataatcgcagagaaatctgcaaatacctatttcaagagggagtttgctattcaaagaatgattacaatcttgcatagcacccttagatcgatgatcccaattttcattacattaaa

SEQ ID NO: 202055 - DNA, 296 bp, Gossypium hirsutum
  unsure (1)..(296): unsure at all n locations
gtcccccagaacttttgttgggttctacagattatactgcggctgtggatctttggagtgtcggctgcgtgtttgctgaacttcttctcgggaaacctatcctgcaaggacgaactgaggttgaacaactgcataaaatttttaagctctgcggttccccacccgacgattactggaaaaaatgcatacttcctcatgcaactctattcaaaccacaacaaccttacaatagttgtcttcaggagacctttaaaattttaccgtgcactgctgntaacctagtagaaactttgctt

SEQ ID NO: 202056 - DNA, 297 bp, Gossypium hirsutum
ccgcatctttgaggtttgatggagccctgaatgtggatgtgactgagttccagactaacctggtcccatatcccaggatccactttatgctttcttcttatgcccctgtcatttcagctgagaaggcttaccatgagcagctatcggtggctgagataaccaacagtgcttttgaaccttcttcaatgatggccaaatgtgacccactgctcggttaaggtcatggcttgctgccttatgtaccgaggagatgttgtgcccaaagatgtgaaatcggctgtggccaccattaatacc

SEQ ID NO: 202057 - DNA, 297 bp, Gossypium hirsutum
tgggaggttttgggattgggatggtgtactacggcgtgccggtatgccttggaaatctatccgtgaatctctatttgggcttcacattaaacgccttatccgagttgccagcgtcactcattacattcttccttatatggaaaatgaaaaggaaagactcattgttgggtgtcacaatattaagcggggtgtgcagcgtgttgtgtgtggttgtggaggaagtgtcacctatgttacagatagtaatggagctgatatccttcaatagttcctgcttggcctttaacatgacactga

SEQ ID NO: 202058 - DNA, 332 bp, Gossypium hirsutum
  unsure (1)..(332): unsure at all n locations
tcaatgtagccggttttatactttgggttgttgttgaataaatgggactaccgtgactgcaaanaagagcgttggcgacttgaaggaagctgatttgaagggaaagaaagtgtttgttagagtcgatctgaacgttccattggatgataacttcaacataactgatgacacaaggatccgtgccgctgttcccaccatcaagtatttgatgggtcatggctctaaagtcatcctctctaatcatttgggacgcccaaagggtgtcactcccaagtacagtttgaaacctcttgtgccaaagttatcttaacttcttggagtccaagtttaaa

SEQ ID NO: 202059 - DNA, 373 bp, Gossypium hirsutum
  unsure (1)..(373): unsure at all n locations
gattgttgtgcgatactggtgatggcatcaggaaaatatggttgcaatcttgccgccagagttttgtaaaaatgctttcggagaaacagttgcgagaaaccgaggaattgaaggcaaaggctcaggtttctcatgcacaaccagatgaccttattgatttctaccatttgaagagtaggaagggtatgagccagctggagttggaggatgaggttcaagatgatttaaaacgtgcaactggagagtttgtcaacgataatgatgacgcaaataagctcaaccgcattcttcaacttactggatttagcgatccagtatatgctgaagcctatgtcactgtgcaccactatgatattgntcttgatataacagt

SEQ ID NO: 202060 - DNA, 314 bp, Gossypium hirsutum
caaacttcgatgtgcaagagctcaaacccgggaatctaaggtcatgtgatttgagtgtggatcgaatgagggccatccaacaaccaccttattctattaagggagaagttgtcaataatttggactttatgcgaaagaggaaaccaagcaatgattcaaacatcatggaacataagatctacatatgcgagttcgtccaatgtccctatagtgaacatcgcttaggttttcatgacaggattgccagggacaatcatcaattaacatgttcgtatcgaaactcctctgcactgtttagtggttcaagttttaat

SEQ ID NO: 202061 - DNA, 280 bp, Gossypium hirsutum
catctccctctacaaaagacaaaagctattttctgagatcggccatcttttgatcaaagcaaatacaaccagaattcaatggggaagaaagctgtgtcgattggaatcaactatccaggtacaaaggctgaactgaatggctgcataaacgatgcgaagtgaatgtacaaaggccttacatgacgctatggattcactgaagaagacttcactgtattgttagacaccgaatattcttatgatcataccccacggaagaacatcagaaggtgcttgaatg

SEQ ID NO: 202062 - DNA, 223 bp, Gossypium hirsutum
tcaaatttccttcttttcccctccacccaaggctaaatggtcatggcgacagctcaaatcagcaaataacgaaagttcgtcgctgatggagttttcttcgcggaactcaactaggtaccgaccagggaactgactgatgattgatactctggagtcgaaaacatatttacttatatgcgtacccaaatcatgatcaaactcacattcacccaccactttatct

SEQ ID NO: 202063 - DNA, 347 bp, Gossypium hirsutum
gagagatgtcgggaggaatagcgcgtggtcgactcgccgaggaacgtaaggcatggaggaagaaccatccccatggttttgttgcgaaaccagagacgttgcctgatggaacggtcaatttgatggtgtggcattgcacgatccctggtaaagcaggaactgattgggagggtggctacttcccgctcacgctccatttcagtgaagattatcccagcaagcctccaaagtgtaaatttccccagggctttttccacccaaatgtttatccatctggtactgtttgcctttcaatcctaaatgaggaatagtggtggagaccagccataactgtgaagcagattctt

SEQ ID NO: 202064 - DNA, 382 bp, Gossypium hirsutum
catggcatccaatccaagattcgtgttgtccgcaatttcccaaaaccaggtattatgtttcaagacataactactcttttactggatcctaaagcattcaaggatacagtggatttgttcgttgagagatacaaagggaagaacatttcagttgttacaggtatagaagctcggggttttatcttcggtactcccattgcattggaaattggagcaaagtttgttcccttaagaaaaccgaacaagttgcctggtaaagttatttcagaagagtatgaactggaatatggaagggattgtctggagatgcatcttggagctgttgaacccggtgagcgggctttggttgttgatgacttgatagcaactggaagcactcttt

SEQ ID NO: 202065 - DNA, 363 bp, Gossypium hirsutum
cctgcttctgctgatatcaagtctgctgaagatgccagtgattttgttgatgaaaagaagatagtaattgttggggtgttccccaaattctccggtcaagagtttgacaactatatggctcttgctgagaaattgcgttctgattatgaatttggtcatactttggatgctaagtaccttccccgtggcgagtcatcagtgactggccctgtcgtcagacttttcaagccttttgatgaactctttgttgacttcaaggattttaatgtggaagctctagagaagtttgttgaagaatctagcattcctcttgtgactctctttaacaatgacccaagcaatcaccccttcattatcaaattc

SEQ ID NO: 202066 - DNA, 371 bp, Gossypium hirsutum
ggaaagcagcgtcaacttcagcttttgggagtgcaaattcagcccgatgtcttattgctaatccaatccaccacctacagaccaaacacttctccataggaatcctccctgatggggtcaatcgtagctccgacaattttgtccagaattccgatgccatggaacgtctcttgtctgaccttcaatcccatatcaacaaggttcttgctggaggaggagaaactgctgtgaaaaggaacaggagcagaaataagcttctccctagggaacgaatcgatcgtcttcttgaccctggttcttctttcctcgaattgtctcagcttgcagggcatgaattatacgaagaccctttaccatcaggtggaataata

SEQ ID NO: 202067 - DNA, 316 bp, Gossypium hirsutum
gttggcaatattcagcaaagggttagtgaatccaggccaagagctgcagagtccagcttcactcacttcatcaatgaagcctaagcttccctttgaaatccttaatggttttgtctcttcaaatcccaccaacgctttttcaatgcggtttggatcttctgcttctttggcttatgtttcaccccacaatcctgcctccacttataaaagggtgtttagtggagtggatgaaatgcattgcatattcatgggtaatttgaacaatctatgtagcctcttaaggcaatatggtctatcaaggggcaccaatgaagca

SEQ ID NO: 202068 - DNA, 323 bp, Gossypium hirsutum
gtatcagctgcgcgttgaaggtggttccgattgtgcttctgttggttcttttcgcgttagcgaatgccaagaaatcagctgatgtgaccgagctgcagatcggcgtcaaatataagcctccatcatgtgaattccaggctcataaaggtgatagagtaaaagtgcactatcgggggaaactcactgatggaaaggttttcgattccagttttgaaagaggtgatcccattgagtttgagcttggtagtggacaagtaatcaaaggatgggaccaaggattgctggggatgtgcgttggtgagaagcgcaaattgaaaatacct

SEQ ID NO: 202069 - DNA, 379 bp, Gossypium hirsutum
cggaaactaactatgttccaattacacgaggcaatagagtggtactcatgattaatggcttgggtgccactcctgtgatggaactaatgattgcagctggaaaaactgtccctaagttacagctggaatttggacttgctgttgaaagagtgtatacagggtcatttatgacctctcttgatatggctggattttcaatatctataatgaaggcagatcaaactctgttgcaacgcctggatgctcccactaaggctccacattggcctgttggttctgctggtaatcgtccacctgccaagattcctgttccattgccaccatctcgttcaacaaagagtgaggagtcattaagtcggccactgcagcttaatgaaca

SEQ ID NO: 202070 - DNA, 363 bp, Gossypium hirsutum
tgcaaacaagagagttaaagatattgaggtttgtgttccaattgttgatggaactattgctttttatctcggtcgaaaggctagtgagtcgcaatcacataagtggactgtttacgtgcgtggggcaacaaatgaagatcttggagcagtgataaagcatgttgtatttcaacttcatcccagttgtaataaccctactagaattgttgaagcacctccttttgagttatcagaatgtggttggggtgaatttgaaattggcattagcatttttcttccatagtgatgttttgtgacaagcattcggatttgtgagttgtttaatttggttgctcacttgaatttgatgccttggttactaac

SEQ ID NO: 202071 - DNA, 301 bp, Gossypium hirsutum
gcagatctttgtaaaaacccttactggtaagaccatcacccttgaggtggagagctccgatactatcgataatgtcaaggccaagatccaagacaaggaagggattccaccagatcagcagaggttgatttttgccggaaaacaactcgaagatggtaggacacttgcagattacaacatccagaaagagtctacccttcaccttgtccttcgtcttaggggtgggatgcagatttttgtaaaaacccttaccggaaaaactattacattggaagtggagagttctgatacgattgataat

SEQ ID NO: 202072 - DNA, 359 bp, Gossypium hirsutum
cttgggccaaccaccacaacatttggagagatgctcaggtccctgagaaaacctaccattattatcacccagagtcgaagggtctagattttgcagcaatgatagatgacattaagaatgctccaaatggctcattctttctacttcatgcatgtgctcataaccccactggtgtggatccttcagaggagcagtggagagaaatctcacaccacatcaaggcaaaaggtcattttgccttctttgacatggcgtatcaaggctttgctagtggtgacccagagaaagatgcaaaggccatcaggatttttcttgaggatgggcatcacataggaatggcccatcatatgcaaaaacat

SEQ ID NO: 202073 - DNA, 313 bp, Gossypium hirsutum
  unsure (1)..(313): unsure at all n locations
attcaaaaatcaacaccatgggctcttccggtgaatttcgggtagattctaacccggattacgatcacgaaagtgaagtaaaggcttttgatgatacaaaagccggtgtgaagggaatagtagattcaggtgtcacacaaatccctcgtatattcatagatcaaagccttatccttgagaagaataacaccgattgttccaataatcagctaggtgtcccgatcatagacctncaaagcatcggtggagactcggctcgccatgccgaggtgattaaccaagttcgaaatgcttgtgcggattggggtttctt

SEQ ID NO: 202074 - DNA, 293 bp, Gossypium hirsutum
  unsure (1)..(293): unsure at all n locations
cgcccgcaagagggaacgcagctgcgcagggccaanggctggagcggagaagaggggaatagctgtgttcggagtgctggtagctgtatggatgaccagaagcataactgaagacattccgggatggggaactctgttcaatggccgtgcaggcgatggaaccggcagtgttcttgtggcagattttttgttcgtaattcccaacaagtagcgaatgggattgaaattgattgactggaacgaatgcaacaagctgccatggaacattattttgttactaggggctggattcg

SEQ ID NO: 202075 - DNA, 399 bp, Gossypium hirsutum
ggcttatccttgcccttacgcacagcgcgtgtggatcgccaggaattgtaagggtttgcaagacaagattaagttggttcctttgaaccttcaaaatagacctgcttggtacaaggaaaaagtttaccctgaaaacaaggtgccgtccttggaacataatggcaaagtcattggggagagtcttgatttgattaaatatgttgatagcaacttcgaagggccgtctcttctacctgatgatgctgacaaaaaggagtactttgagacgacgttatcacacatggacgaatttctagggctggtgtatgctacatttaaaggagacttatcaaaggatgctgatgctgctgttgatcacttggaaactgctcttgcaaaatatgatggtgcatttcttct

SEQ ID NO: 202076 - DNA, 343 bp, Gossypium hirsutum
  unsure (1)..(343): unsure at all n locations
attgcttgggcaactgaggaaaatcgcaatgtatcaagagaacagttaataggcatatttattttgttgtctggtggaagctccatcttcatactgggaaaggccgttttgctggcaactattgctgtagagacagctcaacgtctgttccttggaatgataaaatctgttttccgggcaccaatttcattctttgactcaaatccctcaagtcgaatcctcaacaggtcatctacagatcaaagcacgttagacacagatattccttacagattagcggggctggcatttgctttaattcagttggtcagtatcatcatccttatgntccatgttgcctggc

SEQ ID NO: 202077 - DNA, 415 bp, Gossypium hirsutum
gtgacttcattccattgctacgacccttattgagagggtgcttgagcaagtgcagggacttgcagaccaggaggctggccttcttcaacaactattatgttaagaaaagaagggaaataatggctgctgagggggacaagcacaagataagctgtgccattgatcacattatagatatgctcaaatgaagggagagattagcgaagaaaatgtgctctacattgttgaaaacatcaacgttgcagcaatcgaaaccacactgtggtccatggagtgggccatagctgagctggtgaaccatccccacgttcagcacaggatccgccaagaaatctcccgagtcctcaacggagaagctgtgaaagaatccaaccttcatcaactgccctacttgcaggccacagtgaaagagaca

SEQ ID NO: 202078 - DNA, 406 bp, Gossypium hirsutum
tagagagaggaaggagatggttgccataaaaattgtccgtggagttaagaagtatcgtgaggcagccatgatagagattgagatgttgcaacagcttagaaaacatgataaaggtggcaaccgttgtgtgcaaatacggaactggtttgactatcgtaaccatatttgtattgtgtttgagaagcttggaccaagcttatacgattttctacgcaaaaacaattatcgctcatttcccattgatcttgtccgtgagattggcagacaactattggaatgtgtagcattcatgcatgatttgaacctgatacacacagacttgaagccagaaaacattcttctagtctctccagagtacgtcaaaattcctgattacaaaggtgcattgcgatctccaaggacagtt

SEQ ID NO: 202079 - DNA, 405 bp, Gossypium hirsutum
attatcagcttgagatgatgagatgtctaagggaggttgatgttgataacaacactgttggatggtaccaatcaacgattttgggctcatatcagacagttgagctcattgagacttttatgaattatcaggagaatattaggaggtgtgtatgcattatctacgatccttcgaggtctaatcaaggtgtcttggctcttaaggctttgaagctatctgattcttttatggaactttaccgagctaatagctttactggagaaaagttgagggagaaaaacttgtcatggatggatattttcgaggaaattcctatcaaagtctcaaattctgcccttatcagtgcctttatgactgagctggaatctgacacaccagttacacagtgtgattatgatcgtctgc

SEQ ID NO: 202080 - DNA, 413 bp, Gossypium hirsutum
  unsure (1)..(413): unsure at all n locations
cttcactctcctttacttttaagttcttttctttgcttgatgtcattttgtagccaaaaaaaacatggggttctcactgaaacttcagtattgcctagtttctgtcatggtgctattacctgcagtgtgttactctcaggactatttcgtcaagtccagagcaacttactacggcagtcctgactgcttatgcactccaagtggagcttgcggatttggagaatatggaagaagtgtcaatgatgccaatgtcgccggggtttccaggctctacaagaatggaactggctgcggagcttgttatcaggttaggtgcactaaccctcaaatatgtgctgataatggggtgaacatagtggtgaccgactattgcgaangcgacaacaccgatttatccttagtccccccgcata

SEQ ID NO: 202081 - DNA, 434 bp, Gossypium hirsutum
aatctttcagatcgtctgaaccaagtgcttcgatgggctcttgggtctgtggaaattcttttcagtaggcattgccctatctggtatggttatagtggtaggctcaagtggcttgaacgattcgcatatgttaacacaaccatctacccagtcactgctattcctcttctcatgtactgtacactgccagcagtctgtctgctcactaacaagttcattattccacagattagtaaccttgcgagtatatggtttatatccctctttctttccatctttgcaactggtattttagaaatgaggtggagtggtgtgggaattgacgagtggtggagaaatgaacagttttgggttatcggtggtgtgtcggcacatctttttgctgttttccaagggcttctcaaagttcttgctggcattgacactaacttcac

SEQ ID NO: 202082 - DNA, 380 bp, Gossypium hirsutum; identical to SEQ ID NO: 190679

SEQ ID NO: 202083 - DNA, 423 bp, Gossypium hirsutum
aacacactgacctcagaaagagcacccaaaagaaaaaacactgatcaacgaaggatttctagggttttttttcggtatcagcaagcgatggcaatggctgctctcagacgcgaagggaggcgtttcgcccctctgatctctccccgtccaattactgctgtccgatcctctcctatcgttcccactcacgaagatgagggtccgattggtgttcgttatatttcaacccaagtcgttagaaaccggatgaagagtgttaagaatattcagaaaattacaaaggctatgaagatggttgctgcctcaaagttgagagcagttcaaactaaagctgagaattcccgaggcctctggcagccatttactgcacttcttggtgatcttcccagtgttgatgtcaagaagaacgttgttgtaaccatc

SEQ ID NO: 202084 - DNA, 378 bp, Gossypium hirsutum
taatagcaaaggcagtggtggggtgtacaagaaagctagggttcagacgtcttcaagccaaccacctttgaaagtgagaaaggagaagcttggagatagaataacagcacttcaccagttagtttccccatttggaaagactgacacagcatctgtgttgttagaagctattggttatatcagattccttcaaagtcaaattgaggctcttagctccccttacttgggtactgcatcaccaaacatgagaaaccaacaatctgttcaaggagaaaggaattgtgcatttcctgaagatgaaggacaggaaaagcaagagcctaagccaaaggacttaaagagtaaagggctgtgcttggttctgtatcatgcacccaa

SEQ ID NO: 202085 - DNA, 412 bp, Gossypium hirsutum
gtctcctaatgggcaatctgaacaaactgcaaatggtgggttctcttcatatacaaacaacctctcatctgggcggaatcagaaccttcatcccttccctcatgtcatgaatatgcacaacgcaagaccatcatcaggtgtaggccaatcatatggatacatgaaccacatgtaccctaacaatgtgacctatggtcattatgggaatgccattagaggcggttctgggtttggatcatatggatatgatgcccggaagaaaggtctagggtggtataatgttggtaacaacaaatctaagttccgtggttatggaaaagagaatattgatggtttcaatgagctaaacaaaggacccagagtaaaagggtataagaataaggatggttctggaaatgccactctagctgtc

SEQ ID NO: 202086 - DNA, 402 bp, Gossypium hirsutum
  unsure (1)..(402): unsure at all n locations
gcccaaggttttggatctcttggattgatgacatctgtgctggtttgcccagatgggaagacaatagaagcagaagctgctcatggtactgttacacggcatttcagagttcaccaaaagggtggtgagaccagcacgaacagcatagcatctatctttgcttggacgcgtgggcttgcacacagggcaaaattggatgacaatcctaaactcttggatttcactgagaaactagaggcagcttgtattggaactgtggaatctggaaagatgaccaaagatcttgcactaatcattcacggctctaagcttgctagggacaagtacctgaatactgaggagttcattgatgctngtgcagcagatctaaaagcaagactttcttaagcataaatttgaaat

SEQ ID NO: 202087 - DNA, 397 bp, Gossypium hirsutum
gttttcctcatttccttactcgtgaccgaatttctcgactcaccgtggtcacaacctctagatctgttacttcctaggcccgatttcataatttcaagatctgcttccagcatctaaacgcgaccgtttccggaactcaactcggagattcaatttttaagggtttcgaatttggatgtgcttgtcttttatttggtctactggaaatgtcgattttgcccaaaggtgattcagttcatattcgagaagtttggaacgataatctagaagaagagtttgctttgatccgtgaaattgttgatacctataattacgtagctatggatactgagttcccgggtgtagttctacgtcctgttggttctttcaagaatatcagtgattataactaccaaac

SEQ ID NO: 202088 - DNA, 319 bp, Gossypium hirsutum
ctggcgtggacttaacgggaggttactacgacgccggagataacgtaaagtttgggttcccaatggcgtttaccacgactctattagcttggagtatcatagatttcgggaggaacatgaggccggagttaaagaacgccgttaaagcggtgaagtggtcgacggattatctgttgaaagcaacggcaaagcctggagtggtgtatgtacaagttggagatgcgtactcagatcatagctgttgggaaaggccggaggacatggacacgcttcgcacggtgtacaaaatcgacaatgcgcaccctggttctgatgtggc

SEQ ID NO: 202089 - DNA, 415 bp, Gossypium hirsutum
gcatagcccatagctgttaataaacacagcagaaatctcaggtagctagcttttcccctgcattaaaatccatggcttgcaccattagcatgaagatgaccttggctatccttgctctctcattattctactcttgcttacaagccacactaggggaaattatatgtgaacaccttgaccaagacacctgtgcttacgcggtggcgtccacaggcaagcgctgtgtgctcgagaagcacgtcaagaggagcggtgaagaagaatacacttgccgtaccttcgagatcgaagccgataagataaacaactggatcgaaaccgatcagtgcgttaaatcgtgctgcctcgaccgggaatcattcggtatctcctgcgattccctgctcgagtctcgcttgaccgaaatgctttgctc

SEQ ID NO: 202090 - DNA, 416 bp, Gossypium hirsutum
  unsure (1)..(416): unsure at all n locations
ccagataagtcaaactgaagtcatagaagaaaaacatggagagcccaactgcaatgataagctctttgaaagtagccaagaagaagaaaccgaaaccggtcgtgtcaaatggagtgtttactcgacttttgttgcagcagcttataagggagcacttgttccagtcatcgttctctgtcaagttctcttccagggactacagatggggagcaattactggattgcttgggcaactgatgaaaatcgcaatgtatcaagagaacagttaataggcatatttattttgttgtctggtggaagctccatcttcatactgggaaaggccgttttgctggcaactattgctgtagagacagctcaacgtctgttccttggaatgataacatctngtttccgggcaccaatttcattctttg

SEQ ID NO: 202091 - DNA, 435 bp, Gossypium hirsutum
aggtagtcaatgtagatgatttcggagctaaagctaatggaagagacgattctcaggcatttaagaaagcttggaactatgcttgttcttcatctcaaggggctattatggtggtccccaagaagaagatttatcgtcttaagccaattaacttctcaggaccctgcaaatctcctcttctattgaagatctatggaacactcgaagccactgaggatcactcggattaccaagataatggaagacgatggctttactttgataatgttgaaaatttacgagtcgaaggtggaggcatcatcgatggtaatggcaaaacatggtgggaaaagtcctgcaaagtcaacaaagccctcccttgcaaggaagctccaactgctgtaaccttcaatgaatgcactaacctgagagtatcaagtcttcgtataaaagatg

SEQ ID NO: 202092 - DNA, 398 bp, Gossypium hirsutum
cttcttcaatggcagtgtcagaaatctcgcgatgtactgatcatgtattcttgagttttagaggtgaagatacgcggaaaagtttcacggatcatctttacacagctttggtgcacttaggaattcgaacatttagagatgatgaggaaatcgagagagggaataacataaaagatgaaattgaaaaagcaatactacaccactccaaaatttctatcgttgttttctcaaagaattatgctgcatccacatggtgtcttaacgaacttgtaatgatattggagcacaagaaatcctctaaacatattgtgttgccagttttctatgatgtggatcccagtcaagtcaagaaccagacgggaagttatgcagaagcatttacccaacatgaacaaaac

SEQ ID NO: 202093 - DNA, 402 bp, Gossypium hirsutum
agaatacaaaatggccaacgttgctccgggaaatgccggcggtcacttcggagattttccggcgtttcatacctacggcggtcaatttattcagtacagtatttttggaaacttatttgagatcacgtctaaatatcggcctcccatcacgccaatcggtcgtggagcctacggcatcgtctgctcggtgttgaattcggagaccaatgaaatggtagcggtaaagaaaatagccaacgctttcgataatcacatggacgctaagcgtacgcttcgtgaaattaagcttctccgacatttggatcacgagaatgttatcgcaattagagatgtcattcctccgcctttgcggagagattttaatgatgtctacattgccttggagctcatggataccgatct

SEQ ID NO: 202094 - DNA, 394 bp, Gossypium hirsutum
gtatcagctgcgcgttgaaggtggttccgattgtgcttctgttggttcttttcgcgttagcgaatgccaagaaatcagctgatgtgaccgagctgcagatcggcgtcaaatataagcctccatcatgtgaattccaggctcataaaggtgatagagtaaaagtgcactatcgggggaaactcactgatggaaaggttttcgattccagttttgaaagaggtgatcccattgagtttgagcttggtagtggacaagtaatcaaaggatgggaccaaggattgctggggatgtgcgttggtgagaagcgcaaattgaaaatacctgctaagcttggatatggtgaacagggttcaccacccaccatcccaggtggagcaacgctaatatttgacac

SEQ ID NO: 202095 - DNA, 409 bp, Gossypium hirsutum
  unsure (1)..(409): unsure at all n locations
ggcaaaggcgagggtctattttcttcacaaactacaagggcttccgagtctttagtaaccaaaaggctaaatggtaaggtggcactgataactggtggtgccagtggtttaggagagtgttcagccaggctatttctcaaacatggagccaaggttctgattgctgatattcaagacgaattgggccacttccctttgcaaagagcttggaactgaaaacttcagctatgtccattgtgatgtaacatgcgaatctgatgtcgaaaatgccgtaaacttagcggtctccaagtatggaaaactcgatatcatgttcaacaatgcangccttattggtgatggtgaagtcagagtgacagacgccagcactgacaacttcaagagagtgttcgatatcaatgtcttgggt

SEQ ID NO: 202096 - DNA, 413 bp, Gossypium hirsutum
tagggacgagcttctcttttccgtgtcttgcgggtttcacttgacagcgagcaaaggatctgcaagatggaaagcatgaatagcttttggcagttaggagatgatctccggggacaatctaaagcctcagaggatcacaaatggttgatggttgcctccaaactggctgaacagacgaggataaagggtgagcgaatgaacaatctcgatctttcaaagggtccagctgaagtaaggacaagggataaatttgggttccatgaagacaacatattcgagaaccttaacttcaatatgttgaacttggactccaagatcggagatagtgtaagcaaaagtacctttcgaaatgggatttacaacacccatgctgtttaccctaacaatgacagtcacaacattgggaacctgtc

SEQ ID NO: 202097 - DNA, 425 bp, Gossypium hirsutum
ccctaaccgagtttcacagaggtcaaaacttcaatctggtgcccttggtcttctccgatccaacgcttccttgacgaaccctgaaacatctctttcatgatatattatggctgcaaacactaatacactcccattgtgatcggtccttgagaatgacaaattgaatggtttaaattttcttgaatggttctttaacttgaggattgtcctcaaacaagaacaaaaattatatgtcattcaacaaccggttcctaacgaaccacccgctaatgcctcgagggctgatagagatgcttacaagaagcatctcgatgacatggtagacgttggatgtcttatgcttgccactatgaatcctgagcttcagaagcaacatgaggacatggttgcttatgaaatgattgagcacctaaaagaactttatc

SEQ ID NO: 202098 - DNA, 400 bp, Gossypium hirsutum
  unsure (1)..(400): unsure at all n locations
caacggtgttttgtgattaaaaaaactaccaagattgtggcaaaacaagatggcttccctgcatgaaccatggctagtggagaacgggttgaaggggtctagcaaggagattcgccatggcaggactgcacacaacatgtcgtcttcgtcgttgcggaaaaaatcggacctgacgcttgtttccaaggttcggtatgcaatgcttaggcagttcctcgccaatcttcaagaggtcatattagggaccaagctctccgttctcttcccagctattccattggccattgttgctgagtgttatggatttggaagaccctgggtgtttgcattaaatntacttggacttacaccattggctgaacgagtcaactttctcaccgagcaaattgcttaatacact

SEQ ID NO: 202099 - DNA, 408 bp, Gossypium hirsutum
cagtgaggaagagtttaagtacttgcttgttcagcatagacagccgtttgagcctgagcacatgtcgtttcgatcgagcgaggatgatggtgttgacgtgggatcgatggtttcgttcggggatgagtcttttgaggagtcagcacgtagggatagtgtcagccgaacatcagaggagtgtatcatcgatttggttcatcctgatgtgattcatgacctcaaattcattgccaattcaatgttcatgtcgaattatgatcatgagtgtcgccaagcgtatgtcatagttcgaaaggatgcattggatgagtgccttttcgatctggagatcgagaaatttagcattgaagatgtgctgaagatgaagtggggtacctttgattcgaaaatcaagagatgggttcgagc

SEQ ID NO: 202100 - DNA, 277 bp, Gossypium hirsutum
ctccgtgatggagttttctggtaggtgccacagctacaagagcttgtgaacaaccccaagctacccacatccctgaaaaaccaggcactcaagcaccatggaagccagtggttccaaccccaagtgccaagcctgccccaaaaagtgacaccatccttggcaaaccatatgaagacataaggttgcactacacaattggtaaagaactgggaaaaggtcagtttggtgtaacttatctttgcattgagaattcaactgggaaaacaatatgcttgca

SEQ ID NO: 202101 - DNA, 392 bp, Gossypium hirsutum
cgatcatatgccgtgcgaggatcctaggcgtaatagtgagctcagtagggagatgaatttctatagagaaaggcattgccctttgcctgatgaaacgcctctttgcttgatccctcctcctcttggctacaagattcccgttcagtggcctgaaagcttgcacaagatatggcattccaacatgccacacaacaaaattgctgataggaaaggtcaccaaggatggatgaaagaggaaggtccttactttattttccctggtggtggaacaatgttccctgatggagctgcatcgtatatagagaaacttggacagtacattcccataaccggtggaactcttaggacggccctcgatatgggctgtggggttgctagttttggggttcaat

SEQ ID NO: 202102 - DNA, 327 bp, Gossypium hirsutum
gttcttggaatcgattgaggatataagggtttttatgcaaaggacggtgtcaccttaacacctaagtttgtcgatgatatccataaacgtggaggtacgattcttggaacttctagaggaggtcatgattctgtcaagattgttgaccgcattcaggatcgtgggatcaatcaggtctatataatctgaggtgactggacacataaaggagcagctgtgatttttgaggaaataaagcgacttgttttgaaagtatctgttgctggaatttccaaaaccatttacaatgacattttctggtattgacaaatcatttggtttcgatac

SEQ ID NO: 202103 - DNA, 233 bp, Gossypium hirsutum
caacattgtttttaccaatctccagcttccaaatataatgtgccgggcataaacatatcagttggccgtcccgaacaggcgactcaccccgatgctctcaaggcagcttttgcttaattcatctcaaccttgatcatcattttcgctggatcggtctcaggaatggctcttaacaagttgaccgacaactgagcaacaacccctgccggtctcgtagccgtcgctctagctca

SEQ ID NO: 202104 - DNA, 427 bp, Gossypium hirsutum
  unsure (1)..(427): unsure at all n locations
gctaggaaccctaattccgagtgagaaaggaagaaaagaaaaagaacaaagatgaagccgattttgatgaaaggtcatgaaaagccattgacgtttctcaagtacaacagagatggcgatcttttgttttcgtgtgccaaggatcacactcccaccgtttggttcgccgacaacggcgagcgtctcggcacttaccgtggccataacggcgctgtttggacttgcgatgtctcaagggattcgatgaggcttataactggaagtgctgatcaaacggtgaagttatggaatgttcagaagggaactcaattatatacgtttaatnttggttcaccggcgaggtcggtagagtttgccattggggataaacttgctgtcattaccacggatcccttcatggaattgacatccgctattcatgttaaac

SEQ ID NO: 202105 - DNA, 424 bp, Gossypium hirsutum
ggacatcttcagggcaaagattgtggatatctcagaacatggactaactattgaggtaacaggagatccagggaagatggttgctgtgcaaagaaatttaagcaagtttgggatcaaagaaattgctagaacaggaaagattgctcttagaagggaaaaaatgggtgcatctgctccattctggcgattttcagcagcttcatatcctgatcttgaagaaacagtacctgataacgctcttgcaggggctagaaagcaatcagtatttagcgaggccgatgtttctggatggggagacgtctatccggtggagtcgcctgatggctttacaatcaatcaagttcttgatgctcattggggtgttctcactgatgaagatacaagtggacatcaatctcatactttatccatgctcgtaaatgac

SEQ ID NO: 202106 - DNA, 394 bp, Gossypium hirsutum
ccacccttcaatcctccggatcttaacacacagttccataattgttgtgtgtgggaaaacgaaataggggattcatggaagagaggcatattctgtttgggaaatatgagatggggagattgcttgggaaaggcactttcgccaaagtctactacgcgaaggaattaaaatcgggtgaaagcgtcgcgataaaggtcatcaacaaagctgaggtaaagaaagaaggcatgatggagcagatcaagagggaaatctctgtgacgcgtcttgttcggcatccaaacgtagtggaactcaaagaagtcatggcgaccaaaaccaagatcttctttgttatggagtacgtccgtggcggtgaactattcgccaaagttttcaaaggcaaactcagaga

SEQ ID NO: 202107 - DNA, 363 bp, Gossypium hirsutum
ccaattctctaatttctcctaatccttaaatttccccccggaagaatcagcagacacggtgaagactcattgtcgaggtaacataaatctgacttgaatcgcttttctgttttgtaggttactcacaacaaattcgtataatcagacgctttttctcatttgcttcatcggagtgtaaaatttcaggctagcaagaaggtagcagatgctaaacttgcaaaagattttcaagcagttttgaaagagtttcagaaggctcaacgacttgcagcttaaagggaaacatcatactgtacgaaggtcttccttcaagaaaaatgcgttgaggaagattacaagatttaagtattgtccagaatactc

SEQ ID NO: 202108 - DNA, 408 bp, Gossypium hirsutum
ccccatcgacacacagagcaagttcttcaacccgcaccgactcggattcggatcgtctaacccgacgggcaagatcccgttggggttaaaacgtaaaggcctgaagatcgtggtaacgggtggagccgggttcgttgggtctcacctcgtggaccggttaatagcaaggggagatagcgtgatggtggtggataacttctttaccggcaggaaagaaaacgtgatgcaccatttcggtaaccccaatttcgagcttataagacacgacgtggtggagcctttgctattggaagttgaccagatctaccatttagcttgccctgcttcaccagttcattacaaattcaacccagtcaaaactatcaagacaaatgtggtggggacattgaacatgttaggactggcgaa

SEQ ID NO: 202109 - DNA, 435 bp, Gossypium hirsutum
agaacatggagttgaaggttcaatatggcagttggctaaaggttatgttgctgtaaatgactctggtgttcatcaactcataagccattggctgaacactcatgcaacaatggagccattcgtgattgcaacgaaccgacaacttagtgtagttcatccaatttataagcttctctatcctcacttccgggacacgatgaacatcaatgcttttgctaggcagattctgattaatggaggtggtgtcctggaattaacagtttttcctggaaagtatgcaatggaaatgtcatctataatttacaagagttggaatttgtttgaccaggcacttcttagagatctcaagaaaagaggagttgcagttgattataagagttcaccaaatggtcttcgtttgttgataaaagattatccatatgctgttgatggact

SEQ ID NO: 202110 - DNA, 443 bp, Gossypium hirsutum
taaccaggacatcgaagttacttggggtgatggcaggggcaggattctcgaaaccggaaaccttttaactctaaccctcgacaaattctccggctctggttttcaatccaggaaccagtatctgtttgggaagatcgatatgaacattaaactggtcccaggcaactctgctggcactgttaccacttattatcttcggtcggaagggtcgacatgggatgaaatcgacttcgagttcttggggaacctaagcggagacccatacatagtccacaccaatgtatatacacaaggcaaaggtgacaaagagcaacagttctacctttggttcgatcccaccaaagacttccacacctactcccttctttggaaccctcaacgtattatcttctctggtgatgggactccgatcagggagttcaagaacttggaatcgatgggcg

SEQ ID NO: 202111 - DNA, 432 bp, Gossypium hirsutum
attgagactacctcttgagtcagaccaagttcttctgaaaggcatttatgctggtgtaaacgcaggtgatgtgaactttagcgcaggccgttattttcaaggaaccaagaaagaccctggatttgaggcagtgggaataattgctgccattggagattctgtaagaaatttggaagttggaactcctgctgcagtcatgactattggatgttatgctgaattcatgaaggttccttcaaagcaaatacttacaattccaagacctgacccggaagttgttgctctgcttacttcaggattaacagcatcaatcgctttggaagagcttggtcagatgaaatctggaaaagttgtccttgtaactgctgctgattggaggactggacaatttgcagtccagcttgcaaaactggcaggaaataaagttgttgc

SEQ ID NO: 202112 - DNA, 434 bp, Gossypium hirsutum
ctcaccaggacaactcgtttctttatactgaacctagaacttgcactggtctgtggctagctctagaagatgctacagttgtaaacggctgcctttgggccattcctgaatctcaaaaaaatggtcttgttagaaggttcattaggggtgatgatggagtttactttgataggccgtccccatcgtatgaccagaaagattttgtgcctattgaagtaaaagctgggtctttggttgtaattcatggtgaccttattcatcaaagttttgaaaatcagtcttcaaattcacggcatgcatacagcttgcatgcggtagatactgatggctgcaagtgggcagaagataattggatccgaagaaaagttgaacctaagcccctttacgcttctggacagacttgagagttcgtccctggtaattgcatggagctt

SEQ ID NO: 202113 - DNA, 404 bp, Gossypium hirsutum
  unsure (1)..(404): unsure at all n locations
gtggatcctacgtgaggttgccgcccctctcatggagcagcgtgccttggatcaatcaatttcacaaaacacccaacagggaatggtttgaaacagatgcggtgctgagggtcagcttgggaaattttctctttttcactatcctatcatttttaatgattggtgttaaaaatcagagagatcctcgtgatggtttgcaccatggtggatggatgatgaaaattatctgctggttcattttagttattttgatgttttttgttcctaatgagattatcagcttttatgagacgatatcaaatttcggctcaagactgtttcttttgattcaagttgtgcttttacttgactttgntcatggatggaatgacaaatgggttggatacgatgagcaattctggtat

SEQ ID NO: 202114 - DNA, 403 bp, Gossypium hirsutum
ccaacaggaagtttatcagttcaatgtgccgactttcggccctggtgtggtgtttgatgtggattactcaataaggcaagagcagttccggttctttacggaggcccttcgagttaataaacttaagggttatgtagatcagatggttactgaagctgaggactacttctctaaatggggggatagtggtgaggtggacctcaaatatgagttggagcatctgattatcttgacggctagcaggtgtcttttgggtcgagaagtacgtgataagcttttcgatgatgtgtctgcactctttcatgatcttgataacggcatgctccctatcagagttatcttcccttacctgcccatccctgctcatcgccgtcgtgatcaagctcgaaagaagcttgcagaa

SEQ ID NO: 202115 - DNA, 430 bp, Gossypium hirsutum
  unsure (1)..(430): unsure at all n locations
attgcttcccacaacattttttctcatgttggtggcatggatttgatgaaaaatggtggggtacactctcctcagcagatgtcccacctttaccctggcaggaaccctatgatttcaatgccgacgtctcttgattctcctaatgaacgtgttagaagcttctcacaccgtagaaatgaactgaattctagtaatgctgataagaaacaatatgaacttgacattgaccgcatcatacgtggggatgacagcagaacaacacttatgattaaaaacatacccaacaagtacacttcaaagatgcttctggcagccattgatgaacattgtcgaggaacttatgattntatttatttgccaattgacttcaagaacaaatgcaatgtgggctatgcgttcatcaacatgattgatccgcaacagatcattc

SEQ ID NO: 202116 - DNA, 383 bp, Gossypium hirsutum
aagaaaaggcaaaggcgagggtctattttcttcacaaactacaatggcttccgagtctttagtaaccaagaggctagatggtaaggtggcactgataactggtggtgccagtggtttaggaaagtgttcagccaggctatttttcaaacatggagccaaggttctgattgctgatattcaaaacgaattgggccactccttttgcaaaaagcttggaactgaaaacttcagctatgtccattgtgatgtaacatgcgaatctgatgtcgaaaatgccgtaaacttagcggtctccaagtatggaaaactcgatatcatgttcaacaatgcaggccttattggtgatggtgaagtcagagttacagacgccagcactgacaact

SEQ ID NO: 202117 - DNA, 398 bp, Gossypium hirsutum
gcggcttccacttgtgtaggaaggagcttttactcgagaggggtgttccttgatgctctcaattctttcactcagttcgcaaggattgggtcggttgaggattctaggcgtgagatcgctgctttctttgctcatgctacccatgaaactggaagtaagcatctctttttgctcttaattttctgattaaaacctgtcgagacacgtccgttatagggtttgaagtgcctatgttgggttttatttcaaattttgtctttcaactttgtcgagaacatgaggaggtgactggctcacaaggtcattttcttaatgagcgaagacacgccttctctgtgaactcgtaaccttctcgagctctcaacagagtcaaatgccaaatgtgttgagagctccac

SEQ ID NO: 202118 - DNA, 305 bp, Gossypium hirsutum
accattatcactggtacttggaagatatcctaggatttcaatacaagcagcatttgccaagcaaagcttttaatcctctacactctttcaaaaaaaaaaaaaccaaaaggggttttgctggcaattagtaaaggagaccatgttacaaagcacattgcaaacaaaatgcaggcggtgcactggattccccaaacatccatctttcagtaaattccaggaacgatcttatagggaaccttgttgcagtatagtttccagtacttaccatatttggaccggcaccggtcatcatccctcttggctcg

SEQ ID NO: 202119 - DNA, 442 bp, Gossypium hirsutum
tgtccctaaactaaattctctaattctaaaacaaatgaaagtctcgcaaattccacaaattttgcagtatttttattttatttgaactctataatttaatttccccttattggattcaccattcccagtaccaaaccctagttttcttcttttcttttctctgtaattttttccaagaagattcttcaatcatcttattttaagttttttttttttgcttttgcccccctcccgtgtgtgagttgaggggtttaatattttgaggatggatatcgagcaaaaacaagcagagttaatcgatcactttgtgaagaaagcgtcagctcaagttggttcagctattggcgccttaattgtcgaagcgacgtcgcatgcttcactcttcgccttcttcgagatccttgccgtgcctacagtcgctgagcttgaaggaactgaaaac

SEQ ID NO: 202120 - DNA, 423 bp, Gossypium hirsutum
atccaagacaaggaagggattccaccagatcagcagaggttgatttttgccggaaagcagctcgaggatgggaggacacttgcggattataacatccaaaaggagtcaaccctgcacttggtgctgcgactgcgtggtggaatgcagatttttgtgaaaactttgactggaaaaactattacattggaggtggagagctcagatacaattgataacgtgaaggccaagattcaggacaaggagggtatcccacctgaccagcagaggttgatttttgctggaaagcaactcgaggatgggaggacgcttgcggattatagcatccaaaaggagtcaaccctgcacttggttctgcgccttcgaggagggatgcagatattcgttaagaccttgactggtaaaaccataacactggaggtcgag

SEQ ID NO: 202121 - DNA, 382 bp, Gossypium hirsutum
gcaaatggcactcttgtgcgtgttcttattcatacggatgttacaaagtatctttacttcaaagctgtggatggtagctatgttttcaataaagggaaggttcataaggtgccagcgactgacatggaggcactcaagtctccacttatgggaatatttgagaagcgtcgtgcacggaagttcttcatatatgttcaagattatgatgaaaaggatcctaaaactcacgagggaatggacttgacaagggtgtcaactagggcactaattgcgaaatatgggcttgatgataacactgtggatttcattggtcatgcattggcacttcacagagatgaccgctacctggatgaacctgcattggatactgtaaaaaggatga

SEQ ID NO: 202122 - DNA, 410 bp, Gossypium hirsutum
gtcagttttccttttgtttttgtcgtatgtagtcgtaggatcagctgagcagtgtggaaggcaagcaggtggtgctctttgccccggtggtctatgttgtagccaatttggctggtgtggcagtactgctgactactgcacagttcctggttgccaaagtcagtgcagcggtagtggccctgcccctgggcctggtgggctaaccaatcttatatcaagagagacgtttaatcggatgcttttgcataggaacgatggggcttgtcctgcccgtggcttctatacatatgatgctttcattgctgctgcccgttcctttcctgcatttgctacaactggtgaccaagctactcgcaagagggaaatagctgccttcttagcccaaacttcccatgaaactactggtgggg

SEQ ID NO: 202123 - DNA, 402 bp, Gossypium hirsutum
gatgtctctaattctcttgtttacaaaagatcaccttcaattcgtagacatcccttttcaccagttttgaatcttcaaaacatcacgaaaagaaccaacgttttggtctcaaaaccattgcatatctcatctgttgagagtattggtaaggagaaaaaaccagtaattcaatgcaacgcttatgaagctgacaagtcagagcctattgaggcagcagagcaagttaaatcagaagctgcaaaaagggtgaaaattgggatttattttgcaacttggtggggtttgaacgtggttttcaatatttataacaagaaggttttgaatgcttacccttacccttggttgacttcaacattgtcccttgcttgtggttctttaatgatgttaatttcatgggctaca

SEQ ID NO: 202124 - DNA, 403 bp, Gossypium hirsutum
  unsure (1)..(403): unsure at all n locations
atttagtttaagaaaaaatttccttagagcataaaagagaagttacgaacatgccgggtgtcaatcctgaaattgagttcccagccattgagttccgtccatcggatttgaagcgaggaaccgaaggatggaaccggttgtgcaagagggttcaagaggcttgtgagactttcggttgtttcgaggtggtatatgaaagggtatcgacgaaactccgagaggatgcgtttgggttgatgaaagaaatggttgagctcccagtggagacgaaacagaagaataatagtcccatgccttaccatggttgggttggaccatgcaagcaggtttctgtgttgtatgaaggctttggagttggagatgcctncaactatgactctgttaaaagttttgctcaacttat

SEQ ID NO: 202125 - DNA, 450 bp, Gossypium hirsutum
gccattgttatcttctctgttttctttcttcactctgttcagaacaagttaattaagaaagaagaatgactaaccaacaaaatgtggtggttgtggatgtgaaaccccatggtggggttaagccaccattatcattgccagtggccaagtccttttcaccacaagacctgaagttattgttaatgaagaaaaggtttgaaactgagaatgcttgggtactggattccatgagagcttcttcacctagtcgtatcagcaaccctactacgacttccttacctgaaactgatgtcaaaagttcctggattgttcatcatccctcagctttgaacatgtttgaacaaatagtgactgcttcaaaagggaaacagattgcgatgttccttgactacgatggcacactgtcaccaatcgttgaagacccggatcgagctttcatgcccagagaga

SEQ ID NO: 202126 - DNA, 443 bp, Gossypium hirsutum
ggtttcacatccacaacatatgacccatgtgtagacatctccctggacttggaaccaaaccaaggaggttctgggaagtcttcatctgcaaaatcccttaattctttcaatgttgaggcagactgcatgcgtccgaatcaaaactgtgggatatctaccttaaagggttgcttagaacgatttacgagagctgaaaagttggggtctgaccagaaacttttctgccaaaagtgtcaggtgaggcaagagtcccttaagcagatgtccataagaaagcttcccctggtttcatgctttcatgttaaaagatttgaacattcatcaatacgaaagatgtcaaggaaagttgacaggtatctgcagttcccattttcattggacatggctccttatctttcttcttccattttgaggagtcgatttggaaacaggatttttccttt

SEQ ID NO: 202127 - DNA, 446 bp, Gossypium hirsutum
aaaataccccaaaaaaataggaaaaaaaaagtttacattgagagatggtgagcaaaacagaggagacccaattgaataggcttgaaaaccaggtagataatggaggaggaggtgcttgggagtacctttgccttgtgagaaagctcaaagttaggcgttcagagaaagtcttgaaatatggtttatccatcttaaatgatcccaagaaaagatctgctcttggccctgaagaatggactttgtatgagcaggtagctattgctgctatggattgccaatgtctcaacgttgcaaaggattgtataaaggctttactgaaaaaatttcctgagagcaaaagggttggcaggctggagggcatgttgcttgaagcaaagggatcgtgggctgaagctgaaaaagcttactcaagtcttttagaggacaatccacttgatcaagtaata

SEQ ID NO: 202128 - DNA, 425 bp, Gossypium hirsutum
gagccaaggaagtggccatctttgcctcagcttctgagtcgttttccaagtcaaacataaattgcagcatcgaagatagtcttgctcgttttagagatgttgtttctgctgctagagagatctcacttccagttcgagggtaccgtcattccaatgctcgaaaatgttatgaattttgtcccaatcgataatcttgctgtccactttcatgacacttatgggcaagctctgtctaatatcttaacatcactccaaatggggatcagtaacgtggattcatcagtttcgggtctcggaggttgtccatatgctaagggtggttccggaaatgttgccaccgaggacgtggtttacatgctcaatggacttggaatagagacaaatgtcgatctcgaaaaactcttgttggcccgagattttatatg

SEQ ID NO: 202129 - DNA, 408 bp, Gossypium hirsutum
aaaaatcgaaaccaagatgaccatagaacatgcgtatcagaggtctttggagactgtgatgcagtggctacgcaacgaggtgaatatgagtaagaccaaggtctacttccgcactttcgctcccgtacatttcagaggaggggattggagaaccgggggaagctgccacctcgagactttgccggagctgggaacaacattagtgccatcggaaacttgggagcttctcgaaatagtataggatgtgttatcacctcactcatacacatcccatggaataaaattcgacatattaaacatcactcaaatgacagcaccaaggaaagacggtcacgcgtcgctatactatttaggtcccaaggaaagcccggctccgattaatcatcgagactgcattcactggtgctt

SEQ ID NO: 202130 - DNA, 443 bp, Gossypium hirsutum
gaaggagttaaattggtcggcaatccaaatatggaaaaagacccgtgctactcccttgaccggcttcgagaggaaaatgatgccattgttttggcaattggagccacaaaacccagggaccttcctgtaccaggacgagatttatctggtgttcattttgcaatggaattcctacatgcaaatactaaaagcttgcttgatagtgatctccaagatggtaactacatatcagctaagggcaagaaagtagtagtcatcggtggaagtgacactggtacagattgcattgggacatctatccggcatggatgtagcagcattgtaaatcttgagttgcttcctcagccaccgcagacaagagctcctggcaatccttggccacagtggcctcgcatattccgtgtagactatgggcaccaagaagctgctaccaaatttggaaa

SEQ ID NO: 202131 - DNA, 426 bp, Gossypium hirsutum
  unsure (1)..(426): unsure at all n locations
gggaaatgtatacaaagcgatatttttacggttggaggctgcgattgggcgatttacttctaccccgacggtaaaaatccggaggatagtgcgatgtatgtttcggttttcattgccttggctagcgaaggtacggatgttcgagcgcttttcgagctcacccttgttgaccagagcgggaaagggaagcataaggttcatagtcactttgacagagcgttggagagtgggccttatacgttgaagtacagaggaagcatgtggggctacaaacgattctttagaagaacaactttagaaagttctgactacattaaggatgattgcctaatcatgaactgcactgttggagtagtcagaactcgccttgagggaccaaaactgtcttctattcctgtaccgncatcagacatgggtcagaatctt

SEQ ID NO: 202132 - DNA, 421 bp, Gossypium hirsutum
catgggtccaaactatgtacctggggagaagaaagacttgtatgtaaagagtgtacagagaactgtgatttggatgggaaagaagcaggagacagttgaggacgttccttgtggtaatacagttgccatggttggtttggatcagttcatcaccaagaatgctacattgaccaatgagaaggaagttgatgcccacccaattcgtgccatgaagttttctgtctcccctgttgtccgtgttgctgttcagtgcaaggttgcatcagatcttcccaaacttgttgaagggttgaagcgtttggccaagtctgatcctatggttgtctgtaccattgaagagtctggtgaacacattgttgctggtgctggagagctccaccttgagatctgtctcaaggatttacaagaagatttcatgggt

SEQ ID NO: 202133 - DNA, 360 bp, Gossypium hirsutum
  unsure (1)..(360): unsure at all n locations
gggaaatgtatacaaagcgatatttttacggttggaggctacgattgggcgatttacttctaccccgacggtaaaaatccggaggatagtgcgatgtatgtttcggttttcattgccttggctagcgaaggtacggatgttcgagcgcttttcgagctcacccttgttgaccagagcgggaaagggaagcataaggttcatagtcactttgacagagcgttggagagtgggccttatacgttgaagtacagaggaagcatgtggggctacaaacgattctttagaagaacaacttaagaaggtctgactacataaagatgattggctaatcatgaactgcactgntggagtagtcagaac

SEQ ID NO: 202134 - DNA, 381 bp, Gossypium hirsutum
  unsure (1)..(381): unsure at all n locations
cttcgatgtgatagcagggaccagcaccggcggcttggtgacagccatgctaacttgtccgaacgaaaagaatcgaccattatttgctggcaaagacatcaaagacttctacctaactaaattgcctaacatatttccctaaccaagatgtccattggtttcttcgacaacaaaaggtaataaaagctctatcggggcccaaattatgagggcaagttcttacattaaagttgtagagacaggctaggagaaacaagggtgcaccagacattaactaacgttgttatcccaacatttgatgtcatgcatctncagccagccatttttcaagctatcaggtgaagaaaaaccctatttggatgccttgctctcagacatatg

SEQ ID NO: 202135 - DNA, 425 bp, Gossypium hirsutum
  unsure (1)..(425): unsure at all n locations
atagagagcatgttgaggattggattcagaaacatcatggatggcttcatatgtagagcctcacttcctcagagcttttataacagggaattatcgacacaaaccggaaggctgaaaggcaaaatagcattgatcactggggcagcaagcggtatcgggaaggcagctgcagcaaaattcatcagtaatggtgccaaagtcgtcattgctgatatacaacaccaactagggcaagcaacggcgaatgagcttggacccaatgctacttttataccctgtgacgtaacgaaagaatcagatgtatccgatgctgttgactttaccatctccaaacacaaacgactggatgttatgtataataatgctggggtaccttgctacacgcctncgagcattgtggaccttgaccttgccgtttttgacag

SEQ ID NO: 202136 - DNA, 417 bp, Gossypium hirsutum
acaacatgttcgtgttcatgcaatggaagcagttatggcttgttgggatcttgagcaatcacttcaaagtttaacaggtgtatctccaggtgaaggcactggtgcaaccatgtctgatgatgaagatgaagttgtagatagtgataccagcttgtttgatggaagttttgatgggattgacagcatggggtttggccccctcgtcccatccgagactgagagatcactaatggagcgtgttaggcaagaactgaagcacgagctgaaacagtgttacaaagagaaaattgtggacattagagaggaaattctacgtaagagacgagctggaaagctaccaggcgatacgacctcgtttttaaaagcttggtggcagtcacattccaaatggccttacccaactgaagaagacaaagc

SEQ ID NO: 202137 - DNA, 426 bp, Gossypium hirsutum
aagaaaccatccaagccccaacaaacaaaacagctcctggttatctccaatttcaaaatcaaaatcaaaatcaaaatcaaaatccaaagatctaaatctaaatccgtctcctctcctttctctttctttaaccttacaattaaggaaagaagatgaagagagtcttcggcgttaagaaagacaaggaacccccgccttctatccaagatgctaccgatcggatcagtaaaagaggggatacggttgatgagaagttgaagaagctagatgctgagttgagtaggtataaagagcagataaaaaagacaaggcctggccctgctcaagaggctcttaaatctcgagctatgagggttctcaagcaaaaacgaatgtatgaagggcaacgtgatatgctttataaccagacgttcaaccttgatcaag

SEQ ID NO: 202138 - DNA, 395 bp, Gossypium hirsutum
cttgggattatcaatttgaagccttcttcgaagttcctctttcaagatgcaaattttcgtcaagaccctcactggcaagaccatcacccttgaggtggaaagttctgataccatcgacaatgtaaagaccaagatccaagacaaggaagggatcccaccagaccaacagaggcttatctttgctggtaaacagctggaggatggccgtacccttgctgactacaacatccagaaggaatccacactccatttggtcctccgattgaggggtggtatgcaaatttttgtcaagaccctcaccgggaagaccatcacccttgaggtggaaagttctgataccatcgacaatgtaaaggccaagatccaagacaaagaacggatcccaccagaccagc

SEQ ID NO: 202139 - DNA, 427 bp, Gossypium hirsutum; identical to SEQ ID NO: 190835

SEQ ID NO: 202140 - DNA, 386 bp, Gossypium hirsutum
atagggccatcttttcccttgtggcttcgttctcaaaagcatctagaatatctagacatctcaaattcaagaatttcagacgtcattcctaggtggttttgggggctgtcgacccaatttagagatgtaaatctctctagaaaccaaatttctggccagattccgtatctacctaagggtcctaatattttcacttttgtcgaccttagtttcaataattttagcggtccattgcctcaaatctcaatgggttccaatcagtacatgatagacctttctaataattatttctcgggatctcttttccattttctgtgctatcagttgaatggtaccatcacaacaagttttcttggtattgctaacaatcttttatctggagagat

SEQ ID NO: 202141 - DNA, 419 bp, Gossypium hirsutum
ttcttaatcaagtaaatcttggtaataaaagatatcatgcatttgacttaatcaaggaaatcttgtaatgaactcaaagcaataagccttagagaaaaacttttgagcaggttccaacaatagacgtatcacttgcttctcataatccacacacagcaagccagactcggatagaagatcataaaatgtgtgtgatgatatgatagcatgcagttttgtcctattaatagtattaccacacacccctgctgtcataaggcgtaataaatatgtgaagactttgatgtatactaataaataaggttcttctgagtgaccatcaccctgaaaactatggagggtggttagcagaagagaaaatccagtggcttcaccaaagactctctgagcaccattatttactcctagaatgcgccaca

SEQ ID NO: 202142 - DNA, 369 bp, Gossypium hirsutum
cgggtgtagcgttttttatacgttcggttgttgttgaaggagtggttctaccatggcttcaaagaagagcgttggggacttgaaggaagctgatttgaagggaaagaacgtgtttgttagagtcgatctgaacgttccataggatgataacttcaacataactgatgacacatggatccgtgccgctgttcccaccatcaagtatttgatgggtcatggctctaaagtcatactatctagtcatttgggactcccaaatggtgtcactcccaagtacagttcgaagcctctagtgccaatgatatctgaactccttggagtcgatgttaaaatggcaaatgactgcattggtgaagaagttgataaaat

SEQ ID NO: 202143 - DNA, 426 bp, Gossypium hirsutum
agaagagaggaacacgttagagtattagaggaagctaaggcgagaaactcagagctccagtcattgcatgaaactttaacaagggattcagaacttaaactccgagaagtaatggaaaatttcaacagcaaggattctgaaacaaaatctctgttcgagaaattgaaaacatttgaagatcagataaaggtgtatgaagaacaagttgctcaagcagctggacagtctgcgtcttcaaaagaagaaatggatcagagcttacagaaattggcttctctagaaagcacaaatgaacaactcaaaagcaagatatcggagttcgaaaataaagctcttcagtcttcctcagagaatgaacttttggttcagacaaacattcagttgaagggcagaattgatgagcttaaagaattgcttaattcagct

SEQ ID NO: 202144 - DNA, 278 bp, Gossypium hirsutum
atagggcttctgggtaatgggtaatggtcatggactagagaaattgaaatctttcacagttacatcctgccgaggagcgacagattcgggacttgaagctgttggaaaaggttgcccgaatttgaagcagatatgcctcagtaaatgccctttcttatctgataaggtgttgtcgtctttagccaaatcagccggttcactagagtgcttgcaactggaggagtgccacagaatctcccagtctgtgttctattgctcccttattaactgagttgcaa

SEQ ID NO: 202145 - DNA, 404 bp, Gossypium hirsutum
cccctctgtgccgtgtcttgcgggtttcacttgacagctggcaaaggatctgcaagatggaaagcatgaatagcttttggcagttaggagatgatctccggggacaatctaaagcctcagaggatcacaaatggttgatggttgcctccaaactggctgaacagacgaggataaagggtgagcgaatgaacaatctcgatctttcaaagggtccagctgaagtaaggacaagggataaatttgggttccatgaagacaacaaattcgagaaccttaacttcaatatgttgaacttggactccaagatcggagatagtgtaagcaaaagtaccttccgaaatggtatttacaacaccgatgctgtttaccagaaaaataacagccacaacattgggaacctgtct

SEQ ID NO: 202146 - DNA, 402 bp, Gossypium hirsutum
caatggctataaatcaggagccacaacaacaacagctgctgaacaaccccaagctacccacatccctgaaaaaccaggcactcaagcaccatggaagccagtggttccaaccccaagtgccaagcctgccccaaaaagtgacaccatccttggcaaaccatatgaagacataaggttgcactacacaattggtaaagaactgggaaaaggtcagtttggtgtaacttatctttgcattgagaattcaactgggaaacaatatgcttgcaagactatatcaaagaggaagttaatcacaaagaatgataaagaagatatgagaagggagatacaaattatgcagcatttgagtgggcaacctaatattgtggagtttaaaggtgcatatgaagataagttatc

SEQ ID NO: 202147 - DNA, 408 bp, Gossypium hirsutum
aagaaaaggcaaaggcgagggtctattttcttcacaaactacaatggcttccgagtctttagtaaccaagaggctagatggtaaggtggcactgataactggtggtgccagtggtttaggagagtgttcagccaggctatttctcaaacatggagccaaggttctgattgctgatattcaagacgaattgggccactccctttgcaaagagcttggaactgaaaacttcagctatgtccattgtgatgtaacatgcgaatctgatgtcgaaaatgccgtaaacttagcggtctccaagtatggaaaactcgatatcatgttcaacaatgcaggccttattggtgatggtgaagtcagagttacagacgccagcactgacaacttcaagagagtgttcgatatcaatgt

SEQ ID NO: 202148 - DNA, 395 bp, Gossypium hirsutum
aacccatttccctctttctctgtccatccatttgtccctcttttcttctttttcttcttttttatcctctcaaagacctttttgtgttgcagaatttactcctttttagttttgtggactatgccaaaagctggggttcttcctggttaactaaggcctatttttgggtgggttgaacttatatcagtactagcagattagaggttctctcaagtttcagacatatttgagttcctatcttggaacaatgatgatgtttgacgagatgggaatttgtggggatatggatttcttcagtgctccacttggggaaaaagatgtggcagcctcacaaattgaaccagaggcgacggtggaggatgattatagtggtgaagaaattgatgtggatgaac

SEQ ID NO: 202149 - DNA, 381 bp, Gossypium hirsutum
aaggactggttgagatttagtgttgcattttggcatacatttcgtggaacaggtgccgatccttttggtgcacccacaaagtattggccatgggaagatggtaccaattccattgctatggccaaaagaagaatgagagccaacttcgaattcctaagcaagcttggagttgataggtggtgtttccatgacagggacattgctcctgatggcaaaacactaaaggaaactaattcaaacttggatgaagttgtggcacttgctgaagaacttcagggggacaagatccgtccactgtggggtactgctcaactatttatgcatcctcgttacatgcatggtgctgctacaagctctgagttgggtgtttatgcctatgct

SEQ ID NO: 202150 - DNA, 323 bp, Gossypium hirsutum
gaacaactttcagcagaggagtttgctattctagttggcaagcacttcacatcattttatccacaggtttttactgcaatagtaaagatagtggaaaagccatgggaacgcatttctgtcaatggtcaaccacatgaacatggctttaaactgggatctgaaaagcatacaacggaagcgattgtacagaagtctggtgttttacagctgacttctggtgttgaaggcctgtctttgctgaagacaacccagtcgggatttgaaggattcatcaaggacaaatacacagcacttcctgaaacacgagaaaagatgctggcaac

SEQ ID NO: 202151 - DNA, 419 bp, Gossypium hirsutum
gaggagttacgagagttacgtggtggttatgaaagtgagcgcgccaatcgcgacgcatcgtgggttgaaacgtgccgcgattgatttggttacggtgttggatattagcgggagtgcgatgaggttgcagatggtgaaacgggcgatgcggttgattatctctttgctcgacgagaaagaccgtttgtcgatcgtgattttctcgtcgagctcgaaacggttgttgccattgaaaagaatgagttccggcggacgacgatcggcgaggaggatcgtcgatgcgttgggaagtaaccgacaagggatgagtgtcaacgacgcgctcaaaaaggcggccaaagtgttggaggatcgtagagaaaaaaacgccgtcgccagtgttatgatcttatcggactgtcatgaataacagtcacagt

SEQ ID NO: 202152 - DNA, 235 bp, Gossypium hirsutum
agaaagaaaaggctttaaaggaaaaggagactggaaatgatgcttataagaagaaagacttcgagacggctattcaacattacaccaaagcaatggagattgatgatgaagatatttcatacataaccaatcgggctgctgtttatttggaaatggcaagtatggagactgcattaaggattgtgagaaggctgtgaaagagtagagagctcagagcagactataaaatgatagc

SEQ ID NO: 202153 - DNA, 404 bp, Gossypium hirsutum
  unsure (1)..(404): unsure at all n locations
agcagaagtatttaccttctttggcacagttaaagacgatagcttgttgggctttgactgagcctgaatatggaagtgatgctagtgctgtaaatacaactgcaagaaaggtagagggaggttggataattgacggacaaaaacgctggataggaaacagcacttttgctgatgtgttggttatttttgccaggaataccacaaccaatcagataaatggatatattgttaagaagaattcccctggactgaaagctacaaaaatagcaaacaagattggagtgcgaattgtgcaaaatggtgatattctcttaaagaatgtctntgttcctgatgaggaccgattacctggtctaaactcatttctagatccaaacaaggtacttggctgtttcacgagtaat

SEQ ID NO: 202154 - DNA, 423 bp, Gossypium hirsutum
  unsure (1)..(423): unsure at all n locations
gcgagcaagaggcaaacaataggcttaccaggtatggtagagatggttgcaactatatgttcaacattggttctcaaataaatgatatgagccggttgattgaaagacaagcacgatattttattgatgcatccaaatacggaaatgtttcccggttcatcaatcatagctgctcgccaaatcttgtgaatcatcaagttcttgtggaccgcatggattgtcaccgagctcacattggtctctatgccagtcaagatatatctgtaggtgaagagctgacttttgactatcgatatgaactcctgcctggtcaaggatatccatgtcaatgtggagcttctacatgtcggngccgcctttactaaaccctcagtgagcactacgggatctctatggcatctaaagtttggcttttgagttcac

SEQ ID NO: 202155 - DNA, 421 bp, Gossypium hirsutum
cctattgcaagtgatcttactttctcaaggtactggaattacttgaggaagcaaacatttgttttggaatcatatataagcacggttaattggctaatgaatagagcactgtttttaacccacttctatctgtcatggggatttgttgcaccgtacttcatggctatggttcatgttgcagcagcactacaaatctatataaaagattattcatatggcgaaacaacctgtacttctggtggattgttattggcaatttggctagctatatgtaccttcacggagctactttctatgtggaacttaacaaggattgaagttcaactatgcaacattttatctccagaggcacctaagctctcacttgattattacaactggagcatgatttttgttgcaatgctggttgataattttctat

SEQ ID NO: 202156 - DNA, 397 bp, Gossypium hirsutum
ataagaaattactattccatggcatatttgggtaaattgccaagtgttaccccaaagtattggcttgcattttcagcttctgcacctcctctcgggttaaacacttacttcatctcaagcggataacatatagccatagcagctccttcaaagaaccaagtagtgtacagttctaaagaaaagcacactgatgtaatctaagtagggccaggcgacctgaaacttgtgttctctgcatagcatcgaaaactcattggctacattaatagcagaactaatgtaaaagaaactgtaaggcaatcatatagcttttataccggagctactgacataaaacaggcactcggagcatacatctttcgaccatatggcacgaattcattgaaacttgatcacc

SEQ ID NO: 202157 - DNA, 343 bp, Gossypium hirsutum
caccaatgcatcattacaatatattgggacatactcgaaaaatctgtgtgattttcgtctggttttgcttgatcgagaagaaaggataacagatttgcctcttgacgatggagtccgtgatctattgaggggctgtgaaaagcttagaagatttgctctgtatcttcgacctggtggtttaaccgatgtgggacttggttatattggacaatatagttcgaaagtaagatggatgcttctgggatatgttggggaatctgattcggggcttttggagttctccaagggatgccctagcttgcagaaactagaaatgaagggttggtggttcagtgaacgtgca

SEQ ID NO: 202158 - DNA, 396 bp, Gossypium hirsutum
  unsure (1)..(396): unsure at all n locations
ggcaattggagcatggcaatttcttccatggactggactcgtgtcggagcccttacccaagagctgaaggagaaggaggtgcttataaggggacgagtccacacaacacgaccagtgtcgaagaatatggcgttcgtggtggtgagggagaggggatttaccgtgcagtgcttggttgctacgcatgaagcgggagtgagtcgtcagatggtgaagtttgtagctgcactcaatcgagaatccatcattgatgcaatcggtatggtatctgtccctgggaatcccatcaagggaaccacccagcaggtcgagattcatgttagaaaatngtattgtgtgaaataagctatgcctaccttacccattaatgttgaggatgctgctcgaaatgatgct

SEQ ID NO: 202159 - DNA, 398 bp, Gossypium hirsutum
tctcatctctatatacgatttactgttttaactcaaagggatggtggaggtgaagaaggctcaatctgctggggtttggcctacggttaaaccttttgtcaatggtggtgcctctggtatgctagctacctgtgtcatccaacccatcgatatgatcaaggtaagaatccaactgtagtcaaggatcggcagcaactgttaccaagaacatgcttagggaggagggtgttggtgcctgttacaagggtctatcagcaggactgctcaggcaagctacatacactactgctcgattgggatcattcaaaatgttgacaaacaatgcatttgaagccaatgatgggaagcccttacctatatatcagaaggctttgtgtggactgactgctggtgctatt

SEQ ID NO: 202160 - DNA, 157 bp, Gossypium hirsutum
ggatcatatacggtgcagcagaactacactagcttagacgtacatgtagggcagtcatattcggttctgctaaccacggatcagaatgcaagtagcgattactacattgtagcaagtgccaggtttgtgaatgaatcgcaatggaaacgagttaccg

SEQ ID NO: 202161 - DNA, 318 bp, Gossypium hirsutum
taacagcggtcatctcgtgcttaaagaccctaaaggcagagagctatggaggtctcaacgccttactgatggttctcaagtgtcccatgcagccatgctcgacaccgggaacttcgtgatcgcaagcaaaaactcgaccaacatatgggagagcttcaaatatccaactgacaccatcttaccgtcacaagaacttgatatggctgaccatcttttatcaactctggttgaaacacgttacagtaaggggaagtatcagcttcgtttcaataatgaatctttcatactgaatcaaatagatatgttcacagggaaaac

SEQ ID NO: 202162 - DNA, 376 bp, Gossypium hirsutum
  unsure (1)..(376): unsure at all n locations
gaagtctgtgacgtggtcctncatgctgatgccatccacagaggtggtgggcagatcattccaacagctaggaggggtttctatgcttctcagctcacaggccaaccaaagctttctcgaaacctgtttacttgggtcgagatcaaagccccggagcaggcacttggtggtattacagttttcttaaccagaagcgtggacatgtatttgaggaaatgcaaagacctggcactccactttacaacatcaaggcataccttcctgtcattgagtcctttggattctctagcactttgagggctgcaacatcaggacaagctttcccacaatgtgtgtttgatcactgggatatgatgtcatcagacccattggaacc

SEQ ID NO: 202163 - DNA, 409 bp, Gossypium hirsutum
aggcgttcaatgctactgaagaagagtttttacatttggtgaagcaatcattgcccgtaaggcctcaaattgcttcagttggatcatgttgccttgttggtgcgatatccaacgatgtgttgtatgtggcgaatctcggcgactcgagagcagatcttggcaaaagagtttcggaggataagaaaaacaaggttgtggcggagaggctatcaacagatcacaatgttggagttgaggaagtaaggaaagaggttgaggctcttcatcctgatgattcgcatgtcgtggtttacactcgcggagtttggaggattaatggcataatccatgtacttaacaaaatctgttggcaaacccaattataagagttgtaagttgaatcagccaggctgaagaacaatttatgttt

SEQ ID NO: 202164 - DNA, 348 bp, Gossypium hirsutum
gaagtctgtgacgtggtcctccatgctgatgccatccacaagagtggtgggcagatcattccaacagctaggaaggttttctatgcttctcagctcacagccaagccaaggcttatcgaacctgtttacttggtcgagatccaagccccggagcatgcacttggtggtatttacagttttcttaaccagaagccgtggacatgtatttgaggaaatgccaagacctggcactccactttacaacatcaaggcataccttcctggcattgagtcctttggattctctagcactttgagggctgcaacatcaagaccagcttttccaccatggggggttgaacaatggga

SEQ ID NO: 202165 - DNA, 426 bp, Gossypium hirsutum
ctagcacatttcattgaatctttgaaagaagctgcatcagcaaaggaagtggtaaacattagtaagaagattggggcgcttaatgaagagatgactttgagaatggttttggggaatgtgaagaagtatgagggatttaacctcaaggagcttattgatgagcttactcacatagcaggagctttcaatcttgcagatgttgttccttttctgggtgctttcgacctacagggactcaaagcacgtacaaagaaactcggtgaaaaacttgacaaagccctcgagacgatcattgacgaccatgaacaacataagcaggatgatttcgtcggtacactgcttaaagagttaaatcaaccaatgaacaatgatggtgatataatggatcggaatagcatcaaagccataacaatagatatgatggtg

SEQ ID NO: 202166 - DNA, 415 bp, Gossypium hirsutum
  unsure (1)..(415): unsure at all n locations
gtcagaataaagcaataacatgtgcgaactgcttaggagcaactgcgaccgaggtgttatgcttgctgatgggaaaaccagattttccatcaacggcaagcctatctaccactttgttggaacctcgacttttagccaatatactgtcgtccatgttggccaggttgccaagatcagtccaaccgccccgcttgataaagtctgtcccattagctgtgggatatgtacaggttttggggccactgtaaatgttgccaaacccaaaaagggtcaaactgttgcagtttttggactgngtgccgttggtcttgccgccgctgaaggtgcaagggtttgtggggcttctcggatcatcgctgttgatgtgaaccccagaagatttgaagaagctaagaggtttgggattacagaattt

SEQ ID NO: 202167 - DNA, 380 bp, Gossypium hirsutum
  unsure (1)..(380): unsure at all n locations
caaccacaaagatcttaaaaattcacagacatggaggtagaaatagaagcttcagagatggaagtagaagaacaaccacctattcccagttcaaccaagaaatttggtctaaaggattacatacaaaccaattacggcgacgattatgttttccaaatcgtccccagggatgattggacttccatggcggtatctttatcgactaatgcagtgaaactttactcgccaatgacgggtcaatattttggagagtgcaagggacattcctcaactattaatcatatatctttctctggtggttccaatctgcatgttttgcactcttgttcctctgatggaactatcnaggcgtgngataccagaacttttcaacaggtatc

SEQ ID NO: 202168 - DNA, 414 bp, Gossypium hirsutum
  unsure (1)..(414): unsure at all n locations
ctcatactttttctttgaagtttagtcaagaaggacccgcaactcctgggcaacctgttaaagaaccgatgttcattccagtagctgttggtctactggactcaagtggaaaggacatgattctatcttctgtgtatcacaatgggacattgcagtctgttgcaagcaacaatcaaccagtcctcagcactgttcttcgagtaactaagaaagaagaagaatttgtgttttgtgatatattcgagcggccaattccatctctactgcgaagttatagtgctcctgtaccgcttgaatctgatctctccgacagtgaactatttttccttctcgctcatgattcggacgagtntaatcgctgggagtccggacaggtgctggcaaggaagctcatgctcagcttaaatgctgatt

SEQ ID NO: 202169 - DNA, 427 bp, Gossypium hirsutum; identical to SEQ ID NO: 191454

SEQ ID NO: 202170 - DNA, 379 bp, Gossypium hirsutum
aagaaaaaggagaccataaaccactggtatagatggaaactacgaagaaaacaatggacattatcacgattgatagcttctaattaaagtttggaaagtggttatgaataattccagccaaaagaatggaaattacaagcatattaccagaagagtgcctgtgtctgatcatatcgatgacttcgccggaagatgcatgtcgatcggccatgatttctcacgcttccagatcgggtgcaaaccgtgattaagtgtgggaaaaggttcttcccgctgaatggagatcaatcattttaaggtcattatcattattcatggttttccttggaaaaaaaggatgattatttccaccttggttttaatccaattttaattcaaa

SEQ ID NO: 202171 - DNA, 426 bp, Gossypium hirsutum
ggtaagttcaagcttggaagaaagattgggagtggatcgtttggagagctttatttaggggtaaatgtgcaaactggagaggaagttgctgtcaaactggaatctgtgaagaccaagcatccacagcttcattatgagtcaaaattgtatatgcttcttcaaggaggaactggtattcctcaccttaagtggtttggagttgaggcggattacaatgtcatggtaattgaccttcttggacctagtttggaagatctgttcaactactgcagtaggaaactctcattaaaaactgtgttgatgcttgctgatcaattgattaatagagtagaatatatgcattcgaggggttttcttcaccgtgatataaagcctgacaacttcttgatgggcctaggacgcaaggcaaatcaggtgtatgtcatt

SEQ ID NO: 202172 - DNA, 303 bp, Gossypium hirsutum
ccgcagcctaaaaaacacaccttatggcagacgacttcagattttactgatggtcaagctagcatacataggcaacattttctgcaatgtccccaagggttggtaaacaaacattttgaaaaactggtccaatgtgatatgcgtttgaactgtttaagcagacagccagagataattttggattcaccgtactttgaatcacgaagttcttgttttgaggatcccagtgaacctaaagggcatgactatggccaaagggagactggtaaaggatctactagctctggcttccaaaatatagca

SEQ ID NO: 202173 - DNA, 403 bp, Gossypium hirsutum
gttggcaatattcagcaaagggttagtgaatccaccccaagagctgcagaatccagcttcactcacttcatcaatgaagcctaaacttccctttgaaatccttaatgggtttgtctcttcaaatcccaccaacgctttttcaatgcggtttggatcttcggcttctttggcttatgttccaccccacaatccttccttcacttataaaaggttgtttagtggagtggatgaaatgcattgcatattcatgggtaatttgaacaatctatgtagcctcttaaggcaatatggtctatcaaggggcaccaatgaagcaatgttcatcattgaggcatataggacccttagagaccgtggtccatacccaccacatcaagtcctcaaccacattgaaggtagctat

SEQ ID NO: 202174 - DNA, 430 bp, Gossypium hirsutum
ctttctttgttttttcttttttacaaatggatgcttcacagaaaactattcttgttactggtggtgctgggttcattggcactcacacagtggtacagctactcaatgaaggttttaaagtgtcaattattgacaatcttgataactctgttattgaggctgttgatagggttaaggaattagtgggtcctgagctctctaagaaactccagttcaacttgggtgatttgaggaacagggatgacttggataagcttttctctaagacaaagtttgatgctgtcatccattttgctggccttaaagctgttggggagagtgtcggtaaccctcgtcggtattttgacaataatttgattggcactatcaatctgtatgagatcatggccaaatataattgcaaaaagatggtattctcatcctccgcaac

SEQ ID NO: 202175 - DNA, 411 bp, Gossypium hirsutum
attatccaaacgatggctatcttttcttcatccatggctgctatgctcattctagggctcctcactgcaaacttggatcctactgttgcgcaaattggtgtttgctatgggatgcttggcaacaatctcccaaatgcaagggaagtcatcaatctttacaaatcaaacaacatcaagcgaatgagactctacgatccaaatcaacaagcattacaagctcttagaggctcaaacattgaagtaattttaggtgtcccgaatgatcaacttcaaaaccttgctaacccttccaaagcacaatcatgggttcgatcaaatgttgtagcctattggccaagtgtccggtttcgatacattgctgttgggaacgaagtcccttcatcatcttcattagctcgatttgtgttgcct

SEQ ID NO: 202176 - DNA, 404 bp, Gossypium hirsutum
aaaacacatcagtggtctgtcaaacttgaggagtctcagttttcggagaaacagtgcaatcactgcacaaggaatggcctagtaaacctgatgaagctggacctggaaaaatgtcctgggattcatggggggcttattcacatcaaaggtttgacaatgttagagtctcttagtattaaatggtgtaattgcataacagatgctgatatgaagcctctttcagggcttacaaacttgaaaagcttacagatttcctgtagtaaggttacagattttggcatcacttatttaaaaggtctgcaaaatctttctgttttgaacttggagggctgcccagttacagcttcgtgctttgatactctttcagtgcttgtatctctgttatatttgaatcttagcagatg

SEQ ID NO: 202177 - DNA, 426 bp, Gossypium hirsutum
gttccatccatcaaaccatataatataatattccttatatgtatatatatatattattctcttgtttctttgaattatttcccaatattttctcattatctatttcttctctaattccttagaacacccttttgactcttttacagcttttgaactttctctttaatttgatttcattttttgttcatcttatttcatagatccaatacttacttctttcaacgtattaaagaacaaaatattgaattgaagctctagatctaaagcatatattggagccatgtcttttattggtacccaacaaaaatgcaaggcttgtgaaaagactgtttacccagtggaacttgtatcagtagatggggttcctttccataaatcttgcttcaaatgcagccattgcaaagggacattaaagtggggtaatta

SEQ ID NO: 202178 - DNA, 377 bp, Gossypium hirsutum
tgggaggttttgggattgggatggtgtactacggcatgccattaggccttggaaatctatccgtgaatctctatttgggcgtcacattaaacgccttatccgagttgccagcgtcactcattacattcttccttatagggaaaatgaaaaggaaagactcattgttgggtttcacaatattaagcggggtgtgcagcgtgttgtgtgtggttgtggggaaggtgtcgccaagtttacagatagcaatggagctgatatccttcttcagtgcctgctcggccttcaacatgtcactgatatacacattagagctggtccccacatgcgtgaggaaactcgcaatatcaatggtgaggcaagcactggtgtttgggggg

SEQ ID NO: 202179 - DNA, 425 bp, Gossypium hirsutum
tggaaatgctgtgcctgtatggtacaacatggtcaatcaaggtcttgttaatgaaccagttttttcattttggcttaaccgcaatcctgaggatgatgttggcggagaagtggtttttggcgggatggatccaaaacattacaagggggaacacacttatgttcctgtaacacagaaaggatactggcagttcgatatgggtgatgttctgattggtgaccaaacaactggactttgtgccagtggctgcagtgctattgttgattccggaacttccttgttgactggacctacggctattattgctcaagtcaatcttgctattggtgcaacaggggttgtaagtcaagaatgcaagactgtagtttcagaatacggagaaacaataattgacttgctattatcgaaggaccaaccactgaaag

SEQ ID NO: 202180 - DNA, 167 bp, Gossypium hirsutum
gcgagcaagaggcaaacaataggcttaccaggtatggtagagatggttgcaactatatgttcaacattggttctcaaataaatgatatgagccggttgattgaaagacaagcacgatattttattgatgcatccaaatacggaaatgtttcccgggtcatcaatcat

SEQ ID NO: 202181 - DNA, 419 bp, Gossypium hirsutum
gtgacttcattccattgctacgacccttattgagagggtacttgaacaagtgcagggacttgcagaccaggaggctggccttcttcaacaactattatgttaagaaaagaagggaaataatggctgctgagggggacaagcacaagataagctgtgccattgatcacattatagatatgctcaaatgaagggagagattagcgaagaaaatgtgctctacattgttgaaaacatcaacgttgcagcaatcgaaaccacactgtggtccatggagtgggccatagctgagctggtgaaccatccccacgttcagcacaggatccgccaagaaatctcccgagtcctcaacggagaggctgtgaaagaatccaacctccatcaactgccctacttgcaggccacagtgaaagagacattaa

SEQ ID NO: 202182 - DNA, 418 bp, Gossypium hirsutum
ggacggaattcaacacaaaacggtgattgtcaatggcatcaacatgcacatagccgagaaaggggaaggtccattgattctcttccttcatggcttccctgagctctggtactcgtggcgcaaccagatcaacggtttagccgccctcggctaccgtgctttggcgcccgacctccgcggttacggcggaacagatgcaccagattccgtcgccgattacacttgctgccacgtggtgggagacctcatcgcgcttctggacacagtggcgccgccggagaaggaggataaggtgtttgtcgttgggcacgattggggtgccatcattgcttggtacttgtgcttgtttagaccggaccgggttaaagctttgttcaatttgagtgtgccggttattccttatgatcctcggtttaaa

SEQ ID NO: 202183 - DNA, 404 bp, Gossypium hirsutum
  unsure (1)..(404): unsure at all n locations
gagaaaattgaatcatgtgaaaaaagttattaaaggaaagggccattgaaggtagtgccctgggtgtgcttaaatggaaatggatggcttggttcatgaattttgtgaatgggagaattggcataatnccgagcataggagataagacaggctttgagggttattgctgagcgagttagtgatgctgggtatgaatctcangtttctgatgtgttacacaatgttggtaatgaagagaaaggaatttatttgtgtgagcatagtgagaggcttgctattgcttatggaattttaaagacgaaagcaccagtgccaattagaatagtaaagaatctaagagtttgcatcgattgtcatgaagtgacaaagatcatcagtaaaatctatgagcgtgaaataattgt

SEQ ID NO: 202184 - DNA, 402 bp, Gossypium hirsutum
gaagagttcaaagaagcaccaaatttacagcaaggaattccaggctatgttagatggtttagatgaagaagacagcttagaagaaggtggtcaagcaacagagaagaaaaggcgtttatctatgcatcaagttaaggctttggagaagaatttcgatgtgggaaacaagttagaaccagagagaaaagtgaagttagctgaagaattggggttacagccaaggcaagtggctatttggttccaaaaccgacgtgctcgttggaagaccaaggtgttggagaaagattatgcaatgcttaaagctaattatgatgctcttaagcttgatcatgacaatcttgaaaaagaaaaactgggtctaattgcaaaggttagtgtttatatttcaaaccccatttttta

SEQ ID NO: 202185 - DNA, 386 bp, Gossypium hirsutum
gcaaagccgcctcttcttttccactggactttgttttgatccgtagcttctcctcttacataaattaataaagcagtagtggcttttatggagaattatcaaatgttcttccctatctcggccccatcaacagcagctcaatcattaccgttaaacatggcacctaattcccaagcttttaacagttttcatgggaattcggttgatgggttcttaggtttgaagagtaccgaagacttgattcagaaaccagaagctaaggacttcatgaaatcaagtcaaaaaatggaaaagaagattaggaagcctagatatgcttttcaaacaaagagtcaggttgatatacttgacgatggatatcgttggaggaaatatgggcaaaaagc

SEQ ID NO: 202186 - DNA, 416 bp, Gossypium hirsutum
caggctcattgcatcccttcctatttctcttccctcaatagtcaaaagcttcttctttctttctttttctgtgcgtgcactctcaaaccacaacaaaccaagatgagtgaagaagataaaaatgaagctaaggtagtggaaactccacgcaaaccaccccgtctgaacgagaggattctttcgtctatgtcacggagatcagttgctgcacatccttggcatgatcttgagattggacctggagctccagcaattttcaactgtgttgttgagataccaaaaggtagtaaagtaaagtatgaacttgacaagaagacaggattgattaaggttgatcgagttttatattcatcagtggtctaccctcataactatggtttcatccctcgcacactttgtgaagacaatgatccctt

SEQ ID NO: 202187 - DNA, 420 bp, Gossypium hirsutum
ctaatcatgaactgcactgttggagtagtcagaactcgccttgagggaccaaaactgtcttctattcctgtaccgccatcagacatgggtcagaatcttagagctttgttagaatccgaagttgggtgtgatataatgtttcaagttggtgatgagacatttaaagcacataagttgatccttgctgcacgttcacctgtttttaaagcacagtttttcgggctcgttggagaccctaacttggataaaatagtagtaaaagattttgagccttctatcttcaaggcaatgctcttgtttatttataccgacaagcttcctgatgtacaagaaattgtagactccacatctatgtgtacatctgccaacatggttcagcatcttttggctgctgctgatctgtacaatttagatagactc

SEQ ID NO: 202188 - DNA, 386 bp, Gossypium hirsutum
atacttcaaaagctcatctgtcaccccagagccccttctctccgccgaatctcctttttcccccgtaaaaaatgtctctggtggccaacgaagattttcagcacattttgcgtgtcctgaacaccaacgttgatggaaagcagaagattatgtttgctttgacctccatcaagggtatcggaaggcgttttgccaacattgtttgcaagaaagccgatgtagacatgaacaagagggctggtgaactgactgcacaggaattggacaatctcatgacgattgtggcgaacccgaggcagtttaaaatcccagattggtttttgaacaggcagaaggattacaaggatggaaagtattcccaagttgtgtccaatgctctcgacatg

SEQ ID NO: 202189 - DNA, 414 bp, Gossypium hirsutum
ctgaaatctgagtccaggacataaaatatgaattcaaatcacttgcttcttgaagagcccataagaatggcttccattcttgagccatcaaagcctagtttctttcctgcaatgactaaaattgtggggacacttggtccgaagtcgcgatctgttgaaataatatccgattgtcttaaggctggaatgtctgtggcgaggttcgatttttcgtggggtgatattgaatttcaccaagagacattggaaaatttgaagactgctgttaaaagcactaggaagctttgtgccattatgcttgatactgggggtccagaattgcaagtagttaataaaacggagcaccccatttcccttgaagcagatacaaaagttatcctcactccagaccaagataaaccagctacttcaaat

SEQ ID NO: 202190 - DNA, 408 bp, Gossypium hirsutum
  unsure (1)..(408): unsure at all n locations
cccgatccaaacgtgtcgtcacacctcctgttgatgcaaccacaaattggatttggcagcttgctaaggcccacgtttgctccaatgatgctggtgttcaccaattggttaaccactggttacgaacacatgcatgcatggagccttttatattggctgcacataggcaattgagcgcaatgcacccgatctttaagcttttggatccacacatgagatatacgctagagatcaatgccctagctcgccaaagcttgatctgcgctgatggtgttatcgagaactgcttcactcccggtcgctactgcatggagatgagtgctgctgcttatncgagccattggcgctttcgacaggaaggcctgcctgcggatctaatncgaaggtaaaatactgagtaatcttttg

SEQ ID NO: 202191 - DNA, 374 bp, Gossypium hirsutum
gttggcaatattcagcaaagggttagtgaatccaccccaagagctgcagagtccagcttcactcacttcatcaatgaagcctaagcttccctttgaaatccttaatggttttgtctcttcaaatcccaccaacgctttttcaatgcggtttggatcttcggcttctttggcttatgttccaccccacaatccttcctccacttataaaaggttgtttagtggagtggatgaaatgcattgcatattcatgggtaatttgaacaatctatgtagcctcttaaggcaatatggtctatcaaggggcaccaatgaagcaatgttcatcattgaggcatataggacccttagagaccgtggtccatacccaccacatc

SEQ ID NO: 202192 - DNA, 415 bp, Gossypium hirsutum
ccaagagaattacattgtttcaaaggaaatgggactgcaagtgaggctaattagaagaatgactttgatacggctattcaacattacaccacagcaatggagattgctgatgaagatatctcatacataaccaatctggctgctgcctatttgtaaatgggcaagtctggagactgcattaaggattgtgagaaggctgctgaaagaggttgagagctcagagcagactataaaatgatagcgaaagctttgactaggaagggaactgcttcggtgaagatggcgaaatgctcaaaagattatgaaccagccatcgagactttccagaaagctcttactgagcatcgcaatcctgacacgttgaagaaactaaatgatgctgaaaaagccaagaaagaactagagcagcaagaat

SEQ ID NO: 202193 - DNA, 358 bp, Gossypium hirsutum
ggacattttcttggccaagattgtggatatctcagggcatgcactaactattgaggtaacaggagatccagggaagatggctgctgtgcatagaaatttaagcaagttcgggatcaaagaaattgctagaacaggaaagattgctcttagaagggataaaaatgggtgcatatgctacattctggcgatgttcatcagcttcatatcctgatcttcaatacgcagtgcctgattacgctgttgcttggactcatatgcattattggttccccacagaaattcaaggcttatggggagacttctatccggtggagccgcctgatggctatacaagtaatcaagttctagatgctcattg

SEQ ID NO: 202194 - DNA, 407 bp, Gossypium hirsutum
gccgtttccgtctgcggtggctgatcggagggtcgggattacagggccggtggagaggaagatgatcatcaacgctcttaactcgggagctaaagtgtttatggctgattttgaggatgcactgtcaccaagttgggaaaatcttatgagaggtcaaataaacttaaaagacgcagtggaagggacaataacgttcaacgacaaagcaaggaacagggtttacaagctgaataatgaaatagcaaagctatttgttcggccacgaggttggcacttaccggaggctcatattttcatcgacggggagcctgcaactggttgtctagtggattttggcctttatttttaccacaattatgccactttccgcaacactcaaggtcaaggctttggacccttcttttatc

SEQ ID NO: 202195 - DNA, 386 bp, Gossypium hirsutum
gttaaggaaagtatgcgttatcaagatgcttagcagtgctactttggataaagtatatagtcttcgccgtcaagaagtacgagaaaccataggttatttatatagtaaggccggttcgcctgtaaacgtgggagagcagatgtttttaactatcttgaatgtggtgaccaatatgatatggggcgggtccatggaaggggaggccagggcgagccttggtgcagagttcaggcaagtcatctcagaagtaacagaacttttgggtctacctaatgtttcggatttcttcccggcgttggccccgcttgatttgcaaggtgcagtgaaacgtgtccgaaaatcaacggagaagttggacgcaattattgataagataatcaatcaaa

SEQ ID NO: 202196 - DNA, 422 bp, Gossypium hirsutum
attttctctgagaagctgaaaaatggcggaatcggtggagttgccaggtcgtttagcaattcttccattcagaaacaaagttttattgcctggcgcctttattcgaattcgctgcacttcacagagcagtgtaaaattggtggagcaagagttatggcagcgagaggagaaaggattaataggaattcttccggttcaagatgctgctgagacgacctccatggattccatgttatctcaaggtgttggaagtgaatcatgtgagcgaagctcgaacgttcaggttagcacatctgatgctcacatggttgatgggaaaaacccttcagatgtcattcactggcataacaggggagttgcagcacgagctttgcatctatcaagaggagtggagaaaccaagttggagggttacattcattg

SEQ ID NO: 202197 - DNA, 402 bp, Gossypium hirsutum
ctcttttacactcccttcatttttggtctttgaaaccccataagcccttttcactcctttttatactctcattttacgtttatttcttctttctttcatagatccaggccttcttcttcttcttcttcttcttcttctatcaaagttaatataggcaaatataagagaagaaatcgaattaaagtttatctgtggaactagataaagaacagtacgatttgttttgatccaaagcacattcgagccatgtcgtttattggtacccaacagaaatgcaaggcttgtgagaagactgtttatccagttgaacttttgtctgcagatggagttccttaccataaatcttgcttcaagtgcagtcattgcaaagggacactaaagttggctaattactcctcaatg

SEQ ID NO: 202198 - DNA, 391 bp, Gossypium hirsutum
gccattggtgattgaattgagtttgccacatgcggatggggatcaactaggtgctgttagcaaggtttacacacctacagaacatggagttgaaggttcaatatggcagttggctaaagcttatgttgctgtaaatgactctggtgttcatcaactcataagccattggctgaacactcatgcaacaatggagccattcgtgattgcaacgaaccgacaacttagtgtagttcatccaatttataagcttctctatcctcacttccgggacacgatgaacatcaatgcttttgctaggcagattctgattaatggaggtggtgtcctggaattaacagtttttcctggaaagtatgcaatggaaatgtcatctataatttacaagagttgg

SEQ ID NO: 202199 - DNA, 406 bp, Gossypium hirsutum
aaacatggcattgcttcacacgatatattgagtaccgccgttgtgtagctgcaaaaggagaaggtgctccagagtgtgataagtttgcaaggtattatcgtgccttgtgtcctggagaatggatagatcgatggaatgagcaaagggagaatggtacttttccaggtcctctctagatgagatggtacccctattgttatccgaaaaatccctgttttgacttttttttccctctgttatatcaaaccgtaacagttgaaccacagatgaatttccaggatgaaagcagaatttctcaggaaatatccaatttgaaaaggatgagttaataataaaatttggcgtgtaccctagcttagactagatcaatggaccatacaattgtgttgctcataaatggaaattc

SEQ ID NO: 202200 - DNA, 386 bp, Gossypium hirsutum
gggaagcaatatgaatcttcaacaaaattcggacaggatgaaggagaagacatcgtaccaaaaactttccctgtttgtgacgatcgtcattcagaattgattccctgcttagacagacatttaatataccaaatgagattaaagctggacttgtctgtgatggagcactacgaacgtcactgccctcctcctgaaaggagatacaattgcttgattcctcctcctccaggatacaaggtcccaattaagtggcctcaaagcagagatgaagtatggaaggcaaatattccccatacacaccttgcacatgagaaatctgaccagaactggatggttgtacaaggtgaaaagatagtatttccagggggaggaacccattttcacta

SEQ ID NO: 202201 - DNA, 413 bp, Gossypium hirsutum
cagatcctcaaaaatccactccttttgcttcccatggtcttggtggatcagatctggttttgcagccattgaagaagctcaatcaggtcaagaaaaggccaggtggggcttatgcatcactatcagaaggagctgaatatcactcccaaagaccagcaacgcctctcttggacactataaactatccaattcatatgaaaaatctctctgtcaaggaactgaaacaactatctgaagaactgcggtctgatgtggttttcaatgtttcaaaaactgggggtcacttgggttcaagccttggtgtggttgaactcactgtggctcttcattatgtcttcaatgcccctagagacaagatattgtgggatgttggtcatcagtcttaccctcacaaaatcttgactgggagaaga

SEQ ID NO: 202202 - DNA, 411 bp, Gossypium hirsutum
agacatctgctttgcttgcagggttactagggaacggctaattggctttggatgcagtctccatctgcatgaccatactctggatgggtgtttatgaattccgtggtgctcaatgccttaacaagtgtaagagttgtaaacgagctacgagcgggacatccaaaatcgacagcgttctcggtggtcataatgacggtacttacactcataatctcagtggctagacgctataataataatggctatacctgatgtcattagctacgccttcacagagggcgaagaggaagcgctagctgtctcacatctctggacgcttctagcattaacccttattcttaactgagttcagcctgttttgtccggtgtggcacttgaatgtggatggcaaactttagttgcatatgtcaa

SEQ ID NO: 202203 - DNA, 414 bp, Gossypium hirsutum
gttaaggaaagtatgcgttatcaagatgcttagcagggctactttggataaagtatatagtcttcgccgtcaagaagtacgagaaaccataggttatttatatagtaaggccggttcgcctgtaaacgtgggagagcagatgtttttaactatcttgaatgtggtgaccaatatgatatggggcgggtccatggaaggggaggccagggcgagccttggtgcagagttcaggcaagtcatctcagaagtaacagaacttttgggtctacctaatgtttcggatttcttcccggcgttggccccgcttgatttgcaaggtgcagtgaaacgtgtccgaaaatcaacggagaagttggacgcaattattgataagataatcaatcaaaggttggaggagaagcaaagtgggcacac

SEQ ID NO: 202204 - DNA, 394 bp, Gossypium hirsutum
agagatagtatgaatcgccaccacgatccaaaccctttcgatgaagaagaagtcaatccattttcgaatggtggttctgtcgcacctgcacgaccactggcatccgaacctttgggttttgggcagaaacatgatgctactgtggatatacctctggattcaatgaatgattctaagaaaagagaaaaggagctcgcagcttgggaagctgatcttaaaagaagggaaaaggatataaagagaagagaagatgctgtttcccaagctggtgtttctgtagatgataaaaattggccaccaattttcccgattatacatcatgatatagctaatgagataccggttcatgctcagaggctgcaatatcttgcatttgcaagttggcttggtgtta

SEQ ID NO: 202205 - DNA, 408 bp, Gossypium hirsutum
gaaataattaaactccaccaccccctcagactctatctggtttttagggcttttctaacttttctgattattttttgataatccagagttcaatcatctaaaagaagccctaaaatctttgaatcaggtctgagcttgtggtttgttaggcctctttgatcaaactaagtttcatgtctgatcttgacgttcaaattcctactgccttcggtatgatttcatcttaacttccaaatatttacctttgtccttgatctgccgcctgtccttgttaataacgtgtgtatttgttgtgttagatccctttgctgatgcaaatgctgaggactcaggtgcgggtgcaaaagagtatgtgcatattcgtattcagcagaggaatggtcgcaaaagcctgacaactgtccaggg

SEQ ID NO: 202206 - DNA, 421 bp, Gossypium hirsutum
ggtgaatcaattaggagagattttatgattatcaacttggcggcgaaattatcaaagttcattccaactcttaactggttgagattggatgagagtgtccagcaatttgctgttttcatgatgtctcaagttgatcttgccagggaagctgccaatttgaaccgttttatatataatttccgaagctggaaagacgtttcttttcctaagcctgtctatccacttgtgcaccctgctgttttagtggaaacatatgaacaaggggaaagtgttgcacgctatgttgatgaatttgaaggatatgatatggttaaggccaaacttgctcatattggaactcatgcgcttttaaagatgcttttggttgacaacttcattcatgctgacatgcatcctggaaatatccttgttcgggtgtctc

SEQ ID NO: 202207 - DNA, 402 bp, Gossypium hirsutum
catcagcgttacaatcagttgaaaaatggtggagatgaagaggcagcaacccttgttttcgtgtggacggaccgtggttattacaggagaagaaggcctaagattctctctttccttttactttctcttcttgcttgtggcttcatattggctcctcacttctttagcttttcttctgctttatctcatctctatttttttggtgtacaaaatgacggccttgctggtgatttatatgtaaatgctcctctttgttcttcaatctctaatggttcagtttgctgtgacagaagacattttcgatctgatatttgttttatgaaaggtgacataagaacacattctcccagctcttcggttttcctttattcaccaaaaaatagcgacgatgacgcttcaagt

SEQ ID NO: 202208 - DNA, 422 bp, Gossypium hirsutum
  unsure (1)..(422): unsure at all n locations
atgtggtcgaaatgaaatgggatatggagatcgaggaaatcgaagcagttctcgagaaaatctgggacttacacgacaagctcagcgacgccattcactccatttcgcgagctcacttccttaactccatcaaagccctaaaaaaatccgacaagaagaagctctacgacgatgtcgtagtcggcgcggacgataacaggactggcttcgtgttcgtcaaggaatttagaatcgacgatggtgactccgcaattcaagaggccaagagtcttaatgatataagaactgctctcgagaatctcgaggaccagctcgaatttttccacacagtacaaatacagcagcgtgttgagagagatgctgccattgcacgattagaacaaagccggataattctngcattgagaatggctgagcatcat

SEQ ID NO: 202209 - DNA, 406 bp, Gossypium hirsutum
ggatcatatacggtgcagcagaactacactagcttagacatacatgtagggcagtcatattcgtttctgctaaccacggatcagaatgcaagtagcgattactacattgtagcaagtgccaggtttgtgaatgaatcgcagtggaaacgagttaccggtgttgccattttgcgttattctaattcgaaaggaaaggcatccggtcccctccctgatccaccgcaggatgaattcgacaaaaccttttcaatgaaccaagctagatctatcagatggaatgtatctgccagtggtgctcgcccgaacccacagggatcgtttagatatggttcgattaatgtgactgaagtttacgtcttgagaaacaaaccaccagagactattgatgggaaaagacgagcgacac

SEQ ID NO: 202210 - DNA, 399 bp, Gossypium hirsutum
cataaaatcatgggtttctcccatattgatgccttggatggagtaaggtgaggaagaaggggcaaaagcgaattaggcagccacgttttgcttttatgaccaagagtgaagttgatcatcttgaagatggctaccgatggcgaaaatatggacaaaaagctgttaaaaatagtccatttcctaggagttactatcgctgcacaaacagcaaatgtacagtgaagaagagggtggaacgatcctctgaagatcccaccatcgtcattactacatatgaaggtcaacactgtcatcatagtgtcggtttcccccgtggtggactcatcagccatgaagctgcctttgccggtcagtttactcctggagtctctcaattttattattcacaaggggtacagt

SEQ ID NO: 202211 - DNA, 414 bp, Gossypium hirsutum
caacaatccaagatgttgtttcctcccctacttggggttgcttccatattcagtgcttgctgtcttgcaacttcaactttaggagctacacttgcaaaagacgaagtggaagctttggaaagcataggtgaaacattggggaagacaaactggaaatttagcgtggatccgtgcagcagcggagacgagagttgggcaaaatttgcagaaaaaggtgcatactatgttaataatgtcacttgtgattgcagttccagcccctgtcatattgtccgcatagtgctgaagggacaaaatctatcaggcactctcccaccacaggtgaccagacttccttacctgcaagaaattgatctcagtcgtaactatcttagtggctccattcctcgtcaatggggttctatgcagcaactt

SEQ ID NO: 202212 - DNA, 365 bp, Gossypium hirsutum
gaaagctgctggtttttcatactttgacatatgcacgagatgtgaagccaaactatgtgcgtgcttgggcaaacatgggtatcagttacgccaaccaggtttgagtttttgttggatgcatggtccaggattagctgaattcatgcatagtgacgacttgtttgagctaattgctgatcttaaagtgtacattctatcattattttgttctatttgtattttgttagatttctggtgtagtatgataagtccggtattttgtttgattgttattgataaactttttatttggtgggatatatatttatatcatagatgttattcttcttttcaatattttgataatgaattttaattttttttat

SEQ ID NO: 202213 - DNA, 408 bp, Gossypium hirsutum
gaggagttacgagagttacgtggtggttatgaaagtgagcgcgccaatcgcgacgcatcgtgggttgaaacgtgccgcgattgatttggttacggtgttggatattagcgggagtgcgatgaggttgcagatggtgaaacgggcgatgcggttgattatctctttgctcgacgagaaagaccgtttgtcgatcgtgattttctcgtcgagctcgaaacggttgttgccattgaaaagaatgagttccggcggacgacgatcggcgaggaggatcgtcgatgcgttgggaagtaaccgacaagggatgagtgtcaacgacgcgctcaaaaaggcggccaaagtgttggaggatcgtagagaaaaaaacgccgtcgccagtgttatgatcttattcgactgtcatgataa

SEQ ID NO: 202214 - DNA, 417 bp, Gossypium hirsutum
gcgccgccctatttgccacaaaaccctagcgtacatactccacagacattgtcgtttactctcggcatccatggatattgaggctgagatccgtgcactgcagcttgactctgctgaagataataatgccacgctcattcctgaagatgcaaaaccagaagaagttgaaatgacagataaggtggaggaggaaggtatgacggatgaggttgatactaaatctcagccagtccaggctgagccaaaagtgaaagacaaggaagtagctgatatggattgtgcagaagtaccagatgaaatggaatcacaaaagaagcgccacttgaatgtggtctttattggtcatgttgatgctggcaagtcaacaactggaggccagatactcttcctcagtggtcaagttgatgaccgtacgat

SEQ ID NO: 202215 - DNA, 414 bp, Gossypium hirsutum
cttcactctcctttacttttaagttcttttctttgcttgatttcattttgtagccaaaaaaaacatggggttctcactgaaacttcagtattgcctagtttctgtcatggtgctattacctgcagtgtgttactctcaggactatttcgtcaagtccagagcaacttactacggcagtcctgactgcttaggcactccaagtggagcttgcggatttggagaatatggaagaagtgtcaatgatgccaatgtcgccggggtttccaggctctacaagaatggaactggctgcggtgcttgttatcaggttaggtgcactaaccctcaaatatgtgctgataatggggtgaacatagtggtgaccgactatggcgaaggcgacaacaccgatttcatccttagtccccccgcata

SEQ ID NO: 202216 - DNA, 421 bp, Gossypium hirsutum
ccaacatcggactatctggttacctgtctcctgcagtcgcgaacctctcctcgattcgtcatgttaacctcgagaacaactcatttcgcggaacgttacctaccgagctctttggtgcaactaggctgaagagcttggtagtttcaggtaattccttatacggaccgcttccgtcccaagtcgggaaccttaagaacctacaaacctttgatgtttcacggaatttattcaatggctccgtaccttcgtccatagttcaatgcaagaaattaactacacttgttctcagtcaaaattatttcaacggctcactccccgagggatttggaaacagtttggttagcctacagaagctcaatctttcttacaacagattcgacggttcaatccctggtgacattggaaacttgtcgaatttgca

SEQ ID NO: 202217 - DNA, 420 bp, Gossypium hirsutum
  unsure (1)..(420): unsure at all n locations
agaaaccttatgttgtagagcttgatctccgagatgatggagctgaaatccagtatgtcatcctggatttggtaggtcgtggaactgttccacaagtgtttgtgaatggcaagcatattggaggctctgatgatctcagtgatgcagtccataatggtacattgcaaagccttctagctgcaagttaatgtaagaaagaaggaaataaattgacttgtgaactgtaaagctgcctgtggattagaagatcatttctgggttgtgaacttagtacgttcactgcaagattttgttgagtgcgctgtgataatggcatgtctctttgaggttatcttatatttcatcttcatcatggaagagaatgactatgttttaggtctaaagttcattgtaaatgtangtgtggggagggagcaatga

SEQ ID NO: 202218 - DNA, 385 bp, Gossypium hirsutum
gccggatggctacaaggaagttggggattccggtgagataagagttccttccgttgctccgaaagcgtcaagagcgaagagcgagaggaggggttcgaatcgagggatttattccaattcaacaaaggagaaagggcctgagagcatggaattcacgatggaggaaatattgaaggccactaggaacttctcccctgctttcaagattggacagggtggatttgtgacggcttataagggatgacttgatgatggaaccttcgttgctattaagcgtgcttaacagagtgtatacgataagcatctaggtgtggaatgccacagtgatataggaacactggcactagttgaacacttgcatttggttaaagattgtgggtcttca

SEQ ID NO: 202219 - DNA, 388 bp, Gossypium hirsutum
ccgcatctttgaggtttgatggagccctgaatgtggatgtgactgagttctcagactaacctggtcccatatcccaggatccactttatgctttcttcttatgcccctgtcatttcagctgagaaggcttaccatgagcagctatcggtggctgagataaccaacagtgcttttgaaccctcttcaatgatggccaaatgtgacccacgacacgggaagtacatggcttgctgccttatgtaccgaggagatgttgtgcccaaagatgtgaatgcggctgtggccaccattaagaccaaacgcacaatccaatttgtggattggtgccctactggattcaagtgcggtatcaactaccagccaccaactgttgttccaggaagggacc

SEQ ID NO: 202220 - DNA, 395 bp, Gossypium hirsutum
ggaaagcatcttcaagtttcaagctttgggtttctgttctttttccttcttctttctttctctctctttacatttgggaagcagaaggaaaaagcaaagatgaagcttttgtgggtttgggttgttttaccatttgcttttgctcaactggttactgccttctttgattttaatgaaactgagctgtctcttatcgagtctttggaatatggagtctctaaaatcaattataatcctctcatggttggactcactcttattcatactgctggtgctaaaggagctgtgtgtctggatggaaccttaccggggtatcattggcaccgtggatatggatcaggagcaaatagctggctcgttcaattggagggaagaggatggtgcaacaacattag

SEQ ID NO: 202221 - DNA, 408 bp, Gossypium hirsutum
agaacatggagttgaaggttcaatatggcagttggctaaagcttatgttgctgtaaatgactctggtgttcatcaactcataagccattggctgaacactcatgcaacaatggagccattcgtgattgcaacgaaccgacaacttagtgtagttcatccaatttataagcttctctatcctcacttccgggacacgatgaacatcaatgcttttgctaggcagattctgattaatggaggtggtgtcctggaattaacagtttttcctggaaagtatgcaatggaaatgtcatctataatttacaagagttggaatttgtttgaccaggcacttcttagagatctcaagaaaagaggagttgcagttgattataagagttcaccaaatggtcttcgtttgttgataaa

SEQ ID NO: 202222 - DNA, 399 bp, Gossypium hirsutum
  unsure (1)..(399): unsure at all n locations
attcgccgcacggcatcagtctcatcaggcggngaagaatgtctcacaggaagtttgaacacccaaggcatggctcccttggatttcttccgaggaagcgagcttctcgtcacagagggaaagtgaaggcatttcctaaggatgacccaagcaaaccttgcaagctcactgcctttttgggctacaaggcaggcatgacacacattgtccgagaggtcgaaaaacctggatctaagcttcacaagaaagagacatgtgaagctgttacgatcgttgaaacccctcctatggtgattgttggggttgttggttatgtcaagacaccacgtggtcttcgcagcttgaacaccgtttgggctcagcatctgagcgaggaagtcaaacgtaggttctacaagc

SEQ ID NO: 202223 - DNA, 429 bp, Gossypium hirsutum
tttttgtagttaattatgaactgcactgttggagtagtcagaactcgccttgagggaccaaaactgtcttctattcctgtaccgccatcagacatgggtcagaatcttagagctttgttagaatccgaagttgggtgtgatataatgtttcaagttggtgatgagacatttaaagcacataagttgatccttgctgcacgttcacctgtttttaaagcacagtttttcgggctcgttggagaccctaacttggataaaatagtagtaaaagattttgagccttctatcttcaaggcaatgctcttgtttatttataccgacaagcttcctgatgtacaagaaattgtagactccacatctatgtgtacatctgccaacatggttcagcatcttttggctgctgctgatctgtacaatttagatagactc

SEQ ID NO: 202224 - DNA, 349 bp, Gossypium hirsutum
ctcatcttccgttgtttatacgtttggttgttgttgaagaagtgctactaccatgggtacaaagaagagcgttggggacttgaaggaagctgatttgaagggaaagaaagtgtttgttagagtcgatctgaacgttccattggatgataacttcaacataactgatgacacaaggatccgtgccgctgttcccaccatcaagtatttgatgggtcatggctctaaagtcatcctctctagtcatttgggacgcccaaagggtgtcactgccaagtacagtttgaagcctcttgtgccaaggttatttgaactccttggagtcgaggttaaaatggcaaatgactgtatt

SEQ ID NO: 202225 - DNA, 409 bp, Gossypium hirsutum
aatttattctccaacttctttggaggaaggaacccgtttgatgacccttttatcacacgcccttttggaagcatgtttgattcaagcttctttggccccggtcaaagtccttttatggatatgcatccgactgggtttattgagcgtcaggctccagagccaaagagaccaaggggtctgattattgaagaactaaattctgatgatgagaaggaagaagcagataccgggatgaaagggaatcctaggaagcatggtaggtctaatgccgaaccttatgttgaggttccagatgatgaagctggacaatctgagagaaggaacaggcatttgcagtatatgaatggttacaatggtttgtatcaaaatcagcagcagcaacagcctcaaactagtagttttgtgtttc

SEQ ID NO: 202226 - DNA, 403 bp, Gossypium hirsutum
gtaagttgtgctgatttgcccgttaaaaggcccagggaagacgaagaaaacggggtctcttctgctgctgctgctgttgccatggaaatggaagctgataccaataatacttccaaggaagctgatgggatttcctctgttattcctggatggttctctgagattagcccaatgtggcctggagaggcgcattccttaaaggttgaaaaggtcttgtttcaagggaagtctgattaccagaatgttatggtctttcagtcatcaacatatgggaaggttcttgttttggatggtgtgattcagctcacagagagagatgaatgtgcatatcaagaaatgatcactcatcttccactttgctccattccaaatcctaagaaggttttggtcattggtggtggtg

SEQ ID NO: 202227 - DNA, 425 bp, Gossypium hirsutum
tgataaagaaggcgttcaatgctactgaagaagagtttttacatttggtgaagcaatcattgcccgtaaggcctcaaattgcttcagttggatcatgttgccttgttggtgcgatatccaacgatgtgttgtatgtggcgaatctcggcgactcgagagcagttcttggcaaaagagtttcggaggataagaaaaacaaggttgtggcagagaggctatcaacagatcacaatgttggagttgaggaagtgaggaaagaggttgaggctcttcatcctgatgattcgcatgtcgtggtttacactcgcggagtttggaggattaatggcataatccaggtgtcaagatctattggtgatgtttacttgaagaaacccgatttttatagagatccaatctttcaacgattcggaaaccctgtttcc

SEQ ID NO: 202228 - DNA, 398 bp, Gossypium hirsutum
gatatatttatattatcctcacccactacaaaagaagaagagaaagaaaaagaaatgaagtctataatcgctactttgttgtttgtttccctagttttgtgttcatcatttattcaactctcctttgcctcacctgctgctgctccttcacctgctcctccaagttactgtgatgggaagtgcggggagaggtgtgccaaggctggaatgaaagatcggtgcttgaagtattgtgggatatgctgccaagaatgtaagtgtgttccttcagggacctatgggaacaagtcagaatgcccttgctatcgagacaagaagaactccaaacaccagcccaagtgcccttgaacttcaaactcttctccatcttttaaccttcatatatatatagatatata

SEQ ID NO: 202229 - DNA, 218 bp, Gossypium hirsutum
gcagcttgaagatggtcgcaccttagctgattacagtatccaaaaagagtccaccctccacctagtacttcgtcttcgaggtggcatgcaaatctttgtcaaaactctcactggaaagacaattaccttggaggtggagagttcggataccattgataatgtgaaagccaagattcaggccaaggaaggattccaaccagaccaccaaagatggattt

SEQ ID NO: 202230 - DNA, 391 bp, Gossypium hirsutum
acaggagcaaaatgctgatactccacaaacggtagtccaggaccaacttgatgaggctcaaggactgcttaaaaccaccaactccaccggtcaatcaaaagaggcaagactagctcgggtttgtgctggactttcatcccgtctccaagaatacaaatctgagaatgcacagcttgaggagcttctaattgctgagagggagctgagtaaatcttatgaggctcgtataaaacaactgcagcaagatttatctgtatctaagagtgaagtaaccagggtagagtcaaatatgcttgatgctttggcagcaaagaactctgagatagaggcacttgtcaattctatggatgcactaaagaaacaagctgctttatctgaaggaaacctggct

SEQ ID NO: 202231 - DNA, 424 bp, Gossypium hirsutum
gtagctctaactacctccgcctgtctttcaacgagaagagaacaagaaaagaaactaagaaatggcacgcaagaagatcagagagtacgattccaagagattgttgaagcagcacttcaaaaggttttccgcctacgatttgcccatcaaatctgcacaagtgacggagtcaactgatttcaatgagctagtagagaaggagccatggcttttgtcgcagaaactggttgtcaagcctgatatgttgtttggaaagcgtgggaagagtggtttggttggcttgaatcttcatttcgctcaagttactgcatttgtgaaagagcgcctcggcaaagaggtggaaatgagtggatgtaaaggacctgttacaacattcattgttgaacctttcatccctcacaatgaagagtactaccttaacatc

SEQ ID NO: 202232 - DNA, 410 bp, Gossypium hirsutum
ctaagatattcaaccaccatgaatgattcttcactggtctgcagttcatcaaatcacgaagaagaagctgacgttttgcaagccatgcatttagcttccatttcatcactccctttcactttgaaagtcgccgtcgatctcggcttgttagatattatagccgaagccgccgacactcctcctggtatggtgtcggttgctgagatcgtctctaagcttcccaccaataatccaaacgccccttccattgttgatcgaatgctcaggcttttggccgctcactccatcttgacctgtgatcaaatcactggccaagatggcctgacccaaagatcgtatggtcttgcatcaatcggtaaatacttcgttcaaaatgaagatggagtctcctttgctgctttgcttcgtct

SEQ ID NO: 202233 - DNA, 410 bp, Gossypium hirsutum
cgatcatatgccgtgcgaggatcctaggcgtaatagtcagctcagtagggagatgaatttctatagagaaaggcattgccctttgcctgatgaaacgcctctttgcttgatccctcctcctcttggctacaagattcccgttcagtggcctgaaagcttgcacaagatatggcattccaacatgccacacaacaaaattgctgataggaaaggtcaccaaggatggatgaaagaggaaggtccttactttattttccctggtggtggaacaatgttccctgatggagctgcatcgtatatagagaaacttggacagtacattcccataaccggtggaactcttaggacggccctcgatatgggctgtggggttgctagttttgggggttcaatgttaaaagaaggcattt

SEQ ID NO: 202234 - DNA, 419 bp, Gossypium hirsutum
gaggagttactagagttacgtggtggttatgaaagtgagcgcgccaatcgcgacgcatcgtgggttgaaacgtgccgcgattgatttggttacggtgttggatattagcgggagtgcgatgaggttgcagatggtgaaacgggcgatgcggttgattatctctttgctcgacgagaaagaccgtttgtcgatcgtgattttctcgtcgagctcgaaacggttgttgccattgaaaagaatgagttccggcggacgacgatcggcgaggaggatcgtcgatgcgttgggaagtaaccgacaagggatgagtgtcaacgacgcgctcaaaaaggcggccaaagtgttggaggatcgtagagaaaaaaacgccgtcgccagtgttatgatcttatcggactgtcatgataaacagtcacagt

SEQ ID NO: 202235 - DNA, 413 bp, Gossypium hirsutum
agaaaccttatgttgtagagcttgatctacgagatgatggagctgaaatccagtctgtcatgctggatttggcaggtcgtggaactgttccacacgtgtttgcgaatggcaagcatattggaggctctgatgatctcagcgatgcataccataatggttcattgcaaagccttctatctgcaagttaatgttagaacgaaggcaatgaattgactcgttaactgtaaagcttgctgtggctcagaagatcatttctgggttgtgaacttagtacgttcactgcatgattctggcgagtgcgctgtgataatggcatgtctctatgaggttatcttatatttcatcttcatcatggatgataatgactctgttctaagtctaaagctcattgtatatgtaagtgcggagaggga

SEQ ID NO: 202236 - DNA, 392 bp, Gossypium hirsutum; identical to SEQ ID NO: 190803

SEQ ID NO: 202237 - DNA, 446 bp, Gossypium hirsutum
taccggtttcggaattcccggcggcataagttgtggctacgaggacaagactgaatggggaactgagattgggtggatctatggttctgtgacggaagatattctcactgggttcaagatgcacgcacgaggctggcggtcgatctactgcatgcctaagcggccggccttcaagggatcggctcccatcaatctctcagaccgtctgaaccaggtgctccggtgggctctcggttcagtggaaatccttttcagccggcattgccccctatggtacggctacggaggacgcctgaagttcttggagagattcgcctacatcaacaccaccatctacccgctcacgtccctcccgctcctcatttactgtatcctgcctgccatctgcctgctcacggggaagttcatcatcccagagatcagcaacttcgctagtatctggttca

SEQ ID NO: 202238 - DNA, 412 bp, Gossypium hirsutum
caaacttcgatgtgcaagagctcaaacccgggaatctaaatgcatctgatttgagtgtggatcgaatgagggccatccaacaaccaccttattctattaagggagaagttgtcaataatttggactttatgcgaaagaggaaaccaagcaatgattcaaacatcatggaacataagatctacaaatgcgagttcgtccaatgtccctatagtgaacatcgcttaggttttcatgacaggattgccagggacaatcatcaattaacatgtccgtatcgaaactcctctgcactgtttagtggttcaagttttaatgttaacgaggtgaaacctgtaattttgcctcaagcatttgcgcaatccaagccaactgcaacagcggttacttccgtctcaacaccatttgatctttc

SEQ ID NO: 202239 - DNA, 393 bp, Gossypium hirsutum; identical to SEQ ID NO: 190794

SEQ ID NO: 202240 - DNA, 416 bp, Gossypium hirsutum
tgagatttgccgtctttttgatcaaaatttcagagaacattgacatgaggtgcgtactggtggtgataaggtttacaatgttttcgacaaccaacttcctgctgctttgaaaaggttgcaatttgacagacaactatcaatggagaatattaggaagctcgttactgaagctgatggctatcaaccacatttaatagctcctgaacaaggatatcatcgtttgattgaatctactttagttactatcagaggtccagctgaggctgctgttgatgcgactcattccattctgaaggatctggttcacaaggctatgagtgaaactccaacgtcaggggattttcaaggggattttcaaggaaacaacagaccacctgtataatgcaaccactcaggagcaggaaactactttgaat

SEQ ID NO: 202241 - DNA, 424 bp, Gossypium hirsutum
ggcaggtgaaaaaatatcaccaattgaggtagacgcagtgttattggctcacccagatgtagcacaggcagttgccttcggtgttcccgatgagaaatatggcgaggaggtaagaaaatccaattcatggatttgattgttttttgttttgaatggctgtttggttgtgtaatttgtctaaaagtcggtgtcaaaaaattgcagataaattgtgcggtgattccaagggaaggagtaagcttggatgaagcagaaatcacgaaatattgcaaaaggaatcttgcgagtttcaaagtacccaagaaagttttcatcacggattccgtgccgaaaacagctactggaaaaatccagaggaggatagtagcagagcatttcttgactcaaatgtctgccgctaaagtacccaaatttggagcttaaa

SEQ ID NO: 202242 - DNA, 393 bp, Gossypium hirsutum
gaaaggttcgagaaagaagctgctgagatgaacaagaggtcattcaagtgtgcttgggtgcttgacaagctcaaggctgagcgtgagcgtggtatcaccattgatattgccttgtggaaatttgagaccacgaaatactactgcactgtgattgatgcacctggacaccgtgactttatcaagaatatgattactggtacgtcacaggctgactgtgctgttttgattattgattccaccactggtggttttgaggctggtatctccaaggatggtcagactcgtgagcacgcattgcttgcttttacccttggtgtcaagcaaatgatttgctgttgcaacaagatggatgccactacccctaaatactcgaaagctaagtatgatgaaatt

SEQ ID NO: 202243 - DNA, 444 bp, Gossypium hirsutum
gtaccggtccggaattcccggggggacaatgataactaccggaaactctataccaaatgtttattgtcaatgctggtccgggtttccggctactagggaacactgtgaagtcctttcttgatcccaaaactaccgccaagatacatgttcttgggaacaaataccaaagtaagctgcttgaaataattgacgccagtgaattgccggaattccttggtggcacttgtacctgtcctgaatacggaggctgccttaaggctgaaaagggaccatggaaggacccaaacatacttaagatagtccaaagtggtgaggttcattgtgctcgtcaaattgtaactatttccaatggtgaagaaaaatttattacttatgccaaaccgaagcaccattcaatgcgagggagtgacacatcaactgctgagtctggctcagaagctgacg

SEQ ID NO: 202244 - DNA, 403 bp, Gossypium hirsutum
gagcaggtatggagaatctgagagctgctaagaaggagttgaacaaaacagaagatgatttgaagtctcttcagagtgttgggcagatcattggtgaagttctcaggcctcttgataatgaacgcttgattgttaaagcaagcagtggccctcgttatgttgttggttgccgcagtaaagttgataagggaaaactgacttcaaggactagaatgggtcttgacatggccacacttactatcatggcggcaacttcctcgtgaagttgatcccgttggttaacaacttgttgcacgagggatccctggtaatgttagctactcggcttgttggtggtttatctgatcaaaattcgagagctggagggaatctattgagctccctctcatgaatcctgagcttt

SEQ ID NO: 202245 - DNA, 378 bp, Gossypium hirsutum
atctctacttccatttcatctgccatcaatttgctctgaagatcatgttggctatttttcacaaggcatttgctaatccaccagaggagctgaatagtccagcttctcataaatctaccaagaagcctaaacagcctgaagaaaccctaaatgatttcctatctcatcaccctcacaacactttctccatgagctttggcaacgctgctgttttggcttatgtccgccatgaacgtgctgcttcagttcatcagaggttgttttgtgggtttgatgacatatactgcctcttcttagggagcttgaacaatctatttatgctgaatagacaatatggtctttccaaagggagcaatgaggcgatgtttgtgattgaag

SEQ ID NO: 202246 - DNA, 419 bp, Gossypium hirsutum
cttcaacactgtttcatcatattgatagtttgtctgcaaaggaaaaagcattgtcaatgactcaaccttattgtgttagagaaaacaaaccctgtattggttgggttcaaagatacttcagagactgtctttgtaatttaaaagatgaattttcttttgggtttgggattattagtttggtttgttggggtgttgcagagatccctcaaatcattactaatttcaaaaccaagtctgctcatggtgtttccctcctttttctcctcacttgggttgctggtgatgtgtttaatcttgttggttgtcttcttgaacctgcaacattgccgactcagttctacacagctctgctctatacaataagtactgtggttctagtgttgcaaagtgtatactatgattatatcaacaggtggtgg

SEQ ID NO: 202247 - DNA, 441 bp, Gossypium hirsutum
accggtctcggaattcccgggtggacccacgcgtccgtcgaactctacctgcctttctctcgtccctggcggcggcggcaggatggcggctgggggtgcgaggacggtgaaggatgtgaacccccacgagtttgtcaaggcctactccgcccatctcaaacgctccggcaagatggagcttcctgagtgggttgacattgtgaagactgcgaggttcaaggagctccctccttatgaccctgactggtactacatcagggctgcatctgtagcaaggaagatctacttgagacaaggcattggtgttggtggcttccagaagatttatggtggccgccagaggaatggctcacgcccacctcacttctgcaagagcagtggtgccatttcacgcaacatcctccagcagctgcaggagatgggcatcattgatgtcgatcc

SEQ ID NO: 202248 - DNA, 416 bp, Gossypium hirsutum
gttccattttccctaacaaacctgcatcagatccgatcagagttaactcagatccatccgtatcgggtcttctaaattccagatctttacttttctcgagtaaaggaagaaagaggaagggagagatgagagagattattagcgtccacattggccaagctgggattcaggttgggaattcatgctgggagctttactgtcttgaacatgtaatccaccccgatggaacaatgccgagcgacacctcaatgggcgtcgcacacgatgctttcaacactttcttcagcgaaacgggttcgggaaagcatgtgcctagagctgtctttgttgatctggaacccactgttatcgatgaagtccggaccggcccttatcgccaacttttccaccctgagcagcttatttccggcaaggga

SEQ ID NO: 202249 - DNA, 412 bp, Gossypium hirsutum
aaaggttttcctcttgtctaattctataagtgcttccggagcaaatattagtactggtgtttttaacatgactgttatcccaaaaccctggagggctagcatgttagcagcagctctacaacgcaccatgggtgttgggaacaaagggaatccctgtaatgggcagttacctagcttgtctcttcgaaatcttcttcttgggagaaaaattctaatcgtagatgacaacaatgtgaatctaaaagtagctgctggtgcattgaagaaatacggagcagatgtggttagtgctacaagaggaatagaagctattgagctgctcacaccacctcaccagtttgatgcctgtttcatggatatccaaatgccggaaatggatgggtttgaagctacaaggagaattcgggatatg

SEQ ID NO: 202250 - DNA, 432 bp, Gossypium hirsutum
tctccgtctccttctaaatcttgattgatccaaaaccaaagggaaaaaaatagggcttttttcttacaaaagttgggggttcgaagagcataaaacgataatatgccttcgttacctctcagatcgattttgctcccattaatcccttccttaaccccttttcatgctggtttaagttcccatcgtttgaaacatcttgaaaagagtgatcggcgtggtaatcttagttaacgttttcccctcaaaatcattagctctcttttgactcctttactttctctccttttttcctctctgttttctgtcttcccctagagtcgtccgtttcttttgaggctattaccgtgcgacacgaaggaatctagtttgctcagaaagaaaaaagaaaaccctggagatttggttcgatcttgaactgggattgcttttttc

SEQ ID NO: 202251 - DNA, 436 bp, Gossypium hirsutum
ccggttcggaattcccgggtggacccacgcgtccggagccactggagcaagatctcccagggcgggctccagcgtatcgaggagaagtacagggggaagctctactcggagaggctgatgaccctcaccggcgtgtacgggttctggaagtacgtgtccaacctggagaggcgcgagacccggcggtacctggagatgctgtacgcgctcaagtaccgcaccatggcgagcaccgtgccgttggccgtggagggagagccctccagcaagtgatgcgcgacggcggccacagacctgatcgatcgatgagcgagagggagcactcggagtgtcgtgtcttttcccttgccatttctttctttttttcccttcccggaggcgaaaaaaagagtctgcttttgctaggcggcgggcgttcgttgctgctctttgcttc

SEQ ID NO: 202252 - DNA, 397 bp, Gossypium hirsutum
ccgagttcttatcagaggctggttttgctttgggctcttgggcctgctgaacgtgatgcccttttggctaatgaagccaccaaaaggtggacttcaagcaatcaggtccttatggaaatagcttgcacaaggtctgccaaccaactgcttcacgcaaggcaggcttatcatgctcgttataagaagtcgcttgaagaggatgttgctcatcacacgactggcgacttccgtaaggtatattagatggatgcttaagttatctgtaaaaactaaactaggtattgcttattatgttagcgagtcaatgaagttttattatttgctttctgttctgaatagccctgcttatttatgtgtctttattcctttcagctcctcctacctctagtgagttcat

SEQ ID NO: 202253 - DNA, 426 bp, Gossypium hirsutum
gggaaagtagaaacaaagaaaacatatggcaagtgaggcggcggaggaagctaacgtcgctgcatcggctgcggcggaagcacccacaacagggaccgagaagcaaccacataagcttgaaagaaagtggaccttttggtttgataaccaatcaaagcctaaacaaggcgctgcttggggttcctctttacgcaaagtttacacttttgacactgtagaagaattttggtgtttgtatgatcaaatattcaagcctagcaagttgcctggaaatgctgatttccacttgtttaaggctggaattgagcccaaatgggaagatcctgagtgtgctaatggaggaaaatggtctgtcactagcaacagataggctaatcttgagaacatgtggcttgaaagtttgatggcattgatccgggagcaatt

SEQ ID NO: 202254 - DNA, 430 bp, Gossypium hirsutum
gaattcccggggggacgcactcgtccgttctagatcgcgagctgccgcccttttttttttttttttgttttgttgtttttggtgcgagcataacaccgcgtggtggaactggaaacatccataatcacctttggtcccataaccacaacgtcaggcatcccgcagtctccacgacgatcgagtcgcagtcgtcgatctgtgctgctgcagcagcaagtccaacatctgctaccaacctgtacctgaaagagagccaggctctgggcggcacgagtggttcggactccgacagcgattcgctgctggacatcgagggtggcccgtgcgagcagagcacgaacccacaggacgtgaagaggatgcgacggatggtgtcgaaccgtgagtctgctcgacggtccaggaagaggaagcaagcccacctagctga

SEQ ID NO: 202255 - DNA, 448 bp, Gossypium hirsutum
gctgtaccggtctcggaattcccggggggacccacgcgtccggtcaagttcaacggcgtgtaccacgagatctacatcaactcccaggcctccttcggggagctgaagaagatgctgtcggcgcggaccgggctgcaccccgaggaccagaagctggtgtacaaggacaaggagcgggactccaaggcgttcctggacatggccggcgtcaaggaccgctccaagatggtgctgctcgaggaccccgccgcgcaggccaagcgccttctcgagcagcgccgcaccgacaaggcggagcgcgccgccaagtccatctcccgcatcggcctcgacgtcgacaagctcgccaccaaggtgtcggcgctggaggccatcgtcagcaagggcggcaaggtggtggacgctgacgtggtcgccctcaccgaggcgctcatgaacgagctggtca

SEQ ID NO: 202256 - DNA, 441 bp, Gossypium hirsutum
gctctaccggttcggaattcccgggtggacccactcgtccggagcaagaaggcagtggagaactcccccttccttgagaagctgaagaagaggggctgggaggttctgtacatgggtgatgccattgacgagtatgctgttggtcagctcaaggagtttgagggcaagaagcttgtctctgccaccaaggagggtctgaagcttgatgagactgaggacgagaagaagaggaaggaggagctgaaggagaagtttgaggggctgtgcaaggtcatcaaggaggttctgggtgacaaagttgagaaggtggtggtgtctgatcgcgttgtggactcaccgtgctgccttgtgactggcgagtatggctggaccgtcaacatggagaggatcatgaaggcacaggccctgagggactcgagcatggcgggctacatgtcgagc

SEQ ID NO: 202257 - DNA, 423 bp, Gossypium hirsutum
gctggtcccagtttgtgaaatggcaataaagctttgcggcgctgatggtacaatctctggcatggcttcatattttgtctgcaataacatattcaatggcatcatggcacttgctggcgatacaaattactatgacgttagaaagaaatgtgaagggagcctttgctatgacttctcaaacatggagtcatttctgaacaagaaatctgttagggatgcccttggtgttgggaatatagatttcgtgtcctgcagccctactgtgtatcaggccatgctggttgactggatgaggaatctcgaagttggcattcctgttctcctcgaggacggaatcaagcttctcgtgtatgctggggaatatgatctcatctgcaactggcttggcaattcaagatgggttcatgcaatggaatggtctgg

SEQ ID NO: 202258 - DNA, 376 bp, Gossypium hirsutum
atctctacttccatttcatctgccatcaatttgctctgaagatcatgttggctatttttcacaaggcatttgctaatccaccagaggagctgaatagtccagcttctcataaatctaccaagaagcctaaacagcctgaagaaaccctaaatgatttcctatctcatcaccctcacaacactttctccatgagctttggcaacgctgctgttttggcttatgtccgccatgaacgtgctgcttcagttcatcagaggttgttttgtgggtttgatgacatatactgcctcttcttagggagcttgaacaatctatttatgctgaatagacaatatggtctttccaaagggagcaatgaggcgatgtttgtgattga

SEQ ID NO: 202259 - DNA, 382 bp, Gossypium hirsutum
cagaaggcgaagagggcaccgtcgtttccttgcaacgcggcgcgcacaataagaagctgttcaaccctatgctacataccaaggtgcataaactcagtctaaatatctccgaaactgatagcagataacgtctaactctcgccgtaaaagtactccaacagctcatcgagcactacccgcatcttctgcaaggcgatgtacacggtgccgactgtcatcatcccgcgtaacgagatgatcgactgctacgtcactgtcatggacgataaggccacgcttctgcttgagagccttctccaagtctaggatcacgagcttgtcatgaggaacttcgacgacaccggttgctctggttctcagtatacatgatcacatctacctt

SEQ ID NO: 202260 - DNA, 442 bp, Gossypium hirsutum
gctctaccggtctcggaattcccgggtggacccactcgtccgttggcattccttgcgcttagttgtgttggatatgccattccttttataatgtgtgcggcaatatgctgctgctgtccatgcttgatttctgttttgcgtcttcaagaagatttgggtcaaaatagaggagctactcaagagctaatagatgcattgccaacctacaaattcaaaccaaaacgtgtcaaaaactgggggattgaccatgcttcaagctcagagcatcttgatgagggtggcattcttggcccaggaactaagaaggaaagagttgtttcagctgaagatgctgtgtgctgcatctgtcttacgaagtatggagatgatgatgagcttcgtgagcttccttgcacacacttctttcatgttcaatgtgtagataaatggcttaagataaatg

SEQ ID NO: 202261 - DNA, 411 bp, Gossypium hirsutum
ggcatttgctttaattcagttgttcagtatcatcatccttatgtcccatgttgcctggcaaatcttccttctcttccttgccatcctcagtatctccttctggtatcagaactattatattacgactgctagggagctagccaggatggttggaattagaaaggctcctattttacatcatttctcagaatctatcacaggcgcaacaacaattcgttgttttggccaggaagacaggttcatggagaaaaacttgagcttaatcgatgattactctcgtgtagccttccataactccagcacaatggaatggttgtgtgttcgaatcaattttcttttcaacttcgttttcttcctggtgttggtcatcctggttagcttgccgcggtctgctattgaccctagcttggc

SEQ ID NO: 202262 - DNA, 430 bp, Gossypium hirsutum
ctctgctcgccgccttcacttctctctctctccctctctggctctaatctgactcagggtgctaaaacagagcattaccctttcgagttcaagacttcaagctggcgatcgaaaatcaagaatccactgtccgtgaaattaagcctaagaacagaagaatcatgggtgctggtggacctgatgaagaagacaataggtggccgccatggttgaaacctttattaggagaacatttcttcgttcaatgcaagcttcatgctgattctcacaagagtgaatgcaatatgtactgcttagattgtatgaatggcgctctctgctctctctgccttgctcatcacaaggatcatcgctatattcagattaggaggtcctcataccatgatgtgacaagggtatctgagatacagaaatacctggatatttctgg

SEQ ID NO: 202263 - DNA, 254 bp, Gossypium hirsutum
ttaaatcatttgcgacttatgagaatcttgagggaagatggagaatgtgggaacgtgagttcatctgaacgtaccactgaatgataacttcaacatagctaactacacaaggatccctgccactgatcctaccatcaagtattggatttagaacggctctaatgtcacactatttattaatatctaacacaccacacaacagcactcccaagttcagtacgaaacctcttgttcctagactataacaactgctt

SEQ ID NO: 202264 - DNA, 416 bp, Gossypium hirsutum
gagcagtaaagaaaatcagctcattcaagctactgctttaggaaaggagaaagatgaatatgctctgaaagtacaagatgagttgaatgatacaaagatgaagttctctgaagctgaaactgtcatagaacgaattgcagaactcacaaaccgactagttatctcagttaaggatgaagacaataatgtgttgaggcctgttgatgatgtgagcagcgaattaatgcatcagctggtagataggccttctagtgattttggattgcagaaaaagcaacttgaaactgaactcagattcactaaagagagcttaaaagataaagaaatggaagttcttgctgcacagagggctcttgcaataaaagatgaagagctcaaaatggttcttggaaggttggaagcatgagaaaaagaac

SEQ ID NO: 202265 - DNA, 443 bp, Gossypium hirsutum
accggtctcggaattcccgggcagtgctcctgctagcgcggctccacttgttccacttgtagccacccgtcgctacgtgcgtggctgccgcggggcggctctagtcgccagtcccgaccacgctccaaaccctcgcctccgattcgcgtctgcggcagaggggatggctgcggaagcgagcacggcgggtgcggcgtcggcagccgaggcgaagcccttcgccgtcctcttcgtgtgcctcgggaatatttgccggagtcctgctgctgaagctgtgtttcggaccctcgtaagcaagcgtgggcttgactccaagtttctcatagactctgctggtaccatcgggtatcatgagggtaataaggcagactcaaggatgagagcagcttcaaagaagcgggggattgaggtcacatcaatatccaggcctatcaaaccctcag

SEQ ID NO: 202266 - DNA, 445 bp, Gossypium hirsutum
gctctaccggtccggaattcccggggtgagttcttccgtgatgcccaagagaaggtcctcccgtatgctgactacatcttcggcaacgaaactgaggcgaagatctttgccaaagtcagaggatgggagactgagaatattgaggagattgctttgaagatctctcaacttcctttggcttcaggcaagcaaaagaggattgctgtgattactcaaggtgctgatccagtggttgttgctgaggatgggaaggtgaaaacgttccctgtgatcctattgcccaaggagaagcttgttgacaccaacggctcatgtgatgctttcgttggaggcttcctctcacagttggttctaggcaagggcattgaagactgcgtgagggcaggttgctatgccgcaaacgttatcatccagcgcccgggctgtacttacccggagaagcctg

SEQ ID NO: 202267 - DNA, 353 bp, Gossypium hirsutum
ggcacccgctttaattgagccgatcagtctgatcatccttatgtccaatgttgcctgtcaaatcttagcttgtattccttgccatcactgagactcttcttctggcatcagatctatcatatgacgactgctatgcaactagccaggatggttggaattagaaaggctcctattatacatcagctctcataatctatcacaggcgctacaacaattcgtcgctttggccaggaagacatgttcatggagaactacttgcgcttaatcgatgattaccctagagtagccttccataacttcagcacaatggactggttctgtgtacaaatcaaaaggcttttcaacttcgaaat

SEQ ID NO: 202268 - DNA, 419 bp, Gossypium hirsutum
  unsure (1)..(419): unsure at all n locations
gggaaagtagaaacaaagaaaacatatggcaagtgaggcggcggaggaagctaacgtccctgcagcggctgcggcggaagcacccacaacagggaccgagaagcaaccacataagcttgaaagaaagtggaccttttggtttgataaccaatcaaagcctaaacaaggcgctgcttggggttcctctttacgcaaagtttacacttttgacactgtagaagaattttggtgtttgtatgatcaaatattcaagcctagcaagttgcctggaaatgctgatttccacttgtttaaggctggaattgagcccaaatgggaagatcctgagtgtgctaatggaggaaaatggtctgtcactagcaacagaaaggctaatcttgagaacatgtggctngaaagtttgatggcattgatcgggg

SEQ ID NO: 202269 - DNA, 239 bp, Gossypium hirsutum
tccactttcacctcttcttcgaccacgtccaatgatgattcgtaccaaggaagcagtgggaagaagaagaaatggaaggagtttttcaagaggttgaccaaagaggtgattgagaaacaagaggagttgcagaacaagttcttgcaaaccatagagagatgcgaacaacaaaagttggctcgtgaagaagcttggaaggtgcaagaaatggcaaggattaacaaagaacatgagctttt

SEQ ID NO: 202270 - DNA, 410 bp, Gossypium hirsutum; identical to SEQ ID NO: 190327

SEQ ID NO: 202271 - DNA, 413 bp, Gossypium hirsutum
aaaattgaagcacgtttaaggaatgttttgaaaggagatagcgatattcgtagcgcgaaaaccacggtttctatggccgtaactcataccgaaagaaggttgcatcaaatgatgttcgcagatcgtgattacgaacggaaaccgattttggaacataagtcggagttgtcggctgtcaccgtgcaaaactgggtggaaaggggttattctgttgtgaatgttcaatgcaaggaccgaactaaactcctgtttgatgttgtttgcacattgacagatatgcaatatgttgagtttcatgccactatcaaaacatcaagcgataaatcatatttggaattctatattacgcacagagacggaatactggttagttcagaacccgaacgacatcgtttaatccaatgtttacaagc

SEQ ID NO: 202272 - DNA, 421 bp, Gossypium hirsutum; identical to SEQ ID NO: 190877

SEQ ID NO: 202273 - DNA, 411 bp, Gossypium hirsutum
ctaaggttgaaatgcctcatcattatataaatggtggttgggatgagccttcccaccatattgtgcataagaggggtccaagtttgctgaagttaactgatgaacctgcagagttagcaaccatgcgagctgagcttcatcgacgaagtattgcacaaatgaggattaacaatcgatcgatccaagacatgcaaatatttggagatccttcaggagttcctattgtaattatggaacgtgtaataaatgcacctcgtcgtactgttagtgatatatcattcttgaagaattttgacgtcatgcatttagctaccacaagcactgttcttgaagctgggaagagccaatctagtacaagtgctgcacagagtgggcaagacttgaagatcgttgtctttgtgcatggttttc

SEQ ID NO: 202274 - DNA, 335 bp, Gossypium hirsutum
aacacaacccgcattattatcattgttgttgcttcagttggtggaattcccatactaattgcttcctgcatctgcatcattcggagggccagaaagaccccacaacaattacttagaactgatgatgatgaggtcattagggctgactccttgcagttcgactttgccactgttcgggcagcaactaataacttttctgatgcaaataagcttggccaaggtggatttggagctgtttacaagggtcaacttccaaatggagaagaggttgctgtgaaaagactagccagggattctggacaaggggacctggaattcaagaatgaagtcctctt

SEQ ID NO: 202275 - DNA, 258 bp, Gossypium hirsutum
atatccttgagctttacactttaggccgtaaattaggacggggacagtttggggttgcttacttatgtaccgagatttcgactgggattgaatatgcttgtaagtccatatcgaaaaggaagttgatttgcaaggaggatgtggaggatgttaggagggagatccaaattatgcaccatttggctggtcataagaatatcgtgacgatcaaaggcgcgtacgaggatcctttatttgtgcatatcgtgatggagcttt

SEQ ID NO: 202276 - DNA, 440 bp, Gossypium hirsutum
accggtctcggaattcccgggtggacccacgcgtccgcgtggactacgagaagatcgtgcgcgacacctgccgcgagatcgggttcacctgggaggacgtgggcctcgacgccgaccgctgcaaggtgctggtgaacatcgagcagcagtcccccgacatcgcgcagggcgtgcacgggcacttcacgaagcggcccgaggagatcggcgcgggcgaccagggccacatgttcgggtacgccaccgacgagacccccgagctgatgccgctcagccacgtgctggccaccaagctgggcgcgcgcctcaccgaggtgcgcaagaacggcacctgcgcctggctgaggcccgacggcaagacccaggtgacggtggagtacgtgaacgagggcggcgccatggtgcccgtccgcgtgcacaccgtgctcatctccacccag

SEQ ID NO: 202277 - DNA, 327 bp, Gossypium hirsutum
  unsure (1)..(327): unsure at all n locations
cgtttttccgagacatggcgctgatgcgtcngatggagatcgctgccgattcactctacaaggctaagcttatccgtggtttctgtcatctatacgacgggcaagaagccgtcgccgttggcatggaagccgccattaccaaaaaggactgcatcataactgcctaccgcgaccactgcacgttcgtcagtcgcggtggaaccctgctggaagattttgctgagctgatgggacgccaggctggttgctctaaaggcaaaggaagttcgatgcatttttacaagaaggattcgaatttttatggcggtcacgggattgttggagctc

SEQ ID NO: 202278 - DNA, 426 bp, Gossypium hirsutum
atcctttcctctcttagatgagtacaaccatggcgaatcacggaccgttcgctaatttcttatctcttattctcctctctctcgtcgccatcgcctctgctgaagtgctcttcgaagaacgcttcgaagatggatgggaacgtcgctgggtaaaatctgactggaagaaagatgagaacatggctggggaatggaattacacttctggaaaatggaatggagatcctaacgacaaaggtattcaaactagcgaagactacaggtttgatgctatttcagctgagttcccagaagtttacaacactggcaagactctagtcttccaattgtctgtgaagcacgagcagaagctcgactgtggtggtggctacatgaagttgctcagtgataacattgaccagatgaaatctggtggcgacaccccgt

SEQ ID NO: 202279 - DNA, 400 bp, Gossypium hirsutum
gaagtctgtgacgtgatcctccatgctgatgccatcctcagaggccgtgggctaatcattccaacagctaggagggctttctatgctcctcagctcacagccaagccatggcttctcgaacctgtttacttggtcgagatccaagccccggatcaagcactctggaggaattgacaagttcacttaaccagaagcgtaaacacgcatctgaagaaatgcatagacctgtcactgcactttacaacatcacggcataccttactgtcattgatgcctttggattctatatcactgagagggctgcaacatcaggacaagctttcccacaatgtgtgttagatccctgcgatatgatgtcatgagacccattggaacctggctctcaagcagcaacccatgt

SEQ ID NO: 202280 - DNA, 416 bp, Gossypium hirsutum
gagcagtaaagaaaatcagctcattcaagctactgctttatgaaaggagaaagatgaatatgctctgaaagtacaagatgagttgaatgatacaaagatgaagttctctgaagctgaaactgtcatagaacgaattgcagaactcacaaaccgactagttatctcagttaaggatgaagacaataatgtgttgaggcctgttgatgatgtgagcagcgaattaatgcatcagctggtagataggccttctagtgattttggattgcagaaaaagcaacttgaaactgaactcagattcactaaagagagcttaaaagataaagaaatggaagttcttgctgcacagagggctcttgcaataaaagatgaagagctcaaaatggttcttggaaggttggaagcaagagaaaaagaac

SEQ ID NO: 202281 - DNA, 404 bp, Gossypium hirsutum
tcgagttttttttgctttgttgggtcaaaggtttgggttgatcaggaactacattctttgcacgttcagtagaggttcctgtcaactccttttgactgtaatgagtaacagtatcgaagatgattcattttctaagcctgttggaagatggtctgtttactgttatggtgtgggtcacatgctaaatgacatcacttctgcatgctggtttacttatcttctattgttcttaactgagatcgggctctcctctagggatgctgctattgtcatgctttccggccaaatagccgatggtctagccaccatattttttggtgaactgattgacaggtttggacatttcaaaatatggcacggtgcatgagctatcttggttgctgtttctttttcttcggtttttg

SEQ ID NO: 202282 - DNA, 441 bp, Gossypium hirsutum
accggtctcggaattcccgggtggacccacgcgtccgggagaaatcatcatcttcgacagatgctcaaactcgggctacattcagtttaatcatgggctaccttgctgatcattgcaacttgcccacgagggagctgctgtcacgaaggttttgccagaatattaagaagcataggcttaggcagcttatagatgatactattggttctgttcctgcagattcttctctgataaactctgtccttgaagtgtgctttggcccatccctccttccaaaaagcattagcgatgtgaagtacctggttgattttgttgaaacagtcatggaggctcttcctgcaaactatcgcctgggcttggctgttggtggattcgtagctaagcacttcacaggttatggcgcagcctccactgggaccaggttctgggcaagctctgttc

SEQ ID NO: 202283 - DNA, 273 bp, Gossypium hirsutum
aacacactgattatgtagcaagacttgaaacttgggacaatggggagccttatgagcgggctgctgagattgagataccgatggttgtgcgaatgttccgatattatgctgggtgggcggacaagattcatggattcacagttccagctgatggacaacatcatgttcaaacactgcatgaaccgtatggtgtatgtgggcttatcattccatggaatttttctcttttattgtattcctggaaagttggtccggcattaacttgcggtaaca

SEQ ID NO: 202284 - DNA, 363 bp, Gossypium hirsutum
  unsure (1)..(363): unsure at all n locations
aaaaaaatcgtttaaccattctgattctttatcttatctactgtacaactccaaaggaaattttttaataagaacaattaattcattattgacaaccaacagaaacttcaaactancatccaatcttcttgcttagcattctaagcttgaaaacagtctcctcattcccttcaacaaaatcaatcttgaatccaccatacccaaatataatgccacattggcaacttttaatgactttacgattcaacattacaatcctacacttcctattaaaggagaaatcaaatatcaccctaaccttcacccttatcaaatcaattcattcacgcaactaattacatgcaagacagcatttccaaacat

SEQ ID NO: 202285 - DNA, 415 bp, Gossypium hirsutum
ctaccagagatattgaggttgttagtgaagatcattgaagtgatggttgccaagattctgagtcccaaacttcagatgtcccttcgaagactgaccaagagaggccacaacaccctcaaaaagagagttcacaacatgtaattgctgattctcatgataacttcgaagctaagttgaaagaagttgatgttaaagtcgaaactcctgtgaatcaaaagaaatcacaggagcaaaatgctggtactccacaaacggtagtccaggaccaacttgatgaggctcaaggactgcttaaaaccaccaattctactggtcaatcaaaagaggcaagactagctcgggtttgtgctggactttcatcccgtctccaagaatacaaatccgagaatgcacagcttgaggagcttctaattgc

SEQ ID NO: 202286 - DNA, 250 bp, Gossypium hirsutum
  unsure (1)..(250): unsure at all n locations
aattctgcactatcctcatcgtgtattttgatggagccctgaatgtggatattgttgnatttcaaacgaacctgggcccatatcccattatccactttattctttcttcttattcccctgtcatttcatcttataagtcttaccatgatcaactatcatttttttacataaccaacattactatataacccttttcaatcatttccaaattttacccactacaccttaatttcatatctttcttccttat

SEQ ID NO: 202287 - DNA, 433 bp, Gossypium hirsutum
  unsure (1)..(433): unsure at all n locations
caaagctgtatcgggaccaaaatatgatggcaagttcttagataaagttgttagggacaggcgaggagaaacaaggttgcaccagacattaactaacgttgttatcccaacatttgatgtcatgcatctccagccagccattttttcaagctatcaggtgaagaaaaaacctactttggatgccttgctctcagacatatgcattgcaaccttagctgcaccaacatatnctccagcccattactttaaaatccaaaccgacaatggggacgtgagagaatataacctcattgatggtggtgtggcttgcaataacccaactttagtggcaatgggggaagtgagcaaggagatcattaagggaaaccctgattnttttccaacgaaacccatggattatgggaaatttctggttatttcattggggactggc

SEQ ID NO: 202288 - DNA, 337 bp, Gossypium hirsutum
  unsure (1)..(337): unsure at all n locations
attcttcactatcaaaactcgttcttcaccaaagtataatcacaaaaacttttataaatttataccggacaatctcccataaacaatctttcaccaaacattaactaaccttcttatcccaacatttcatctcatacatctccatccatccattttttcattctatcaantcaacaaaaaacctactttctataccttactctcatacatattcattacaacctcatctccaccaacatatctcccatcccattactttaaaatccaaacctacaattattacctaatataatataacctcattcatattcctttcactacaaataacccaacttta

SEQ ID NO: 202289 - DNA, 309 bp, Gossypium hirsutum
  unsure (1)..(309): unsure at all n locations
atatcctgggttctttacactttaggccgtaaattangacagttgacagtttggaggtgcttacttgtgtaccgagatttcgactgggattgaatatgcttgtaagtccatatcgaaaaggaagttgattttcaaggaggatgtggaggattttatgagggagatccaaattatgcaccatttggctggtcataagaatatcgtgacgatcaaaggcgcgtacgaggatcctttatttgtgcatatcgtgatggagctttgctccggaggcgaactgtttgatataattatccatatggggcattacac

SEQ ID NO: 202290 - DNA, 410 bp, Gossypium hirsutum
ccggcatctcctccttcactgtgttccttcaatcgcttctcgcatttcccatttggacctacggctcccccaccaccacctccgcctctgaatgtcttgttacaatgcatcaaagaaagtgttaaattggaccactgctatcgtccatacagatttattgagagtagtatctagaagacttgttttggcaaccaagactcaatcaataacgaccatggcagctcaagaagaagaatgtaaaggtaatgtgaaagcacagttagcaaaactatttgaagtttcacttaaagtaacagttccgaatgaagcagatgttgacccattgatagctgcctgcactggcaaatttggtgattaccaatgtaataatgccatgggcctttggtctaaaatcaaagggaagggtactc

SEQ ID NO: 202291 - DNA, 418 bp, Gossypium hirsutum
gggaagtcgttctttgggtctggaagaaagcacaaaagcagtagatgatggcatggggctttggttggtactacagtgaaaattcgccagggtccttataagggttaccgtggacgtgttgtagatattaaaggtcaatcagttcgagttgagctggagtctcaaatgaaggttgttacagttgatcgcgattccatatctgataacgtggttatttcaacaccccaccgtgagtcatcccggtatggtatgggaagtgaaacttctatgcacccttcacgaactccattacattcatacatgactcctatgagagatccttggagcacacctgtccatgatggcatgagaacacctatgcgtgacaaggccctgaatccttatgcacctatgagtccacccagggataattgggaag

SEQ ID NO: 202292 - DNA, 376 bp, Gossypium hirsutum
tccccaagtctgcaggctttcacctcgcaaaatagggggtgcaaggcagggatattagcccacacttgtgtctaatttatacggggcgacgggcgtgtcctgtattacgatcgccacgccggtggaccagctcccgaggattgacgctcagctagatcagtcgcagcacgtggtgactttatactccgctctcagcaagcagcccacagcttggttgcagacgacatataactcgatcagttcatgacacaatatgttgtattgctatgttcgtttaaagaacaattgcaacaacatgatcagttccacacaatggaagcagttatggcatactcggaaaatgaacaatccttacagagctttacatgattttcac

SEQ ID NO: 202293 - DNA, 281 bp, Gossypium hirsutum
  unsure (1)..(281): unsure at all n locations
caaactgggttttgcaagagctcaaacccgggaatctaaagtgatcttatttgggggtggatggaatganggccatccaacaaccaccttattctattaagggagaagttgtcaataatttggactttatgcgaaagaggaaaccaagcaatgattcaaacatcatggaacataagatctacaaatgcgagttcgtccaatgtccctatagtgaacatcgcttaagttttcatgacaggattgccagggacaatcatcaattaacatgtccgtatcgaaac

SEQ ID NO: 202294 - DNA, 452 bp, Gossypium hirsutum
ggtcccaaactctgcaagctaacacctctcaaaatacgggttgcaaggcagagatattagcccacccttttgtcaaacttatacagggcggcgcgcttgtccagtcttatgatcgccacaccggtggaccagctcccgatgattgacgctcagctggatcagtcgcagcacgtggtggcctattactccgctctcggctgaacatcccatggcttgattgcgaacgacaaagaactctatcagttcatgacgcaatatgttgtattgctatgttcgtttaaagaacaattgcaacaacatgttctggtccacgcaatgtaagcagttatagcatgctgggaaattgaacaatccttacagagcttaacatgagtttcaccgttagaaggtactgtgtcaacaatttcagatgatgattaataccaattgtacaatgatgcaaatatttttta

SEQ ID NO: 202295 - DNA, 402 bp, Gossypium hirsutum
ttggggattgactttggttctactggcaaacaaggagagatctgtgctgtttttatgggcaccggggtccatactttcttcgggaaggcggctcaccttgttgataccactaaccaagttggtcatttccagaaggtcttgacagcaataggtaacttctgcatatgttctattgcagttgggatggtaatagagataattgtgatgtatccaattcaagaccgggattaccgtcctggaattgacaatcttcttgtccttctcattggtgggatcccgattgccatgcctacagttctgtcagttacaatggctatcggttctcataggctatcccagcagggggcaatcacaaagagaatgactgcaattgaggaaaatggcggcatggatgttctttgt

SEQ ID NO: 202296 - DNA, 231 bp, Gossypium hirsutum
gcgaagtctatgtaacggcagatatcgacatagcctgtagtcaccgtcggcatgccgtcttggaaatccaaggacggcttgggacagttcctatggttgcctaaaagcatgaagaacggttccctcgctaataattcggagatgaaactcccaactcacaccggcacccaccttgacgctcccggacacgtcatcgatcggtacttcgatgccggcttcgatgtccatacc

SEQ ID NO: 202297 - DNA, 341 bp, Gossypium hirsutum
  unsure (1)..(341): unsure at all n locations
gagcaggtgggtagaatctgagagctgctaagaaggagttgggcaaaacagaaggggatttggagtctcttcagagtgttgggcagatcattggtgaagttctcaggcctcttgataatgaacgcttgattgttaaagcaagcagtggccctcgttatgttgttggttgccgcagtaaagttgataaggagaaactgacttcaggaactagagtggttcttgacatgacaacacttactatcatgcgggcacttcctcgtgaagttgatccagttgtttacaacatgttgcacgaggatccctgtaatgttagctactcggctgntggtggtttatctgat

SEQ ID NO: 202298 - DNA, 408 bp, Gossypium hirsutum
gggcaatgaaaaggagggatctcttgttgcggcgctattggagaatagaagatgggggaacatatgttatcctctaccactcagtgtttcacaagaattgtcccccgcagaaaagctatgtccgtgcctgccttaaaagtggtggatatgtcatatctcctgtgaatgaaggaaaacagtctgttgtaaaacacatgcttgcaattgattggaaattctggaaatcttatcttcgaacttcagcagctcggcctattaccattaggatgcttgagagagttgctgcattacgagaattattcagagcaaaacaagtaaaatatccttcggacaatctttcttctggagagttgatacggaaagttaagttgcaccagagtgtggaggatggcgcaattgatatgtgta

SEQ ID NO: 202299 - DNA, 388 bp, Gossypium hirsutum
ggaaacgggattgtacgcttgagtaactcaaacattggtgggaatccaatgccccgaaaaccgtacggttcctccgcaaggttcgtacaccgacggtgattcaaggcctaagatcatacccaaatgcgtagtctatcgacaacaggtgaatattcctgtactacccctagttgataccgacggacggatgacgctttcttacactatagatggctatatgttcaatgactcacggtacttctgctttcacatggtaacaacgggtatagaaaataccctcagccaatgttctagtatcactcgctacatagcttaagtaacctatgctatactcccatgatatgttcgaactaccttcaacaatacgctacctgtactagaaaccgac

SEQ ID NO: 202300 - DNA, 431 bp, Gossypium hirsutum
gcggcgggtgctgcttctcaggcagccgcagcctccgttcgcgtctctgatgacggggcggttgtagaaggttgtattgacaacgatagtgtacagattggggattcatatgattccaagacatcgtttttgatctccgatgggagcatcactgttcatgctggtgaaagattaggtcgcggtatagttactgatgcaattactactccagtggttaatacttctgcatatttctttaagaaaactcaggagcttattgacttcaaggaaaaacgccatacaagttttgaatatgggcggtatggaaatccaacaaaatttattggtggacacaatgatgtccttgctggttgtataagtggttctgagaagttggttacagaaattcgtactttgcatcatattttgggtggtactctcaacccaaatgc

SEQ ID NO: 202301 - DNA, 419 bp, Gossypium hirsutum
agatcatctttaatgggcttgcgtttccataactttgctgctttgcttcttcgtgctgatcttcaatggctccaactctttgctttcttctgatcctttatagattacctatcaccggcattcacctcctccttatattcctccattctctcttataactcttccttctcaccggttttcccggtttcaacaaaatccctgatctttctttctttccgaaagtgaaccaaggggaaaaaaacactcagatcttttatttagaaacaagtattctcagtaaacaaacggaaaatttaaggaatggcatcggtgctgttgtaccatgtagtgggggatctgacggtggggaagcctgagttggttgaattctgcgatgttgagacagttgaatcagctataagagcaataggtggatcaac

SEQ ID NO: 202302 - DNA, 431 bp, Gossypium hirsutum
aacacggctttcattattatgattgttgttgcttcagttggtggaattcccatgcgaattgggtcctccatctgcatcattcggagggccagaaagaccccacaacaattacttagaactgatgatgatgaggtcattagggctgactccttgcagttcgactttgccactgttcgggcagcaactaataacttttctgatgcaaataagcttggccaaggtggatttggagctgtttacaagggtcaacttccaaatggagaagaggttgctgtgaaaagactagccagggattctggacaaggggacctggaattcaagaatgaagtcctcttagtggccaagcttcagcaccgcaatttagttaggctccttggtttctgcttagaagggcatgaaaggcttctcatttatgagtttgtgcccaacac

SEQ ID NO: 202303 - DNA, 431 bp, Gossypium hirsutum
aacacggctttcattattatgattgttgttgcttcagttggtggaattcccatagtaattgcgtcctccatctgcatcattcggagggccagaaagaccccacaacaattacttagaactgatgatgatgaggtcattagggctgactccttgcagttcgactttgccactgttcgggcagcaactaataacttttctgatgcaaataagcttggccaaggtggatttggagctgtttacaagggtcaacttccaaatggagaagaggttgctgtgaaaagactagccagggattctggacaaggggacctggaattcaagaatgaagtcctcttagtggccaagcttcagcaccgcaatttagttaggctccttggtttctgcttagaagggcatgaaaggcttctcatttatgagtttgtgcccaacac

SEQ ID NO: 202304 - DNA, 424 bp, Gossypium hirsutum
agatcatcgtgaatgggctttcgtttccataactttgcgtgtgtgcttcttcggggtgatctgcaatggctccaactctttgctttcttctgatcctttatagattacctatcaccggcattcacctcctgcttatattcctccattctctcttataactcttccttctcaccggttttcccggtttcaacaaaatccctgatctttctttctttccgaaggtgaaccaaggggaaaaaaacactcagatcttttatttagaaacaagtattctcagtaaacaaacggaaaatttaaggaatggcatcggtgctgttgtaccatgtagtgggggatctgacggtggggaagcctgagttggttgaattctgcgatgttgagacagttgaatcagctataagagcaataggtggatcaactgagt

SEQ ID NO: 202305 - DNA, 428 bp, Gossypium hirsutum
aacccatggccctctttctctgtccatccatttctccctcgtttcttctttttcggctttttgatcctctcaaagacctttttgtgttgcagaatttactcctttttagttttgtggactatgccaaaagctggggttcttcctggttaactaaggcctatttttgggtgggttgaacttatatcagtactagcagattagaggttctctcaagtttcagacatatttgagttcctatcttggaacaatgatgatgtttgacgagatgggaatttgtggggatatggatttcttcagtgctccacttggggaaaaagatgtggcagcctcacaaattgaaccagaggcgacggtggaggatgattatagtgatgaagaaattgatgtggatgaacttgagaggaagatgtggagggacaaaatgcgtc

SEQ ID NO: 202306 - DNA, 381 bp, Gossypium hirsutum
aattctccactagattcatagcttttttactccaggaattaaactatttaattgtgtattctttactgggattactgtgatttgagtctacttttcctctcaaattcctcattttcagccatgatttcacttaaacctcgttcgattcttctcatatcagccattttccgtgtgggtttaatcctatttggcgaatggcaagatacccatgtggaagttcgatacacagatgtggattatctcgtcttctccgatgctgcttctttaatggcttccggtcaatctccttataaaagaaccacttatcgttattcacctttacttgctttcttattaatccccaattcttttacttctcgttgtttgggcaaatttctcttc

SEQ ID NO: 202307 - DNA, 415 bp, Gossypium hirsutum
gaaatggagataaattcccacgatggggttgtcgttaacggcggaaactaaggcgtgttgggcctacatgccaagaggaagaagctcattatcgataccgatccaagaattgatgatagcatggcaatcttaatggcattccaaaatcctgaggtggatatcttaggtttgacgactgtatttggaaatgttaggactgaagatgccactcgtaatgccttacttttgtgttagatcgcaaggtgtccaagtgttcctgtagttgaaagcagccacgaacctcttaagggtgggaggccacgtgttgctgactttgatcatggctctgatggaatggggaatatatttcgacctcctccaaaaacagagaaatctgataagagtgcctctgaatttttagttgaaaaggtctctc

SEQ ID NO: 202308 - DNA, 419 bp, Gossypium hirsutum
actttgcgtttttgctttgttggtttagtaagaaaaattggctttcctgggaaggtaaaaagacaaaatatgggtagaggtagggttcaactaagacggatcgagaacaatattagcagacaagtaacattctcaaagagacgaagtggtttattaaagaaagccaatgagatctcagttttatgcgatgctgatgttgctttgattgttttctctaacaaaagaaagctctttgagttctcttctgatcccagcatggagaggatcctagaacgatacgaacgacaaatatatgccccaactggttctgaatcacaggcaaattggtctttggaatcttccaaactcatgtcaactattgaagtcttgcaaaggaacttgaggaactttcgtggagaagagcttgaacccttgagttc

SEQ ID NO: 202309 - DNA, 415 bp, Gossypium hirsutum
  unsure (1)..(415): unsure at all n locations
atttcttgcattttctctctggtacttccttgcttttctccgattncaaccatgggtttgaaacgtttcnttgaaggaagcattgcatctatcgtcgccggcgcttcaactcatcctctcgaccttatcaaggtccgtatgcaacttctatgtgaatcccatctccctaatccttcccttcaactttatcgtccggcacttgccgtcaactctgctgccgttgggaatgtttcgatctcgcaacctcgtgttggtcccatttctatcggtgtccgtatcatccaatttgaaagtgtagcggctcttttctccggtgtctccggcacgatgcttcgacaaacgttgtattctactacccgtattggactttatgaaattataaagaacaaattgacttacaaagaaacttggaatt

SEQ ID NO: 202310 - DNA, 408 bp, Gossypium hirsutum
actctacaaattttccactaaccaactaggtttttacatcttgttctcaaaacataaaaaatgttatattttcaaagggtacattgcctcacaactaccataactctctttaaatccttatccaaatccattaccctttcattctcattcttactcggtttattcacaattattacacatttaaatttccatattattttccatcataaaattttcctacacaattttacaatatctttatttatactaatattatacattaaacataaacctcattatttatactcaacttttaaataaattctaaggactcagatgacccaccactatcagtttttcacattcaatatcctgagttacctgaccatgtaattcccactgacactctttctgtccgtcaaatcttta

SEQ ID NO: 202311 - DNA, 435 bp, Gossypium hirsutum
tctccgtctccttctaaatcttgattgatccaaaaccaaagggaaaaaaatatgtcttttttcttagcggaagttgggggttcgaagagcataaaacgataatatgccttcgttacctctcagatcgattttgctcccattaatcccttccttaaccccttttcatgctggtttaagttcccatcgtttgaaacatcttgaaaagagtgatcggcgtggtaatcttagttaacgttttcccctcaaaatcattagctctcttttgactcctttactttctctccttttttcctctctgttttctgtcttcccctagagtcgtccgtttcttttgaggctattaccgtgcgacacgaaggaatctagtttgctcagaaagaaaaaagaaaaccctggagatttggttcgatcttgaactgggattgcttttttcag

SEQ ID NO: 202312 - DNA, 398 bp, Gossypium hirsutum
cagcaatgtcccacgctgtgatatatgtgaaaatgcacctgctttcttttactgggaagtggatgggagttccctgtgcctgcaatgtgatatgattgtacatgttggaggtaaaaggacccatgggaggtatctcttgttgaggcagagagttgagtttccaggggataagcctggtcgtttggaggaaccaggtttacaaccgctcagtccggatgaagtaaggaaggatctgaatcagcagtcaaagcttgcagtgagagagaaccggcaaaaccgtggagtctctcatgttccattgcttgatgataatgctaagggtgatggagaggtaggaaatgagttgattgatctaaatgccaagccacaacaggtgcaggggcaagcttctatcaatc

SEQ ID NO: 202313 - DNA, 244 bp, Gossypium hirsutum
cccaaaccagtcaccctccgccatgctgttatccaggaccgcccactttggatcgtgttcaagcgtgacatggtcatcaggttgaagcaggagcttataatgaacagttttaagaccatcgatggtcgtggtgccaatgtgcatatcgctaatggggcctgcattaccatccagtatgtcactaatattatcatccatggaatccacattcatgattgtaagccccaccgcaacgccatggttc

SEQ ID NO: 202314 - DNA, 423 bp, Gossypium hirsutum
  unsure (1)..(423): unsure at all n locations
gttatcaagtcttcccctttatagcacacaactactatcagaaataccatttagggtctatagatatagatagatatatagatatggagggtgcaaaggaacaattacaagctcctacatatggagatttaatcaccatacttagcattgatggtggtggaataagagggatcatccctggaaccatacttggtttcttagaatctcaacttcaggaactggacggtgaagatgcaagactagcagattacttcgatgtgatagcagggaccagcaccggcggcttggtgacagccatgctaacttgtccgaacgaaaagaatcgaccattatttgctgccaaagacattaaagacttttacctaactaattgtcctaacatatttcctcaaccaggatgtccattgntttctcgagcaacaa

SEQ ID NO: 202315 - DNA, 425 bp, Gossypium hirsutum
gcggcggcttttgcttctcaggcagccgcagcctccgtgatggtctctgatgagagggcggttgtagaacgttgtattgacaacgatagtgtacagattggggattcatatgattccaagacatcgtttttgatctccgatgggagcatcactgttcatgctggtgaaagattacgtcgcggtatagttactgatgcaattactactccagtggttaatacttctgcatatttctttaagaaaactcaggagcttattgacttcaaggaaaaacgccatacaagttttgaatatgggcggtatggaaatccaacaaaatttattggtggacacaatgatgtccttgctggttgtataagtcgttctgagaacttggttacagaaattcctactcttcatcatattttgagtggtactctcaaccc

SEQ ID NO: 202316 - DNA, 418 bp, Gossypium hirsutum
  unsure (1)..(418): unsure at all n locations
cattccattgctttctttctgattcaatcttcaataagttcgcgatatggctgggggattaacgacaggaaatatcactggtattgagaaactgcatattgttggtggagctgaagatcgtactgctattacaaacggcaacgctgcaaagaataaacctctagttgtttgcttcggtgaattgttgatcgactttgtaccgacggttggaggggtttctctggctgaagcacctgctttcaagaaaggctcctggggtgcttctggcaatgtggcttgtggggtatcacgattaggaagatcatncgctttcgtaggaaaagtangtgatgatgaattttgctacatgttagctgacattttaaaacaaaacaatgttgacaactctggcatgcgatttgatcgaactgcaagaact

SEQ ID NO: 202317 - DNA, 429 bp, Gossypium hirsutum
gcggcggctgctgcttctcaggcagccgcagcctccgttcgcgtctctgatgagggggcgggggtagaaggttgtattgacaacgatagtgtacagattggggattcatatgattccaagacatcgtttttgatctccgatgggagcatcactgttcatgctggtgaaagattaggtcgcggtatagttactgatgcaattactactccagtggttaatacttctgcatatttctttaagaaaactcaggagcttattgacttcaaggaaaaacgccatacaagttttgaatatgggcggtatggaaatccaacaaaatttattggtggacacaatgatgtccttgctggttgtataagtggttctgagaagttggttacagaaattcgtactttgcatcatattttgggtggtactctcaacccaaat

SEQ ID NO: 202318 - DNA, 422 bp, Gossypium hirsutum
  unsure (1)..(422): unsure at all n locations
aaatcggagaaaaagttcagattgtaggagatgatctttgtgtcaccaacccagggagggttgcgaaggctattgccgaaaaaaacttgtaatgcccttcttctcaaggtcaatcaaattggatctgttaccgaaagtatcgaagctgtgaaaatgtccaagcaagctggatggggtgtgatggccagccaccgcagtggtgaaacggaggatacttttattgctgatctttcagtcggtttggccacgggccaaattaagaccggagctccatgcaggtctgagcgtttagccaagtacaatcagcttctgcgaattgaggaggagcttggtgcggaagctgtctatgctggagccagcttccgtgctccagttgcaccctattaagatgcttgtttagatgataatntgctgagactgga

SEQ ID NO: 202319 - DNA, 435 bp, Gossypium hirsutum
gactgccagttttggcacagaaatttaggcatcaagtgcgggctacatgaattagcaaacaagcgtagaatttcagttacaggggcttcaaaactgttggcaaacattctctattcttaccgaggaatgggactttcggttggaaccatgattgctggatgggatgaaacgggccctggactatattatgtggacagtgaagggggaaggttaaaaggaatgcgtttctctgttggatctggttcaccatatgcttatggtgtgctggataatggctatcggtatgatatgtctgttgaagaggctgcagagttggccagaagagctatttatcatgccacattccgagatggagccagtggtggtgttgccagcgtttactacgtgggaccaaatgggtggaagaagctatctggtgatgatgttggagaactt

SEQ ID NO: 202320 - DNA, 369 bp, Gossypium hirsutum
  unsure (1)..(369): unsure at all n locations
gaaaggttcgagaaagaagctgctgagatgaacaagaggtggttcaagtatgctggggtgcttgacaagctcaaggctgagcgtgagcgtggtatcaccattgatattgccttgtggaaatttgagaccacgaaatactactgcactgtgattgatgcacctggacaccgtgactttatcaagaatatgattactggtacgtcacaggctgactgtgctgctttgattattgattccaccactggtggttttgaagctggtatctccaaagatggtcagactcgtgagcacgcattgcttgcttttacccttggtgtcaagcaaatgatttgctgntgcaacaagatggatgccactacccctaaatac

SEQ ID NO: 202321 - DNA, 279 bp, Gossypium hirsutum
tctttctctcacaattgatacatacacatcttattaaatttatcagatattgcttccaacaacaacatttactgcttcactattaatatattccaacatgcagactataaaaccagctatttcaaaagtactctgattatcttccattatcgactaagattaaaattgctcttatagcttacaaagctcttacctatatacatgaatcataaaaatcaataatttacccacatttcaaaacctcaaatatcttcttatattcttattacacatccaaac

SEQ ID NO: 202322 - DNA, 432 bp, Gossypium hirsutum
  unsure (1)..(432): unsure at all n locations
ctaatcatgaactgcactgttggagtagtcagaactcgcgtggagggaccaagggtgtcttgtattcctgtaccgccatcagacatgggtcagaatcttagagctttgttagaatccgaagttgggtgtgatataatgtttcaagttggtgatgagacatttaaagcacataagttgatccttgctgcacgttcacctgtttttaaagcacagtttttcgggctcgttggagaccctaacttggataaaatagtagtaaaagattttgagccttctatcttcaaggcaatgctctngtttatttataccgacaagcttcctgatgtacaagaaattgtagactccacatctatgtgtacatctgccaacatggttcagcatcttttggctgctgctgatctgtacaatttagatagactcaaagtgttgtgt

SEQ ID NO: 202323 - DNA, 374 bp, Gossypium hirsutum
  unsure (1)..(374): unsure at all n locations
atagagagcatgttgaggattggattcagaaacatcattgggggcttcatatggggagcctcacttcctcagagcttttataacagggaattatcgacacaaaccggaaggctgaaaggcaaaatagcattgatcactggggcagcaagcggtatcgggaaggcagctgcagcaaaattcatcagtaatggtgccaaagtcgtcattgctgatatacaacaccaactagggcaagcaacggcgaatgagcttggacccaatgctacttttataccctgtgacgtaacgaaagaatcagatgtatccgatgctgntgactntaccatctncanacacanacgactgggatgtatgtataataatgctggggtacc

SEQ ID NO: 202324 - DNA, 316 bp, Gossypium hirsutum
ggacggaattcaacacaaaacggtgattgtcaatggcatgggcatgcacatagccgagaaaggggaaggtccattgattctcttccttcatggcttccctgagctctggtactcgtggcgcaaccagatcaacggtttagccgccctcggctaccgtgctttggcgcccgacctccgcggttacggcggaacagatgcaccagattccgtcgccgattacacttgctgccacgtggtgggagacctcatcgcgcttctggacacagtggcgccgccggaaaaggaggataaggtgtttgtcgttgggcacgattgg

SEQ ID NO: 202325 - DNA, 360 bp, Gossypium hirsutum
  unsure (1)..(360): unsure at all n locations
ctcttacattacctacaaaatctttgctttcccttttttttgtttttgccaatgggggcttcaccaaaattcatctcttacttcttccttttagccctcttctccgttgaaatacatggtagggatttttttagcaaaatcccaagtgttaacacaaatgagaaagaggtgaccaacaaagaagaacaaaccactttggggaagaaggagcaagagccaaagtttgtccccgagacccaaaatggctatgggctttacggtcacgagtctggtcaactcccttctagcaccgncagtaccaaagaaacctatgaaccctatgtcacacctgttaaataccaccctgatgaaccctacaat

SEQ ID NO: 202326 - DNA, 412 bp, Gossypium hirsutum
cttggatgtatgaaagacgaacaactgcgaaagcatttgcgagggatgttttcatgaatcaagaaacttcccctttacaagcacattgctaaccttgccggtaacagcaagttggttcttcctgtccctgctttcaatgtcatcaatggtggttcacatgcaggaaacaaacttgctatgcaggagttcatgattcttcctgtaggagcatcatcctttaaggaggccatgaaaatgggtgttgaagtctatcaccatttgaagtctgtgattaagaagaagtatggtcaagatgcaaccaatgtcggtgatgaaggtggctttgctcctaatatccaggagaacaaggaaagacttgaattgttgaatactgccattgctaaagctggttacactggcaaagttgttattg

SEQ ID NO: 202327 - DNA, 355 bp, Gossypium hirsutum
gtcaaagcggtgtcagatctttgtgatctatagccggaaggttcatttcgagtgggacgatctcatccttcgatctttccactttcttcagcctaccatgaatcccgaatatgactatcttttcaagctacttcttattggagattccggcgttggaaaatcttgccttcttttgagatttgctgatgattcatatgtagaaagttacataagcaccattggggtagattataaaatacgcactgtggagcatgatgggaagaccattaaacttcaaatttgggacactgctggtcaagaaagatttacgacaattactagcaactactaccgtggggctcatggcataataatt

SEQ ID NO: 202328 - DNA, 259 bp, Gossypium hirsutum
aatccacggtttacttggtgctgcgtcttcgtggtggtattgttatttttgtgagggcacttactgggaagaccatcaccctggaagttgagagctctgacacaatcgataatgttaaggccaaaattcaagataaggaaggtatcccttcagaccagcagaggctgatatttgctggaaagcagctagaggatgggaggacccttgcagattacaacatccagaatgagtccaccctccacttggttctccgtctccg

SEQ ID NO: 202329 - DNA, 393 bp, Gossypium hirsutum
ggtcaatggaagcatcatgagcttaaggtgaaggactcaaagggccttctctttggtgaaaagcctgtcacagttttcggtatcagaaaccctgaggaaatcccatgggctgaggctggagctgagtatgttgttgagtctactggtgtttttactgacaaggacaaggctgctgctcacttgaagggtggcgcgaagaaggttatcatttctgctcccagtaaggatgctcccatgtttgttgtgggtgtcaatgagaaggaatataagcctgaccttaacattgtctccaatgctagctgcaccaccaactgtcttgctccattggctaaggtgatcaacgattaatttggcattgttgagggtcttatgaccactgttcattctattact

SEQ ID NO: 202330 - DNA, 287 bp, Gossypium hirsutum
  unsure (1)..(287): unsure at all n locations
caggctccaagggatcttcaaaagggtaaccttaaatactcaagtgtccttttttacggagaaaaggccttcacaattttccacatccaaaacccttcccaaatcccatttacttaatcttnaccttaatattttggttaatctacttctttttttacttaccaanacaaagaaactcctcactttaactctttccctaataaacttatcatttctgctcccaataatgatcctcccatctttaatgtctatttcaatgacaatcaatataacccttaccttaacat

SEQ ID NO: 202331 - DNA, 230 bp, Gossypium hirsutum
ccgtcaaggaaatttccaacaccatttcatttgcaccaaggggccttcttgacgggtgcaacagcagcggtgccgtggagaagttcgaagtacaaatgacatccaatgagaaactgcagttctttgatggcgaggtttcctcggagttgacaacttcactcagcaacaaccggaatccaacagcagcgatcagtctcaaagtccggggttgtgggaagtttggtgcatac

SEQ ID NO: 202332 - DNA, 316 bp, Gossypium hirsutum
cctttctggatggtgatgtcgaatcacattctcggaacaggcttccttttacagggaatattgatggattggcacctgagactttgttaacaagggaatatgactctcaaaaggatcttcaaaacatgctttctaattatggtgggaacccaagagatattgacactgagttgtctactgctccaataagctgtcagtcatttggtgtgccaaatatacctttcaagacaggatgctcaaatgatgttgccataaatgagacaggagttttaaatggcggattgtggaccaaccaaactcaacgcatgcgaacata

SEQ ID NO: 202333 - DNA, 361 bp, Gossypium hirsutum
  unsure (1)..(361): unsure at all n locations
gggattgcgttacgccaccgtccggcggcttcccaagcgagtcaatatccgatggagcccgggagatccccagctggagcacgaacggtacggtgaagcttgtgtccgccggtgaaaaagtgagcggcgggatgctactcatcgtaccccgaggcaggcacgccgtcagattgggcaacgacgcggagatcagtcaggaagtgacggttgagaaaggatcggcgtacgcggttacgttcagtgcggcacgcacttgcgcgcagatggagtcactgaacgtgtccgtaccacctgcatcgcanacggtggacctgcagacattgtacaacgtgcaaaggtgggacccttacacgatttcttt

SEQ ID NO: 202334 - DNA, 309 bp, Gossypium hirsutum
  unsure (1)..(309): unsure at all n locations
gggaaatgtatacaaagcgatgtttttacggttggaggctgcgattgngcgattggcttctaccccgacngtaaaaatccggaggatagtgcgatgtatgtttcggttttcattgccttggctagcgaaggtacggatgttcgagcgcttttcgagctcacccttgttgaccagagcgggaaagggaagcataaggttcatagtcactttgacagagcgttggagagtgggccttatacgttgaagtacagaggaagcatgtggggctacaaacgattctttaaaagaacaactttagaaagttctgac

SEQ ID NO: 202335 - DNA, 435 bp, Gossypium hirsutum
ccggaaactgatcctaccgttgtattcattcactcttttctggattattctcccgaggaccatgttcgttccagaggctgagcttcctgcatgggttgtttgttacatccctgctacaatgtcgttccttaacatccttccggcaccaaaatccttcccgttcattgttccttaccttcttttcgagaataccatgtcggtgaccaagttcaatgctatgatatctggtcttttccaactcggcagtgcatacgagtgggtcgttacgaaaaaatccggacgatcttcggagggtgatcttgtttcattggttgagaaaaagccaaaacaccatcgggttggatcagaacccaatcttgaggaaatgaaagctgatctccagcaagaacaggaacaaaaggctcgtaaaaagaagcataatagaatatacacgaa

SEQ ID NO: 202336 - DNA, 431 bp, Gossypium hirsutum
  unsure (1)..(431): unsure at all n locations
caccaatggtttaaaggatacgcagatggtcgttttgataggaaatcatggcctgggatactgaagctgaaagattggcctccatctaacgaatttaagaatctccttccacgtcatcatgccgagtttctttgttgtttgccatttaaagaatatacccatcctcaaagtgggcttcttaatattgctaccaaattgccaaagaaatctctaaagccagatatggggcctaagtcatatattgcatatggagttgcacaagagcttgggcgaggagactcagtaaccaggcttcattgtgatatgtcagatgcggtgaatgttttaacacacattgctgaggtgaatcttactcgtaaacagcttgatgcaatcagcaagttaaaacgaaagcacaatctgcaagaccagcangaactttttggaagaat

SEQ ID NO: 202337 - DNA, 96 bp, Gossypium hirsutum
ccaatgtcctttagttcactcttgtgctgatatccttgtggtgtcttctagagggggcatcgtttctttcggaatcccttacattcctatcaaaac

SEQ ID NO: 202338 - DNA, 434 bp, Gossypium hirsutum
  unsure (1)..(434): unsure at all n locations
tcaagttcaaggattacaattgtaccgttgagtactaccgagctcctttccttgttgtacaaagcangccgcctgccgggtctccgcaaaacatcaagacaacccttaagttggatcgaatggattggaattcatttaagtggaaagatgccgatttgttggtcttcaacaccggccattggtggaactacgagaagaccgttagagggggatgttactttcaagtcggggaaaaaatcgaaaccaagatgaccatagaacatgcgtatcagaggtctttggagactgtgatgcagtggctacgcaacgaggtgaatatgagtaagaccaaggtctacttccgcactttcgctcccgtacatttcagaggaggggattggagaaccgggggaagctgccacctcgagactttgccggagctgggaacaacattt

SEQ ID NO: 202339 - DNA, 210 bp, Gossypium hirsutum
tttgatggagccctgaatgtcgatgtggctgagttccagagtgacctggtcccatatcccaagatccactttatgctttcttcttatgcccctgtcatttcagctgagaaggcttaccatgagcagctatcggtggctgagataaccaacagtgcttttgatccctcttcaatgatggccaaatgtgacccacgacacgggaagtacatg

SEQ ID NO: 202340 - DNA, 395 bp, Gossypium hirsutum
gagagaactagtagttctttttttttttttttatcactgaaatgccaagcaaaatatcatgggcaagggtcctggtctctacactgaaatcggaaagaaagctagagatcttctttacaaggattatcagactgaccaaaagttcactttgaccactagctctcccactggtgtttcaattacctctgccggaacgaagaaaggtgatcttttcttggctgatgttaatacccagctgaagtctaggaatgttacaactgatatcaaagtggacaccagctccaatctatttaccaccataacagttgatgaacctgcacccgggctaaaggcaatctttggcttcagagtccctgatcagaggtctggcaagattgaactccagtatttgcatg

SEQ ID NO: 202341 - DNA, 404 bp, Gossypium hirsutum
cggtggccaggttgtttacatcttggatcaagtccgtggcttggagaacgaaatgctcaaccgtatcaagcaacaaggactcaacattacccctcgtattctcatcattactcgacttctccctgatgccgtgggaacaacttgcggtcaacggctcgagaaagtatacgggacggagtactcggatattcttcgaatacccttcagaacagagaagggaatcgtacgtagatggatctcgagatttgaagtctggccttacttggaaacttacactgaggatgttgctcaaaatgtttccaaaagagttgcaaggcaagcccgatttaatcatcggaaactacagtgatggtaatatcgtcgcctccttgctggcacataagttgggagttacacagtgtacg

SEQ ID NO: 202342 - DNA, 419 bp, Gossypium hirsutum
agaaagaaaaggctttaaaggaaaaggagactggaaatgatgcttataagaagaaagacttcgagacggctattcaacattacaccaaagcaatggagattgatgatgaagatatttcatacataaccaatcgggctgctgtttatttggaaatgggcaagtatggagactgcattaaggattgcgagaaggctgttgaaagaggtagagagctcagagcagactataaaatgatagcgaaagctttgactaggaagggaactgctttggtgaagatggcgaaatgctcaaaagattctcaggaaagccatcgagactttccagaaagctcttactgagcatcgcaatcctgacacgttgaagaaactaaatgatgctgaaaaagccaagaaagaactagagcagcaagaatattttga

SEQ ID NO: 202343 - DNA, 412 bp, Gossypium hirsutum
ggaatcccatattgagaaacaaaatagagatgtgcttcggaaatctttcaaagagatgatatctactctccctaaagagaattgttggggtattcctgaagctctatatcaatatcagggtttttggctcacccccccttttctacaaggagcattgtcggctcaacaacaattccaggctcaacccactgatatcatcctttgtagctctccaagaacaggtgcagcctggttaaaatccctcactttcgccactattacaagaacttcatacaattgattcccaccacccaataagttttccaagatgcctcatgatgttgtgcctttcatggagttcgatcatgcccagttttccactaatcgacatcttggaattcctcttttagccactcatcttccttattccttc

SEQ ID NO: 202344 - DNA, 409 bp, Gossypium hirsutum
  unsure (1)..(409): unsure at all n locations
aaacaaggcattgcttcacacgatatattgagtaccaccgttgtgtagctgcaaaaggagaaggtgctccagagtgtgataagtttgcaaggtattatcgtgccttgtgtcctggagaatggatagatcgatggaatgagcaaagggagaatggtacttttccaggtcctctctagatgagatggtacccctattgttatccgaaaaatccctgttttgacttttttttccctctgttatatcaaaccgtaacagttgaaccacagatgaatttccaggatgaaagcagnaatttatatttntcatatccaatttgaaaaggatgagttaataataaaatttggcgtgtaccctagcttagactagatcaatggaccatacaattgtgttgctcataaatggaaattca

SEQ ID NO: 202345 - DNA, 414 bp, Gossypium hirsutum
  unsure (1)..(414): unsure at all n locations
agcacatgaagcttatgttatataaagattcacatgtgttaaggtgtcttacttggaacaacactaatagccgaaatggatggaccgtaataaccttgtattggtgtgcagcaagtccccttaccagcccaaaacaggtgaatttcaagatggttctcagttacattagcagtgaaattcttaattattgctctctcaacaccacctgctgccttcgatatatcaaaatccctcaatcgccgagttccctgataaagcattatagcaataaaagatttctaaagtgcgaaacatgagaattacattattatgatcatgaaagcattgcaaagaaggggtatgaaatgaatgatatacagcttagaatgatatgaatntctacattaaaaaaatattacctgaatataaacatca

SEQ ID NO: 202346 - DNA, 399 bp, Gossypium hirsutum
  unsure (1)..(399): unsure at all n locations
ggcatttgctttaattcagttgttcagtatcatcatcctgatgtgccatgttgcctggcaaatcttccttctcttccttgccatcctcagtatctccttctggtatcagaactattatattacgactgctagggagctagccaggatggttggaattagaaaggctcctattttacatcatttctcagaatctatcacaggcgcaacaacaattcgttgttttggccaggaagacaggttcatggagaaaaacttgagcttaatcgatgattactctcgtgtagccttccataactccagcacaatggaatggttgtgtgttcgaatcaattttcttttcaacttcgttttcttcctggtgttggtcatcctggntagcttgccgcggtctgctattga

SEQ ID NO: 202347 - DNA, 323 bp, Gossypium hirsutum
aggcagccaatgacactgctgcatagtatgtacatttggtgagccaatcattggccgtgaggactcaactcgcttcaattgcatcatgttggctagttgctgcaacatcctacgatgttgcgtgtcgagtgcatctacgcgacttgagagcagttgctcgcaatggaattgatgacgatcagaaacacaatgctgtggcgcatacgctatcaaccgatcacactgcttgcgccgaggcattcaggaacgaggaccaggctatacacactgatgactctgaatgcccgcgcacgtacacactcattttgcaatggtcgattaac

SEQ ID NO: 202348 - DNA, 389 bp, Gossypium hirsutum
cagattcagaaagaaataacggaagaagaagcaatgggcgctgttacagtgcccacgacaggtccttcggtgtctgaagattgcgaacagctaagaaaagccttttcaggatggggaactaatgagggcttaatcatagatatattgggtcacagaaatgccgagcaacgaaacttgattcgaaaaacctacgctgaaacctatggagaggatctcctcaaggcactagacaaggagctctcgaatgactttgagaggctggttttgctttgggctcttgatcctgctgaacgtgatgcccttttggctaatgaagccaccaaaaggtggacttcacgcaatcaggcccttatggaaatagctcgcacaaagtctgccaaccaactgct

SEQ ID NO: 202349 - DNA, 411 bp, Gossypium hirsutum
actcaattagtgtctgagatgggaatccatgccttcagtgagccaataagggatctaaaaactcaccagccacttaccggaaatgaaataaatgattgtgggcacaaaattggcctgaatggggtggataatggctcactgacattccagtcagttttaattccccaagataatattcttaatcgatttggggatgtcacccgagattgtaaatacacaagtaggctgcctacaatgaataaacgtactgatgctactcttggcgaacttgtaagttggaagggttggcctatttgcattcttcacttggtatactaacgattgctgccactattgcaatacgatactccttactacgtcagcagtttagtcctacaaaacagactgaagtcagcattcttgattatcaat

SEQ ID NO: 202350 - DNA, 418 bp, Gossypium hirsutum
cacagatacacttgcttctcactttagaacggtgtatgggcgattcaacaccgcttgtgtctcactgtgataaaccggcagaaccaaaacggccgcctcgatccctcgatgagaccatcgaaggctgtatcggagacttcgggtggtggcaattcttgcaagcaatactcgtctctcttgcttgggtctttgatgctcagcaaaccttcatcagtgtattcacagatgctgagccatcctggcactgcacccaaggcggagacgagtctgtttgtaacgctttgtccaacatttgggaccatgtctaagaattcatggtcttgggattggccttcccacacatcaattatagcggaatggggcctggaatgtgcgccttctttcatcactggccttactgcttctgctttcttcatgg

SEQ ID NO: 202351 - DNA, 362 bp, Gossypium hirsutum
aacaggttccagataaccctgctgatgaatgttgtctcatggacttggatcaggagaggacgtcctgagaatcaccttcatgcccagatcggtagcctagtatcctcatgctgaaccgctagtgctgcttccaaaacgtatgttggctacaaggaaaacggagttccatacatggtatggctaggatatttaactactagattaccatactgagaaagctgacaatagatctaaccagctggacctgcagaagcagcgggttcagagatagaaggctcctctttgtgggccagaacgctatcttcttccataatttgggacagtggaaacggctagactcacattacttgtcacgagatact

SEQ ID NO: 202352 - DNA, 416 bp, Gossypium hirsutum
cttcgatgtgatagcagggaccagcaccggcggcttggggacagccatgctaacttgtgcgaacgaaaagaatcgaccattatttgctgccaaagacatcaaagacttctacctaactaattgtcctaacatatttcctcaaccaggatgtccattgttttctcgaacaacaaaagttatcaaagctctatcgggaccaaaatatgatggcaagttcttacataaagttgttagagacaggctaggagaaacaaggttgcaccagacattaactaacgttgttatcccaacatttcttgggtggcatctccagccagccattttttcaagctatcaggtgaagaaaaaacctaatttggatgccttgctctcagacatatgcattgcaacctcagctgcaccaacatatctcccag

SEQ ID NO: 202353 - DNA, 401 bp, Gossypium hirsutum
gcgacttccaccatgaaaacaagcttcatagccattatggtagcgggaatggttgctggaatggtgaaagctcaatgcggcaacacttgctcggcgaccgagtgttgcagtcggttcgggttttgcgggacgggagacgatttctgcggagtgaattgccgagggggtccttgtgttaacaatggggtctccatagctgccattgctacgcaggaattcttcgatgggatattgaaccaggcggcttccacttgtgtaggaaggagcttttactcgagaggggtgttccttgatgctctcaattctttcactcaattcgcaaggattgggtcggttgaggattctaggcgtgagatcgctgctttctttgctcatgctacccatgaaactggaagtaagca

SEQ ID NO: 202354 - DNA, 371 bp, Gossypium hirsutum
gcaccttccatcgttttgacaaatttaaccttaagtatggtccttgcggtcaaagcaggctcagggaaatcttcctcaagcaggataatcttatccaaggtcgattccttggggagctgacacaagcaggtcttttctgctcttgtcgcacgcaaataccacatggctgaatacagaatatctatatatggcaagaagccaagtgagtgggaccaactggctagctcgatcgttaacaacgaattccacaatgagaatgttgattggttaattccgatccctcgactttccaacgtatacagagcgacggggactgctacactatctcagagcattcttgacaacattttccatcctctttttcatgccac

SEQ ID NO: 202355 - DNA, 399 bp, Gossypium hirsutum
  unsure (1)..(399): unsure at all n locations
acatgctgttattgagttaactagaaaggctgangaaatggccaaagctctgaatcttgaccatgttcttgaagtttctaacaaacagtgcccttgttacaattcaatgggagaagctgacattgacaacaataagctaaggaaagcagcttcttcagaagatgccactgacaactatttatattgtccaaaagctaaagatattgagagcggagatttgaaacatttccaaaagcactgggctaatggtgagcctgttattgtcagcaatgtccttgagaatgcatctggtttgagctgggagccaatggttatgtggcgtgcttttcgtcaagtaacaaatcaaaaaagtgatcaccaattggaagttaaggcacttcattgcttagattggtctga

SEQ ID NO: 202356 - DNA, 391 bp, Gossypium hirsutum
gaagagtgtgggaagcgcaactttgaagatggttggggaagtgcgcaagcaattgagcacaatcccaggtctcatggacggtactgctaaacctgactatgctacctgtgctaagatctctactgatgcttcaatcaaagaaatgatcccacctggtgcccttgatatgctcacaccccttgttgttgggatctgttttggcgtggaaactctgtctggagtcctcgctagatctcttgtctctggagtacacattgctatctctgcatccgtcacaggaacgtgcttgagaagatgtcatgaaaatatattgccgtatccataattttactgactgccatgagccactaccttgattggcgtttcaaaacaataggtccatatatatgct

SEQ ID NO: 202357 - DNA, 392 bp, Gossypium hirsutum
cctctcttatcttccgttgtttatacgtttggttgtgggtgaagaagtgctactaccatggctacaaagaagagcgttggggacttgaaggaagctgatttgaagggaaagaaagtgtttggtagagacgatctgaactttacattggatgattacttcatcatatctgatgacacaaggatccgtgccgctgttaccaccatcaagaatttgatgggtcatggctataaagtcattctatctagtcatttaggacgcccaaagggtgacagctaccaagtctcagttctgtaagtagcaagagaaccaggttatctgaactccttggagtctagggtaaaatgtgtaatgactgtattggttaataagatgagaatatgagggttgcttta

SEQ ID NO: 202358 - DNA, 413 bp, Gossypium hirsutum
cccaaaccaggcaccctccgccatgctgctatccaggagcgtccactttggatcgtgttcaagcgtgacatggtcatcaggttgaagcaggagcttataatgaacagttttaagaccatcgatggtcgtggtgccaatgtgcatatcgctaatggggcctgcatcaccatccagtatgtcactaatattatcatccatggaatccacattcatgattgtaagcccaccggcaacgccatggttcgaagctccccatctcattacgggtggagcgaccatggctgatggggcatggggctctagtgctttggggcaagccatatttgggctgaccataattcactctctaactgtgctgatggactcattgatgctataatgggttccactggaattaccatctcaaacaacta

SEQ ID NO: 202359 - DNA, 236 bp, Gossypium hirsutum
ttttctataaacaaggcattgtttcacacgatatattgagttccaccgccgtgtagctgcaaaaggagaaggtgctccagagtgtgataagtttgcaaggtattatcgtgccttgtgtcctggagaatggatagatcgatggaatgagcaaagggagaatggtacttttccaagtcctttctaaatgagatggtacccctattgttatccgaaaaaatcctggtttgacttttttt

SEQ ID NO: 202360 - DNA, 386 bp, Gossypium hirsutum
ctacagttcagtgctgatcacgatgatacaatgaccgctgaagccattgttttgcttgatgaccttcatcaaaaggtgaacacatatgcaatgatggttcgcgaatggtatcgtaggatttatcatacgttactaagatcatacgggacaatgtcatgtatcccaaggtctctaaactaaatggtgaccgtactaatgctcataaattcgagttctgacaagttttaccattatagcttgccccttcgatacttgagggccacagtaataatcatcaggactgaaactagtgaccttgagtctgactcctattagaaattgatgagatcatgatctcaatctttgtgaacactaagttcaactatatgaatattccatgcgcttga

SEQ ID NO: 202361 - DNA, 315 bp, Gossypium hirsutum
  unsure (1)..(315): unsure at all n locations
accagttgtttgtctcgttggtctcggtctctttgcacgaggcttcccattggtaattgttctttgaacactntaatgcttggttgggacaaataatatgctgatataaataatgcagttaatgtatgatacagcttggtaactgcgtggaaatcggcctgcctatgcttattctactgattatttctcaacagtacctgaaacgtgtcccctcgagagcccatctaatactcgagaagtttgccttgcttatttgcattggaattgggtgggcttttagctgctaancctaaccgtgtctggggcttacaacaa

SEQ ID NO: 202362 - DNA, 402 bp, Gossypium hirsutum
  unsure (1)..(402): unsure at all n locations
aaacaaccaaacacagtcctacattttaggagtttttggccttccaatctgcggcggagataatgatgcacagatttatttcggtcaggaggctattttcggaaactaaatgttctcttccttgccaactacgacgacgttgcttctctcaggtggctcgaaatgagattgataacagggatgatcttgttcgtaaaatgcctacttttgattactcctacgctccttacaccggtgcttccgccgaccagatccttttcaaacgcacaggagtatcttaagcccctacatcgtgatntncattacaccaaaccgttgaacatagtggaccggaggacgcagtacttgttcgatgatacgggactaagatacctagacgcatttggagggaatgctactgtg

SEQ ID NO: 202363 - DNA, 410 bp, Gossypium hirsutum
  unsure (1)..(410): unsure at all n locations
agaaccgactgatctttgggctcctttggcttaccaaggttggagaccatgttttgggggatcttgtaaccccccaccgttgccccagaaatctgaaggatatcttcacgtctttcttgatggaggacttaaccagcaaagaatggggatatgtgatgcagttgccgttgctaaaatattgaatgcaacacttgtgatcccgtatctcgaagtaaatccggtttggcaagattcaagctcattcatggatatatttgatgtggatcactctattaatgtaatgaaggcatgaccatcctntntcgtcaaagaactacctgatgatttctcttgtagcacaagagagtattatgccaccgctattcgaccaacccgaattaaacgagcacctgttcatgcatctgcaaact

SEQ ID NO: 202364 - DNA, 390 bp, Gossypium hirsutum
gatccttgtacccttgagaagttcctcgggagaattcgatggtgttcaatgtcgtgagtcttacacctcacggttactttgctcaggacaatgttttggggtatcccgacaccggtggccaggttgtttacatcttggatcaagtccgtgccttggagaacgaaatgctcaaccgtatcaagcaacaaggactcaacattacccctcgtattctcatcattactcgacttctccctgatgccgtgggaacaacttgcggtcaacggctcgagaaagtatacgtggcgatgttgactcggatattcttcgaatacccttcagaacagagaagggaatcgtacgtagatggatctcgagatttgaagtctggccttacttggaaacttacac

SEQ ID NO: 202365 - DNA, 261 bp, Gossypium hirsutum
ggaatctatgaccactaatccaatggcatgggaaggtgcagttaacccaagggtgaagcaaatggagcaagctcagaattgtctacttactatgggtattacttcagaaaacgttgctcatcgctttggtgtgacaaggcaggaacaggatcaggctgcagctgaatctgacaagaaagcagctgctgctacagcttctggttaattcaacagatgaaatattcccttgggacaccaagattcgtgatccaaagactggtg

SEQ ID NO: 202366 - DNA, 400 bp, Gossypium hirsutum
gttcagttagaattccccgagataatcttcttaagggatgtggcgatgtcacccgagatggaaaatacacaagcagtctccctacaataaacaaacgttttgctgctactcttggtgaacttgtaggtgggagggttggccttgcacattcttgagttggtatcctcaagattgctgtcactattgcagtacgatactccttactacgtcagcagtttggtcctccaaaacagcctgaagtcagcatccttgattatcaatctcactagcacatagctcatgctctgaaattggcttcaacttatgcatttcattttgccactcagtatttggtagagaaatattcagagatgaagaagacacatgatgaacaactggttggagatgtgcatgctatttc

SEQ ID NO: 202367 - DNA, 409 bp, Gossypium hirsutum
  unsure (1)..(409): unsure at all n locations
gaacatctttcatacttcaaatttgttggacgagtagtgggaaaagcactttttgatgggcaactcttggatgttcactttactcgatctttctacaagcatatattggatgttaaagttacttaccatgacattgaagcgattgaccctgattacttcaaaaacctgaagtggatgcttgagaatgatattagtgatgtcctagaccttacttttagcattgatgctgacgaggagaaagtgatattgtatgaaaaggacacaaggtgacttgactatgaagcttgaatgntgggtgggcggaacattaaagttactgaggagaataaacaccaatatgttgatttagttgctgagcatcgtttgacaactgctattcgtccacaaatcaatgcatttttggaaggat

SEQ ID NO: 202368 - DNA, 353 bp, Gossypium hirsutum
gaaaaccttgtttaaaatataagagaaaagtcatacgcagtgagcactgccggtcaggttattcgttgcaaagctgcggtggcatgggaggccgggaagccactatctatagaagaagtggaagtggcaccaccccaaaaacatgaagtccgtattaagattctcttcactgctttatgtcacactgatgtatactactgggagtgtaagggttacactgctgtgtttactcgtatacttggtcatgaagcctcagggatcgtggagagtgtccgtgagggtgtgaatgatttgaaacctgaggatcatgtgcttgctatcttgaccggagaacgcagagaatgtcgccactg

SEQ ID NO: 202369 - DNA, 395 bp, Gossypium hirsutum
  unsure (1)..(395): unsure at all n locations
taccagaaatcaattacccgggaattgtcacgggctaaccagtggcaggatggaaaggtaagaatttacgttgcttaaaacagaatgccaaaagagcgctgggagatcggttcaccacattctcggatttagggctctttgacggacacaatggatctgcagctgatatttacacgaacgagaatgttcttaacaatgctctaagtgccacttccgcagatcttgatagagatgaatgggttgctgaccttacgagagctttggatgcaggtttcgttaaaacgagataatcgattcttcannnatagagcataaacgtcaggaactactgtaacctatgtgatattagaatgatcggttgtaacagtggcatctgttgcagattcctgctggat

SEQ ID NO: 202370 - DNA, 351 bp, Gossypium hirsutum
gctggatttgggtgctacgaggtccctagtcgagacagggttgcataatcttcccatgggtcaacctttctatgcagtcaaatccaaccctaaccccgctttcctcaaagaaatggcagctctcggcaccggctttgactgtgcaagccttcctgagattgaaaccattttatcgcttggggtttcgcctgatcgaatcgttttcgcaaacacatgcaaacccgagtctcacatcaagtatgcaactaaaggtggcgttaacttagccactttcgactccaactgtgagctcgaaaagataaagaaacggcacccgaaatgtgaactgttgatccgaatcaaagtcccgga

SEQ ID NO: 202371 - DNA, 319 bp, Gossypium hirsutum
  unsure (1)..(319): unsure at all n locations
gtctctttactcttctctcaccatgtcattgctgtctttcgccttcttgttgctgtttacttttagtgccaaagctgttgttcctccatctgaaacttttaggtttgtcaacgacggagaatttgggccgtttgttgttgaatatgatgcaaattaccgtgtcataagcatagctaatgcccccttccagcttgcgttttataacaccacccctaatgccttcacccttgcgttacgcatggctacaacgcgttccgagtcgctctttccgatgggtttgggagggttaacanggggaaccctgttcgcgagaacccac

SEQ ID NO: 202372 - DNA, 275 bp, Gossypium hirsutum
taatagcaaaggcagtggtggggtgtacaagaaagcgagggctcaaacgtattcaagccaaccacctttgaaagtgacaaaggagaagcttggagatagaataacaacacttcaccagctagtttccccatttggaaagactgacacagcatctgtgctggtagaagctataggatatattagaatcctttcaagtcaaattgaggctcttagatccccctacttgggtactggatcaccatacatgagaaacccacaatatgttcaacgagaaa

SEQ ID NO: 202373 - DNA, 390 bp, Gossypium hirsutum
  unsure (1)..(390): unsure at all n locations
acatgatcaaaatgctgatactccacaaacggtagtgggggaccaacttgatgaggctcaaggactgcttaaaaccaccaactccaccggtcaatcaaaagaggcaagactagctcaggtttgtgctggactttcataccgtctccaagaatacaaatctgagaatgcacaacttgaggagcttctaattgctgagagggagctgagtcaatcttatgaggctcgtataaaacaactgcagtaagatttatctgtatctaagagtgaagtaaccagggctagaagtcaaatacttaatgatgctttgccagcaaagaactctgagatagaagcacttgtcaattctatggatgcactaaaganacatgctgctttatctgaaggaaacct

SEQ ID NO: 202374 - DNA, 253 bp, Gossypium hirsutum
gagaagctatttgaatcttgaacaagatccggacaggggggaggtgaagacatcgcgccgaaaactttccatgtgagtgaccatcgacattcgcaaccgattacctgcttagacagacacttaatctaccatacgagatcaaagctggacttgactgtgatggagcactactaacgtcacgtgcctactactgaaaggacatacaacagcttgactccttctcctccatgataccaggtaccaactaagtggc

SEQ ID NO: 202375 - DNA, 339 bp, Gossypium hirsutum
tggactaattgaattcgaggcgagcttttagtgcttgtcaacattcttcgaaattggggagggataggcaaacatgagggaagaccctctctggcacaaccattgctctcgattcttgaaatcctgataccatcgactatgtaaagaccaagatccaagactaggaatggatcccaccagaccagcataggcttatctttgctaataaacagctggagaatagccatacccttgctgactacatcatccagaaggaatccacactccatttggtcctgcgattgacaggtggcatgcaaattaatgtcaagaccatcacctgaaagaccatcacattgt

SEQ ID NO: 202376 - DNA, 400 bp, Gossypium hirsutum
  unsure (1)..(400): unsure at all n locations
acctgttgctgtcaaacgcattcttccatcactttcaggtgacagattagtgattcaggatttccggcatgaagtgaagttgcttgtaaagctccgtcatnctaatattgttcaatttctcggagctgtcactgacaggaagcctcttatgttaattactgagtatttaagggggggtgatcttcatcagcatctcaaggaaaagggtgcacttcatccatcaactgccatcaactttgctttggacatcgctaggggtatggcttatcttcacactgagccaactgtgattattcatcgggacctaaaaccgaggaatgtgctttcggtcaactctagtgcagaccatttgaaagtcggagactttggactgagcaagctcatcaaagctcaaaattct

SEQ ID NO: 202377 - DNA, 365 bp, Gossypium hirsutum
agaatacataatggccaacgttgctccgggaaatgccggcgggcacttcggagattttccggcgtttcatacctacggcggtcaatttattcagtacagtatttttggaaacttatttgagatcacgtctaaatatcggcctcccatcacgccaatcggtcgtggagcctacggcatcgtctgctcagtgttgaattcggagacgaatgaaatggtagcggtaaagaaaatagccaacgctttcgataatcacatggacgctaagcgtacacttcgtgaaattaaacttcttcgacatttggatcacgagaatgttatcgcaattagagatgtcatttctccggctttgcggagagattttaatg

SEQ ID NO: 202378 - DNA, 407 bp, Gossypium hirsutum
  unsure (1)..(407): unsure at all n locations
cgaggttcaattaattaacaagaatggctctttcagctggcggtcttctcactgcccttgcggtactctgctctttctttttcattctattttacatctcatcaagcaaaaatggaaaaggaaaaggaaaagggaaagccattccgggtccgcgacccttgccaattattggaaacctccacatgttaggcatgcttccacaccaatccctttatcacttggccaaaaaatatggtcctatgatgtccataaggctaggcgttgtgccaactgttgtcgtttcattnnnnncaagccgccgagatatttctcaagacacatgatgctgttttcgcaagcaggccaagacttcaagtcctagaattaatttacaatggcaaaaggggcatagcattcacggaacttgg

SEQ ID NO: 202379 - DNA, 400 bp, Gossypium hirsutum
gccagtggttggtttaggtgcttggcgtatggatggaagagacgttagagacctcatcatcaactccatcaagcttggttatcggcatttcgattgtgctgctgactacacgaatgaagcacaagttggtgaggcattgtctgaagcattcaaaactgggcttgttaagagagaggacctctttattacaaccaagctttggaattctgatcacgggcatgttcttgaggcctgtaaagacagtcttaagaagcttcaattggattatctcgatttgcatctagttcactttcccgttgctgtaaagcacactggagtcggacaaacggacagtcctttggacaaggatggagtcctggacatagacacgactatatcgttggagactacctggcacgcg

SEQ ID NO: 202380 - DNA, 251 bp, Gossypium hirsutum
gtgatacaatgattgtgaagccattggtttgcttgatgaccttgattaagagctcaacacatatgccatgagggttcgtgaatggtatgggtggcatttttcagagcttacttagatcataccagacaatatcatgtatgccaaggcagtaaaactaatgggtgaccgtgctaatgctgctaagctcgacttttcagaagtattaccagaagagtttgagacagaatttaaggaggcagcagtcatattca

SEQ ID NO: 202381 - DNA, 319 bp, Gossypium hirsutum
acaacatgttcgtgttcatgcaatggaagcagttatgggttggtgggatcttgagcaatggcttcaaagtttaacaggtgtatctccaggtgaaggcactggtgcaaccatgtctgatgatgaagatgaagctgtagatagtgataccagcttgtttgatggaagttttgatgggattgacagcatggggtttggccccctcgtcccatccgagactgagagatcactaatggagcgtgttatgcaagaactgaagcacgagctgaaacagtgttacaaagagaaaattgtggacattagagaggaaattctacgtaag

SEQ ID NO: 202382 - DNA, 324 bp, Gossypium hirsutum
ggaacatttttaactggagctaacagggtgatcatctgggaccctgaatggaacccgtaacatacatgcaagcaagtgagcgtgcttggcgtattggtcagaataaaatgtaagctgatattgatagattactcgtggaacaatccaatagaatgtgtaccatccgcagatttactaacatttttttaccaatgagatactgaagaacccttaatagagaaagttctttaaagctcgagacatgaaagatctttttggtctgaatgatgaacgacagaatgggtcgaccggaacatctaatattttcagtcagttggcaaaaga

SEQ ID NO: 202383 - DNA, 294 bp, Gossypium hirsutum
aacacactgacctcagaaagagcacccaaaagaaaaagcgactgatcaacgaaggatttctagggttttttttcggtatcagcaagcgatggcaatggctgctctcagacgcgaagggaggcgtttcgcccctctgatctctccccgtccaattactgctgtccgatcctctcctatcgttcccactcacgaagatgagggtccgattggtgttcgttatatttcaacccaagtcgttagaaaccggatgaagagtgttaagaatattcagaaaattacaaaggctatgaaaat

SEQ ID NO: 202384 - DNA, 401 bp, Gossypium hirsutum
  unsure (1)..(401): unsure at all n locations
gagaaactaaatagagatgtgcttcaaaaatctttcagagagatgatatctactctccctaaagagaattgttggggtattcctgaagctctatatcaatatcagggtttttggctcacccccccttttctacaaggagcattgtcggctcaacaacaattccaggctcaacccactgatatcatcctttgtagctctccaagaacaggtgcagcctggttaaaatccctcactttcgccactattacaagaacttcatacaatgattccaccacccctttaccnnnctnngatgcctcatgatgttgtgcctttcatggagttcgatcatgcccagttttccactaatcgacatcttggaattcctcttttagccactcatcttccttattccttcttac

SEQ ID NO: 202385 - DNA, 378 bp, Gossypium hirsutum
  unsure (1)..(378): unsure at all n locations
gcaaattcccttcttttccccttcacccaagcctaaaagatcatggcgacagctcaaatcagcaaaaaacgaaagttcgtcgctgatggagttttcttcgcggaactcaacgaggtattgaccagggaactggctgaggatggatactctggagtcgaagtcagagttactcctatgcgtaccgagatcatcatcagagccacccgcacccaaaacgttctcggtgaaaaaggtaggaggattagggagcttacctcagtggttcagaaagcgattcaagttcccaagaaaaannncgtcgagctttacgctgagaaggtcaacaacagaggcctttgcgctattgcccaggccgagtctcttcgctacaagctactc

SEQ ID NO: 202386 - DNA, 310 bp, Gossypium hirsutum
  unsure (1)..(310): unsure at all n locations
ctaaagttgctgagatggtgactcaaacctttggagacatgctgttttcacctggctcggaatgcctgaaggaattcccgtctccagaatcattgaaaggacgcataatcatatctactaaacctccaaaggaataccttgaggccaaagaagttaaggaaaatgagaacgatccagagagggttaaggctagtgatgaagaagcttggggaaaagaagttccggaccttctcanagacgattacaagaatgacttgggtgaagaagatgaggaagatcttcgatttncatggagattagtcacaacatg

SEQ ID NO: 202387 - DNA, 406 bp, Gossypium hirsutum
gaagcatggccgtcgggaagaacaagaggatttccaagggaaagaagggaggaaagaagaaggcagcggatccttttgctaagaaggattggtacgatatcaaggctccttcagttttcactaccagaaatgtgggaaaaactctcgtcacccgtactcagggtaccaagattgcttctgaaggactcaaacaccgtgtgtttgaggtttccctggctgatcttcaaggtggtgatgaggatcatgcttacagaaagattcgtttgagagctgaagaagttcaaggaaacagcgtcgaggaccaacttctagggaatgaattttacaactgacaaactgaggtctttgcttcgttaatgggcacaccctgattgaagctcatgttgacgtgaagacaactgacaat

SEQ ID NO: 202388 - DNA, 388 bp, Gossypium hirsutum
  unsure (1)..(388): unsure at all n locations
cttcactcttctctcaccatgtcattgctgtctttctgcttcttgttgctgtttacttttagtgccaaagctgttgttcctccatctgaaacttttaggtttgtcaacgacggagaatttgggccgtttgttgttgaatatgatgcaaattaccgtgtcataagcatagctaatgcccccttccagcttgcgttttataacaccacccctaatgccttcacccttgcgttacgcatggctacaacgcgttccgagtcgctcttccgatgggtttgggagggacnncagggggaaccctgttcgcgagaacgccacgttctctctcgggactgacgggaaccttgtcttggctgatgccgatggtcggattgcttggcaaagtaacact

SEQ ID NO: 202389 - DNA, 371 bp, Gossypium hirsutum
  unsure (1)..(371): unsure at all n locations
acatgctgttattgagttaactagaaaggctgangaaatgaccagagctctgaatcttgaccatgttcttgaagtttctaacaaacagtgcccttgttacaattcaatgggagaagctgacattgacaacaataagctaaggaaagcagcttctcgagaagatgccactgacaactatttatattgtccaaaagctaaagatattgagagcggagatttgaaacatttccaaaagcactgggctaatggtgagcctgttattgtcagcaatgtccttgagaatgcatctggtttgagctgggagccaatggttatgtggcgtgcttttcgtcaagtaacaaataaaaaaagtgatccccaattggaagtta

SEQ ID NO: 202390 - DNA, 336 bp, Gossypium hirsutum
atctctacttccatttcatctgccatcaatttgctgtgaagatcatgttggctatttttcacaaggcatttgctaatccaccagaggagctgaatagtccagcttctcataaatctaccaagaagcctaaacagcctgaagaaaccctaaatgatttcctatctcatcaccctcacaacactttctccatgagctttggcaacgctgctgttttggcttatgtccgccatgaacgtgctgcttcagttcatcagaggttgttttgtgggtttgatgacatatactgcctcttcttagggagcttgaacaatctatttatgctgaatagacaatatg

SEQ ID NO: 202391 - DNA, 384 bp, Gossypium hirsutum
ccaaaccgcaagtctactcgctctcgttctttggctgctgaggatctgagaagcttcatcgccaaattttacagagttcattgaaacaaattagctagtttcatgggtttgtcgtctattggcactgctactgaaggcatgcaactctgcatatttgatttgagaagaggccaacatgaagggcaagaacttgataaaattttgtacttctttcctcctgatttgcccttttcgactcaactctctgtggttgggctcagcgaagggcttattacattcacgcgaattttctctccggaggctgcttgcgacgttatagaggcagagaggcactctcatgtcttttacgaggcagagccagatatttggatggttatgatagtg

SEQ ID NO: 202392 - DNA, 423 bp, Gossypium hirsutum
  unsure (1)..(423): unsure at all n locations
aaatgaaagacacgcttaattagaaattttctctcctatttcttcgttcccttaattaaacacaaattcccattttttcccgctgaagaaattatgagtgatcacctggttttgggtgtcgaccgtctgatgaagccggaggagtcggatgctggtccctcaacggaggttccggggtcgtcgtgcttgttggagtctaaggagaagggggttgtcaacggagaggaggaggaggagccgctgattcagtcggcggagtgccgcatttgccaggatgaagattccattaagaatcttgagactccatgtgcctgcagtggcagcctcaagtatgcacatagaaaatgcgtgcagcattggtgcaacgagaaaggcaatataaagtgcgagatatgtcatcagccttatgaaccangttacact

SEQ ID NO: 202393 - DNA, 390 bp, Gossypium hirsutum
cttaaattcaaactttgaatgatccatttcacttctcatgagctttcgtttttttgttctttttaccctgttttcgtttctcattttcctctttgctagctctttgaatctctgagggaagatatggcggccaatgggaacggagtttcgacgacgccgaagagttcgttggcgaggattcagacgcagaagaacggtggaatctgtcatgacgatagcgggaagcctgttaaggctcagacgatcgacgagcttcactctttgcagaagaagagatcggcgccgacgactcctcttgacggcgttcagggtacctttgccaccatttctgaagatgagcgccagaggcagcagctccagtccatcagtgcatcgttggcgtcactcact

SEQ ID NO: 202394 - DNA, 447 bp, Gossypium hirsutum
  unsure (1)..(447): unsure at all n locations
gtcggcatggcatttgatacctctcagcattcaaactctcttcaaggcaacctcgatcttacacagtctgctttaggccaacaaggattttcttcaggccaaatgaatggacacaacaggagtgcagctgttgcaagcaaggcaatgttctcaacaggcgatgttaaggagctcggaagtgcacaaaatgttaaccaacatctcaacaaccttcttgttgacaatacaataagggtcaagtccgagagagtttgcgataccagccctgccaatatattccccgatcacttcggacaagatgatctcatgagtgctcttctcaaacagcaagaaagtgttgcatcatctgaaaacgagtttgacttcgacgggtattctatgaataatattccagtgtanggtgttattccatactccagttcacgtcgtgattgcagtttccgatgt

SEQ ID NO: 202395 - DNA, 439 bp, Gossypium hirsutum
gaaggagtttaatttgtcgtcaatgcaaatattggaaaagacccgtcctactcccttgaccggcttcgagaggaaaatgatgccattgttttggcaattggagccacaaaacccagggaccttcctgtaccaggacgagatttatctggtgttcattttgcaatggaattcctacatgcaaatactaaaagcttgcttgatagtgatctccaagatggtaactacatatcagctaagggcaagaaagtagtagtcatcggtggaggtgacactggtacagattgcattgggacatctatccggcatggatgtagcagcattgtaaatcttgagttgcttcctcagccaccgcagacaagagctcctggcaatccttggccacagtggcctcgcatattccgtgtagactatgggcaccaagaagctgctaccaaatttg

SEQ ID NO: 202396 - DNA, 373 bp, Gossypium hirsutum
atttcttccgttgatctttgttagagattagctttgtaatttttcattatgggaaagatcaagatcggaatcaatggatttggaaggatcgggcgtttggttgcgagagttgctctccaaagcgatgatattgagctcgttgctgttaacgatcctttcatcaccactgaatacatgacgtacatgtttaagtacgacagtgttcacggtcaatggaagcatcatgagcttaaggtgaaggacttaaagacccttctctttggtgaaaagcctgtcacagttttcggtatcagaaaccctgaggaaatcccatgggctgaggctggagctgagtatgttgttgagtctactggtgtttttactgacaagggac

SEQ ID NO: 202397 - DNA, 375 bp, Gossypium hirsutum
  unsure (1)..(375): unsure at all n locations
gaaagctgctggtttttcatactttgacatatgcgctagatttgaagccaaactatgtgcgtgcttgggcaaacatgggtatcagttacgccaaccaggtttgagtttttgttggatgcatggtccaggattagctgaattcatgcatagtgacgacttgtttgagctaattgctgatcttaaagtgtacattctatcattattttgttctatttgtattttgttagatttctggtgtagtatgataagtccggtattttgtttgattgttattgataaactttttatttggtgggatatatatttatatcatagatgttattcttcttttcaatattttgataatgaatnttaattttttttattaaacaaaaa

SEQ ID NO: 202398 - DNA, 291 bp, Gossypium hirsutum
agaaggctggcagatggaagcagtccattgcattgtgaaagaaagacaaccattacaaagatgcaatggaaacagcgtcacagtctggtgaacgtgaacttgccgaggagttacttgtttactttattgaacagggcaagaaggaatgctttgcatcatgcctctctgtcagttatgacttacttcgagcagatgttggactagagctagcctggattcacaatatgatcgacttcgcatttccatatctgttgcagtttatccgcgaatataccggcaaagcccatgaac

SEQ ID NO: 202399 - DNA, 356 bp, Gossypium hirsutum
ccgcatagaaaagggtgtaaagtttctctgtaccaggatgctgatatcccagacggatttgtgcctaaaattcctcttgctggaggcaagaattatgagccacatagatgctgggaagatatttttgatgctatcaccaacgctaaacacatgatctacattactggttggtctgtttatactgagatcagtttggtgagagactcaagaaggccaaagcctgggggtgacatcactattggtgaattgctgaaaaagaaagcaagtgaaggtgtcagggttaatatgcttgtttgggatgatagaacttctgttggattgctgaagaaggatgggttaatggccacccatgatga

SEQ ID NO: 202400 - DNA, 420 bp, Gossypium hirsutum
cccagactcactttgttgtcgtgtgtatatacagatataggttatagaagcaaaagagcccatctctatatagactacctcaggatctgcaacatcggtacccaaggtactgactttcgctctgaattcctctgggtcaggaatttggagagtgatcactactgaatcaaaatcaaactttggggggaaatggagttttccaagatttttacgatttgtttttctgtattgctgttgtactcctacttggcctatggtcaagcaaggagccctcctccggtcgcaatgagcccaacttcagcaccagccccagcaacggcaccggcatatgtaaacctcacttatttactctcagtggctggtccatttcacactgtccttgactaccttgagtccactaaagtgattgacacctttcaa

SEQ ID NO: 202401 - DNA, 313 bp, Gossypium hirsutum
tgactatccaagctactcttcgcatttatatttagttctgatggatttatgcagttgctatccatgcctgtcttcaatacaggctgaatatgtactgtcctcttttttcattgtttcttctgatatgttgcataaactctaattaatttgtgaattttccattgtcttcattttcctgtcctccagagttcgaagatgatccggacctctatgtgctgagaccaataaaatatgtgggtattgaagtctggcaggtaaaggctggttcggtttttgacaacatattgatttgtgatgacccacaatatgcaag

SEQ ID NO: 202402 - DNA, 413 bp, Gossypium hirsutum
aaaaaatcttctgatttttctgagtctttttcttatcttgtgtttggctcctgagaaagtgttttaagaagaacaatgaatgcattagtggcaaccaacagaaacttcaagctagcagccaggcttcttggtttggattctaagcttgaaaagagtctcctcattcccttcagggaaatcaaggttgaatgcaccatacccaaagatgatggcacattggcaacttttgttggctttaggattcaacatgacaatgctagaggtcctatgaaaggaggaatcagatatcaccctgaagttgaccctgatgaagtgaatgcattggcgcaactaatgacatggaagacagcagttgcaaacatcccatatggtggggctaaaggtggtataggatgtaaccctggagagttgag

SEQ ID NO: 202403 - DNA, 426 bp, Gossypium hirsutum
ccgcatctttgaggtttgatggagccctgaatgtggatgtgactgagttccagactaacctggtcccatatcccaggatccactttatgctttcttcttatgcccctgtcatttcagctgagaaggcttaccatgagcagctatcggtggctgagataaccaacagtgcttttgaaccctcttcaatgatggccaaatgtgacccacgacacgggaagtacatggcttgctgccttatgtaccgaggagatgttgtgcccaaagatgtgaatgcggctgtggccaccattaagaccaaacgcacaatccaatttgtggattggtgccctactggattcaagtgcggtatcaactaccagccaccaactgttgttccaggaggggaccttgccaaggttcaaagagctgtctgcatgatcttcaact

SEQ ID NO: 202404 - DNA, 441 bp, Gossypium hirsutum
  unsure (1)..(441): unsure at all n locations
cttcctttggtactcaagaaaaagcaagagatgggttttggaaggaaagagtacgagttcttgagcgagatcggattgagttctggcaatttgggatgttttgtgaatggcacctggaaaggaagtggccctgtggtttctactcttaatcctgcccataatcagaaaattgccgaagttagtgaggcttccatccaagactatgaggaagggatgcaagcttgcagtgaagcagcaaagatttggatgcaggttccagcccctaagagaggtgacatagttcgacaaataggtgatgcattgagatccaaactacagcagcttggccgccttgtttctcttgagatgggaaaaattcttcccgaaagaattggngaagttcaagaaatcattgacatgtgtgactttgctgtgggttaagcaagcaattgatgggtctgt

SEQ ID NO: 202405 - DNA, 438 bp, Gossypium hirsutum
gtcatcgtggaaaccacttctttatccagaggagaagtgaggagtgtttcaattcagaactactagcttgtccagtggataatacatctgcaacaacagttcttattcctcacagggcaagtgtaaagattcagtatattaaactttttagtgatcatcttgctgtctctgagcgtgaagaaggtttgcccaaaattactgtttaccatcttccggaagttgaagagccactcataaatcttgaagggggtaaatcagttcaatttattgaccctgtatactcagttgatctatcagtatcacagttttcctccaccattttgcggttttcttatagctcattgaggatgcctaattctgtctacgactatgacatgaatactggggagtctgttttgaagaagattgaaactgttttgggagggtttgatgcatcta

SEQ ID NO: 202406 - DNA, 368 bp, Gossypium hirsutum
ggcatttgctttaattcagttgttcagtatcatcatgcttatgtcccatgttgcctggcaaatcttccttctcttccttgccatcctcagtatctccttctggtatcagaactattatattacgactgctagggagctagccaggatggttggaattagaaaggctcctattttacatcatttctcagaatctatcacaggcgcaacaacaattcgttgttttggccaggaagacaggttcatggagaaaaacttgagcttaatcgatgattactctcgtgtagccttccataactccagcacaatggaatggttgtgtgttcgaatcaattttcttttcaacttcgttttcttcctggtgttggtca

SEQ ID NO: 202407 - DNA, 395 bp, Gossypium hirsutum
gaagattgcagggaagctgtctcatctctaatgtttgcagctgctagattttctgatttgccagagttgcgtgagcttaggcatatatttcatgaaagatatgaaaattcactggacgtattcgccaataaacagcttgttgagaattcagcttcaaatccttccacaatggagaggaaagttatggtaatgcatgatatagcatcagagttttccataaaatgggattcaaaagctttcgagcgaagaatgtctgaacctgttgtgatcccacagccacaggaccgaactaaaaaatacgggtctttccatgtcaatggtgaagataataaatcaaattatggaaaacaggaccgacttaaaaaatacgggtctttccatgtcaatggtgatga

SEQ ID NO: 202408 - DNA, 379 bp, Gossypium hirsutum
ctcacctgtatcattctcactcattcactccttcacagttgaaaaaccctttaattttaaaaaggatattttggttatatactgagaaatccaacttcttttgtatctttatccttttggtacttcaattatcaaaagaaagaaaagcatcaacaacaacaaaaaaaagcccatacacttaagtgaaaaaccagacaagagagaaaacaagaaaaatgggtgttctggatcatgtttcagatctgtttgactgttctcacagttccaagcacaaaacgtaagcagttgcagacggtggaaatcaaggtgaaaatggactgcgaaggatgcgaacggaaagtgaaaaaatcaatggaagggatgaaaggggtgacacaag

SEQ ID NO: 202409 - DNA, 417 bp, Gossypium hirsutum
attgaagtttcctttctcgattttctatttagccaaacaagatgcagatcttcgttaagactctaaccggcaagacgatcactctcgaggtcgagagctccgatacgatcgacaacgtgaaggccaaaatccaagataaggaaggcattcctacagaccagcagcgtctgatcttcgccggaaaacagctcgaagacggccggaccttggccgattacaacatccagaaggagtcaactctgcacctcgtcctccgtctgcgcggtgggatgcaaatcttcgtgaaaaccttgactggcaagacaatcactctcgaggtcgagagctccgacacgatcgacaacgttaaagcgaagatccaagacaaggaaggcatccccccagaccaggaacgtctcatctttgccggaaaacaac

SEQ ID NO: 202410 - DNA, 279 bp, Gossypium hirsutum
aaaagataacgatattcacaagaaaaaagttgaatttgattggtacagcttggagggcccggctgggatgttaagcttggaagaagggattcaaagaccgccagcttttctgctgcgaatagtggtgtcatcccacctccgaccgccacccttagtcaactcatcaacagattccaagcgcgaggtctttctgccaaggacatggttgctttatctggtataatagaccattctttcctcccctgcactgcactactttattatatctatacatctctt

SEQ ID NO: 202411 - DNA, 423 bp, Gossypium hirsutum
tggaaatgctgtgcctgtatggtacaacatggtcaatcagggtcttgttaatgaaccagttttttcattttggcttaaccgcaatcctgaggatgatgttggcggagaagtggtttttggcgggatggatccaaaacattacaagggggaacacacttatgttcctgtaacacagaaaggatactggcagttcgatatgggtgatgttctgattggtgaccaaacaactggactttgtgccagtggctgcagtgctattgatgattccggaacttccttgttgactggacctactgctattatcgctcaagtcaatcttgctattggtgcaacatgggttgtaagtcaagaatgcatgactgtagtttcagaatacggagaaacaataattgacttgctattatcgaatgaccaaccactgaa

SEQ ID NO: 202412 - DNA, 379 bp, Gossypium hirsutum
gttttcgtaagggaaagggtgaggattggtaaacgacacgcctttgtcactcaaaccctattctttttcccaatttctcgaatctagggttttagaatctccttttcctttccaaatcaaccttatttcattttttttcttctcttagaaataatatcgtcaatgagcaacgaaagagttaacttcaacatgtccggtcttggcgatgctcttaacgccgaagcacgagctggtctcgttaacgctctcaagaataaacttcaaagtcttgctggggatcactccgatgtgctggagagtctatcaccgattgtcaggaagcgtgtcgaggttcttagggagatccaagcatgttctttttccctaagccttttcgata

SEQ ID NO: 202413 - DNA, 338 bp, Gossypium hirsutum
cacactcttcctttagcaaaaccacattctcaagagaaacaaaggggaaaaaaaaagcagaacgcaagtgaagagagatcaggaaagaaaattaaagtcgggttggttacgggttttcgagctttgttcgtaaaattttgtgtataagtaacgcaatgactagcattatggatgcagaacatgacaagtatagcatgattaatttcgaagagacggagttacgtttaggattacccacaggcattgaaaatgataatgaaaccgccaaaaataatgggaaaagagggtattcggatatgggtgatttgaagcttaacctttcaacaacaaaggaagca

SEQ ID NO: 202414 - DNA, 381 bp, Gossypium hirsutum
ctccaaggcaaccgtggcatgatttacacagcaaagtggaagggcctgctgcatatgatgttcttatcaactttgagcagcggtggaggaaatcaaccaagtggaaagagttcagtctactttttaaaggaaaatctcactggagtgatgatgctatgattaggatagaacgaatctcatggatacaaagtcctcccttagctgtgacagatgatggtactacaatagttccagatgatgatcccaaagtacatgttcttagtaaagataatcgtgaaaactggaatgtccagattttccgctccattgactctggatcactgaaaggatttccaaaatacatcaaaaaagctgaaaatcagaatcttttctgtgcaaaaa

SEQ ID NO: 202415 - DNA, 349 bp, Gossypium hirsutum
gcggcggctgctgcttctcaggcagccgcagcctcggttcccgtctctgatgacgtggcggttgtagaaggttgtattgacaacgatagtgtacagattggggattcatatgattccaagacatcgtttttgatctccgatgggagcatcactgttcatgctggtgaaagattaggtcgcggtatagttactgatgcaattactactccagtggttaatacttctgcatatttctttaagaaaactcaggagcttattgacttcaaggaaaaacgccatacaagttttgaatatgggcggtatggaaatccaacaaaatttattggtggacacaatgatgtccttgctg

SEQ ID NO: 202416 - DNA, 389 bp, Gossypium hirsutum
cggatacggagaaacatttgcgccatgagaaacattgcaagtatattagctctcatgatgttgcttattgggctcggagttttgatcaggacctcgtgagagcttgtagggatcattatcacaagaggtattggagagttggacttggtttagcgtttaggcttgttgctttggagcctaacttcaggaagctcctaggggatactctcaactctgcctacaagataaccagtagccgattgatccttttggactacgatggcactatgatgcctccaacttcagtgaacaaggggcctagtcatgaggttatttcggttttgaatcgtttatgcgatgaccccaaaaacattgttttcattgtgagcggcatggaccgggataccctg

SEQ ID NO: 202417 - DNA, 404 bp, Gossypium hirsutum
agttgcttcagctataacccaaaccgtgttggctcaaaactgtggctgtgcgccaaacttgtgttgcagtcaacatggttattgcggtcagggtaacgattactgtggcactggttgcaaagaaggcccttgtttctccaagtctcccactggtgcttcagttgcctccattgtttcacctcagttcttcaacgggataatcaaccaagctcgtgcggattgtgcaagcaagaaattctatacacgacaagctttcctgactgcacttgattcctttcccgatttcggaaaattgggttctgatgttgaatccaagcgtgagattgctgcattcttcgcccatgctacccatgagactgaattcttttgctatacagaagagcaggataaaagtaatagctact

SEQ ID NO: 202418 - DNA, 442 bp, Gossypium hirsutum
attctctgctgctttcagtttccgaaggaaattcgccatgggtctctcgtctgccaatggtgttattttcttcggtgatggtccctatgtgttcctccctggagttgatgcatcagaatcgcttactttcacaccgctcttcattaaccctatcagcacagccccttctttccctctcggtgaaccttccgccgagtatttcatcggcgttaagtccatcaaagtgaacgaaaaacccgtctcactgaatacaacgttactgtccattaacagcgaaggtgttgggggcacaaagattagcaccgtgaatccctacactgccctagaggcttccatcttcaaagctgttactgaggccttcattaatgaagctgctgctaggaacatcaccagggtggctggtgtggccccatttgaggtatgtttcagctcaagaaacatt

SEQ ID NO: 202419 - DNA, 430 bp, Gossypium hirsutum
  unsure (1)..(430): unsure at all n locations
catgtcttaaattccgattataaatttcagacagaaattatagagttaattgaagttggtttctgaatggatgaatcatcgtcatcttcatcttcgtcttcggacaagacggccaatctggattctgcgctccatttattgggatttcaattacaagatttgtcccctaccaaagttaacggacacctacacgttacccacaagtgctgccagccgttcaaggtgttgcacggtggagtatcggctctgatagcggaggcgctggctagcatcggggctcacatggccagcggtttccaaagagtggctgggatccaccttagcatcaatcacttaaagcgcgctgaacttggtgactntatcttcgctgaagctacgcccgtcagtcctggcaagaccattcaggtatgggaggttcgactgtggaaaa

SEQ ID NO: 202420 - DNA, 424 bp, Gossypium hirsutum
cctgcttctgctgatatcaagtctgctgaagatgccagtgattttattgatgaaaagaagatagtaattgttggggtgttccccaaattctccggtcaagagtttgacaactatatggctcttgctgagaaattgcgtcctgattatgaatttggtcatactttggatgctaagtaccttccccgtggcgagtcatcagtgactggccctgtcgtcagacttttcaagccttttgatgaactctttgttgacttcaaggattttaatgtggaagctctagagaagtttgttgaagaatctagcattcctcttgtgactctctttaacaatgacccaagcaatcaccccttcattatcaaattctataacagtccccttgctaaggctatgttgtttgcaaatttgagcaatgaatgagttgatt

SEQ ID NO: 202421 - DNA, 434 bp, Gossypium hirsutum; identical to SEQ ID NO: 191432

SEQ ID NO: 202422 - DNA, 352 bp, Gossypium hirsutum
aggttatagtattacgggaaacaactttctttgtgcgtcttctgaacatatatgcacagatgtttcttatccattaaatgtggcaggctcagtttcgtcttctcgagtcagtggaaaccatcattggctgctttctgttgccataggaattggttttgcatttgtggtttccgtgatgctgcttgcttgttgggtgcgttggtacagatctcggattatgctaccctcatacgtgcagcacgattatgattttgaaattggtcatataaagaggttctcctatcgtgaactgcaaatcgccaccagtaattttaactccaaaaacattttaggacaaggaggatatggagtt

SEQ ID NO: 202423 - DNA, 432 bp, Gossypium hirsutum
gaggagttacgagagttacgtggtggttatgaaagtgagcgcgccaatcgcgacgcatcgtgggttgaaacgtgccgcgattgatttggttacggtgttggatattagcgggagtgcgatgaggttgcagatggtgaaacgggcgatgcggttgattatctctttgctcgacgagaaagaccgtttgtcgatcgtgattttctcgtcgagctcgaaacggttgttgccattgaaaagaatgagttccggcggacgacgatcggcgaggaggatcgtcgatgcgttgggaagtaaccgacaagggatgagtgtcaacgacgcgctcaaaaaggcggccaaagtgttggaggatcgtagagaaaaaaacgccgtcggcagtgttatgatcttatcggactgtcatgataaacagtcacagtccaatcccactaa

SEQ ID NO: 202424 - DNA, 377 bp, Gossypium hirsutum
cacactctttctttagcaaaaccacattctcaagagaaacgaaggggaaaaaaaaagcagaacgcaagtgaagagagatcaggaaagaaaattaaagtcgggttggttacgggttttcgagctttgttcgtaaaattttgtgtataagtaacgcaatgactagcattatggatgcagaacatgacaagtatagcatgattaatttcgaagagacggagttacgtttaggattacccacaggcattgaaaatgataatgaaaccgccaaaaataatgggaaaagagggtattcggatatggttgatttgaagcttaacctttcaacaacaaaggaagcatcggtggatgaagctgagaagatgaaggagaaaaacact

SEQ ID NO: 202425 - DNA, 434 bp, Gossypium hirsutum
  unsure (1)..(434): unsure at all n locations
cactttgattcccatgttgagcaacataacgaagattaggttcagaaatctttcaaagagatgatttctactctccctaaagggaacagctggggtcttcccgatcatctatatcagtatcaagatttttggttcacctcacctttcctacaaggagtcctgttagctcaacaacagtttgaggctcaacccactgatatcatactttctagtgcccctagaaccggcacagcctggttaaaatctctcactttcgctactattacaagaacttcatacgatgattctaccacccctttgcttttcaggatgcctcatgatgttgtgcctttcatggagctngatcatgctcatttntccgctaatcgacatcttggaattcctctcttggccactcatgcctcttaattcttcttacctacatcaataattga

SEQ ID NO: 202426 - DNA, 367 bp, Gossypium hirsutum
ctgatattgagaagaaaggctgcagtgccgaggatttgttactcgagatggagcgtattctccgtccaagtggattcgttatcatccgggacaaacaaccagtgatagatttcgtaaagaaatatttatcagctttgcactgggaagcagttgcaacagctgattcagataatgaaagggatgacattggttttatcatccaaaagaaattgtggctgacaagtgaaagccttaggaattctgaatagagtatttcaaccctcacagattccccctatcttatttcatctgcagcttctaagagattaagaaggccaggcattattaaaatgcagtaaacaatttcattttggagcaattaacaaat

SEQ ID NO: 202427 - DNA, 367 bp, Gossypium hirsutum
  unsure (1)..(367): unsure at all n locations
agcatgaagtatttaaccttctttggcacagttaaggacaatggcttgttgggctttgactgagcctgaatatggaagtgatgctagtgctgtaaatccaactgcaggaaagggtaagggaggttggataattgacggacaaaaacgctggataggaaacagcactttggcagatgtgtgggttatttttgccaggatatccacaaccaatcatataaatggatatattgttaaaaaaaattcctctggactgagagctacaaatatcgcaaacaagattggagtgcgaattgttgcaaatggtgatattctctcaaagaatggtctntgttcctgatgaggaccgattacctggtctaaactcatt

SEQ ID NO: 202428 - DNA, 380 bp, Gossypium hirsutum
  unsure (1)..(380): unsure at all n locations
aaatggcccttcgatcgttagccaccaggaaaacccgaaccggggctctcaactccaccaggctggctcagtctcgagccttgcagaccttctcgctccccgatcttccgtacgactatggcgcactcgagcccgccatcagtggagagatcatgcagctccatcaccagaagcatcaccaaacttacatcactaactataacaaggctttggagcagctccatgacgctatccagaaaggagattcttccaccgtcgttaagttgcaaagcgccatcaagttcaacggcggaggtcatatcaaccactcaattttttggaagaatcttgcccctattcgtgaaggaggaggtgagcctncacatggttctttgggttgg

SEQ ID NO: 202429 - DNA, 384 bp, Gossypium hirsutum
gcaagtttcaatggcaaaggcaaacattctcttggttttcttgtgttcactgggattgctactgcttgggggtgttggagtggaaggaaatccgaattacagagatgcactacaaaaatcctttctcttcttccaaggccagagatcaggcaagctgcctgccaatcagaaagtttcatggaggtccaactctggtctttctgatggctcccttgaccatgtagatttgactggtggctactacgatgctggagacaatgtgaaatttaacttcccaatggcattcaccaccacaatgctttcatggggtacacttgaatatggaaagagaatgggtccccagttacaagaggcaagggcagctatccgttgggcgactgacta

SEQ ID NO: 202430 - DNA, 405 bp, Gossypium hirsutum
agaaggctgtcagatggaagcagtccattgcattgtcaaggaaagacaaccattacaaagatgcaatggaaacagcgtcacagtctggtgaacgtgaacttgccgaggagttacttgtttactttattgaacagggcaagaaggaatgctttgcatcatgcctctttgtttgttatgacttacttcgagcagatgttgttctcgagctagcctggattcacaatatgatcgacttcgcattcccatatctgttgcagtttatccgcgaatataccggcaaagtcgatgaacttatcaaggataaaatcgaggctcaaaaggaagtaaaagccaaagagcaagaagagaatgaagtgattgcacaacataacatgtatgctcagttgctacctctagccttacctg

SEQ ID NO: 202431 - DNA, 279 bp, Gossypium hirsutum
gaactagaactagcggatccctccagctgtatcaatccagcgcgatgattttgcttctcgaattcactgtgtcaccatttgcgagggaatattgcaaagatatgaaactggccgatcagattacccacgaacagatctctgagtccaatgaggcctttcaccttttcgacaaggatgccaatactcgcattactaccatggagctgggaactcatatgcgatcacttggacaggatccaactgatgcataacttcgagatgtgatacacaaatttgact

SEQ ID NO: 202432 - DNA, 250 bp, Gossypium hirsutum
gtttgagggacacccattcattgtggaagctggtgttagtgtgggtggaaaagatgttaaacagggtttgaatattttccgatttgcaaatcgaattccgcttctttttgagcaaggtggtgatgttgtcacgaggactgcgctaaagagaatcagttggaataattacaagatcaaccaaacacaagataaaatcggtgtctttgtgagtatagtaagcacgaaaattccatttaaagggactggaaag

SEQ ID NO: 202433 - DNA, 431 bp, Gossypium hirsutum
gagaggtcgaaaaacctggatctaagcttcacaagaaagagacatgtgaagctgttacgatcgttgaaacccctcctatggtgattgttggggttgttggttatgtcaagacaccacgtggtcttcgcagcttgaacaccgtttgggctcagcatctgagcgaggttttcaaacgtaggttctacaagcattggtgcaagtccaagaagaaggctttcaccaagtactcaaagcggtacgagagtgaagaagggaagaagagtatcgaggctcagctggaaaagatcaagaaatatgccactgttgttagggttttggcccacacacagattaagaaaatgaaaggattgaagcagaagaaagcacacctaatggagatccaaagtaatggtggaactattgcagacaaaggtgattttgcttacaagttc

SEQ ID NO: 202434 - DNA, 374 bp, Gossypium hirsutum
cggaactctcgagtcgtctcccactgatggcaccatgacggtccagtgggttcgaaagtttcccttcttctgcagtgacagagaatacttgataggtcgtcggatttggtcgtgtggtcggacatattactgtgttacaaagggagtaccatatccctctattcctagaaaaaccaaacctaggcgcgttgatttatactattcaagttggtgcattcgtgcagctgaatcaaggaaaggggatggccagctgactgcatgcgaggtattactttttcaccatgaaaatatgggtataccatgggaaattgcaaagcttggggtcaagctaggcatgtggggaactgttaggaagattgaccctggcttacgtg

SEQ ID NO: 202435 - DNA, 418 bp, Gossypium hirsutum
  unsure (1)..(418): unsure at all n locations
ctggtatgggaatgggggattttagcaatccttttgatcggtttgagtcgctattcgagggcatgggtggtatgggcggcatgggcatgggtggacgaagttccaggaatagagctgttgatgggcaggatgaatattacagtcttgtattgaatttcaaggacgcagtttttggagttgagaaagaaattgagataacccgactagaaagctgtggaacttgcaatggttcaggtgcaaaacctggaacaacaccatccaaatgtaccacatgtggtggccaaggtcaggttatctcatctgcaaggactccgttgggtgtcttccagcaggtaatgacatgctcttcttgtggtgggacgggggaaatttctaccccatgcaatacttngtctggtgatgggcgggtaaggagaac

SEQ ID NO: 202436 - DNA, 274 bp, Gossypium hirsutum
attcttttttctcttacatgagtacaaccatggcgggtcacagaccgttccctaaggtcttagctcttattctgctctctctcgtcgccatcgtctctgctgaagttttcttcgagaacgcttctaagatggatggggaaagccgctggtaaaaatctggctgggaaaaaggatgaaaacatggctggggattggaatccacttctggaaaatggaatggagatcctaatgccaaaggttttcaacctagtgaagactacaggtttaatgctat

SEQ ID NO: 202437 - DNA, 356 bp, Gossypium hirsutum
gggcaatgaaaaggagggatctcttgttgcggcgctgttggagaagagaagatgatggaacatatgttatcctctaccactcagtgtttcacaagaattgtcccccgcagaaaagctatgtccgtgcctgccttaaaagtggtggatatgtcatatctcctgtgaatgaaggaaaacagtctgttgtaaaacacatgcttgcaattgattggaaattctggaaatcttatcttcgaacttcagcagctcggcctattaccattaggatgcttgagagagttgctgcattacgagaattattcagagcaaaacaagtaaaatatccttcggacaatctttcttctggagagttgata

SEQ ID NO: 202438 - DNA, 363 bp, Gossypium hirsutum
agtaacactaatggttgtgatgatatcaacgaaaatgaaccagatgctaaaagatggtaagcttggatcatagccaaaaatgaaaaacagattctcccattaatgggttcttgttttagcttacgcttttgtgattttttttttttgcaggaaaggtgaaaatgagaatgagggtatggtaggttgtggtagcaaaactgtgaaagagcctagaatagtggtgcaaacaacaagtgatattgatattcttgatgatgggtatagatggaggaaatatggacagaaagtagtcaagggaaaccccaatccaaggttagtcattattctccacctaattgtctactaataagaagcctggatgtg

SEQ ID NO: 202439 - DNA, 433 bp, Gossypium hirsutum
ggtggttcatgagaggataagaggaggagtaagcgaccttggtctgactcttgaagggttcctttttcttcatgctctttttatagaaaaagggcgtcttgagacaacttgggctgtcttgaggaagtttggatataatgacgagttaaagctcaaggatgatattcttccagttccaaccaagcatgcccctgatcagactgtggagctgacaaatgaagctatcgactttttgcgtgggatcttccgattgtatgacagtgataatgatggatctttgcaaccttctgagtttgatgatatctttgtaactgcaccagaaagtgggccttgatgacaactctggatccttcatatcgtatggctaacttgatttgcattggatatggatgtgatccaacttcagtcctttctgttactaggagaagatctg

SEQ ID NO: 202440 - DNA, 386 bp, Gossypium hirsutum
atagggccatcttttcccttgtggcttcgttctcaaaaagatctagaatatctagacatctcaaattcaagaatttcagacgtcattcctaggtggttttgggggctgtcgacccaatttagagatgtaaatctctctagaaaccaaatttctggccagattccgtatctacctaagggtcctaatattttcacttttgtcgaccttagtttcaataattttagcggtccattgcctcaaatctcaatgggttccaatcagtacatgatagacctttctaataattatttctcgggatctcttttccattttctgtgctatcagttgaatggtaccatcacaacaaggtttcttggtatggctaacaatcctttatctggagagat

SEQ ID NO: 202441 - DNA, 441 bp, Gossypium hirsutum
ctcaagcggttgttatgcagggctatggaatgactgaaacctgtgcgattatctcgatggagaatctcgcatttggtgtccgacatactggctcagctggactgcttgcttcatgtattgaagctcagatagtcagtacagagaatccagagcctcttcctccaaaacaattaggggaaatatgggttcgagggcataatatgatgcaaggatacttcaacaatcctgaggcaactaaacagacaatagatgaaaagggttgggtacataccggagatcttggatacttcgatgagaacggttatctctatgttgttgacagaattaaggagttgatcaagtacaaaggtttccagattgcaccagcagagcttgaaggtctacttgtatctcaccctgaaatactggatgctgtcactatcccatatcctgatgatgaaa

SEQ ID NO: 202442 - DNA, 323 bp, Gossypium hirsutum
taaaaatctatttatggataagcttgtttcaagctggtagaaggatcaatctttgcctgaatcttacatattcccaccccatgaaagacctggcaagctacttgttcctaggtgcaacaccgtgccggtaatcgatctcggcgatacccgaaccaatttagttcaccaaatcttgaaggctagccaagagttcggattatttcaggttgttaaccatggagttcctccaaatatcatgagtgaaaccatgagtgttttccacaagttcttcgagttacctgcagaagacaaggcgagccttaccgtacacacaaacgatccaa

SEQ ID NO: 202443 - DNA, 381 bp, Gossypium hirsutum
agaaggctggcagatggaagcagtccattgcattgtgaaagaaagacaaccattacaaagatgcaatggaaacagcgtcacagtctggtgaacgtgaacttgccgaggagttacttgtttactttattgaacagggcaagaaggaatgctttgcatcatgcctctttgtttgttatgacttacttcgagcagatgttgttctcgagctagcctggattcacaatatgatcgacttcgcattcccatatctgttgcagtttatccgcgaatataccggcaaagtcgatgaacttatcaaggataaaatcgaggctcaaaaggaagtaaaagccaaagagcaagaagagaaggaagtgattgcacaacagaacatgtatgctc

SEQ ID NO: 202444 - DNA, 333 bp, Gossypium hirsutum
  unsure (1)..(333): unsure at all n locations
cttcgatgtgatagcagggaccagcaccggcggctgggtgacagccatgctaacttgtccgaacgaaaagaatcgaccattatttgctgccaaagacatcaaagacttctacctaactaattgtcctaacatatttcctcaaccaggatgtccattgttttctcgaacaacaaaagttatcaaagctctatcgggaccaaaatatgatggcaagttcttacataaagttgttagagacaggctatgagaaacaaggttgcaccagacattaactaacgttgttatcccaacatttgatgtcatgcatctncagccagccattttttcaagcta

SEQ ID NO: 202445 - DNA, 256 bp, Gossypium hirsutum
gcgacttcaaacctttcgacggagggatatgaagttgtcgatgatatcaaaacggcgttggagaaagcttgccctcgtgtcgtctcatgtgccgatgttttggcacttgctgctcaaatttctgtttctttgggtggaggttcgacatggcaagttccgttagggagaacggatagtctgactgctcacctggaagggaccggtagtttcccgacctgccactagagtcttgtttatatagtcaaccttgttcaag

SEQ ID NO: 202446 - DNA, 191 bp, Gossypium hirsutum
gctacctctaacctttcgacggatgcctatgaaaacgttgatgatgtcaaaaccgggtgggagaacgctagacctactatccactcatgtgccgatgtcatggcacttgctgctcacatatctgcatcttgtggtggcagtcctacatgtcaaactccgttatggagaatggatattttcactgcgcaccg

SEQ ID NO: 202447 - DNA, 429 bp, Gossypium hirsutum
cccaactcttatgttcatagcaacatcgccggtctcgtcgcgcttctcgaaatttgcaaatccgctaatccccagccagccgttgtctgggcctcctccagttccgtttacggtctcaacgaaaaggttcctttctctgaggccgacaggaccgaccagccggctagtttgtatgccgccaccaagaaggcaggcgaagaaataacccacacttataatcatatctacgggctttcagttactggattaagatttttcaccgtgtacggtccatggggaaggcctgatatggcgtatttttcgtttacgagaaatattctgcaggggaagcccatcaccatttatcggggaaagaatcgggttgatttggcacgagattttacctacattgacgatatcgtgaaaggctgtttgggatcgttggataca

SEQ ID NO: 202448 - DNA, 403 bp, Gossypium hirsutum
gcaatggtttgtcagcctgctgagataattggtcttgtaagaattccaagtcatatccgattttggggaatcgattcaggaatacgacacagtgttggaggtgcagactatggatctgttcgaataggagcctttatgggtcgaaagattataaaagctacagcatcaactaggttgtctcaatcaatgtctactgctaatggggcatcccctgatgaagtggacaatgatggactagaattacttgaagccgaagcttcattagattatttatgcaacttgtcacctcacagatacgaagctctttatgccaatctacttcctcaatcaatgcttggtgaggtgtttttggagaaatatgttgatcatggtgatacagttacagtaatcgataagaaacgaa

SEQ ID NO: 202449 - DNA, 341 bp, Gossypium hirsutum
gttagctactcccatagttggacttgtatggatctttaggggatggcatctccgtaccgagtaacttgctatcattatctcatgacccgagagcatactcgcgaaagctatgaatggcacgctaaagctgattctgactatatgaagtacagtgtagtattacctacgtatgacgcgcgcctcaacattggtatcatcgtatatctcatcttctgacatctccgtgatgtcgatttcgaaataattgttgagaatgatgggagcccacattgtactcaagaagttgtgaaacagctgcagacactctatggtgaatatcgaattttattgagacctatacc

SEQ ID NO: 202450 - DNA, 368 bp, Gossypium hirsutum
gaaaaacgaaaaatcaaatgaaaaaacagtattgaagacgaactctttcgaccaagaattcttgctgccataatcggagaaacggcattaaaattggtgaaggttttgaagagaagacgaaaatggatgctgccaagaagaagtacagtataatagtaccaacgtataacgagcgcctcaacattgctctcatcgtctatctcatcttcaaacatctccgggatgttgattttgaaataattgttgtggatgatgggagcccagatggtactcaagaagttgtgaaacagctgcagacactctatggtgaaaatcgaattttattgagacctagacctaagaagcttggattgggaacggcttatata

SEQ ID NO: 202451 - DNA, 415 bp, Gossypium hirsutum
gagcagtaaagaaaatcagctcattcaagctactgcgttattaaaggagaaagatgaatatgctctgaaagtacaagatgagttgaatgatacaaagatgaagttctctgaagctgaaactgtcatagaacgaattgcagaactcacaaaccgactagttatctcagttaaggatgaagacaataatgtgttgaggcctgttgatgatgtgagcagcgaattaatgcatcagctggtagataggccttctagtgattttggattgcagaaaaagcaacttgaaactgaactcagattcactaaagagagcttaaaagataaagaaatggaagttcttgctgcacagagggctcttgcaataaaagatgaagagctcaaaatggttcttggaaggttggaggcaagaagaaaagaa

SEQ ID NO: 202452 - DNA, 368 bp, Gossypium hirsutum
attcaaaaatcaacaccatgggctcttccggtgaatgtcgggtagattctaacccggattacgatcacgaaagtgaagtaaaggcttttgatgatacaaaagccggtgtgaagggaatagtagattcaggtgtcacacaaatccctcgtatattcatagatcaaagccttatccttgagaagaataacaccgattgttccaataatcagctaggtgtcccgatcatagacctccaaggcatcggtggagactcggctcgccatgccgaggtgattaaccaagttcgaaatgcttgtgcggattggggtttctttcaggtagttcaccatgggattcctgcaagcgttttggatgaaatgattgatggg

SEQ ID NO: 202453 - DNA, 400 bp, Gossypium hirsutum
agatctacaaaatttgcgcatatcactttcccctctgctgcagtatttctctgaccggtgcgcgatggtgtttttgaagggagtatcagcgctatccaggctaaggtcacgtgttaaacagcattccagtctcagcaactctgttagatggcttcaaatgcagtcctcttccgatcttgatcttcattcgcagttgaaggaattgattcctgaacaacaggagcgcctgaagaaactgagggcagaacatggaaaagtgcaacttgggaatattactgatgatatggtcattggtggaatgagaggaatgacagggttgctttgggaaacctcattacttgacccaaatgaaggaattcgctttaagggcttgtcaatttccgaatgtcaaaaactatta

SEQ ID NO: 202454 - DNA, 358 bp, Gossypium hirsutum
atcagtcttcttggtccacaactttggaatctgaaggaaagtcggatcatctacttactatggaagaaaatacagaaaaattggatcaatcttcttggtccatgacttcagaatttgaagggaagtctgatcatctagttgcaaaggaggtatcctctagtaaagttggggttcaacgacattcggaaatagcaactattgatttatttcttgatagatccatcagttgcattcctggtttaagtaaaaggcactctcgccagctagaagaatgtggcttttacactttgcggaaactgttacatcatttttctcggacctatgccgatttacagaatgcccaaactgagaatgatga

SEQ ID NO: 202455 - DNA, 418 bp, Gossypium hirsutum
tgcttttatatcggggatttttggttgttgaactccagtctaggttctggaatctataccaaaaatccattaagtcaaaactcttatcttccagcaagaagagaaagacatatcttggtttttttttttgctgtaaatcttgatgctgcgtaaattgttgtggttgatgcttgagactcatgtctccagttgtcagtgaaatcctccgatccggttttatgataaattcctccctcagacgcaggacccatctcgttcaatctttctcagttgtcttcctctactggttctatgttttttcataaatgacatgcttattttttttactatatatatatatataattatctgttgctagtatatgtgtccaatcgcctttgaggttagattatcctgaaatattagtaatttatatttg

SEQ ID NO: 202456 - DNA, 358 bp, Gossypium hirsutum
gtcgcctccttgctggcacataagttgggaggtacgcagtgtacgattgcccatgctttggagaagacaaagtatccagattccgacatctactggaagaagctcgaggataaatatcatttctcctgccaatttacagctgatcttttcgctatgaaccatacggatttcatcatcaccagtaccttccaagaaattgccggaagcaaggacactgttggtcaatacgagagtcacactgctttcactcttcccggtctctaccgtgttgttcacggaattgatgtgtttgatccttaattcaacattgtgtcccctggtgccgacatgagcatatactacccttacaccgaggaga

SEQ ID NO: 202457 - DNA, 309 bp, Gossypium hirsutum
attgagactacctcttgagtcagaccaagttcttctgaaagtcatttatgctggtgtaaacgcaggtgatgtgaactttagcgcaggccgttattttcaaggaaccaagaaagaccctggatttgaggcagtgggaataattgctgccattggagattctgtaagaaatttggaagttggaactcctgctgcagtcatgactattggatgttatgctgaattcatgaaggttccttcaaagcaaatacttccaattccaagacctgacccggaagttgttgctctgcttacttcaagattaacagcatc

SEQ ID NO: 202458 - DNA, 417 bp, Gossypium hirsutum
  unsure (1)..(417): unsure at all n locations
ctttagcttttcttctgctttatctcatctgtatttgtttggtgtacaaaatgacggccttgctggtgatttatatgtaaatgctcctctttgttcttcaatctctaatggttcagtttgctgtgacagaagacattttcgatctgatatttgttttatgaaaggtgacataagaacacattctcccagctcttcggttttcctttattcaccaaaaaaatagcgacgatgacgcttcaagtacggttgatggtgatgaacttcaacacgaaaagatcaaaccttatacccgaaaatgggaaacgagtgtaatggccaccattgatgaattgaaccttatctcanagagacgaaattcggacgttgaccattcttgtgacgtaattcatgatgttccagcagttatcttctcaactg

SEQ ID NO: 202459 - DNA, 367 bp, Gossypium hirsutum
tacaaacaagagagttaaagatattgaggtttgtgttgcaattgtttatggaactattgctttttatctcggtcgaaaggctagtgagtcgcaatcacataagtggactgtttacgtgcgtggggcaacaaatgaagatcttggagcagtgataaagcatgttgtatttcaacttcatcccagtttcaataaccctacaagaattgttgaagcaccaccttttgagttatcagaatgtggttggggtgaatttgaaattggcattagcattttcttccatagtgatgtttgtgacaagcatttggatttgtgagttgtttatttggttgctcacttgatttgatgcccttgttactaactaggctct

SEQ ID NO: 202460 - DNA, 339 bp, Gossypium hirsutum
ggtaagttcaagcttggaagaaagattgggggtggatcttttggagagcgttatttaggggaaaatgtgcaaactgcagaggaagttgctgtcaaactggaatctgagaagaccaagcatccacagcttcattatgagtcaaaattgtatatgcttcttcaaggaggaactggtattcctcaccttacgtggtttggagttgaggcggattacaatgtcatggaaattgaccttcttggacctagattggaagatctgttcaactactgcagaatgaaactcttattaaaaactgtgccgatgcttgctgatcaattgattaatagagtagaatatatg

SEQ ID NO: 202461 - DNA, 349 bp, Gossypium hirsutum
gtacgatgttcacaagctcatgcacctagagaaactgattgatattttcctttcacacgattgtccgctcggcatcactgattatgggaactggcaacatcttgtttgctgcagaaaaacatttcaaaggtgagatccagcaaggaactcttggaagcaaacctgctgctcagctgctcaaaaaaactcagaccatcgtattggttttcagctcacttgcactgcaaattcaccgctcttgttgaacatgaagagggtggtctagtgacaatttcttgcactcgataaatgccttccagggcgcaagttcttgcaagttgttgatattgatctgatctaagaccttatg

SEQ ID NO: 202462 - DNA, 414 bp, Gossypium hirsutum
gaaattggtgtgattccacaggtggctagtgcaacagcaacattcgtaatgatgttctcttcatccttatccgttgttgaattctatttgcttaagaggttcccaatgccctatgctttgtacttgatgggagtatctattttggctggtttctggggacagtatttcgtgagaaaactaataacaatccttaggagagcttcacttatagtgttcatcctatctggtgtcatctttgcaagtgctctcaccatgggagtcataggcattgagagaagcattcgaatgattcacaaccatgagttcatggggtttttagatttttgcagcagtcaatgatcgttgactaagtaaggatgttgttggtcatcaccttgttgaccaatcccaacatattcaatgtctcgtaagaat

SEQ ID NO: 202463 - DNA, 328 bp, Gossypium hirsutum
ggaaaatctactctgctcgactctcttgcaggtagacttgccagaaatgtggtgatgactggaaatatccttttaaatggaaagaagaagagactagagtatggtgctgttgcttatgtaactcaggaggatgtgatgttgggaactctgacagtaagagaaactttgacatactcagctcatttaaggcttccgaccacgttgagcaaagaagaagtgaaagacattgtggagggaacaatcatggaaatgggtcttcaagattgtggtgacacagtgattgggaattggcatcgaagaggaataagtggtggggagaagaagagac

SEQ ID NO: 202464 - DNA, 348 bp, Gossypium hirsutum
cgaagacgtggcaaaatacgaggtgcaaggcagagatattagcccaccgtgtgtacgagcagctactgtcggcgcacgtgtcgtgtcttaagatcgccacgccggtggaccagctcccgaggattgacgctcagctggatcagtcgcagcacgtggtggccaagtactccgctctcggcggcgcaacccaaggcttggttgcggacgacaaagaactcgatcagttcatgacgcaatatgttgtattgctatgttcgtttaaagaacaattgcaacaacatgttcgggtccacgcaatggaagcagttatggcatgctgggaaattgaacaatccttacagagcttaa

SEQ ID NO: 202465 - DNA, 406 bp, Gossypium hirsutum
cattgattattgttccaacctcaaaagcacaagcagtacagagaagtggacgtgcagggcgtgaaggacctgggaagtgtttccgtctctatcctgagagcgagtttgaaaagcttgaggattcaaccaagccagagattaagcgttgcaacctctcgaatgtcattttgcagctcaaggccctgggtgttgatgatatatttgggtttgacttcatagagaaaccctcaaggacagctattaaaaagtcattggaggagttgctcttgctaggtgctttaactgatgaattcaaactgtcagatccagttggtcgtcaaatggctcggctcccattagatcctgttcattctaaagctctcatcctagctagccaggtcaagtgcctggatgaaatgttaattgc

SEQ ID NO: 202466 - DNA, 317 bp, Gossypium hirsutum
tcacggatcatgggaataatccgttaatgtggtgccgtgatgcatatggctgagcgtcgatggtctgaagcaatcacagatttctattaagctctcaataactatgatgtatctagctatgatagacacattttatgtataatatacgcaatgactagctattatggattcagaacatgacaagtatagcatgattaatttcgaagagactgacttacgtttaggattacccacaagcattgaaaatgataatgaaaccgccaaaaataattggaaaagaaggtattctgatatggttgattttaagcttaaccttt

SEQ ID NO: 202467 - DNA, 281 bp, Gossypium hirsutum
cagggaagccagaatgtcagcttgagtaacgcagacattggtcagaatccaatgccccgaaaacccaagggttactacccaaggttcgaccaccgaaggtgagtcaaggcctaagatcaagccaaaaggcctaatccatggaccacaggtgaatattcctggactaacccttggtggtcccgacggaccgaagaagctaggttaacccaaagatgggtatcggttcaaggaccccaggtgccccttcttttttaaggttagaaagggtaaaggaaatgccc

SEQ ID NO: 202468 - DNA, 348 bp, Gossypium hirsutum
gagatcttaagtgtgacaacatctttgtcaatggccgccttggacaggtcaagatcggcgatcttggactagctgccatccttcgtggctcacaacaagcccatagtgtcatagggacccctgaatttatggcaccagaactatatgaagaggattacaatgagctagtggatatatactcctttggaatgtgtgtattagagatgcttacctctgaatacccgtatagcgagtgttccaatcctgctcaaatctacaagaaagtgacttccggaaagttgccagaggcattctataggattcaagatgaggaagcccggaggtttatcggaaagtgcctggagaacg

SEQ ID NO: 202469 - DNA, 403 bp, Gossypium hirsutum
  unsure (1)..(403): unsure at all n locations
cgagtgaccagttatattccgtgcgcaaaggggatgtcaaagagctcaggggcactttgctgagagagaaaggctagcaagtataaaaactcaaactcggtcttgtgtgctctcttncccctgggcccttcatcaacttgttgatgccttacgagaaagcttgctttcatcaattcctcgagttcgcaaagctttggcaaagctcttcaaagtcctctgcacctgtggaagttgacagaagcaganaccggaatatgcagttaatggtgtcaaacatnattttgacggtcatgtttgtgttcagtacaactgcagntataccattccagagcaattattggagaacgtcactgttattgtggatgcttcagaggctgaggaatttgctgaagtagattcaaag

SEQ ID NO: 202470 - DNA, 416 bp, Gossypium hirsutum
agacaatcctgcatactcagttgttaagcaatattgtgtccatgtagatgacaccggtcctcaaaagattgttgttcacaagaatagtccaagaggagtacatttccgacgagctggaccacgtcaaaagatatatttcgactccgatgacgttcatgcctgtattgtaacgtgtggtggtctttgccctggactcaacaccgtgattagagagatagtatgcggcttgttccacatgtatggtgtgaagaaagtttcggggatagatggaggatatcggggtttttatgctaaaaatactgtgcatttagatcctaaagttgtcaatgatatccataaacgtggtggaactatccttggaacatcacgaggtggccatgatacctcaaagattggtgacagcattcaggatcgtg

SEQ ID NO: 202471 - DNA, 151 bp, Gossypium hirsutum
ggacatcttcagggcaaagattgtggatatggcagggcattcactaactagtgaggtgacaggagatccagggaagatggttgctgtgcaaagaaatttaagcaagtttgggatcaaagaaattgctagaacaaggaaagattgctcttat

SEQ ID NO: 202472 - DNA, 407 bp, Gossypium hirsutum
gttgaacacgggtacttcaataacagtgaaaagtcgtttactgcatatggaaaattatttgcctatatgtggctacttcaatcattcagatgttgcatatggaaaatttgcctgtcctgtgatatctatttatctacataggatagtttgtactctcacaaaattataaaataatgacatgttcagtcgatgaaattgctgatcccaggttactgctgccctcgcacaagctggcctcgagtcctctaacctcatcgttggtatcgatttcacaaaaagcaacgaatggacaggtgcaaggtcattcaaccgcaaaagcttgcatcacatcgggaatggccaaaatccctatgaacaagctatatcaattattggacagagcttatccgcttttgatgaggataact

SEQ ID NO: 202473 - DNA, 388 bp, Gossypium hirsutum
accattttccgtgaaaaaaagggatgcaactgtaggtgcaaagctaaagaaagggaagaagcatgaatatccatggcctgcagatccagatccaaatgtgaaaggcggggtcctaactcatctctcccatttcaagcctttgaaagaaaagcaaaagcccgttactttggattttgagaagccccttgttgaaatcgagaagaagatgattgacgtgaggagaatggcaaatgaaactggtttggatttcagtgatcagattatattgttggagaataagtatcaacaggctctaaaggacttatacacacatctgacccctatacaacgtgtacacattgcccgacaccccaatagacctacattccttgatcatatatttagcatt

SEQ ID NO: 202474 - DNA, 333 bp, Gossypium hirsutum
tattactccggcgccgccgtgctcggctggggagacgggtattacaaaggggaagaagataaagagaaagcaaagtcaaaagcttctttatctacaatcgccgagcaacagcatcgtaaaaaggttctcaaagaactcaactctttgatttccggttcaaccgccaacactgactacgccgtcgatgaagaagtcacctacaccgaatggttctatttagtttccatgacccaatctttcgttaacagcaacggactttcgggacaagcttttttcaattcatgtccagtatgggtcgctggatcgtaccgttaagccaatactacgtgtgaa

SEQ ID NO: 202475 - DNA, 361 bp, Gossypium hirsutum
cttcgatgtgatagcagggaccagcaccggcggctgggtgacagccatgcgaacttgtccgaacgaaaagaatcgaccattatttgctgccaaagacatcaaagacttctacctaactaattgtcctaacatatttcctcaaccaggatgtccattgttttctcgaacaacaaaagttatcaaagctctatcgggaccaaaatatgatggcaagttcttacataaagttgttagagacaggctaggagaaacaaggttgcaccagacattaactaacgttgttatcccaacatttgatgtcatgcatcttcagccagccattttttcaagctatcaggtgaagaaaaaacctaatttggat

SEQ ID NO: 202476 - DNA, 406 bp, Gossypium hirsutum
gggatttaacctcaaggagcttattgatgagcttacgcacatagcaggagctttcaatcttgcagatgttgttccttttctgggtgctttcgacctacagggactcaaagcacgtacaaagaaactcggtgaaaaacttgacaaagccctcgagacgatcattgacgaccatgaacaacataagcaggatgatttcgtcggtacactgcttaaagagttaaatcaaccaatgaacaatgatggtgatataatggatcggaatagcatcaaagccataacaatagatatgatggtgggtgccttggacacttcagctgccacattggagtgggcattatcagagctcctaaggcatccaagggtaatgttaaaactccaacaagagttagaaagtattgtcgggaac

SEQ ID NO: 202477 - DNA, 420 bp, Gossypium hirsutum
ggcaattggagcatggcaatttcttccatggactggactcgtgtcggagcccttacccaagagctgaaggagaaggaggtgcttataaggggacgagtccacacaacacgaccagtgtcgaagaatatggcgttcgtggtggtgagggagaggggatttaccgtgcagtgcttggttgctacgcatgaagcgggagtgagtcgtcagatggtgaagtttgtagctgcactcaatcgagaatccatcattgatgcaatcggtatggtatctgtccctgggaatcccatcaagggaaccacccaacaggtcgagattcatgttagaaaattgtattgtgtgaataaagctatgcctaccttacccattaaagttgaggatgctgctcgaagtgatgcttaaaattgaactgctttgcaagcc

SEQ ID NO: 202478 - DNA, 361 bp, Gossypium hirsutum
cttcactctcctttacttttaagttcttttgtttgcttgatttcattttgtagccaaaaaaaacatggggttctcactgaaacttcagtattgcctagtttctgtcatggtgctattacctgcagtgtgttactctcaggactatttcgtcaagtccagagcaacttactacggcagtcctgactgcttaggcactccaagtggagcttgcggatttggagaatatggaagaagtgtcaatgatgccaatgtcgccggggtttccaggctctacaagaatggaactggctgcggtgcttgttatcaagttaggtgcactaaccctcaaatatgtgctgataatggggtgaacatagtggtg

SEQ ID NO: 202479 - DNA, 352 bp, Gossypium hirsutum
tgaaggtgatcatcatcaacagcagctgaggagaggaccttggactatagaggaagattcagtccttgatcattacattgctcgacatggtgaaagtcgatggaattttcttgcaaaacatgcccgtttaaggagaacaagcaagagtcgcaggttgagatggttgaatcatttgaaaccagatgtcaaacctgggaaccttactgctgaagaacagcatttgatccttgaactccattctaaatcgggtaacaggtgagccaagattgcacagcatctgcctggaagaaccgataatgagatctagaatcactggataacccgtgtgcaaaaacaagctcggcagcttaac

SEQ ID NO: 202480 - DNA, 372 bp, Gossypium hirsutum
gaaaaaccctaattttccctctcactcatactcacaggaaaagcaaaaaagaaaacataattgaaaagaagaaagatttgtgatcaagatattcagccatggatgaagagtacgatgtgatagtcctagggacaggccttaaggaatgcattctcagtggtcttctctccgttgatggactcaaagttttgcacatggataggaatgactattatggtggagaatcgacttctcttaatcttgtgcaggtcattgttcttcgattagtggaaccttttttttttttcatttattccttggctattttctgaatattgtctttctttttctgctattgcatagctttggaaacatttcaagggagatgaaaag

SEQ ID NO: 202481 - DNA, 291 bp, Gossypium hirsutum
tgaaggtgatcatcatcaacagcagctgaggagaggaccttggactatagaggaagagtcagtccttgttcattacattgctcgacatggtgaaagtcgatggaattttattgcaaaacatgcaagtttaaggagaacaggcaagagttgcaggttgagatggttgaattatttgaaacctgatgttaagcgtgggaaccttactgctgaaaaacagtttttgatcctcgaactccattctaaattgggtaacaagtggtccaagattgtacagcatctttctggaaaaac

SEQ ID NO: 202482 - DNA, 387 bp, Gossypium hirsutum
ccgcatctttgaggtttgatggagccctgaatgtgggtgtgactgagttccagactaacctggtcccatatcccaggatccactttatgctttcttcttatgcccctgtcatttcagctgagaaggcttaccatgagcagctatcggtggctgagataaccaacagtgcttttgaaccctcttcaatgatggccaaatgtgacccacgacacgggaagtacatggcttgctgccttatgtaccgaggagatgttgtgcccaaagatgtgaatgcggctgtggccaccattaagaccaaacgcacaatccaatttgtggattggtgccctactggattcaagtgcggtatcaactaccagccaccaactgttgtttcaggaagggacc

SEQ ID NO: 202483 - DNA, 389 bp, Gossypium hirsutum
tacaaacaagagagttaaagatattgaggtttgtgggccaattgtttatggaactattgctttttatctcggtcgaaaggctagtgagtcgcaatcacataagtggactgtttacgtgcgtggggcaacaaatgaagatcttggagcagtgataaagcatgttgtatttcaacttcatcccagtttcaataaccctacaagaattgttgaagcaccaccttttgagttatcagaatgtggttggggtgaatttgaaattggcattagcattttcttccatagtgatgtttgtgacaagcatttggatttgtgagttgtttatttggttgctcacttgatttgatgccttgtttactaactaagctctgtatttgtaggtatcacatgtt

SEQ ID NO: 202484 - DNA, 408 bp, Gossypium hirsutum
gttaggttgctgaaggaggatggtgaagtggttgctatgaccggggatggagttaacgatgctcctgccttgaagttggctgatattggagtggcaatgggcattgctgggactgaggtatccactaccctttcctattatatccatgatgtccatatggttacttgctaattgtatattgtcagctctccttgtgaaatagcattatgggtgatgattcagagacccggttgaatgcaatgcaatatgcatggttgggctgctttttattcagaatgtatatatgttggaacagctatacaactataccactatttccagacattctatagatattgatctgagttacctacttattctaaacatttgataggaattcatctgtagttcttttaaaaatcttagtac

SEQ ID NO: 202485 - DNA, 373 bp, Gossypium hirsutum
cgaggaaggagtctacttctccatttggttctccgcgcttcggggtggtatgcatgatctttgtaaagactcttaccggaaagaccatcactttggaggttgaaagttccgataccattgacaatgtgaaggcaaagatccaagacaaggagggtatccccccagaccagcaaaggctcatctttgctggcaagcagctcgaagatggtaggacattggccgactacaatatccaaaaggagtctacccttcacttggtgttgcggctgcgtggtgggatgcagatctttgttaagactcttactggaaagactatcactctagaggttgaaagttcagacaccattgacaatgttaaggcaaagattcaaga

SEQ ID NO: 202486 - DNA, 380 bp, Gossypium hirsutum
ggagctttaactaccttcggctggctttcaacgaggggagaacaagaaaagaaactaagaaatggcacgcaagaagatcagagagtacgattccaagagattgttgaagcagcacttcaaaaggttttccgcctacgatttgcccatcaaatctgcacaagtgacggagtcaactgatttcaatgagctagtagagaaggagccatggcttttgtcgcagaaactggttgtcaagcctgatatgttgtttggaaagcgtgggaagagtggtttggttggcttgaatcttcatttcgctcaagttactgcatttgtgaaagagcgcctcggcaaagaggtggaaatgagtggatgtaaaggacctgttacaacattcattg

SEQ ID NO: 202487 - DNA, 415 bp, Gossypium hirsutum
ggacatcttcagggcaaagattgtggatatctcagagcattcactaactattgaggtaacaggagatccagggaagatggttgctgtgcaaagaaatttaagcaagtttgggatcaaagaaattgctagaacaggaaagattgctcttagaagggaaaaaatgggtgcatctgctccattctggcgattttcagcagcttcatatcctgatcttgaagaaacagtacctgataacgctcttgcaggggctagaaagcaatcagtatttagcgaggccgatgtttctggatggggagacgtctatccggtggaagtccctgatggctttacaatcaatcaagttcttgatgctcattggggtgttctcactgatgaagatacaagtggacatcaatctcatactttatccatgctc

SEQ ID NO: 202488 - DNA, 387 bp, Gossypium hirsutum
gaaaaagctgtctggatctcagtaatagggctgatggcaacgaatgggtgtgaaggtaggttgaagatgattgcggaactgaccacaaatgctgagcaaattcaagacgaggtattgggggaaatactaagtcgaaatgcaggaacagagtatttaaggggatacctccatggtcaaaccgagaagcagctctttaagaaaaatgttcccatagttacttatgaagatctcaagccttacatagataggattgctaatggggagacatcagatatccttttagctgaacccattacagggttctttttaagctctgggacttcaagcgggcaaccaaagctgatgcctgtcactgctgaagttgctaataagtgggaattatttcgt

SEQ ID NO: 202489 - DNA, 375 bp, Gossypium hirsutum
atttcttccattttctctcttttacttccttgcttggctccaattgcaaccatgggtttgaaaggtttcgttgagggaggcattgcatctatcgtcgccggcgcttcaactcatcctctcgaccttatcaaggtccgtatgcaacttcaaggtgaatcccatctccctaatccttcccttcaactttatcgtccggcacttgccgtcaactctgctgccgctgggaatgtttcgatctcgcaacctcgtgttggtcccatttctatcggtgtccgtatcatccaattggaaagtgtaacggctcttttttccggtgtctccgccacgatgcttcgacaaacgttgtattctactacccgtatgggactttatgaa

SEQ ID NO: 202490 - DNA, 416 bp, Gossypium hirsutum
gcggcggctgctgcttctcaggcagccgcagcctgcgttcccgtctctgatgacgtggcggttgtagaaggttgtattgacaacgatagtgtacagattggggattcatatgattccaagacatcgtttttgatctccgatgggagcatcactgttcatgctggtgaaagattaggtcgcggtatagttactgatgcaattactactccagtggttaatacttctgcatatttctttaagaaaactcaggagcttattgacttcaaggaaaaacgccatacaagttttgaatatgggcggtatggaaatccaacaaaatttattggtggacacaatgatgtccttgctggttgtataagtggttctgagaagttggttacagaaattcggactttgcatcatattttgggtggtac

SEQ ID NO: 202491 - DNA, 366 bp, Gossypium hirsutum
ccggggaagaccccagttccttagaaccaagaaccggaaaaccttgggtcttgaaaagcaagggttaatttggtaatcagggctttggttcctaaaaatcctggcctaatccacagttgaagtccttaattacaagtttttttggcaggattccaagttaattaagctgggtagcacgaaaagcattttgaccgtcaatggcaggttttccagggcctgagattcgggttcggagaggggacacagtttttgtcaacgtccacaatcaagggaaccatgctgtatccctcaagtgggaagggcgtaaggattcaattgatggttcgaatgagctgattcagccagggggaaacttcacttacgaga

SEQ ID NO: 202492 - DNA, 406 bp, Gossypium hirsutum
  unsure (1)..(406): unsure at all n locations
gaaaggttcgaggaaagaaactgctgacatgaacaagaggtcattcaagtatgcttggggtgcttggcaagcttaaggcttatcgctaacctggtattaacattgatattgccctgtggaaatttgagaccaccaaatactactgcactgcgattgatgcaccttgacaccgtgactttatcaagaatatgattactggtacgtcacaagctgactgttcttgtttgattattgattccaccacttgtggttntgaggctggtatctccaaggatggtcagactcgtgagcacgcattgcttgcttttacccttggtgtcaagcaaatgatttgctgttgcaacaagatggatgccactacccctaaatactcgaaagctaagtatgatgaaattgtgaaggaagt

SEQ ID NO: 202493 - DNA, 329 bp, Gossypium hirsutum
caaggttacgatgcgaagtgctgatatgaaccagagtcattcatggtgctagactgcttgacaagctcgcagctgaccatgatcaggctatcaacattgttattgcccagtggaaatcctacaccgctatacactactgcactgagattgaggcaactggtcacagtgactttctcatgatgatgactactggcacgtcacatgcttactgctctgaaccgacattgattccaaccatactgattgctagcgctactatgtccaggatggtcagactcgtgagcactcaatgcttgcttgaaacatgagtgtctagctaacgattggat

SEQ ID NO: 202494 - DNA, 391 bp, Gossypium hirsutum
gagctacttaaccatttcccaaatctcctccgtgctcttctttagcgtccttttcatttccgctcatgcagcgcgctttgaaatccgcaatgagtgctcctacaccgtctgggcagcagcctctcctggtggtggccgtcgcctagaccctcggcaaagttggaccatcgatgtgcctgctggcactgctatggctcgtatttggggtcgaaccaattgcaatttcgatgccagcggtaggggtcattgccaaaccggtgattgtggtggactccttcaatgcaaaggttggggtgtacctccaaacaccctggctgaatatgcacttaaccaatttggaaacatggatttctacgacatttccttagttgatgggtttaacatccccatg

SEQ ID NO: 202495 - DNA, 350 bp, Gossypium hirsutum
gaccaaggtaaaggatctcttagattgatgacatgggggctggtttgcccagattggacgacaatataaccagaagctggtcatggtacttgatcacggcatttcagagttgaccacagaggtggtgagaccagcacgaacagtatagcatctatacttgcttgaacgcgtgggcttgcacacagagcatacacggatgactatcctaaactcttggatttcactgagaaactataggcagcctgtattggaactgtggaatctggaaagatgaccaaagatcttgcactaatcattcacggctataagcttgctatggacaagcacctgaatactgacgagtatattga

SEQ ID NO: 202496 - DNA, 312 bp, Gossypium hirsutum
gccctatgtatcggatctcttgcattcatgagatcggttctgtttcgcccagatgggaatacaatataagcccaatctgatcatggtactgctacacggcatttcacaatttaccaaaagggttaccagaccaggacgaacagcataccatctatctttgcttggacgccttggcttgcacacagggcaaaattggatgactatcctaaactcttggatttcactgcgaaactaaaagcagcttggattggaaccgtgtaatctggaaagatgaccaatgatcctacactaatcattcactggtttaagctt

SEQ ID NO: 202497 - DNA, 197 bp, Gossypium hirsutum
cgttagcccgtgacggtttcgacaccgtcatcaaggcgaagcaagcggtccatgcggttccgagttgtagaaacaaagtttcatgtgctgatattatggccatggcgactcgagatgtcattgctctgtcatgtggaccatcttatgcaattgaattggggagggtggatggggtaagctccacagcagatagtgtc

SEQ ID NO: 202498 - DNA, 230 bp, Gossypium hirsutum
gtgcatggagaggaagaatagctcgtaaagaactgccgaagcttaagatggctgctatggagacaggagctctgcaagctgcaaagaacaaactggaaaagcacgttgaggaactgacatggagattacaactggagaaacgcatgagggttgacccgtaagaagctttaacacacgataatgcacaaatgcagtatgcttttcaagacatacaacttcagtttaaagaa

SEQ ID NO: 202499 - DNA, 345 bp, Gossypium hirsutum
ggaagttactactttacctagtgatggcagacggtgacgagagtgacaagaatattgagatatggaagatcaagaagcttattaaagcacttgaagccgctagaggcaacggcaccagcatgatatctctcataatgcctccacgtgatcagatttcaagggttaccaagatgctgggagatgaatttggaacagcttcaaacatcaaaagcagagtcaaccgtcaatctgtgttaggtgcaatcacatctgctcagcagaggctcaaactttatagtaaggttcctcccaacggacttgtgctctacactggaacaattgggactgatgatgggaaagaaaaag

SEQ ID NO: 202500 - DNA, 406 bp, Gossypium hirsutum
gggcaatgaaaaggagggatctcttgttgcggcgctagtggagaagagaagatgatggaacatatgttatcctctaccactcagtgtttcacaagaattgtcccccgcagaaaagctatgtccgtgcctgccttaaaagtggtggatatgtcatatctcctgtgaatgaaggaaaacagtctgttgtaaaacacatgcttgcaattgattggaaattctggaaatcttatcttcgaacttcagcagctcggcctattaccattaggatgcttgagagagttgctgcattacgagaattattcagagcaaaacaagtaaaatatccttcggacaatctttcttctggagagttgatacggaaagttaggttgcaccagagtgtggaggatggcgcaattgatatgtg

SEQ ID NO: 202501 - DNA, 408 bp, Gossypium hirsutum
ccgcatctttgaggtttgatggagccctgaatgtggatgtgactgagttccagactaacctggtcccatatcccaggatccactttatgctttcttcttatgcccctgtcatttcagatgagaaggcttaccatgagcagctatcggtggctgagataaccaacagtgcttttgaaccctcttcaatgatggccaaatgtgacccacgacacgggaagtacatggcttgctgccttatgtaccgaggagatgttgtgcccaaagatgtgaatgccgctgtggccaccattaagaccaaacgcacaatccaatttgtggattggtgccctactggattcaagtgcggtatcaactaccagacaccaactgttgttccaggaggggaccttgccaaggttcaaagagctg

SEQ ID NO: 202502 - DNA, 398 bp, Gossypium hirsutum
caaggttttggtataagcttcctggtaaaaaagggcctggaaccggcggtttccattctttcatggggaggctctggctttgtgcttaatgggaataagcttaaaccagttgcggtcttccagagggactacttcatttggtcttccggttgcaactggcgcatacttgtatacactaattttcgttactgttccatccctagcatctgtctttaatgaatatgctttaaagagtcagtttgagacaagcatttaccatcagaacttggttctttatggatatggtgccattttcaatttcctagccattcttggaactgcaatttttaaaggtcccaatagcttggatatcctgcagggacattcaaaggctaccgtgctcttaatatgcaacaatg

SEQ ID NO: 202503 - DNA, 350 bp, Gossypium hirsutum
ggcaattccggttttcgaatttcttttcctttgttggggaaaaaaaaaaaggaaattttttaagacctaaaatctgcaaccatgaaaatggaaatgttcgcacaccttaaaaaccatgttaaaggtggcaaccgttgtgggcaaatccggaactggtttgactatcgtacccatattggtattgggtttgaaaagcttggaccaagcttatacgattgtctacccaaaaacaattatcgctcatttcccattgatcttgtccgtgagattggcagacaactattggaatgtgtagcattcatgcatgatttgaacctgatacacacagacttgaagccagaaaacattct

SEQ ID NO: 202504 - DNA, 369 bp, Gossypium hirsutum
agaactttcggatggaaagttacttgccgtcaagaaactggagaagagagttgcaagccagcacaaggatgatgaatttattgaactggtggaaaatattgatcgtatccagcatgtaaatgttgtcaggctaatgggttattgtgcacagcatggtcaaaagcttttgatctatgagtattgcagcaatggatcgctgcatgatgcgctgcactctgatgatgagtttaaaaagctgctttcatggaatacccgtattcggatggctcttggagctgctagagccttaaagtacatgcatgaggcttgccagccacctgtaattcacagaaaatttaagactgccaatggtcttcttgatgatgatct

SEQ ID NO: 202505 - DNA, 346 bp, Gossypium hirsutum
ggaaagggcgggggtttcaaaagaataaaacctgtcatggccgctattcctacaaacgtccagcatttttttcccagaattccttctacaaatcactagttatatggttcatccaaaaatttttctcctttaattttcaggtgggctctgggaactaagtcttttcaatactggtagcttgatggcctataatgtgttctacactagtattcctgttctagtcagtgtccttgacaaagatcttagtgaaggaacagttatgcagcatccacaaattttattttactgtcaagcgggaaggtttactgtttctccgccttttttggcctttttcctcctatataac

SEQ ID NO: 202506 - DNA, 264 bp, Gossypium hirsutum
caccagttatgagtggatcaaggccgtccatttctactgtttcggtttccaagatctgatatccgagggtttgctctcgcctcactccaagtctctctgcgtggagactcccttgggacaagaagtgttcgcgttgaaagagatcggcgtggagaactccatcggtattttcaagaaagcggccaagccttttgtggttaaaagtgaggggcatcatataccgctcgatgataattcttttgacttcataatcttcggcggagc

SEQ ID NO: 202507 - DNA, 404 bp, Gossypium hirsutum
ccagggtggagcaatgcggataaagctttgacaacgtgcattaatggacctttaattgagtactcgaagaacagaagaaaagctgatagtgcatcaacttcatttctttccccccatttgcattttggggaggttagtgtccgaaaagtctttcatctcgtccgaatgaagcaggttttatgggctaatgaagggaacaaagctggtgaagagagtgtaaacttgtttctgaagtcgattggcttgagggaatactcaagatacttgagttgtaaccatccttacagccatgaaaggcctcttctcggacatcttaagtttttcccttgggttgtcaatgagggttatttcaaggcatggagacaaggaagaacaagttatccattgagggatgctggcatgag

SEQ ID NO: 202508 - DNA, 370 bp, Gossypium hirsutum
acatgctgttattgagttaactagaaaggctgaggagagaaccaaagctctgaatcttgaccatgttcttgaagtttataacatacagtgcccttgttacaattcaatgggacaagctgacattgacaacaatatgctaaggaaagcagcttctaaagaagatgccactgacaactatttatatggcccaaaagctaaagatattgatagctgagatttgaaacatttccaaaagcactgggctaatggtgagcctgctattgccagcactgtccttgagaatgcatccggatcgagcttatagcctatggttactaggcgggctactggtcatagtatcagatgagataagtgatcagcaaaaggaagt

SEQ ID NO: 202509 - DNA, 246 bp, Gossypium hirsutum
aaagaaacaaaggaaggagaagcgatggctacaaacacagtgcccacgacacggccctcggtgtctgaagactgcgaacagctaagaaaagccttgtcaggatggggaactaatgagggcgtaagcagagatatatggggtcacagaaatgccgagcaacgaaacttgattcgaaaaacctacgctgaaacctatggagaggatctcctcaaggcactagacaaggagctctcgaatgactctgag

SEQ ID NO: 202510 - DNA, 392 bp, Gossypium hirsutum
aaacaaggcattgcttaaaacgatttattgagtaccaccgtttttttacttgcaaaaggggaaggggctccaaagggggataaggttgcaagggattatcgggccttgtgtcctggagaatggatagatcgatggaatgagcaaagggagaatgtacttttcagggcctttaatgagatgtacccctattgtatccgaaaaaacccctggtttgacttttttttccctctgttatatcaaaccgtaacagttgaaccacagatgaatttccaggatgaaagcagaatttctcaggaaatatccaatttgaaaaggatgagttaataataaaatttggcgtgtaccctagcttagactagatcaatggaccatacaattgtgttgctcataaa

SEQ ID NO: 202511 - DNA, 419 bp, Gossypium hirsutum
cgccattctctcatttttcgcgtcctttatttaccttttggggttctttgggattgacttcggtcaatctttgggtttccaaccattggctgacctttggattggccaagaagaagattatgaaattctgcttgccaagggagattccccgtaggtcccttgccggccaacctctcgattggtccgttacaacctttgcttcctggggcaaccaatcgtgacccgttcaggaagggtgttcgatgaaatagccctgtgacgggttctaacgggaggaaagatgaaggaattaattaaaatctgtaagtggctggtacaacccccttcatatatccttggaattgaaattgggtgattgcaagagggcggctgcaatcaagcgggaagcgttgcaaagattaacagggaagtccttatct

SEQ ID NO: 202512 - DNA, 419 bp, Gossypium hirsutum
  unsure (1)..(419): unsure at all n locations
ccgagttggttaaggaagaagattgggaagttcttgtgaaaatggaagaagaatacattgagagcccttgcttgcagattcttaaattcaaaccagacttggtggttacagaaaaaggacttagtgacttggcatgccattatcttagcaaggctggtgtcagtgcaattaggagggtgagaaagactgacaacaacagaattgcaaaggcatctggagctgttattgtgaatcgtcctgacgaattgcaggaatccgatgttggtactggagctgggctatttgaggttaaaaaaatcggngatgagttctttgcattcattgttgattgcaaagatccaaaagcttgtacggttctcttaaggggtgctagcaaggatctcctgaacgaggttgaaagaaatttgcaggatgccatg

SEQ ID NO: 202513 - DNA, 404 bp, Gossypium hirsutum
gcccaatgttttgcatctctcggattgatgacatctgggctgggttgcccagatgggaagacaatagaagcagaagctgctcatggtactgttacacggcatttcagagttcaccaaaagggtggcgagaccagcacgaacagcatagcatctatctttgcttcgaacgcgtgtgcttgcacacagggcaaaattggatgacaatcctaaactcttggatttcactgggaaactagaggcagcttgtactgtaactgtggaatctggaaagatgaccaaagatcttgcactaatcattcacggctctaagcttgctatggacaagtacctgaatactgaggagttcattgatgctgttgcagcatatcttaatagccgactttcttaagcataaatttgcaaat

SEQ ID NO: 202514 - DNA, 300 bp, Gossypium hirsutum
cgtatgtgtatatacgggtgaccgacaagtgttgggggcttaatattcatgaacctatcatttgggcattggatgatctctataacaatcttcatctagagcaaattcctcaaagttccaatggcactcaagttgacccagagatacctgttgacctgacacatatttcagaggtgatgctcaaagctgcattggaaacagcacccgcccaaaggcctcatggagttctccgtgtgcggagacctatactttctgatcgtggaaacgcatttagaattcaggggcatctaacggaggtga

SEQ ID NO: 202515 - DNA, 397 bp, Gossypium hirsutum
cttcgatgtgataagcaggaccagcaacggccggcttggtgacagccatgctaacttgtgcgaacgaaaagaatcgaccattatttgctgccaaagacatcaaagacttctacctaactaattgtcctaacatatttcctcaaccaggatgtccattgttttctcgaacaacaaaagttatcaaagctctatcgggaccaaaatatgatggcaagttcttacataaagttgttagagacaggctaggagaaacaaggttgcaccagacattaactaacgttgttatcccaacatttgatgtcatgcatcttcagccagccattttttcaagctatcaggtgaagaaaaaacctaatttggatgccttgctctcagacatatgcattgcaacctcagc

SEQ ID NO: 202516 - DNA, 163 bp, Gossypium hirsutum
gaactagaacgcctcactcgagttttcacccataaaatacatgatcttataggaattcataccgatgttccagcacctgatatgggtactggtccgcagacaatggcatggatactatatgagtactcaaaattccatggtcattcacctgctgtggtgactg

SEQ ID NO: 202517 - DNA, 395 bp, Gossypium hirsutum
gatgaatcagggtactacagttggtatgcttacggacgatcaaagcttgctaacatattacatgccaaggagcttgcacggcatctaaaggaagaaggggtggagattactgcgaattcacttcattctggagcaattatttcgaccaatcttatgcgccaccatggtttaatcaacaccgttggtcaaatgttgggaaaatacttcctcaaaaatattccacagggagctgccactacatgctatgttgcattaaatccacaagtcaaaagtgttagcggagaatatttcttagacagcaacatatgtaacccgagcgctaaggcgaaggatgcagatttggcaaaaaagctatgggacttcagctgcaccttgaccaaccccaattagttagt

SEQ ID NO: 202518 - DNA, 244 bp, Gossypium hirsutum
taggtggcaatgcaaaatttatggccaggctgaagtttcgcgagatgctaatgccaaaagttgtcaaaccagctggaggagtctttgtatcagtgaagaaaccttctccaatgaagccatggaaggttttatgctcattttcaatatgaaaatattttggtattggtagatgaatttaatttagattagggttgctattccaggtgaatgagaagttatttccgtgcaagctatctgacaagaa

SEQ ID NO: 202519 - DNA, 373 bp, Gossypium hirsutum
atcatggaattcatgagacaggatgagcctgattttgaccgggttattgagcttgtgagggaagtgagggatgaaatatgtgagctggctcctcgaagttggagagaagaaataactgatgctattgatttggaaattcttgcccaggtgctgaagtcaggcaacctggacattcattatcttggacggattctggaattcgctttgatcactttgcagaagctatccgcttcagccaatgatgatgaaatgaaggccgctaaccaaaggttattgaaagagttggctgaaatatgtggagccagagagaactcggataattcttctgccctcgcaatgatcaagggtctacgttttgtcctagaacagattc

SEQ ID NO: 202520 - DNA, 229 bp, Gossypium hirsutum
atcaacgaaatagtcatagcttttcagcagttgtaggatctcataaagggttgatgcaagctgacaagatcgacaaactgccgggtcagcctgaaggggtggattttgatcaatatgcaggctatgtaacagtagatcccgcggctgatcgagcattgttctattatttcgtggagtcaccggtaacttctccaaataagcctctggttttatggttaaatggaggtcc

SEQ ID NO: 202521 - DNA, 411 bp, Gossypium hirsutum
aacaagcggaagccatggcaggtggtggaaataagagaagatcaaataacaacaagaataagaacagcaacagcaacagtaacagcaacagcagcagccaaaataaaacgaagagtggccgaggaagatccaaatcttcgtctactcgaatcaggaactctctttttgttgagggtggtcttttatccgattggcagttggattcccaaggaaggaatagaaatgggaatcgaatttctgggttgggttctgatagggcaaaggcttctacttcaaaaaaagggccatcaacaaatattggtggtagtgctataagatatgagtacccttctctcgatcttcaagatccagaatcagatattctggcccatgagggagataataaaaaagatgagctgcatcctattattt

SEQ ID NO: 202522 - DNA, 396 bp, Gossypium hirsutum
cttactttgggtgaacaccatgaaccaaattcccaaatggaactagttggtcactcgattgtcttgacatcatatccttattcagatcctcagtattgtggaattctgacttcatattggccacaaatgatggtgtcaccacatctatatggaatgcatcatgctagaatgcctttgcctcttaaaatggaagaggagcctgtttatgtaaatgcaaagcaatatcatggcattttgaggcgaagacagatacgtgctaaggctgagcttgaaaagaaagccattaaagttagaaagccataccttcatgagtcccggcatctacatgctatgagaagggctaggggttgtggaggtcgttttcttaatacaaagaaagcaggtgatgatgttacc

SEQ ID NO: 202523 - DNA, 394 bp, Gossypium hirsutum
acatagttcgactggaccaacgggttcttgattcttcaggggcttgaaaatgaaaaaattggaatggtggaccaagaccagttggttggctggcttaggtccctcctaagaaaaagggaattttgggggtggattaaggcaccactttcattggttccacttccgaccatggaattcaaggaaccattagggaagaaacatgccgatgtacaatcatcactggggcacatcggataccaactgtcatcgacaatgacttggttttggttcttgataatgggatgatagtcgaatacgataagccaaagatattactcgaggacaaatcttcttggttctcgaagttggtggctgaatttttgagatcatccaagagcaaccaccctaagaatct

SEQ ID NO: 202524 - DNA, 399 bp, Gossypium hirsutum
caggttgataatttgaggattaattgtctgtggtgtcatgaaggggctccgatttttacgattccacctggtaaaaagctgtttgagattatgcgtaagaaagagagtaatctctgtttgtcggctgatgttgccactgctgctgagttgctcgatattgctgagaaggttggacctgaaatttgcctattgcagacccatgttgacatattccctgatttcactccagagttcggatctaagcttctcgcgagtgcagaaaaacatagcttcatgatatttgaagaccgtcaatatgctgacatcggtaacacagtaacaatgcagcatgaacggggtatcttccgcattttggaatgggctgatattgtcaatgctcatataatctctggtcctgga

SEQ ID NO: 202525 - DNA, 347 bp, Gossypium hirsutum
tcggccttttgaactctgcacgagccgtcattgaaattttcaacaccatttcatttgcaccaatcggccttcttgacatgttcaacagcagcggtgccgtggagaagttcgaagtacaaatgacatccaatgagaaactgcagttctttgatggcgagggtttctcggagttgacaacttcactcagcaacaaccggaattcaacagcagcgatcagtctcaaagtccggggttgttggaagattggtgcatactcatcttagcatccgttgaagtgttgtgtggacaatgccgacacttacttcaactatgactcagccaccggattggtgacacttacattggca

SEQ ID NO: 202526 - DNA, 403 bp, Gossypium hirsutum
cactttgattcccatgttgagcaacataacgaagattagtttcagaaatctttcaaagagatgatttctactctccctaaagggaacagctggggtcttcccgatcatctatatcagtatcaagatttttggttcacctcacctttcctacaaagagtcctgttagctcaacaacagtttgaggctcaacccactgatatcatactttctagtgcccctagaaccggcacagcctggttaaaatctctcactttcgctactattacaagaacttcatacgatgattctaccacccctttgcttttcaggatgcctcatgatgttgtgcctttcatggagcttgatcatgctcatttttccgctaatcgacatcttggaattcctctcttggccactcatgctc

SEQ ID NO: 202527 - DNA, 418 bp, Gossypium hirsutum
gccagaccggtgattgtggtggactccttcaatgcataaggtggggtgtacctccaaacaccctggctgaatatgcacttaaccaatttggaaacatggatttctacgacatttccttagttgatgggtttaacatccccatggtgtttggtccaactaatggcggttgtcacaacattcggtgcactgcagacatcaacggacaatgcccgaatgagttaagagctcctggtgggtgcaataacccatgcacggtgtttaagaccaatgaatattgttgcactcaagggtacgggacctgtggtccgacccgttattcaaggtttttcaaggaccggtgccgtgattcatacagttatcctcaagatgatccttcgagcacctttacttgccctgctggtttcaattacagggtcgt

SEQ ID NO: 202528 - DNA, 405 bp, Gossypium hirsutum
atctctacttccatttcatctgccatcaatttgctgtgaagatcatgttggctatttttcacaaggcatttgctaatccaccagaggagctgaatagtccagcttctcataaatctaccaagaagcctaaacagcctgaagaaaccctaaatgatttcctatctcatcaccctcacaacactttctccatgagctttggcaacgctgctgttttggcttatgtccgccatgaacgtgctgcttcagttcatcagaggttgttctgtgggtttgatgacatatactgcctcttcttagggagcttgaacaatctatttatgctgaatagacaatatgggctttccaaagggagcaatgaggcgatgtttgtgattgaagcatataggaccctgagggataggggtc

SEQ ID NO: 202529 - DNA, 384 bp, Gossypium hirsutum
agttccgacaaaagaaaacgaaaaaaatagaggaaatacaatcggtttctttttgaagtccggttttagtttttggggagaaaaaaatgttgggagtatttagcagtgcgatagtgtcttcgccggacgagctggtggcgggcggttgccgaacttcatcacctaagataaccgcggatgctcttgtgaaaccgttccttgagacgaactccttcggcgtgtccatgcagaatggagaccatgttcaattcgcttattctcaccataaagagtctcctttacggcccacgtaaaaaaaaaatcatatatggtattggctgttggatgatctcaatcgttgaaaattaattatgaattcaaactttcagtgatcatcgagtgctt

SEQ ID NO: 202530 - DNA, 415 bp, Gossypium hirsutum
cttagttgttgccactcagctggtggaagaatctagggtgaagcttgatagaatttgtagacaagaaaatgtgatgttgatttttgctcgctcctacggcctaacaggtttagttcgaatcagtgtgaaggtaacatgttcttggcattgactatctcaccatggtgacatcaatatctcactgataaagctgaatatcagcaagaacaaatcttgaaaatcgtttgaacttatataggcctagaggaaatggatggttatttaatatttttcaagagtttagtatataggtaacagacaaaggaaatatctcgaaatgatgatcaagttttgcttgtggcaggaacacactgtaattgaatcaaagcctgaccattttctagatgaccttcagttaaataatccatggcctgag

SEQ ID NO: 202531 - DNA, 406 bp, Gossypium hirsutum
  unsure (1)..(406): unsure at all n locations
ggatcatatacggtgcagcagaactacactagcttagacatacatgtagggcagtcatattcggttctgctaaccacggatcagaatgcaagtagcgattactacattgtagcaagtgccaggtttgtgaatgaatcgcagtggaaacgagttaccggtgttgccattttgcgttattctaattcgaaaggaaaggcatccggtcccctccctgatccaccgcaggatgaattcgacaaaaccttttcaatgaaccaagctagatctatcagatggaatgtatctgccagtggtgctcgcccgaacccacagggatcgtttagatatggttcgattaatgtgactgaagtttacgtcttgagaaacanaccaccagagactattgatgggaaaagacgagcgacac

SEQ ID NO: 202532 - DNA, 368 bp, Gossypium hirsutum
gccagtggttggtttaagtgttaggcgtatggatggggaagacgttagagacctcatcatcaactccatcaagcttggttatcgtcattctgattgtgctgctgactacaagaatgaagcagaagttggtgaggcattgtctgaagcattcaaaactgggcttgttaagagagaggacctctttattacaaccaaactttggaattctgatcacgggcatgttcttgaggcctgtgaagaccgcattaagaagcttcaattggattatctggatttgtatctagttcactttcccgttgctgtaaagcacactggagtcggtcaaacggacaggactttggacaaggatggagtcctggacatagaca

SEQ ID NO: 202533 - DNA, 406 bp, Gossypium hirsutum
caaaaggctgtttcagcagtgagaaaaaccagagggggaaagaaaagaaaaagaattagagaaaaggagaccagaagggtcaaagtaactcagatatcaaccgttatttctcatattcatttctgattcctaccaaactgtttctggaggcttaacatctcatttgcaaattggatgtgactgcttcactgtagattgtcaggattaattgtcgatgtctttggagatttagcagtggtagcatcatctgctgcttgggttgagaaatacaaatcaaaagttaaagcatgcatcagtagcattgatgagattaatcatatacactggagaccttctgttgaaattttaaaagaagaaggaatggatgcaacagatctgaaagaattgcatccatccactttgtccc

SEQ ID NO: 202534 - DNA, 399 bp, Gossypium hirsutum
ggatggtactaatgtgaggagttatttatactgcgaggatgtggctgaagcatttgaggtcattcttcacaagggtgaagttggtcatgtttataatgctggaacaaagaaggagaggagagcgattgatgtatccaaagatatatgcaaacttttttcaatggactcggagacaagcatcaagtttgttgaaaacagaccatttaacgaccacaggtattttcttgatgatcagaaattgaagaacttgggatggtctgatcgaactgcgtgggaagatggcttgaagaagaccatagaatggtgcactcaaaatcctgattggtggggccatgtgtctggtgcactgcttccacacccgagaatgctgatgatgcctgtcgagagacaatttgattc

SEQ ID NO: 202535 - DNA, 408 bp, Gossypium hirsutum
gggcaatgaaaaggacggatctcttgttgcagcgctattgtgagaatagaagatgatggaacatatgttatcctgtaccacttcatgttttacaagaattgttccccgcagaaaagctatgttcgtgcctgccttaaaagtggtggatatgtcatatcttctgtgaatgaaggaaaacagtctgttgtaaaacacatgcttgcaattgattggaaattctggaaatcttatcttcgaacttcagcagctcggcctattaccattaggatgcttgagagagttgctgcattacgagaattattcagagcataacaagtaaaatatccttcggacaatctttcttctggagagttgatacggaaagttaggttgcaccagagtgtggaggatggcgcaattgatatgtgt

SEQ ID NO: 202536 - DNA, 421 bp, Gossypium hirsutum
agaacatggagttgaaggttcaatatggcagttggcgaaagcttatgttgctgtaaatgactctggtgttcatcaactcataagccattggctgaacactcatgcaacaatggagccattcgtgattgcaacgaaccgacaacttactgtaggtcatccaatttataagcttctctatcctcactttcgggacacgatgaacatcaatgcttttgctaggcagattctgattaatggaggtggtgtcctggaattaacagattttcctggaaagtatgcaatggaaatgtcatctataatttacaagagttggaatttgtttgaccaggcacttcttagagatctcaagaaaagaggagttgcagttgattataagagatcaccaaatggtcttcgtttgttgataaaagattatccatat

SEQ ID NO: 202537 - DNA, 326 bp, Gossypium hirsutum
tgaatggtgcaataatcaccctcacgaggcagatgccatatggaaagcaggaagcaaatttatcgaagaggctttgacaatgcgaaacgtgtatgattacatgttccatttgttgaacgaatactttaaactcttgaaggttaaaccaaccatacctccaaatgcccaaaagctctgcttcgaaaccacggagcaaggtttatggaaggaattcatggtgcagtcaattgtgaagtctcctagtgataaacctccatgtgcattgccttccccatttgaacctcatgccattcaagcttctctggacgtaaaagagaataatacta

SEQ ID NO: 202538 - DNA, 401 bp, Gossypium hirsutum
ggaatttgaacttcttgcttgtcgctaatggatttccagaaacaactatgttgtccccaattgcagatcaccatcctgagaagaagagaagaggaaggtcttctctaagccgcaagtcattgagcctggaccccattgtggggccagatactgtttttgcactttcagatcaacctttttgatccttgcaaggacattcgcatgatgtgcttgacctctcatggtccaaatctcagcacttgctgtcatcttcaatggacaaaacaatgaggcttcgggacttgattagcaagacttgtttgagaatattctcacacagtgattatgtgacttgcatccagtttaatccacttgatgatgaacactttattagtgggtccctagatgctaaagtgcgcata

SEQ ID NO: 202539 - DNA, 360 bp, Gossypium hirsutum
cacagctcacaggcgaactcctcacgttcgttgagtaccttttcgaaggagctccttacctttttccgagacatggcgctgatgcgtcggatggagatcgctgccgattcactctacaaggctaagctaatccgtggtttctgtcatctatacgacgggcaagaagccgtcgccgttggcatggaagccggcattaccaaaaaggactgcatcataactgcctaccgcgaccattgcacgttcgtcagtcgcggtggaaccctgctggaagtttttgctgagctgatgggacgccaggctggttgctctaaaggcaaaggaggttcgatgcatttttacaagaaggattcgaatttttat

SEQ ID NO: 202540 - DNA, 433 bp, Gossypium hirsutum
ccattttctcaaaaaattcaccatctaaaacgtgattttctccagatagagaagctgaaaatttcaccatctaaaaagcttgaagtgcttttggctgataaatgaccaaattaacctgtcttctcccccttggaaaaacgttctttcctctgctgtgaaagttctatacccatttttttcacattttcgctgtgaaagctccttcctgttctttggtcctcttccgctgaaatcatggaacaaaagcttgctacacagcatgtggaaatggagagacttggtacagaaaaccagagaactgctgctaccaatgggacattgagacaggaacttgctgctgcacagcatgagttgcagatcttgcatgctcagataggagctgtaacatctgaaagagaacaacaaatgacgagccttacggataaaatagcta

SEQ ID NO: 202541 - DNA, 372 bp, Gossypium hirsutum
cttgactcttctttcaccatgtcattgctgtctttgtcctgcttgttgctgtttacttttagtgccaaagctgttgttcctccatctgaaacttttaggtgtgtcaacgacggagaatttgggccgcttgttgttgaatatgatgcaaattaccgtgtgataagcatagctaatgccccctttcagcttgcggtttataacaccacccctaatgccttcacccttgcgttacgcatgggtacaacgcgttccgagtcgctcttccgatgggtttgggaggcccacagggggaaccctgttcgcgagaacgccacgttctctctcgggactgacgggaaccttgtcttggctgatgccgatggtcggattgct

SEQ ID NO: 202542 - DNA, 421 bp, Gossypium hirsutum
  unsure (1)..(421): unsure at all n locations
accgaaccgtggtttctgcaggttttcatcttcccagtattattgtggcatattgggagaacacttcccattattgaggtctcatatgtgatgacgaaacatatatggtgttcaaagttggaaaatggtccactcaaatcagattgcctctctttgatgttgnttttatggtgcatgcttctttgttaaaatatgagatattgagccatgaggtttacaaattgttctgcatagagtttgttctttgtcgggtagttctcaaatgttgttccacgtttccgtaactttttatcaatcttgtagatatcactacaacgtagcagattcaaggttgcatcagcatgtagagaagggtaatgaagatgcattngttattaattgtgtggcttcagcggcaaaattttgggccctgatcatggat

SEQ ID NO: 202543 - DNA, 416 bp, Gossypium hirsutum
ccattttctcaaaaaattcaccatctaaaacgtgattttctccagatagagaagctgaaaatttcaccatctaaaaagcttgaagtgcttttggctgataaatgaccaaattaacctgtcttctcccccttggaaaaacgttctttcctctgctgtgaaagttctatacccatttttttcacattttcgctgtgaaagctccttcctgttctttgttcctcttccgctgaaatcatggaacaaaagcttgctacacagcatgtggaaatggagagacttggtacagaaaaccagagaactgctgctaccaatgggacattgagacaggaacttgctgctgcacagcatgatttgcagatcttgcatgctcagataggaactgtaacatcttgaaagagaacaacaaatgacgagcc

SEQ ID NO: 202544 - DNA, 386 bp, Gossypium hirsutum
ggtggttcaagagaggataagaggaggagtaagcgacgttggtctaactcttgaagggttcctttttcttcatgctctttttatagaaaaagggcgtcttgagacaacttgggctgtcttgaggaagtttggatataatgacgagttaaagctcagggatgatattcttccagttccaaccaagcatgcccctgatcagactgtggagctgacaaatgaagctatcgactttttgcgtgggatcttccgattgtatgacagtgataatgatggatctttgcaaccttctgagtttgatgatatctttgtaactgcaccagaaagtgggccttgatgacaactctggatccttcatattggttggctaacttgatttgcattggata

SEQ ID NO: 202545 - DNA, 388 bp, Gossypium hirsutum
caacaatccaagatgttgttttctcccctacttgcgtgtgcttgcatattcagtgcttgctgtcttgcaacttcaactttaggagctacacttgcaaaagacgaagtggaagctttggaaagcataggtgaaacattgtggaagacaaactggaaatttagcgtggatccgtgcagcatcggagacgagagttgggcaaaatttgcagaaaaaggtgcatactatgttaataatgtcacttgtgattgcagttccagcccctgtcatattgtccgcatagtgctgaagggacaaaatctatcaggcactcttccaccacaggtgaccagacttccttacctgcaagaaattgatctcagtcgtaactatcttagtggctccattcctc

SEQ ID NO: 202546 - DNA, 388 bp, Gossypium hirsutum
ggaattataaggcaaaagctcaggtttctcatgcagagggggatgaccttattgacttttaccatttaaagagtcgaaagggtatgagtcagctggaattggaggatgaggttcaagatgatttaaaacgagcaactggagagtttgtcaaggatccagatgatgcaaataagctcaaccgcattcttcaactgacaggatttagtgatccggtatatgccgaagcatatgtcactgtccatcactatgatattgttcttgatattactgttatcaaccgatccagggaaacccttcagaatttgtgcttggagttggctactatgggtgatctgaaacttgtggagcgtcctcaaaattataccctatctcctgaatctatcaagca

SEQ ID NO: 202547 - DNA, 311 bp, Gossypium hirsutum
  unsure (1)..(311): unsure at all n locations
gcccctcaactctcttctctctttccccttcactggttcaactcaaagaaatggcggaggagaagaaggctcaatctgctgnggtttggcctacggttaaaccttttgtcaatggtggtgcctctggtatgcttgctacctgtgtcatccaacccatcgatatgatcaaggtaagaatccaactgggtcaaggatcggcagcaactgttaccaagaacatgcttagggaggagggtgttggtgccttttacaagggtctatcagcaggactgctcangcaagctacatacactactgctcgattgggatca

SEQ ID NO: 202548 - DNA, 374 bp, Gossypium hirsutum
tatcctacatacatggctggcaggcatgctccttcagggctggctcgctgcatactaggatcctactgctgctcaacagggtggtggctatggtatgctgggcagtaatcttccaccttcatgggaaggcattcaactttactactcatacaacatccggcgattgatgctgtactatccaactcaacaagcattactagctgttataggctgctacatcgaagtaatgttaggtggtgcaactgatcaacttctaaacctagctgacccttccatagcacgatcatgggtgcaatcaacagatgtagcttactggccgagcgatcggttccgatacatcgctgtccggaatgaaagacctcattcatcttggt

SEQ ID NO: 202549 - DNA, 214 bp, Gossypium hirsutum
tttcactaccagaaatgtgggaaaaactctcgtcacccgtactcaaggtaccaagattgcttctgaaggactcaaacaccgtgtgtttgaagattccctggctgatcttcaaggtggtgatgaggatcatgcttacagaaagattcgtttgagagctgaagaggttcaaggaaaaaatgctttgaccaacttctggggaatgaattttacaact

SEQ ID NO: 202550 - DNA, 398 bp, Gossypium hirsutum
tgggtccccccggcttgaagaatatccggccaagggatttaaaggcaaaagctcaggtttttaatgggcaacgcgttgaccttattgacttttaccatttaaagagtcaaaggggtttgagtcacctggaattgaaggatgaggttcaaaatgatttaaaacgagcaactggaaagtttgtcaaggatccagatgatgcaaataagctcaaccgcattcttaaactgacaggatttagtgatccggtatatgccgaagcatatgtcactgtgcatcactatgataatgttcttgatattactgttataaaccgaaccagggaaacccttcaaaatttgtgcttggagttggctactatgggggatctgaaacttgtggagcgtcctcaaaattatacc

SEQ ID NO: 202551 - DNA, 403 bp, Gossypium hirsutum
caaaagtgtgcgtcgagcttaaaaaacatcttgtcacagcaagctatgtcgatgactccatgttaatgatggatgaaaaggccaagaatgctggcattacaattcttggtgaaatgggtttggaccctggaatagatcatatgatggcaatgaagatgataaaccaagcgcatctcaaaaagggcaaaataatgtctttcacttcctattgtggagggatcccatctccagcagctgcaaataatccattggcatataaattcagttggaatcctgccggagctattaaagcaggacgaaatcctgccacgtacaaatctcagggtgaaacagtacatgtaaatggggatgacctctatgattcggctgtgagatttcggatacctgatcttacagcttttgc

SEQ ID NO: 202552 - DNA, 405 bp, Gossypium hirsutum
cttactttcaaggttgtaggaaagggaagaaatggtgaggatttgttgaattggacctggttatgttggaggtccaacaatggcagtcattggactcaactgtccctccattgaagttgtcgttgttgacatctcggttactcgaatctcaacctggaacagtgaccaattaccaatctatgagccaggtcttaatgaagtggtcaaacaatgcaagggaaggtacctgttcttcatcaccgacatataaaaacatgtcttcgaagcagacataatctttgtttctgtaaacacgcccaccaaaacccgaggtctcggtgctggcaaagctgcggaccttacatattgggaaagcgcatcatggatgattgctgatgtatcaaaatccaacaaaatcgtcggcga

SEQ ID NO: 202553 - DNA, 402 bp, Gossypium hirsutum
  unsure (1)..(402): unsure at all n locations
ccgacttcacttttcttcttcaccaatcactccagctttagtggtaatgggtgccattttgtcatttcattaccacactcaatggtgtttaaccagtgcccccttacctttttacttaactntaatcatttccctaatgtgctaccatgtttatctgcaaaccataacatattcttccttcccctatatccccatatctaaccaacctataccattcctacacactgcaaccccagtatctatcttgtctggtttctttttttaatgatgtctgaacttgaagaagattctttaaagcttccagtacttgatctaacccaacctgataatattgaatcctctntcttgtcttctctcttaaaagcttgtcaagaatggggtttcttttatgttaccaaccat

SEQ ID NO: 202554 - DNA, 268 bp, Gossypium hirsutum
gaagcatggccgtcgggaagaacaagaggatttccgagggaaagaagggaggaatgtaattttgcagcggatccctttgctaaaaaagattggtacgatatcaaggctccttcagttttcactaccagaaatgtgggaaaaactctcgtcacccgtactcagggtaccaagattgcttctgaaggactcaaacaccgtgtgtttgaggattccctggctgatcttcaaggtggtgatgaggatcatgcttacagaaagattcgtttga

SEQ ID NO: 202555 - DNA, 421 bp, Gossypium hirsutum
gcttttcgaggtcttgtgcaaggtccatcatgcaaatctggtagagctgatcggctatgctgcaagtgatgatgaactgttccttatttatgaatatgctctaaagggggcccttaaaagccatttacatgatcccttgaacaaaggtcataccccactttcgtggataatgagagttcagattgcactcgatgctgctagaggcctggagtacatccatgagcataccacaacacattatgttcatcgagatatcaagtcaagcaacatcttgcttgatggttctttcagggcacagatttcagattttggattgtcaaagctcgttgggaagacacatgatgaggaagcaacagcaacgaaagttgttggtacatttggttatttggcaccagaaatattgagtgatggacttgcatca

SEQ ID NO: 202556 - DNA, 352 bp, Gossypium hirsutum
gccagctccctctattttcagctccggttctgcgacaggtccgtttccaccgtcgtaccgtcgatttccacctcagtttcttcgtccatggctggaacggactcttctctaacgaccaaggtttgtatcattgggagtgggcccggcgctcacacggccgctatctacgctgctcgtgctgagctcaagcctattctttttgagggatggatggctaacgatattgcgcctggtggtcagcttaccaccactttcgacgtcgagaacttccctggattcccggatggtatcatgggttccgagcttatggagcggtgccggaaccagtcgcttcggttcggtactactatct

SEQ ID NO: 202557 - DNA, 286 bp, Gossypium hirsutum
tagtcatttgcctattgagtacatacaatgcgatggtttagatgaagaagaaacatgtgataaattatcaaagcttaacgatgtgactcatgtgttttatgttgcatgggataagagatcaactgaagatgaaaactgcgttatcaatggtactatgttacggaacgtgttgaaagcggtaatcccgaattcacccaagttgaaacatatatgcttgcaaaccggtcgtcggcattacaccggtccgattgatttgtacggaaaatatcatgctcagccccatgat

SEQ ID NO: 202558 - DNA, 293 bp, Gossypium hirsutum
accttttcctattgctgtaactaatctattggatttaacaagactggatctgcattacatcaagctgactggcccaattccttcacaaattggccggctaagacgacttacaatgttaaatttgaggtggaataagctccaagatgtccttccttcggagattggagagctgaaaaaactagcccatctgtcattgagctttaataattttaagggcgagatcccgaaagagcttgcatatctaccctagctccgctatctctatcttaaagaaaaccgtttcactgggcgaa

SEQ ID NO: 202559 - DNA, 398 bp, Gossypium hirsutum
  unsure (1)..(398): unsure at all n locations
ccgggggtccatctttagtgcacggtgttatgtcagattcattactcatggcttcgtggcttaaagtcgctgaagatttatttgaagttgtagatcgaagagcaaagctagttgctaatgatctgtcggaggagccacctgattctcaaacacaaggttcttcagcagaaaaaacatagccaagggcaaaggcacaaaaaagactttctacacaaagatctcccaaacctagtgatactataaacaagcatactagttcagaagtactaaaatcttatgaggctcgtataaaacaactgcagcaagatttatctgtatctaagagtgaagtaaccagggtagagtcaaatatgctngattgcttggcagcaaagaactctgagatagaggcacttgtc

SEQ ID NO: 202560 - DNA, 365 bp, Gossypium hirsutum
aaaattgaagcacgtttaaggaatgttttgaaaggagataacgatattcgtagcgcgaaaaccacggtttctatggccgtaactcataccgaaagaaggttgcatcaaatgatgttcgcagatcgtgattacgaacggaaaccgattttggaacataagtcggagttgtcggctgtcaccgtgcaaaactgggtggaaaggggttattctgttgtgaatgttcaatgcaaggaccgaactaaactcctgtttgatgttgtttgcacattgacagatatgcaatatgttgtgtttcatgccactatcaaaacatcaggcgataaagcatatttggaattttatattatgcacagagacggaatact

SEQ ID NO: 202561 - DNA, 365 bp, Gossypium hirsutum
tttgatgataatatcctttaaaatcacttgatgtccgcttcttattgcaggatttactcccagttgctttacggtactgcttgtcaaaaaatgtgacgtcctgtttaattgaactatccaatttaacgaaggctatttgtggcaaagttttggatgttgaagaacttatgaaagtgcaggatcgagctgttttgactttatgcaatttggagaagatctttccaccttccttcttcactattatagtgcacttggttcctaagcaaattgaaatcttattgtcgcactaagcgttatccagaacgatcaattgctgaatgctacttggcagaggagtgcatgacattctggtctagatatttaga

SEQ ID NO: 202562 - DNA, 347 bp, Gossypium hirsutum
tggcggccgctctagttcttacgcgtattgtccttccgcacgaattcggttttaggcccttgttttcccccgatgatatcatggtttttaggcaaagaacactatcaccttaacacctaagtttgtcgatgatatccataaacgtggaggtacgattcttggaacttctagaggaggtcatgattctgtcaagattgttgaccgcattcaggatcgtgggatcaatcaggtctatataatcggaggtgacgggacacataaaggagcagctgtgattattgaggaaataaggcgacgtggtttgaaagtagctgttgctggaattcccaaaaccattgacaatgaca

SEQ ID NO: 202563 - DNA, 398 bp, Gossypium hirsutum
  unsure (1)..(398): unsure at all n locations
gaactattctcggacctgctgataatattaggacgatcaccaaagagcatttgcaaagctatattcagacacactatactgctcctagaatggtcattgctgcatccggtgctgttaagcatgaggaaattgttgaccaagtgaagaagttgtttaccaagttatcgtctgatccaaccactggttctcagttagttatgaacgaaccagcaacttttactggttctgaggttagaatgatcaatgatgatgttcctctggcgcaatttgctgttgcttttgagggagcttcttggacagatccagattccattgcgctcatggttatgcangcaaatgtgngttcgtggagcaaaaatgctgnnggtggaaaacacatgggctctgagctggcacaa

SEQ ID NO: 202564 - DNA, 390 bp, Gossypium hirsutum
  unsure (1)..(390): unsure at all n locations
ccaaggttggtccaggaaaggttaaaaggaggattaagcaaccttggtctaactcttgaagggttccttttccttaatgctcttttaatagaaaaaggccttcttgagacaacttggcctgtcttgaggaagtttggatttaatgacaagttaaagctcagggatgatattcttccagttccaaccaagcttgcccctgatcagactgtggagctgacaaatgaagctatcgactttttgcgtgggatcttccgattgtatgacagtgataatgatggatctttgcaaccttctgagtttgatgatatctttgtaactgcaccagatagtgggccttgatgacaactctggatccttcatatngtttggctaacttgatttgcattggat

SEQ ID NO: 202565 - DNA, 328 bp, Gossypium hirsutum
  unsure (1)..(328): unsure at all n locations
gcgtctagaatagggatcccggctgagaatggacgagctaatcggttatttggtcctgtctnctgcagtcgcaaacctctcctcgattcgtcatgttaaactcgagaacaactcatttcgcggaacgttacctaccgagctctttggtgcaactaggctgaagagcttggtagtttcaggtaattccttatacggaccgctttcgtcccaagtcgggaaccttaagaacctacaaacctttgatgtttcacggaatttattcaatggctccgtaccttcgtccatagttcaatgcaagaaattaactacacttgttctcagtcaaaat

SEQ ID NO: 202566 - DNA, 410 bp, Gossypium hirsutum
  unsure (1)..(410): unsure at all n locations
ctaacttcgatgtgcaagagctcaaacccgggaatgtaaattcatctgatttgagtgtggatcgaatgagggccatccaacatccaccttattctattaacggagaagttgtcaataatttggactttatgcgaaagaggaaaccaagcaatgattcaaacatcatggaacataagatctacaaatgcgagttcgtccaatgtccctatagtgaacatcgcttatgttttcatgacaggattgccagggacaatcatcaattaacatgttcgtatcgaaactcctctgcactgtttagtggttcaagttntaatggtaacgatgtgaaacctgtaattttgcctcaagcatttgcgcaattcaagccaactgcaacagcggttacttacgtctgaacaccatttgatctt

SEQ ID NO: 202567 - DNA, 374 bp, Gossypium hirsutum
  unsure (1)..(374): unsure at all n locations
gaaaaagggacaatacaccaagttctggaatgaatgggggaaatccattaaactcggtatcattgacgatgcaaccaatagaaatcgcttggcaaaactccctcgatttgagagcaccaagtcggatggtaaattgacatcacttgatcagtacatctcaaggatgaaatccagacagaaagatatattctacattacaggaaccagcanggaacaattagaaaaatctccattcttggagaggcttaagaagaaaaattacgaggttattctcttcactgatcctgttgatgagtacctgatgcaataccttatggattatgagggaaagcatgtccaaaatgtatccaaggagggcctgaatatcgggaaag

SEQ ID NO: 202568 - DNA, 339 bp, Gossypium hirsutum
gttttgctctcgatctctccgcccaaatcttgtagacgccaagcagataaatattgtgattactcttttctttctcagatcccttcgaaagcgattcttcttcttctttttattctttttaaattgaattgaagttgctgattcgaaatgagtacggccgaccttctcagcatcgagcctttaaagctcaagtttccttttgaactgaggaagcaaatctcgtgtgctcttcaattgtcgaataaaactgataattatgtagctttcaaggtgaaaacgacaaatccaaagaagtactgcgttcgtcccaatacggtgggtcgtttgcctcgatccaca

SEQ ID NO: 202569 - DNA, 351 bp, Gossypium hirsutum
ccaagggcttttccttgcccttacgcacaaaacttgtggatggccaggaattgtaagggtttgcaagacaagattaaattggttcctttgaaccttcaaaataaacctgcttggtacaaggaaaaagtttaccctgaaaacaaggtgccgtccttggaacataatggcaaagtcattggggagagtcttgatttgattaaatatgttgatagcaacttcgaagggccgtctcttctacctgatgatgctgaccaaaaggagtactttgagacgacgttatcacacatggacgaatttctagggctggtgtatgctacatttaaaggagactcaacacaagatgcttatgct

SEQ ID NO: 202570 - DNA, 355 bp, Gossypium hirsutum
  unsure (1)..(355): unsure at all n locations
ctcgagttcactcattaatatgtatgtgaaatgtgggcagctagagattgctcgtactgcatttgatcaacttggttccaaggacttgatttcctggactgcaatcatgtcaagttatgccatgagtgggagaactagagaagcaagggaactctttaatatgatgccggaacggaatgtaatctcatggaatgcaatgctagcagggcatactcgtttgtctcaatgggaagatgccttagaatttatttttcttatgcggagaatgactaaagattttgaccatgtgacgcttgttctaattntaaatgtctgtgctggcctgtcaaacgttgaaatggggaaaaaggttcat

SEQ ID NO: 202571 - DNA, 284 bp, Gossypium hirsutum
gttcagttagaattccccgagataatcttcttaatcgatttggggatgtcacccgagatggaaaatacacaagtagtctccctacaataaactattgtttcgctgctactcttggtgaacttgtaagtgggagggttggccttgcacattcttcagctggtatcctcaagattgctgtcactattgcagctcgatactccttactacgtcagcagtttggtcctccaaaacagcctgaagtcagcattcttgattatcaatctcagcagcacaagctcatgcca

SEQ ID NO: 202572 - DNA, 416 bp, Gossypium hirsutum
  unsure (1)..(416): unsure at all n locations
ccatttcccaaatctcctccctcctcttctttagcgtccttttcatttccgctcatgcagcgcgctttgaaatccgcaatgagtgctcctacaccgtctgggcagcagcctctcctggtggtggccgtcgcctagaccctcggcaaagttggaccatcgatgtgcctgctggcactgctatggctcgtatttggggtcgaaccaattgcaatttcgatgccagtggtaggggtcattgccaaaccggtgattgtggtggactccttcaatgcataggttgaggtgtacctccaaacaccctggctgaatatgcacttaaaccaattggaaacatggatttctacgacattttcttagttgatgggtttaacatccncatggtgttaggtccaactaatgtgcggtgtcacaacatt

SEQ ID NO: 202573 - DNA, 419 bp, Gossypium hirsutum
gtagtttttttttttctttttttaattagaaaataggttagtctatactaatcattcttatttcacaaatgctagcaatgaggaataaaagaggtctcccacatgctaactaattccaaaatcaaaggttccttttcctgatgaggtgtaactaaaatatccgagtgaagacgtactgaaattttgcacgacaccaaaaaataagggttcacagtttgaatccccttaactcatgctgcatgggatgatagtttataacaaagcatttctctcatagccgactgatgactgcttccacctctgaaggggtgtacagatggtatatcggtgctactttggcaatatcaacattgttgggagtcaccttttcttccattacttgctttaaaatggacagagcaattgtttcagcttcttga

SEQ ID NO: 202574 - DNA, 343 bp, Gossypium hirsutum
gcaagtttcaatggcaaaggcaaacattctctaggaggtcttgtgttcactgtgattgctactgcttgtaggtgttggagagtaaggaaatccgaatgacagaaacgcactacaaaaatcctttctcttcttccaaggccatagatcagtcacgctgtctgtcaaccataaagtctgatggaggtccaactaaactctttcttaagactaacttgaccatgttgatcatactgatggctaatactatgctatatactttgtctaaccaaacttagcaatggcttccacccccacaatgctttcatggtgtacacttgaatatggaaagagaactggaccccag

SEQ ID NO: 202575 - DNA, 353 bp, Gossypium hirsutum
  unsure (1)..(353): unsure at all n locations
agagaatagaggaggagtttggtcctattgtacgtcggattgtagaatgagagactaaagtgtccaaattgggaaagttgaaatataagaatgaaaatgattcagtacaagatgtgaaagctgatgatctgcaacaaatgtttctagccatgacagaagatgttcgcgtcatcattgtcaaattagctgacagattacataatatgcgcactctttcacatatgcctncatgtanacagtccagcattgcaatggagacattgcaagtctttgctcctttggcaaaattgatgcggatgtatcacattaagtctgaacttgaaaattaatccttcatgtacacaaatcctgaa

SEQ ID NO: 202576 - DNA, 213 bp, Gossypium hirsutum
  unsure (1)..(213): unsure at all n locations
gcccgcaaagctgacatacttttacgaggatatttcggatggaattcacgacgtgccatacaggttctcgatcatgttttcccaaaggatgctgctacacagcctgaattgataataacttattttggaggtaatgattcgatgggggctcatccatctggacctggccctcatgttccacttnctgaatatatcgagaacatgaagcaaata

SEQ ID NO: 202577 - DNA, 240 bp, Gossypium hirsutum
atggttcaagttggtgatgagacatttaaagcacataagttgatccttgctgcacgttcacctgtttttaaagcacagtttttcgggctcgttggagaccctaacttggataaaatagtctaaaagattttgagccttctatcttcaaggcaatgctcttgtttatttataccgacaagcttcctgatgtacaagatattgttgactccacatctatgtgtacatctggcaacatggttc

SEQ ID NO: 202578 - DNA, 407 bp, Gossypium hirsutum
  unsure (1)..(407): unsure at all n locations
atctcctttccttctccttcatgatttgttccattggaagactgtttttgatttccattagcatgcgaattaagccttttcgttataattcatcgcctgaaatatctgttatcgaatacgcttctacttttttttgtttcctgattttgattttagtgataacaactggaaattttgaatgctcgagctgtaatatgggatatttgaattcggttttgcaatcttcaagtcaggttcatgctgaatatggaccggttagcggcggaggccttagccagaatggaaagtttagctacggctgtgcaagctctcctggaaagaggtcttcaatggaagattnttatgaaacaaggattgacggtgttgatggagagatagttggtctttttggagcttttgatggtcat

SEQ ID NO: 202579 - DNA, 332 bp, Gossypium hirsutum
  unsure (1)..(332): unsure at all n locations
gcggaaggtgtatgctcttgcacgcgtttgtttcgtcccatgaagggnnngatgagaaaacactgaaaataagaggcatatttaacaaatctgcacattgactcatattttgacaacgccatctttgccaaagaccgccacgagcctatattaaactatgcatggaattaactgaggcgaatttgtgcttagaaactgaaagacttctagccttcgacttgtacactggcaaatcaaaactaacccgagtctgattcatacgaacacagggccctaacttgtcaaaacctgcatccaaaagagaactgctattcaacgaaacggacatacat

SEQ ID NO: 202580 - DNA, 171 bp, Gossypium hirsutum
  unsure (1)..(171): unsure at all n locations
ggcggatgctgnatattataagaatcatgatgtgattaaacttctggagaaacatggatctaagccttttatggctccaatgcatgtaaatcacgcgcgtgaagttccagaatatgagattgatccaaaagaacttgattttactaacagcatcaacattacaaagggaac

SEQ ID NO: 202581 - DNA, 318 bp, Gossypium hirsutum
  unsure (1)..(318): unsure at all n locations
attgaatcccccttcatcttattgcgctttggatccaaattacccttgtgctcctgggtaacaatattttgggccgggtcccatgcaactttcttggaactacaactacgggcagtgtggaagggccataagggtcgaattggttaacaacccagacctgctatcaagtgatcccacaatttccttcaagtctgcgttttggttttggatgactncacaatcaccgaagccatcttgccacaatgtgatcatcggagcatggtcacccttcagtagcgatcgggcagcaagtcgggttccagggtatggtgtgatcac

SEQ ID NO: 202582 - DNA, 249 bp, Gossypium hirsutum
tagcatctgatatatcagatcatgcagccatgatataccactgttgctggctacaatctcaccctactaagcatgcgacatttataggctcatgcgcattctagttcactcggacttctttgcacgccaaaagctagacaatgatgctcaagaagaaggatatgttcttaccaactcttctcgtattttgctcaagaataatcccttctgcataacgcctactttgaaggctacaatggatcctattat

SEQ ID NO: 202583 - DNA, 343 bp, Gossypium hirsutum
attgtatttacgatcggtgggtataaatgactggcatgaagtccatgtgaaaagggtcgtaaatgaacctatcttgatgtcagagtgcaaactggaatctgatagggcaatcacaccaatctttctgctaatttggatttcttacaaaagaggaaaccgtctgacgatataaacatcgaacacaagatctacacttgtgagttcctccaatgtccttatagtgaactccaattgggttttcatgaccggactgccagggacaatcatcaactaacttgtccacatagaaactcgtctgcacagtttggtggttcgaattttaacatatacgacgtgaaacccg

SEQ ID NO: 202584 - DNA, 262 bp, Gossypium hirsutum
gtatacagctttggagtggtactattggagcttttgacagggagaagatccgtaaacaagaaccgatttcctaaagaacaaaacttagtggaatgggcaaggcccatgttgaacgattccaggaaactcggcccgataatggaacctagactcgaaagcccatactcgtaaacggctgctagattagcagctgcctttggcttaccaatgcgtcagccctagcccatagcaaagtctcacaatgagtgatgtactgaagaca

SEQ ID NO: 202585 - DNA, 319 bp, Gossypium hirsutum
ttcaagctggaaagcatacctgaaatccgtcataatggcaaaaccaagaagataaaagggtatcatcttcgtcccccgagggatgctcctatcgagtggtatacaacagtcgctctcaagaaaatgcaagaacatggtgctatttatctgactcccttttcacatcgtcttgctgaagaaattgacaatcccgagtatcaacggttgaagtgtagagttaactatcatgctttgaggttcaagccaaatattatgcagttaagtgagtcaatagttgataaactccgggcacagggtcatttcatgtcgatacatcttc

SEQ ID NO: 202586 - DNA, 376 bp, Gossypium hirsutum
caaagctctttctaaatcaaagtgaaatcgagaaattgcacctcaacgataatccaccgagaacagacatgaccatcactgggaagcttaatcctgaagatgataccatcttccttaaagttcagattgcagatacagagggttctactaggaacatctactttccctttgatattgtggaagatacgccattggatgtggcaactgaaatggtgaaggagcttgagataaccgattgggatccacttgaaattgcagaaatgattgatggtgaaatttcagctctagtcccacaatggaaaaaatcagacctccctagacatcaagcccataatacatataactaccaggaagatgatgatgatgggtgtcatca

SEQ ID NO: 202587 - DNA, 309 bp, Gossypium hirsutum
caaaagcctgtattgtttaggggaactgtacgttatgcatgtgtgcattctaatttgggtgggcacacgcagtcgaagggatgaccttgagtcattggcttatacactaatatttttacttaggggaaaacttccctggcaaggttacattggggagaacaaaggatttcttgtttgtaagaagaaaatggcaacttctcctgaaatgctttgttacttgtcccctcttccttttcaacattttcttgaaattgcaaccaacataaaatttattaaaaaaccaaattcctaaaagttaattcttttttt

SEQ ID NO: 202588 - DNA, 425 bp, Gossypium hirsutum
gagagggattttatggctcaaatttcaccgaagctgctgatcccggtttcgtttcaagtgtcgagagatgacatcacgggccaactgggtttgatttgggagctaatcaaaacgccattgatagttcccttgctgcaactgggcgtctacatttgcttagccatgtccctcatgctcttcatggagcgggtttacatgggcatagtcattatcctggttaagcttttctggaaaaaaccagagaagcgttacaattttgagctcattcaagatgatgtggaactcggtagctctaatttccccgtcgttttaatccaaatcccaatgttcaacgaaaaagaagtttacaagatctccattggagcagcttgtggactttcatggccgtcggatcgtctcgtgatccaagtacttgatgattcaac

SEQ ID NO: 202589 - DNA, 324 bp, Gossypium hirsutum
gcaaattcccttcttttcccctccacccaagcctaaaaaatgatggctacagctcaaatcagcagaaaacgaaagttcgtcgctgatggagttttcttcgcggaactcaacgaggtattgaccagggaactggctgaggatggatactctggagtcgaagtcagagttactcctatgcgtaccgagatcatcatcagagccacccgcacccaaaacgttctcggtgaaaaaggtaggaggattagggagcttacctcagtggttcagaagcgattcaagttcccagaaaacagcgttgagctttacgcttagaaggtcaacaac

SEQ ID NO: 202590 - DNA, 403 bp, Gossypium hirsutum
ggaatgctttctcagaaggattgtggagactgaaatgccgatcatggttcagatacagcgattgatccgaggagcgaaaaatgctgtgtcactcgctcagggagtggtttactggaaaccacccaaacaggcattggataaggttaaagcacttgtagaggagtcttcagttagttgttatggtgctgatgaaggtcttcctgaacttagagaagcattgataataaagttacgttatgagaacaatttgcagaggtcttcggtgatggtcactgcaggagcaaatcaggcatttgtgaatcttgttctaacactgtgtgatgctgtggactcggttgtcaatgttgctccatactatttcaatctctacatgtccttacagatgacaagtgttactaaaatt

SEQ ID NO: 202591 - DNA, 346 bp, Gossypium hirsutum
gaattctgcacgagccgcatcttttttgtttgatggagccctgaatgtggatctgactgagttccagactaacctggtcccatatcccaggatccactttatgctttcttcttatgcccctgtcatttcagctgaaaaggcttaccatgagcagcttatcgtggctgagataaccaacagtgcttttgaaccctcttcaatgatggccaaatgtgacccacgacacgggaagtacatggcttgctgccttatgtaccgaggagatgttgtgcccaaagatgtgaatgcggctgtggccaccattaagaccaaacgcacaatccaatttgtggattggggccctact

SEQ ID NO: 202592 - DNA, 337 bp, Gossypium hirsutum
cttcttcaatggcagtgtcagaaatctcgcgatgtctgatcatgtattcttgagtttgagaggtgaagatacgcggaaaagtttcacggatcatctttacacagctttggtgcacttaggaattcgaacatttagagatgatgaggaaatcgagagagggaataacataaaagatgaaattgaaaaagcaatactacaccactccaaaatttctatcgttgttttctcaaagaattatgctgcatccacatggtgtcttaacgaacttgtaatgatattggagcacaggaaatcctctaaacatattgtgttgccagttttctatgatgtggatccc

SEQ ID NO: 202593 - DNA, 435 bp, Gossypium hirsutum
aaataaaatttgagctttcttcggctcttgtcagttttgcttttgttcttatcctatgtggtcataggatcagctgagcagtgtggaaggcaagcaggcggtgctctttgccccggtggtctatgttgtagccaaattggttggtgtggcagtactgctaactactgcacagttccgggttgccaaagtcagtgcagcggtagtggccctgcccctgggcctggtgggctaaccaatcttatatcaagagagacgtttgatcggatgcttttgcatagggacgatgggggttgtcctgcccgtggcttctatacctatgatgctttcattgctgctgcacgtacttttcctgccttcgctacaactggttaccaagctactcggaagagggaaatagctgccttcttagcccaaacttcccatgaaactactggt

SEQ ID NO: 202594 - DNA, 387 bp, Gossypium hirsutum
acatgctgttattgagttaactagaaaggctgaggaaatagccaaatctctgaatcttgaccatgttcttgaagtttctaacaaacagtgcccttgttacaattcaatgggagaagctgacattgacaacaataagctaaggaaagcagcttctcgagaagatgccactgacaactatttatattgtccaaaagctaaagatattgagagcggagatttgaaacatttccaaaagcactgggctaatggtgagcctgttattgtcagcaatgtccttgagaatgcatctggtttgagctgggagccaatggttatgtggcgtgcttttcgtcaagtaacaaataaaaaaagtgatcaccaattggaagttaaggcacttcattgctt

SEQ ID NO: 202595 - DNA, 442 bp, Gossypium hirsutum
  unsure (1)..(442): unsure at all n locations
gttttctctttgttgtcagcttccttggcctgtttgggcgtactccccttcgtaaggtaatggtactggattataaacttacatatccaagtgggactgccacagcaatgttgataaatagttttcatactcactctggtgctgagcttgcagggaagcaagtcaagtgtcttggaaaatatctaagcataagtttcatttggagctgtttcaagtggtttttcagtggtattggcgattcctgtgggtttgataattttcccagtttcggcttaatgctgttcagaaacacgtaagtcccctcagatttagtttctcatgtaaactcccactttttcctttntccccagttgaaagaatgctcgtataagttaataagaatacttgatctntctttntgaatcactattcaaaggcaatgggacctttattaccattaaac

SEQ ID NO: 202596 - DNA, 309 bp, Gossypium hirsutum
caccaatttttcattacaatatattgggacatactctcgaaatctttaaaattttcgtgtggttatgcttgatctagaagaaaggataacagatttgcctcttgacgatggagtccgtgatctattgacgggctgttaaaagcttataagatttgctctgtatcttcaacctgttgatttaacccatttgggacttgtttatattagacaatatatttcaaaagttagatagatgcttctagtatatcttatgtaatctgattcagaccttttgtaatttttcaagggatgccctatattgcataaact

SEQ ID NO: 202597 - DNA, 314 bp, Gossypium hirsutum
gtcttcgtctccttctaaatcttgtttgatccaaaaccaaagggaaaaaaatagggcttttttcttacaaaagttgggggttcgaagagcataaaacgataatatgccttcgttacctctcagatcgattttgctcccattaatccctttcttaaaccctttttaatcctggttaaagttccaatcgttggaaacatcttgaaaagagtgatcggcgtggtaatcttagttaacgttttcccctcaaaatcattagctctcttttgactcctttactttctctcctttttttctctctggtttcttgctttccc

SEQ ID NO: 202598 - DNA, 298 bp, Gossypium hirsutum
catggcatctaatccaagattcatgttgatcccaatttcgcaaaattataaattatgttgcgacacataactactcttttactggatcctaaagcattcaaggatacattgtatttgttcgttgagagatacaaacgtgaataacattttatttattacatgtatataatcttatggttttatcttctgtactaccattgtatttgaaattttatcaaactttgtttccttaataaaacctaacaagttgactgttaaagttattttataacaatattaactgtaatatggaaggtat

SEQ ID NO: 202599 - DNA, 376 bp, Gossypium hirsutum
  unsure (1)..(376): unsure at all n locations
tagagagattatttagatggttgccataaaaattgtccgtcganttattaaatatcgtgaggcagccatgatagagattgagatgttgcaacagcttagaaaacatgataaaggtggcaaccgttgtgtgcaaatacggaactggtttgactatcgtaaccatatttgtattgtgtttgagaagcttggaccaagcttatacgattttctacgcaaaaacaattatcgctcatttcccattgatcttgtccgtgagattggcagacaactattggaatgtgtagcattcatgcatgatttgaacctgatacacacagactttaagccagaaaacattcttctaatctctccagaatacgttaaaatttctgattac

SEQ ID NO: 202600 - DNA, 304 bp, Gossypium hirsutum
gccagcgccctctctcaccagctccgtacatgcaacagctgcggttccaccggcgcaccgtcgattgccacctgagtgcctgcggccatgggtgcgacggactctactctaacgaccaagggttgtatcattgggagtggccccgccgatcacgaccggcgatatctacggtgcccgtggtgcgctacagcctatgctttttgagggatggctgggcaacgatattgaagctggtggtcaaatcaccaccagctgcgcagaccagaactgtccactgtttccggatgaactacatggttcggag

SEQ ID NO: 202601 - DNA, 424 bp, Gossypium hirsutum
gcgagcaagaggcaaacaataggcttaccaggtatggtagagatggttgcaactatatgttcaacattggttctcaaataaatgatatgagccggttgattgaaggacaagcacgatattttattgatgcatccaaatacggaaatgtttcccggttcatcaatcatagctgctcgccaaatcttgtgaatcatcaagttcttgtggaccgcatggattgtcaccgagctcacattggtctctatgccagtcaagatatatctgtaggtgaagagctgacttttgactatcgatatgaactcctgcctggtcaaggatatccatgtcaatgtggagcttctacatgtcggggccgactttactaaaccctcagtgagcactacgggatctctatggcatctaaagttttgctttttgagttcac

SEQ ID NO: 202602 - DNA, 429 bp, Gossypium hirsutum
gcaaattcccttcttttcccctccacccaagcctaaaaaatcatggcgacagctcaaatcagcaaaaaacgaaagttcgtcgctgatggagttttcttcgcggaactcaacgaggtattgaccagggaactggctgaggatggatactctggagtcgaagtcagagttactcctatgcgtaccgagatcatcatcagagccacccgcacccaaaacgttctcggtgaaaaaggtaggaggattagggagcttacctcagtggttcagaagcgattcaagttcccagaaaacagcgtcgagctttacgctgagaaggtcaacaacagaggcctttgcgctattgcccaggccgagtctcttcgctacaagctactcggaggtcttgccgttcgcagggcctgctatggtgtactgagattcatcatggag

SEQ ID NO: 202603 - DNA, 347 bp, Gossypium hirsutum
gttgattgcaacaagtgttgcagctaggggtttagatgtagaggagcttgaattagtgattaattttgatgtcccaaatcattatgaagattatgttcaccgtgttggtaggactggtagagccgggccgaaaggctgagctatcacatttatctctgaggatgatgcaagatatgcaccggatctcgtaaaagctttagaactctctgagcaagttgttcctgatgacctgaaagctctcgcagatggctatatggcaaaagtcaatcagggacttgagcaggctcatggaacaggttatggaggaagtggttgtaaacttcatgaagaggaggatgaaaagagaa

SEQ ID NO: 202604 - DNA, 390 bp, Gossypium hirsutum
attgagactacctcttgagtcagaccaagttcttctgaaagtcatttatgctggtgtaaacgcaggtgatgtgaactttagcgcaggccgttattttcaaggaaccaagaaagaccctggatttgaggcagtgggaataattgctgccattggagattctgtaagaaatttggaagttggaactcctgctgcagtcatgactattggatgttatgctgaattcatgaaggttccttcaaagcaaatacttccaattacaagacctgacccggaagttgttgctatgcttacttcaggattaacagcatcaatcgctttggaagagcttggtcagatgaaatctggaaaagttgtccttgtaactgcttgtgctggagggactggacaatt

SEQ ID NO: 202605 - DNA, 389 bp, Gossypium hirsutum
gtgaccgtcaccgactttgagaaagggcttcctacgtggtaatatatttggcaaccctaataccagccctctatttctcaaaccctaaactccagtttttaagatagttgttattgatcaaaataaaattaggagatgccgggtctaacctgcaacgcatgtaacaaagaattcctggacgatgcagaccagaagcttcattacaagtctgattggcatcgctacaatctcaagcgcaaggtagctggagttccgggagtgacggaagctctgtttctggcaagacaattggcacttgctcaagagaaagagaagcagaatgagacccccatgctttacaggtgtggtggttgtggcaagggctatcgaaggttcaaggcttattctca

SEQ ID NO: 202606 - DNA, 260 bp, Gossypium hirsutum
gctcacttgtcggaattcgccctgaggctaagttcacattccatggcctgcctgcctaacttagacatggaagtgttgcaattgcgggtatcaccagctgtacaaacacatcaaaccctactgtcatgcttggggctgggcttgttgctaagatggcttatgaactaggtttggaggtcaagccatggattaaaacaagctttgctcctggatctggactcgtctcaaagtatttacttcacagtgggcttgcaaaaata

SEQ ID NO: 202607 - DNA, 434 bp, Gossypium hirsutum
cggagacgggatcggacctttggtgacgaacgcggtggaacaagtgatggaagtgatgcacgcaccggtttacttcgagaagtacgacgttcacggcgacatgaaacgggtaccacaagaagtgttggattcgataaagaagaacaaggtttgtttgaaaggagggttaagaacacccatgggaggtggagtcagttcattgaatatgcaattgaggaaagaactggatctatacgcttcattggtcaactgttgtaacttacccggattgccgacccgccatgaaaacgtggatatcgtcggaattagagagaacactgaaggggaatactcgggtcttgacatgaggtggtgcctggtgttgttgaaagccttaaggttataacgaagttttgttccgagcggattgcgaaatatgctttcgagtatgctta

SEQ ID NO: 202608 - DNA, 359 bp, Gossypium hirsutum
tagagagaggaaggagatggttgccataaaaattgtccgtggagttaagaagtatcgtgaggcagccatgatagagattgagatgttgcaacagcttagaaaacatgataaaggtggcaaccgttgtgtgcaaatacggaactggtttgactatcgtaaccatatttgtattgtgtttgagaagcttggaccaagcttatacgattatctacgcacaaacaattatcggtcattttccattgatcttgtccgcgagattggcagacaactattggaatgtgtagcattcatgcatgatttgaacctgatacacacagactttgagccagaaaacattcttcttgtctttccagagttct

SEQ ID NO: 202609 - DNA, 395 bp, Gossypium hirsutum
gggaaatgtttacaaagcgatatttttacggttggaggctgcgattgttcaatttacttctgccccgacggtaaaaatccggaggatagtgcgatgtatgtttcggttttcattgccttggctagcgaaggtacagatgttcgagcgcttttcgagctcacccttgttgaccagagccggaaatggaagcataaggttcatagtcactttgacagagcgttggagaagtggccttatacgtttaaatacaaaagaaacattttgggcttcaaacgattctttagaagaacaactttaaaaagttcttactacattaaagatgattgcctaattattaactgcacttttggagtagtcaaaacttgcctttaaggaccaaaactgtcttctatttc

SEQ ID NO: 202610 - DNA, 173 bp, Gossypium hirsutum
ggcaaaacggtgtcagatctttgtgatctatagccggaagtggaatttccggctcgaggatggtgatccttcgatctttcgcactttcttcaggctaccatgaatcccgaatatgactatctcttcaagctactttttattggagatatcggagtcggaaaatcttgccttct

SEQ ID NO: 202611 - DNA, 263 bp, Gossypium hirsutum
cagaaacaagaacaaaagcacaactctccctaaatcttttgtttctttctcttcagcagtgataatggttgagcctgcaacagcaacccaagcagcagctccggtgatgcctcagctgaaagatgagcttgacattgtgataccaactataagaaacttggacttccttgagatgtggaggccattttttcagccctaccatctcattattgatcaagatggcgatccttcataaaccatcaaggcccctcctggttttgact

SEQ ID NO: 202612 - DNA, 242 bp, Gossypium hirsutum
cgccgcccacgagcgaccggacaggacccgacgacagccggagcaggccgagagggccgacgacccacgcgagcgcagggggccagaccccaaagcgagcccgacaggccaccacagagcagaccagcagggcagcgcccaggaccaagagccggcgggagacgggcgagggacaggcaaagacggcggacaagacaccaggcagcacggagacgagaggcgggagacaagagaccgagaag

SEQ ID NO: 202613 - DNA, 252 bp, Gossypium hirsutum
cacagaagccccgccaacgaagcgacccccaggacccaccgacagccggaccaggccacgagggccgacgacccacgcgaacgcaggaccccggagggagagacaagggcgcgcaacaagaaccacacggagggcggaggagagaccgacaacaacaccgagagcagccgaaggacccaagagcacgaggaacagacacgcacggacaggaagaacgagccggaagccagcaaagggaccaagaaaggcacg

SEQ ID NO: 202614 - DNA, 374 bp, Gossypium hirsutum
ccgcatctttgaggtttgatggagccctgaatgtggatgtgactgagttccagactaacctggtcccatatcccaggatccactttatgctttcttcttatgcccctgtcatttcagctgagaaggcttaccatgagcagctatcggtggctgagataaccaacagtgcttttgaaccctcttcaatgatggccaaatgtgacccacgacacgggaagtacatggcttgctgccttatgtaccgaggagatgttgtgcccaaagatgtgaatgcggctgtggccaccattaagaccaaacgcacaatccaatttgtggattggtgccctactggattcaagtgccggatcaactaccagccaccaactgttgtt

SEQ ID NO: 202615 - DNA, 663 bp, Gossypium hirsutum
ggatcatatacggtgcagcagaactacactagcttagacatacatgtagggcagtcatattcgtttctgctaaccacggatcagaatgcaagtagcgattactacattgtagcaagtgccaggtttgtgaatgaatcgcagtggaaacgagttaccggtgttgccattttgcgttattctaattcgaaaggaaaggcatccggtcccctccctgatccaccgcaggatgaattcgacaaaaccttttcaatgaaccaagctagatctatcagatggaatgtatctgccagtggtgctcgcccgaacccacagggatcgtttagatatggttcgattaatgtgactgaagtttacgtcttgagaaacaaaccaccagagactattgatgggaaaagacgagcgacactcagtgggatatcctttgtcaatcctgctacaccaatccggcttgttgaccagtataagattaaaggagtatataagcttgattttcccaataaaccacttacagagccacctaaaatggaaacatctgttattaatgggacttataggggatttatggaagtcatcctacagaacaatgacactaagatgcatacttatcacatgagtggatatgcattttttcgtttgtcggaatggattatggtgagtggtcgg

SEQ ID NO: 202616 - DNA, 221 bp, Gossypium hirsutum
ctacatttctctgctttggagcaaaaaagggctgatgaaggtgtaatgaaattggctgaagagcagagcaggcagaaggaggaacttcacaacaagataattcaccttgagaaaaaattacatcaaaaacaggcattggaactggaaattgagcaactgcgaggatcactgaatgtaattaggcacatgtcagatgaacatgatattagaagttcttgata

SEQ ID NO: 202617 - DNA, 388 bp, Gossypium hirsutum
ccgagccgtacctgacctcaccgggatcaagaaacagttttgtcgtaaacatggggtgaaaaaatggaaatgcgataaatgctacgagaaatacgctgttcaatctgattggaaagctcattcaaacacctgtggcacaaaggaatataaatgcgactgtggcaccattttctccaggttttacatatattcaactatcagtttcatgcactattaactactcttgcatatataactctcttggtaaaagtatagttataggatcacattttatcctttgagtcaattaatttttgtacgataaatcagacaacaaattagacacgtgaaaaattattaacatttttaacaataaaattgatatactctttgatctaacctattaaac

SEQ ID NO: 202618 - DNA, 422 bp, Gossypium hirsutum
  unsure (1)..(422): unsure at all n locations
caaaagagttccatgtttttcgctgccatttccaaagccgagtctactttagaaattttgatacaagtaaagtaatagaatcttaaagaaaaaaaagtgctaaaaaagctaactttttttttctttctattgttccttctttactctgggttcgtttttcaaagcataaaaacctaatttctaacagagcagctgcaactatcatcacccatggcggcaccgatctgggtatgggctttttacgtagccctaactctatttccttccgttttgggaaactcagaaggcgatgctctttatactttgagaagaagcctatcggatcctgataacgtgctccagagctgggatcccacccttgttaaccccttgtacttggttncanatcacttgcaatcaagataatcgagtcactagagtag

SEQ ID NO: 202619 - DNA, 326 bp, Gossypium hirsutum
  unsure (1)..(326): unsure at all n locations
tgttctagcggaaaaggaaatgttccatttcattcaagcattgcaaaaagaaatggattattaaagtattaagacaagacactaatgccatgtatgaagactatgttaaagaagctcctgcaactcgattggaatcattactttgtaccttgtatggtgttgggtttaatctcctgatgtgatcaggcctcatttgctcaagctgnttgatgcaatggtccctaatgtccttcagagctggtaatctcttccttactttacctgattttccaggccagtaacacttaagaagcttctncacacgctttggtaccacatatgctctt

SEQ ID NO: 202620 - DNA, 335 bp, Gossypium hirsutum
gagcagtaaagaaaatcagctcattcaagctactgctttagtaaaggagaaagatgaatatgctctgaaagtacaagatgagttgaatgatacaaagatgaagttctctgaagctgaaactgtcatagaacgaattgcagaactcacaaaccgactagttatctcagttaaggatgaagacaataatgtgttgaggcctgttgatgatgtgagcagcgaattaatgcatcagctggtagataggccttctagtgattttggattgcagaaaaagcaacttgaaactgaactcagattcactaaagagagcttaaaagataaagaaatggaagttc

SEQ ID NO: 202621 - DNA, 398 bp, Gossypium hirsutum
  unsure (1)..(398): unsure at all n locations
taatagcaaaggcagtggtggggtgtacaagaaagctagggttcagacgtcttcaagccaagcacctttgaaagtgagaaaggagaagcttggagatagaataacagcacttcaccagttagtttccccatttggaaagactgacacagcatctgtgttggtagaagctattgggtatatcagattccttcaaagtcaaattgaggctcttagctccccttacttgggtactgcatcaccaaacatgagaaaccaacaatctgttcaaggagaaaggaattgtgcatttcctgaagatgaaggacaggaaaagcangagcctaagccaaaagacttaaggagtagagggctgtgcttggttcctgtatcatgcacccaacaagtcggaagtgaaaatg

SEQ ID NO: 202622 - DNA, 275 bp, Gossypium hirsutum
ctaatcatgaactgcactgttggagtagtcagagcgggcgttgatgtaccaaaactgtcttctattcctgtaccgacattagacatgggtcagaatcttagagctttgttagaatcccaaactaggtgtgatataatgcatcaagttggtgatgagacattttaagcacattatgtgatcccttcttaaacctaacctggtttttaagtacaatttcttgggctctgtagaaacccacacttggattaaataatctttatacaattttagccctt

SEQ ID NO: 202623 - DNA, 358 bp, Gossypium hirsutum
cagttgtaaaagctgcagttgatgaaagattaagggggcttcaaggttttagggaatcacagggccgggcatctaagctatatggttttaagcatgattctatgtcatcgcttaggaaaacaagtaagacaggagaattggttgattcaaaaactaatggagatctttcacgttccaagtccgaatcaatgaatgaggatgaaaatcttctttgtctgacaggagatgctaagtcggattctgttccagatcttcaacagcaggttgtagggttaaaggtcgagttgtgcaggttgctggaagagaaaagatcagctgttctcagatctgatgaactggagacagcattgatggagat

SEQ ID NO: 202624 - DNA, 279 bp, Gossypium hirsutum
gcaagcactatttttatcttcagtgcattcttgaatggtagcaaaggagttctcaatgcccgatgtgctggcagccaatcagactgaaagatccaaccagtcatgatttgcttgaagctgctgaacgtgaaaagagttttaggtttaatccttctaaaaatgcatccatatttcatcatacaacgctagtcaattttgaactacagcatttgccattggggacaaatgatgctgaacttgatgagcgcataatccagcactttgcttctgcttctgcaa

SEQ ID NO: 202625 - DNA, 315 bp, Gossypium hirsutum
agagaagggaaaaagggaaggtgcctgctttccgtcattcgcgattccatggcttgtaaaatctcaaattccctgttcctttgcttgggtcctagtcaaaggccaattaggagccaaacaattgctattcattcttctactgcaagtatctgtcatttgaattgggacaatcttcttgttaagggaattaaccataggaagggtataattcccttaagaaggaataaagtcatacaagctgtggcggttccagtaagaccatcttcagcagacagtgctgagtacagaaaacagttagcgggaacttatggattc

SEQ ID NO: 202626 - DNA, 381 bp, Gossypium hirsutum
ggacggaattcaacacataacggtgattgtcaatggcatcgacatgctcatagccgagaaaggggaaggtccattgattctcttccttcatggcttccctgagctctggtactcgtggcgcaaccagatcaacggtttagccgccctcggctaccgtgctttggcgcccgacctccgcggttacggcggaacagatgcaccagattccgtcgccgattacacttgctgccacgtggtgggagacctcatcgcgcttctggacacagtggcgccgccggagaaggaggataaagtgtttgtcgttgggcacgattggggtgccatcattgcttggtacttgtgccttgttagaccggaccgggtttaagctttgtcaaattg

SEQ ID NO: 202627 - DNA, 286 bp, Gossypium hirsutum
gcctctctcatcttccgttgtttatacgtttggttgttgttgaagaggtgctactaccatggctacaaagaagagcgttggggacttgaaggaagctgatttgaagggaaagaaagtgtttgttagagtcgatctgaacgttccattggatgataacttcaacataactgatgacacaaggatccgtgccgctgttcccaccatcaagtatttgatgggtcatggctctaaagtcatcctctctagtcatttgggacgcccaaagggtgtcactcccaagtacagt

SEQ ID NO: 202628 - DNA, 220 bp, Gossypium hirsutum
actgtaaagaatataatatagatatgagtgatctacaattgctttctccaacacatgagccacgtgtttctgatcacattgagcagatcaaagatatgataactcaaattattaacaaagactttggatatgttggtgaccgcgatgtggttttcgctggtgataaaatcccaaattattgcaaggtatcttggcagaaacttgaaaacacattaacggg

SEQ ID NO: 202629 - DNA, 325 bp, Gossypium hirsutum
aaaagatcgtcttccatatcatcacagataagaaggcataggctggtatgcacgcctggttcgcactaaaccctgtatcccctgcaatagttgaagtgaaaggggttcaccagtttgattggttaacaagagagaatgttcccgtgcttgaagctgtagagaaccatcatggcattcgaaattattatcatggcaatcatcttgccggggcaaatctctccaatactactcctcgaacattcgcttcgaaattgcatgctagaagtccaaagtacatatctttactcaaccatcttcggatatatttaccaaaacttttttcaaa

SEQ ID NO: 202630 - DNA, 343 bp, Gossypium hirsutum
agggaatagggttaaagcagttgtgataggtcttggtgcgggctgacttcctatgtttcttcatggatgtatgcaatctatgcaaattgagggagtggagctagatcctgttatgcttaaccttgcaagagactattttggttttactgaagataaacgaatgaaggtacatattgctgatggcatccagtttgtccgggactacagaaacttattttcagctggcaatgaagtgctcctttcttccaacggaagttgcaaactttcagatgctgaaagcagaagtaccgctattgacataattattggtgatgtggactcttctgactcaagctctggactg

SEQ ID NO: 202631 - DNA, 248 bp, Gossypium hirsutum
atggctattttgaatagctatcgcctgcgcttgaaagagtctacgccccattttacgggtacgaatcttagtgataactacaggagcagatatgtaaaatggagacacccacatgctgccgaaattcctaagttccatctaccaatgcgtcaatgtgaggttaaaaacaggcaggatatctatgacgtattaactgcatgatgacggtgctgcacacattaaacgatgacattaaagctattagattg

SEQ ID NO: 202632 - DNA, 339 bp, Gossypium hirsutum
ctacaatgggaatggaatccccttcatttattggccttgggatccaatgccttgtgctcctggtaacaatattttggccggggtcccatgcaactttctgggaactacaactacgggcagtgtggaagggccataggggtcgacttgttaaacaacccagacctgctatcaagtgatcccacaatttccttcaagtctgcgttttggttttggatgactccacaatcaccgaagccatcttgccacaatgtgatcatcggagcatggtcacccttcagtagcgatcgggcagcaggtcgggttccagggtatggtgtgatcacaaatattatcaatgga

SEQ ID NO: 202633 - DNA, 181 bp, Gossypium hirsutum
atatccttgatctttacactttaggccgcaaattgggacgcgtacagtttggggttacttacttatgtaccgagattccgactgcgattgaatatgcttgtaagtccatatcgaaaaggacgttgatttgcacggacgatgtgcaggatgttaggatggagattcatattactcatcataa

SEQ ID NO: 202634 - DNA, 228 bp, Gossypium hirsutum
aacttttaagttgtcaacgaccgaaaatttgggccgtttgttgttgaatatgatgcaaattaccgtgtcataagcatagctaatgcccccttccagcttgcgttttataacaccacccctaatgccttcacccttgcgttacgcatggctacaactcgttccgagtcgctcttccgatgggtttgggaggccaacaaggggaaccctgttcgcgagaacgccacgttc

SEQ ID NO: 202635 - DNA, 374 bp, Gossypium hirsutum
gagagagataaagcttttggttgggtgcttgaaatgtatgcgtatgctgtttcgtctgccttgcatggtgtgggtaacatcctgtacaaagatttcatgatccaacctccttgggatacagaaataggtaacaagttcatcattcattacacatatggatgcgactatgatttgaaaggtaggttaacctatggaaagattggagaatggaggttcgattaaagatcatttgatacttgaagaccaccaagaaacctttccctgccttcttctggtcgttccgaaaggggggggacacttggtaaaaatgtaaatgaagcaccttaaacatttcaaaatgggggtcaattgaaaagggaaaaaggaaggtaagg

SEQ ID NO: 202636 - DNA, 335 bp, Gossypium hirsutum
taatagcaaatgcattggtggggtgtacaagaaagctagggttcagacgtcttcaagccaaccacctttgaaagtgagaaaggagaagcttggagatagaataacagcacttcaccagttagtttccccatttggaaagactgacacagcatctgtgttgttagaagctattggttatatcagattccttcaaagtcaaattgaggctcttagctccccttacttgggtactgcatcaccaaacatgagaaaccaacaatctgttcaaggagaaaggaattgtgcatcttctgaagatgaacgacaggaaaagcatgatcctaagccaaaggact

SEQ ID NO: 202637 - DNA, 359 bp, Gossypium hirsutum
gaagcttccttttccgttttagatctcaaaattcaaaagggtcggtttttcatctcatggctgctactattgtctccgtcaaagctaggcagatcttcgacagccgtggaaatcctacggttgaggttgatgtggaaatatcgaacggtataaaggctagggccgcagttcctagcggtgcatccactggaatttacgaggctcttgagttgagagatggaggttccgattacctcggtaaaggtgtatcgaaggctgatgctaatggtaacacaatcatcggcccttcattgattggaaaggacccaaccgagcatactgcaattgacaatttcatggtttaacaactggatggaacc

SEQ ID NO: 202638 - DNA, 351 bp, Gossypium hirsutum
cagttgtaatagctgcagttgatgaaagattaagggggcgtcaaatttggagggaatcacagggccgggcatctaagctatatggttttaagcatgattctatgtcatcgcttaggaaaacaagtaagacaggagaattggttgattcaaaaactaatggagatctttcacgttccaagtccgaatcaatgaatgaggatgaaaatcttctttgtctgacaggagatgctaagtcagattctgttccagatcttcaacagcaggttgtaaggttaaaggtcgagttgtgcaagttgctggaagagaatagatcagctgttctcagatctgatgaactggaaacagcattga

SEQ ID NO: 202639 - DNA, 297 bp, Gossypium hirsutum
ctacaatagggaatcgaatccctcttcatcttattgcgcttctgatccgaatgacccttgtgctcctggggaacaatattttgaccggtgtaccatgcaactttcttggaactacaactacggtcagagaggaaggtccataagagtcgactttttaaacaacccagacctgctattatgtgatcccacaattaccttcaagcctacgcttaggttctggatgactgcacaatcacccaatccatcttgacacattgcgatcatcttagcatggatacccttcaatagcgatccgac

SEQ ID NO: 202640 - DNA, 381 bp, Gossypium hirsutum
agaagatagtaacactgtatagtactacatgaagcttaggggagagactcataactccagtgattgattgaaactttaacaagggattcagaacttaaactccgagaagtaatggaaaatttcaacagcatggattctgaaacaaaatctatgatcgagaaattgatatcatttgaagatcatattaaggtgtatgaataacaagttgctcaagcagctagacagtctgcgtattcaaaagaagaaatggatcagagcttacagaaattggcttctctagaaagcacagatgatcaactcataagcaagatatcggagttcgaaaataaagctattcagtctttctcatagaatgaactttatggttcatacaaacattca

SEQ ID NO: 202641 - DNA, 385 bp, Gossypium hirsutum
ggcttatccttgcccttacgcacagcgcgtgtggatcgcggggaattgtaagggtttgcaagacaagattaagttggttcctttgaaccttcaaaatagacctgcttggtacaaggaaaaagtttaccctgaaaacaaggtgccgtccttggaacataatggcaaagtcattggggagagtcttgatttgattaaatatgttgatagcaacttcgaagggccgtctcttctacctgatgatgctgacaaaaaggagtactttgagacgacgttatcacacatggacgaatttctagggctggtgtatgctacatttaaaggagactcaacacaggatgctgatgctgcttttgatcacttggaaactgctcttgtcaaatatgat

SEQ ID NO: 202642 - DNA, 256 bp, Gossypium hirsutum
ggagctcaatggcttgttgttagccggcgaattcatccacgtccatactggcagatgtgtgtgtttctatgtatgggaggcaatagcactacatggatgaacactgcagttctggttacttgtatgcgaaacttcccgaaaaatcgaggcccggtctcggggatccttaagggctatgtcggactcagtaccgcaatcttcacggatatatgcacagctctgttttcttcggaccctttaacgtttctcttcattc

SEQ ID NO: 202643 - DNA, 278 bp, Gossypium hirsutum
ctatcatagtatattgtgattaacgatctaaaataatccgtagcgaccagtataaggctagtggacccctaataagacatctttatgactcaaatctacctcactctgtcatgtaatcaccgacttgaaatacttatagatgctgctaggggacttcataaatatcacactggtccaacccaaaccattattcaccttgatgacaatactacacacattcttttggattacaattccgtatacaaagttacagattttcgactttcaaaaactcatcc

SEQ ID NO: 202644 - DNA, 391 bp, Gossypium hirsutum
cttctcaggtccctgcaaatctcctcttctattgaagatctgtggaacactcgaagccactgaggatcactcggattaccaagataatggaagacgatggctctactttgataatgttgaaaatttacgagtcgaaggtggaggcatcatcgatggtaatggcaaaacatggtgggaaaagtcctgcaaagtcaacaaagaccttccttggcagggaaactccaactggtgtaaccttcaatgaatgcactaacctgagagtataaagtcttcgtattaaagatgcacaacatatgcacgttatatttcaaaaatgtgtgaatgtaaaagcatttaaccttttggtgacagcacctgggaacagttccaacactgatggcattcatgtgac

SEQ ID NO: 202645 - DNA, 296 bp, Gossypium hirsutum
ggcttatccttgcccttacgcacagcgcgtgtggatcgccaggaattgtaagggtttgcaagacaagattaagttggttcctttgaaccttcaaaatagacctgcttggtacaaggaaaaagtttaccctgaaaacaaggtgccgtccttggaacataatggcaaagtcattggggagagtcttgatttgattaaatatgttgatagcaacttcgaagggccgtctcttttacctgatgatgctgacaaaaaggagtactttgagacgacgttattacacatggacgaatttctag

SEQ ID NO: 202646 - DNA, 423 bp, Gossypium hirsutum
gttttggtaatagctatcttgttaaagatgatcatgaaagggcgggtttctatcattcagggggaggctcttgctttgttgcttattggaattagcataaaccagttgcggtctttaccagagggtactacttcatttggtcttccggttgcaactggcgcatacttgtatacactaattttcgttactgttccatccctagcatctgtctttaatgaatatgctttaaagagtcagtttgagacatgcatttaccatcagaacttgtttctttatggatatggtgccattttcaatttcctaaccattcttggaactccatttttaaaaggcccaataccttggatatcctgcacggacaattaaaggctaccgtgcttttaatatgcaacaatgcaccccaagggaacttataatctttct

SEQ ID NO: 202647 - DNA, 375 bp, Gossypium hirsutum
gaagcttccttttccgttttagatctcaaaattcaaaaggctctgtttttcatctcatggctgctactattgtctccgtcaaagctaggcagatcttcgacagccgtggaaatcctacggttgaggttgatgtggaaatatcgaacggtataaaggctagggccgcagttcctagcggtgcatccactggaatttacgaggctcttgagttgagagatggaggttccgattacctcggtaaaggtgtatcgaaggctgttgctaatgttaacacaatcatcggccctgcattgattggaaaggacccaaccgaacagactgcaattgacaatttcatgggtcaacaactggatggaacccaaaatgagtgggggt

SEQ ID NO: 202648 - DNA, 223 bp, Gossypium hirsutum
ccctggacaatgatcagatccatataccattccgtgggagcaaactggcttgggggctccgtgactttttcgttggcaactcaaggactggtatgaactcggggatttcttcaaatgcaaggtcatgggagcacacttttaatacttttagatatgcttatagggttaaaaggcttttcaaaaggggtaatcccaaaaaggaccaagctggaacttctttacc

SEQ ID NO: 202649 - DNA, 440 bp, Gossypium hirsutum
gatgcgctggactaattgaattcgagacgagccgaacagtaccagacagctgttaacgcagagagaagcatgtttgatgtcaaaggactgatcggctgaaagttcgatgataaggaggtccagaaggacatgaaacttgttccgtataagattgtgaacaaggatggaaagccttatattcaagtagagattaaggatggagagaccaaggtcttcagtcctgaggagatcagtgctatggttctgactaagatgaaggaaacagctgaagctttcctcgggaagaaaatcaaggatgcagtggtcactgttcctgcgtacttcaatgatgcccagagacaagccaccaaggatgctggcgttattgctgggctcaatgtggccagaattatcaatgaaccaactgcagctgccattgcctatggttggacaaaaagggt

SEQ ID NO: 202650 - DNA, 352 bp, Gossypium hirsutum
agattctggttttgcttgcagggttgctcgagaacgcagaattggctttggattcactctccatttgcatgacgatatctggatgggtgtttatgatttcggtggggttcaatgccgcagcaagtgtaagagttgggaacgagctaggagcgggacatccaaaatcggcggcgttctcggtggtcatagtgacggtactttcattcataatctcggtggcggcggcaataataataatggttctacgtgatgtcattagctacgccttcacagagggtgaagtggtggcggaggctgtttcagatctctgtccgcttctagcattaacccttatccttaacggagttcaggc

SEQ ID NO: 202651 - DNA, 342 bp, Gossypium hirsutum
  unsure (1)..(342): unsure at all n locations
gccatgggtgattgaattgagtttgccacattcggatggggatcaactaggtgctgttagcaaggtttacacacctacttaacatgtagttgtaagttcaatatggcagttggctaaaagctatgttgctgtaaatgactctggtgttcatcaactcataagccattggctgaacactcatgcaacaatggagccattcgtgattgcaacgaaccgacaacttagtgtagttcatccaatttataagcttctctatcctcactttcgggacacgatgaacatcaatgcntttgctaggcagattctgattaatggaagtggtgtcctggaattaacagtttt

SEQ ID NO: 202652 - DNA, 317 bp, Gossypium hirsutum
gcgtgatcttcacggtttgcataactgtgaggggctgattgagccactccatccttgggtgagacaggaggttgtcaagtacggagagttcgttgaggcgacttacgatgcttttgatttcgatccattatcggagttctgtggaagctgtaggtacaacccgaataaactgtttgaagaactaggacttactaaacatggttacaaggttaccaagtacatatatgctatgtcccatgtggatgttcccgaatggttcgagaggtcacattgtacttggagcaaggagtcgaactgtatggggtacattgcggtta

SEQ ID NO: 202653 - DNA, 402 bp, Gossypium hirsutum
gtctcctaatgggcaatctgaacaaactgcaaatggtgggttctcttcatatacaaacaacctctcatctgggcggaatcagaaccttcatcccttccctcatgtcatgaatatgcacaacgcaagaccatcatcaagtgtaggccaatcatatggatacatgaaccacatgtaccctaacaatgtgacctatggtcattatgggaatgccattagaggcggttctgggtttggatcatatggatatgatgcccggaagaaaggtctagggtggtataatgttggtaacaacaaatctaggttccgtggttatggaaaagagaatattgatggtttcaatgagctaaacaaaggacccagagtaaaaagggataagaataaggatggttctggaaatgcaac

SEQ ID NO: 202654 - DNA, 270 bp, Gossypium hirsutum
caaaagcctgatgtgtttaggggaactgtacgttatgcaagtgtgcatgctcatttgggtaggacaggcagtccaagggatgaccttgagtcattggcttatacactaatatttttacttaggggaaaacttccctggcaaggttacattggggagaacaaaggatttcttggttggtagaagaagaaggcaacttctcctgagatgctttgttacttgtgccctcctccttttcaacaatttcttgagattgtgacccacatggaaatt

SEQ ID NO: 202655 - DNA, 347 bp, Gossypium hirsutum
aaaagattgaggatgttgccaaactcctttgctgggagaagaagcatgagaagggtgaaattgccatttggcaaaagagagtcaatgatgagtcttgtcgtggtagagaagatgattctcaagccaaattctgcaaggctgaagaggctaacgatgtctggtacaagaaaatggatgtgtgcgttactccataccctgatgttagtagttcgagtgaagttgctggtggggaattgaagccattcccagagaggctatttgctgtccctcctagaattgctagtggaagtgttcctggagtttcagttgagacatatgaagaggacaataacatatggaagaaacat

SEQ ID NO: 202656 - DNA, 343 bp, Gossypium hirsutum
ctgtgtttgagccctcaagcatgatggcgaagtgcgatcctaggcatgggaagtacatggcatgctgcctgatgtatcgaggagatgttgtgcctaaggatgttaatgctgctgttgctactattaaaacaaagaggactgtgcagtttgttgactggtgcccaactggtttcaaatgcggtattaactatcagcccccaactgttgtacctggaggagatcttgctaaagtgcagcgagcttgttgcatgataagcaattatacagcagtggctgaggtgtttgcacgcattgaccacaaggttgatctcatgtactcaaagagagcttttgtgcattggga

SEQ ID NO: 202657 - DNA, 386 bp, Gossypium hirsutum
  unsure (1)..(386): unsure at all n locations
cgcagcaatgtcccacgctgtgatatatgtgaaaatgcacctgctttcttttactgtgaagtggatggtagttccctttgcctgcaatgtgatatgattgtacatgttggaggtaaaaggacccatgggaggtatctcttgttgaggcagagagttgagtttccaggggataagcctggtcgtttggaggaaccaggtttacaaccgctcagtccggatgaagtaaggaaggatctgaatcagcagtcaaagcttgcagtgagagagaaccgtgcaaaaccgtggagtctctcatgttccatngcttgatgataatgcttaaggtgatggagaggtaggaaatgagttgattgatctaaatgccaggccacaacaggtgcaagggc

SEQ ID NO: 202658 - DNA, 437 bp, Gossypium hirsutum
aaacttcaaaatgggagttactttagtagctcttacttctgtcatagccttagccttggtccattctttccatgcccaaaacttaccacaagactacctagtcctttccttccaagcccaagactcacaacaagactacctaaccttgggaggggactcaccacaagactacctcaatgctcacaatgcagctcgagcagccgtcggtgttggccctatgatttgggacaagaccgtggctgcctatgcacagaactacgctaatcaacgctattacgactgcaaccttattcactccggtggaccttatggtgagaatcttgcctggagtagcgctgacttttcaggcactagtgctgtaagaatgtgggttagtgagagggtaaactacaattacaacttcaacagttgtgcaacaaggcaaggggggggttttt

SEQ ID NO: 202659 - DNA, 329 bp, Gossypium hirsutum
atacttcgatgaccacttcgaactcgccctcgatctctagtcgcaagccatcggaatcaaccctaaaaaggccgagctctacgctgaccgtgctcaagccaacatcaaactcaacaatctccctgacgctgtggcagatgctaacaaagcaattgagttggatccgtccatgtctaaatcctacttgcgtaaagctactgcgtgtatgaagcttgaggagtatcaaactgctaaggctgcgttggagactggggctgctttggcaccagaagactcgagattttccaagttgatttaagaatgtgaagagcgcattgcaaaggaaaatg

SEQ ID NO: 202660 - DNA, 354 bp, Gossypium hirsutum
gggaaatgtatacaaagcgatatttttacggttggaggctacgattgggcgatttacttctaccccgacggtaaaaatccggaggatagtgcgatgtatgtttcggttttcattgccttggctagcgaaggtacggatgttcgagcgcttttcgagctcacccttgttgaccagagcgggaaagggaagcataaggttcatagtcactttgacagagcgttggagagtgggccttatacgttgaagtacagaggaagcatgtggggctacaaacgattctttagaagaacaacttttgaaagttctgactacattaatgatgattgcctaatcatgaactgcactgctggagta

SEQ ID NO: 202661 - DNA, 364 bp, Gossypium hirsutum
ggattatcaatttgaagccttcttttaaattcctgtggtaagatgcaaattttcgtgaagaccctcactggcaagaccatcacccttgaggtggaaagttctgataccatcgacaatgtaaagaccaagatccaagacaaggaagggatcccaccagaccaacagaggcttatctttgctggtaaacagctggaggacggccgtacccttgctgactacaacatccagaaggaatccacactccatttggtcctccgattgaggggtggtatgcaaaattttgtcaagacccttaccgggaagaccatcacccttgaggtggaaagttctgataccatcgacaatggaaaggccatgatccaag

SEQ ID NO: 202662 - DNA, 358 bp, Gossypium hirsutum
tgtcctagcccaaaagttgcagggcatgggtgctttggtgtgcgtcttatgcttgatccaaaggaaagtttgttggagaagccatgtcagtcattgctgccaatacaaatgttcctgtcagtgttaaatgtcggattggtgttgatgatcatgattcatataatgagctctgtgattttatctacaaggtttcttccctatcaccaactaggcatttcatcatacattcacggaaggctctactaaatggcattagcccggctgataaccgaagaattcccccactaaaatatgagttctattatgcactcttgcgtgacttttcggacttgacgtttaccataaatggaggcattaa

SEQ ID NO: 202663 - DNA, 310 bp, Gossypium hirsutum
tgttctagcccaaatgttgctgggcatgggtgctttggcgtgcggcttattcttgatccaaaggaaacattgtagtagacgccatgtcacacattgctgactatacaaacgttcctgtcaccgataaatgtcggattggagtagatgatcatgattcatataatgagctctgcgattatatctacaacgtttcttccctatcaccaactaggcatttgatcatacattcacagaaggctctactaaatggcatgagcccatgctgatttccgtagaagttccccactatcatatgaggactattatgcac

SEQ ID NO: 202664 - DNA, 348 bp, Gossypium hirsutum
catttggttgcttgatacccgagacaacatctacattggtgcgggagatgctattgggggggcatacctctacattggctgcggacttgacaggtcggtttggatatcttccgaaatgaaaggattaaatgatgactgtgaacactttgagtgctttcctcctggtcacttgtactccagcaaaacaggaggatttagaagatggtacaatccaccatggttctctgaggccattccatcagttccatatgatccccttgttctaagacgtgcttttgaaaatgctgtgatcaaaagactgatgaccgatgtaccttttggaagtcttctatctggaggcctcgattc

SEQ ID NO: 202665 - DNA, 377 bp, Gossypium hirsutum
ccctggacaatgatcagatccatataccattccgtgggagcaaactcactgagagtgctccgtgactctttcgttggcaactcaaggactgttatgatctcgtgtatttctccaaatgcaggttcatgtgagcacactctcaatactctgagatatgctgatagggttaaaagtctttccaaaagtggtaatcccaaaaaggaccaggctgtaacttctttaccaccaagtaatacggatgcttcttcagcatcttctctgccagcttccgcagatttagaagtcatatatgaacaacaacaggaagccaaagttgttgatacaagtcaaaaggttgtagaaaaagatgtttatactgttgactttgattaaacagc

SEQ ID NO: 202666 - DNA, 277 bp, Gossypium hirsutum
agccgatgttctgcactaattcaacacgaggcattatcaattgttttccttctatgaaattcctctttcaggatacaaattttcgtcaagaccctcactttcaagaccatcacccttgacgtggaaagttctgataccatcgacaatgtaaagaccaatatccaatacaaggaatggatcccaccagaccacctcaggcttatctatgcttgtaaacaacttaacgattgccgtacccttgcttactacaacattcattaagaatccacactccatt

SEQ ID NO: 202667 - DNA, 344 bp, Gossypium hirsutum
ctcacctacacaatggatttctcaacattctcaatggttcgcattttcatcctttctctgctttgtccttctcttggttcttcttcggcagttcgagaccctgaatctgtcgtagctgaagttcatagagcataaatgcttcgaggaggcacttgggttacttgtcatgtggaagggggaaccctattgatgactgctggaggtgtgacccctattgggagagtaatcgtcaaaagctagctgattgcggaatcgggttcggaaaggacgcaattggcggaaagaccggtcgaatctatgtcgttaccgatgccggtgacgatgaccctgtaaaccttaaaccg

SEQ ID NO: 202668 - DNA, 177 bp, Gossypium hirsutum
ggattatcaatttgaagccttcttcgaaattcctctttcgagatgcaaattttcgtcaagaccctcactggcaagaccatcacccttgaaggggaaagttctgataccatcgacaatgtaaagaccaagatccaagacaaggaaaggatcccaccagaccagcagaagcttatcttt

SEQ ID NO: 202669 - DNA, 304 bp, Gossypium hirsutum
gaatcttcatatccacacatacttgatgaatgatatctcgagaggcgctcctgatgttaaactttaagtacttgctgcttgtacatagaattacagtggagcaatacttgaaagtgttgtgaaacgtgcagcgtctactggtttgaattgacacgtaaccatggatgatctttccaagctagtggacgaatagaacattaacgttacattggatgattctacaaatgcactgatggaaatctgttactgggttctgagactgaactgatgacctagaacgatgcagactaaatggcacggtaga

SEQ ID NO: 202670 - DNA, 288 bp, Gossypium hirsutum
gttgaaagataagagtgataaacatggtgcctgacgacgagatgaatgaggttgaggattataagttaactgttcaagtccctgaaactgcccatcaagttagcactgattcatggctccaggccggttttgtcttgacaactggtgttaacagtgtatttgtgttgggatattctgggacaatcatggtccctcttggttggataggaggcatagtcggtttgcttttagccaccgtgctgtctctgaacgccaacatgcttgttgccaagcttcattaacatgggg

SEQ ID NO: 202671 - DNA, 210 bp, Gossypium hirsutum
ttcgaatcgaattcatatgctttttattgaacttctaatcctaattggcctagatctcctggtaaacaagattgtggcctacataccatacaactttcttagaactacatctacaaccatgatgaaatggccataatcgcctacttgtttaacaacccatacctgatattaaatgatcccacaatttcctttaactctgcctttaaattt

SEQ ID NO: 202672 - DNA, 339 bp, Gossypium hirsutum
agttgctagtcgcctgaagatcacaatagtaggtggctctatacccgaacgctgtggtgataagttgtataatacttgttgtgtctttggtactgatggaaagctgaaagccaagcatcgcaagattcacctttttgatatcgatattcctgggaagattacctttatggaatccaaaacccttactgcaggggagactcctactgttgtggacacagatgttgggcggattggtataggcatctgttatgacattcgctttactgaattagcaatgatatatgctgcaagaggtgctcacttgatatgctatcctggagcatttaacatgacaaccgg

SEQ ID NO: 202673 - DNA, 390 bp, Gossypium hirsutum
ccgcagtggctgctcatttttcatttttcatctaaatcttgatacgaaacaaaaaaagtcaaatcggtgggaatagcaatgggttttgagaagatcaaggtcgccaatcccatcgttgagatggacggagatgaaatgaccagagttatttggaaatcaattaaggataagctcattcttccctttgtggagttggacataaagtactttgaccttggtcttccacatcgtgatgctaccgatgacaaagttacaattgaaagtgcagaagctactcttaagtacaatgtcgccatcaagtgtgctactattactccagatgaagctcgtgttaaggagtttgacttgaagcagatgtggaagagccctaatgggactattaggaatatt

SEQ ID NO: 202674 - DNA, 331 bp, Gossypium hirsutum
agtccaccctctcacttggtgctccgtcttcgtggtggtatgcagatttttgtgaagacacttactgggaagaccatcaccctggaagttgagagctctgacacaatcgataatgttaaggccaaaattcaagataaggaaggtatcccttcagaccagcagaggctgatattagctggaaagcagctagaggatgggaggacccttgctgattacaacatccagaatgagtccaccctccactaggttctccgtctccgttgcgggatgcacattttagtgaagtcccttgctggaaagaccatcacccttgaagttgaaagctcagaca

SEQ ID NO: 202675 - DNA, 403 bp, Gossypium hirsutum
cttcatgggtgcttttgcaatcttgattttcctttggcttggctcggcagagggtttcagcacaaagagccagccttgcacttatgacaaatctaagatgtgcaaacctgctcttgccactgctatattcagcacaggatctttcttgctcggtgctgtcacttcagtagtttctggctttcttgggatgaaaattgctacctatgctaatgctcgaaccaccctggaggcaagaaagggagttgggaaggcatttattactgcattcagatctggtgctgtcatgggctttcttcttgctgcaaacggtcttttggtgctgtacattgccatcaacttatgcaagctctactatggtgatgactgacgtggtctttatgaggcaatcactggttatggactt

SEQ ID NO: 202676 - DNA, 268 bp, Gossypium hirsutum
gaaaatcttgtttaaaatataagaaaaaagtcatacgcgatgagcactgccggtcagggtattcgttgcaaagctgcggcggcatgggaggccgggaagccactatctatagaagaagtggaagtggcaccaccccataaacatgaagtccgtattaagattctcttcactgctttatgtcacactgatgtatactactgggagtgtaagggttacactaatctgtttcctcagatacttggtcatgaagcctcatagatcgtggaga

SEQ ID NO: 202677 - DNA, 400 bp, Gossypium hirsutum
aattggtactcaccttgtcagtggcttttgctggagatagggacatggcgctgaaatatgtgctcgagggctgcccacagttgcagaagcttgagattagagatagcccatttggggatgcagctctgcgttctggtttgcatcactactacaacatgaggttcctttggatgtcgtcatgcaggctaacgcgccatggttgccaggagattgctcgtgctatgcctcgcctggtagttgaagtgattaggtctgctgatgaggaggagatggatgatgttgttggaacattatacatgtatcggtctcttgaaggaccaagaactgatgcaccaaaattcgtcaccatcttgtaagtaaatggtgtgcatgaagctgtttcaattgttctcatgataga

SEQ ID NO: 202678 - DNA, 305 bp, Gossypium hirsutum
gcaaattcccttcttttcccctccacccaagcctaaaaaagcatgagcacatctcaaatcagcgaaaggacgaaagttcgtcgctaatggaaatttcttcgcgaaactcaactaggtattgaccaatgaactggctgaggattgatactctggagtcgaaatcagagttactactatgcgtacctagatcatcatcatagccacccgtacccaaaactttctcctgtaaaatggtatgatgattaaggagcttacctcaatggttcacaagctattcaagttcccaaaaaacagcgttgaacttt

SEQ ID NO: 202679 - DNA, 357 bp, Gossypium hirsutum
  unsure (1)..(357): unsure at all n locations
ggcttatccttgcccttacgcacagcgcgtgtggatcgcgaggaattgtaagggtttgcaagacaagattaagttggttcctttgaaccttcaaaatagacctgcttggtacaaggaaaaagtttaccctgaaaacaaggtgccgtccttggaacataatggcaaagtcattgnggagagtcttgatttgattaaatatgttgatagcaacttcgaagggccgtctcttctacctgatgatgctgacaaaaaggagtactttgagacgacgttatcacacatggacgaatttctagggctggtgtatgctacatttaaaggagactcaacataggatgctgatgctgcttttgatca

SEQ ID NO: 202680 - DNA, 429 bp, Gossypium hirsutum
  unsure (1)..(429): unsure at all n locations
catcttcatcccctcctttttcgcaggcttcaatgacttgcgtgacctctcaagttaccttccctgcaaagcttcgtttctgtttctttaacctcaaaatggcggtggatctgatgagttttccgaagatggatgatcagatggcggtacaagaggttgcatcgcaaggcttgaaaggcatggaacacctgatccgtctnctttctcaccagtccaaaaacgtcgactgcaccgacctcgtcgatctcaccgtctctaaattcaaaaaggtcatttcacttctcaacagaaccggtcacgctcggttcagacgcgggccgattcaacccctgtctttctcatcttccccctcgacatcatcctctgcttctctgtctgttccgaattctcaaaacaatctaactctaacttctgctgcgatctcaaaaa

SEQ ID NO: 202681 - DNA, 302 bp, Gossypium hirsutum
  unsure (1)..(302): unsure at all n locations
cttctcaggaccctgcaaatctactcttctattgaagatctgatggacactcgaagccactgaggatcactcggattaccaagataatggaagacgatgggcttactttgataatgttgaaaanttacgagtcgaaggtggaggcatcatcgatggtaatgggaaaaacatggtgggaaaagtcctgcaaagtcaacaaagcccttccttgcaaggaagctccaactgctgtaaccttcaatgaatgcactaacctgagagtatcaagtcttcgtataaaagatgcacaacaaatgcacgtt

SEQ ID NO: 202682 - DNA, 386 bp, Gossypium hirsutum
ggcttatccttgcccttacgcacagcgcgtgtggatcgcggggaattgtaagggtttgcaagacaagattaagttggtttctttgaaccttcaaaatagacctgcttggtacaaggaaaaagtttaccctgaaaacaaggtgccgtccttggaacataatggcaaagtcattggggagagtcttgatttgattaaatatgttgatagcaacttcgaaaggccgtctcttctacctgatgatgctgacaaataggagtactttgagacgacgttatcacacatggacgaatttctaaggctggtgtatgctacatttaaaggagactcaacataggatgcttgatgctgcttttgatcacttggaaactgctcttgcaaaatatgat

SEQ ID NO: 202683 - DNA, 386 bp, Gossypium hirsutum
  unsure (1)..(386): unsure at all n locations
atagagagcatgttgaggattggattcagaaacatcattaatggcttcatatgtagagcctcactttctcagagcttttataacagggaattatcgacacaaaccggaaggctgaaaggcaaaatagcattgatcactggggcagcaagcggtatcgggaaggcagctgcagcaaaattcatcagtaatggtgccaaagtcgtcattgctgatatacaacaccaactagggcaagcaacggcgaatgagcttggacccaatgctacttttataccctgtgacgtaacgaaagaatcagatgtatccgatgctgttgactttaccatctgcaaacacanacgactggatgttatgtataataatgctgnggtaccttgctacacgcc

SEQ ID NO: 202684 - DNA, 430 bp, Gossypium hirsutum
  unsure (1)..(430): unsure at all n locations
gagctacttaaccatttcccaaatctcctccctcctcttcgttagcgtccttttcatttccgctcatgcagcgcgctttgaaatccgcaatgagtgcttctacaccgtctgggcagcaagctctcctggtggtgggcggcggctaaacccttcgcaaagttggaccatcgatgggcctggtggcactgctttggcttgtatttggggtccgaccaattgcaatttccatgcccgtgggtaggggcattgtcaacccgtgaatggggtggactcctttcatgcaaaggtggggtgtacctncaaacaccctggctgaatatgcactttaccaaatttggaacatggatttctacgacattttcttagttgatggggttaacatccccatggtgtttgggccaactaatggcggttgtcacaacattttttt

SEQ ID NO: 202685 - DNA, 395 bp, Gossypium hirsutum
gcccctcaactctcttctctctttccccttcactgtggcagctcaaagaaatggcggaggagaagaaggctcaatctgctggggtttggcctacggttaaaccttttgtcaatggtggtgcctctggtatgcttgctacctgtgtcatccaacccatcgatatgatcaaggtaagaatccaactgggtcaaggatcggcagcaactgttaccaagaacatgcttagggaggagggtgttggtgccttttacaagggtctatcagcaggactgctcaagcaagctacatacactactgctcgattgggatcattcaaaatgttgaccaacatagcaattgaagccaatgatgggaagccctttcctctatatcagaaggctttgtgtggtctgact

SEQ ID NO: 202686 - DNA, 387 bp, Gossypium hirsutum
  unsure (1)..(387): unsure at all n locations
gaagagtgtgggaagtgcagctttgaagatggttgagggagtgcgcangcaattggcacaatcccaggtctcatggagggtactgctaaacctgactatgctacctgtgttaagatctctactgatgcttcaatcaaagaaatgatcccacctggtgcccttgttatgctcacaccccttgttgttgggatcttttttggcgtggaaactctctctggtgtcctcgctggatctcttgtctctggtgtccagattgctatctctgcatccaacacaggaggtgcttgggataatgccaagaagtatattgaggtatccataattttactgacttccatgagccgctcctttgattggcgtttcaaaacaatagttttatatttatgc

SEQ ID NO: 202687 - DNA, 398 bp, Gossypium hirsutum
ggaacatctactttccctttgatattgtggaagatacgccattggatgtggcaactgaaatggtgaaggagcttgagataaccgattgggatccacttgaaattgcagaaatgattgatggtgaaatttcagctctagtcccacaatggaaaaaatcagacctccctagacatcaagcccataatacatataactaccaggaagatgatgatgatgggtgtcatcatccgttttactctttctcctcctgttcttcatcccaaatgtctgtcttgatgtcacatggctgcgattggctccgagatgatgataccagctctcagagctcttcgcactcaagaatttattccaactttagttacttgtctggagatgaccacaatcctgatatgagccct

SEQ ID NO: 202688 - DNA, 407 bp, Gossypium hirsutum
cattgattattgttccaacctcaaaagcacaagcaatggagagaagtggacgtgcagggcgtgaaggacctgggaagtgtttccgtctctatcctgagagcgagtttgaaaagcttgaggattcaaccaagccagagattaagcgttgcaacctctcgaatgtcattttgcagctcaaggccctgggtgttgatgatatatttgggtttgacttcatagagaaaccctcaaggacagctattaaaaagtcattggaggagttgctcttgctaggtgctttaactgatgaattcaaactgtcagatccagttggtcgtcaaatggctcggctcccattagatcctgttcattctaaagctctcatcctagctagccagttcaagtgcctggatgaaatgttaattgct

SEQ ID NO: 202689 - DNA, 392 bp, Gossypium hirsutum
tttcatggttgcttttgcaatcttgattttccttttccgtggctcggtagagggtggcagcacaaagagccagccttgcacttatgacaaatctaagatgtgcaaaccttgttttggcaattgttatattcagcacagtttctttcttgctcggtgctgccacttcagtagttcctggctttcttgggatgaaaattgctacctatgctaatgctcgaaccaccctgtaggcaagaaagggagttgggaaggcattaattactgcattcagatctggtgctgtcatgggctttcttcttgctgcaaatggtcttttggtgctttacattgccatcaacttattcaagctctactatggtgatgactggggtggtctttttgaggcaatcact

SEQ ID NO: 202690 - DNA, 407 bp, Gossypium hirsutum
agacaatcctgcatactcagttgttaagcaatatttggtccatgtagatgacacggttcctcaaaagattgttgttcacaagaatagtccaagaggagtacatttccgacgagctggaccacgtcaaaagatatatttcgactccgatgacgttcatgcctgtattgtaacgtgtggtggtctttgccctggactcaacaccgtgattagagagatagtatgcggcttgttccacatgtatggtgtgaagaaagtttcggggatagatggaagatatcggggtttttatgctaaaaatactgtgcatttagatcctaaggttgtcaatgatatccataaacgtggtggaactatccttggaacatcacgaggtggccatgatacctcaaagattgttgacagcattc

SEQ ID NO: 202691 - DNA, 409 bp, Gossypium hirsutum
  unsure (1)..(409): unsure at all n locations
gctttctgttctggtgttgatgctgttgctctttatcgcttacataatgaagggaaagttgaagattgtaaaagatttctcgagacactatataagtttgtatacttacaaggaacgtatttgaagccgcatgttgcaatcttggacggtataacaatgggatgtggaagtggaatatctctccctgggatgtttcatttagtaaccgataaaactgtttttgctcatccagaggctcaattggggttccatcctgattcaggggcttcattttatctttctcgcctacctggttacttaggggaatgcttagctctaacgggagaaaagttgaatggtgtcgaaatgattgcctgtggcctggctacccattattgcttaaatgctcgactntcttgggtcaaagaat

SEQ ID NO: 202692 - DNA, 415 bp, Gossypium hirsutum
aaagactcaaagacaaagaaagcggccatggagaaggggagagagcaacaagtttacttggcaaggctcgctgagcaagctgaaagatacgatgagatggttgaggccatgaagagtgttgctaagttggatgttgagctgactgtggaggagaggaatctgttatctgtgggatataagaatgtgattggagcaagaagggcatcctggcggatactgtcttcaattgaacagaaggaggaggccaaaggtaatgaacaaaatgtgaagaggataaaggattataggcaaagggttgaagatgagctctcaaaaatatgcaatgacattctctcagtcattgataagcacctcattccatcttccttcaccggggaatcaactgttttctactataagatgaaaggagattatt

SEQ ID NO: 202693 - DNA, 408 bp, Gossypium hirsutum
gttcttcagcaaatattatattttgtcagatagagtcgtgttatcctatacaaattctagtaaaggcgatgctgagcagcttagaagaggaacttggtctgctgaagaagactctctcctaattcattatattgctcgccatggcgaaggccactggaatttgctcgcaaaacgagcagggttgaagagaactggaaagagttgcaggctgagatggctaaattatctgaaaccagatgttaagcatggaaaccttactccacaagaagagtgtttgattcttcaactccattccaagtggggtaacaggtaataacttcttttaccatttcccattctgctatttagttgacattatatgatattgatttgtaggtggtcaaagattgcaaaatatttaccaggaag

SEQ ID NO: 202694 - DNA, 405 bp, Gossypium hirsutum
ctttctttctttctcatcttcattccccttcattgtcagataatccaaacagcagaaattgaacacacagagagaaattatcagagatggggatttctaagagattgctctcttcgtttgctttgcttgtaacgtgtattttgcttttcgtttgtgtcaaggcctcagcagagaaaacagagctgaattcaaggctcagtgaagaaaacaagttgcagggcttgaaaaactcatcaatggaagaggggttggaggatgagcaatggataaatgagcactcagtcgacaatccagaggaaattgcttcaatggtgcatatgagcataagaaatagcacagagaggaggaaattgggatatttctcatgtggaacagggaatccggctgatgattgctggcgatgtg

SEQ ID NO: 202695 - DNA, 359 bp, Gossypium hirsutum
gtttgagaaagaagctgctgagatgaacaagaggtcattggagtatgcttgggtgcttgacaagctcaaggctgaacgtgagcgtggtatcaccattgatattgccttgtggaaatttgagaccaccaaatactactgcactgtgattgatgcgcctggacaccgtgactttatcaagaacatgattactggtacctcgcaggctgactgtgctgttttgattattgattccaccactggtggttttgaggctggtatctccaaggatggtcagactcgtgagcatgctctgcttgcttttacccttggtgtcaagcaaatgatttgctgttgcaacaagatggatgccactaccccta

SEQ ID NO: 202696 - DNA, 404 bp, Gossypium hirsutum
aaacaaccaaacacagtcctacattttaggagtttttgtttttcgaatctgcggcggagataatgatgcacagatttatttcggtcaggaggttattttcggaaactaaatgttctcttccttgccaactacgacgacgttgcttctctcaggtggctcgaaatgagattgataacagggatgatcttgttcgtaaaatgcctccttttgattactctccgcctccttacaccggtccttccgccgacgagatcctttccaaacgcaaggagtatcttagcccctccatgttttacttttacaccaaaccgttgaacatagtggacgggaggatgcagtacttgttcgatgataagggacgaagatacctagacgcatttggagggattgctactgtgtgttgc

SEQ ID NO: 202697 - DNA, 400 bp, Gossypium hirsutum
cagtatagtaatataccaagcctttgggtaaatggaggttaagctatggaacgacaagcgcgagagagaaatgtatgagaattttgcggagctgtatgccattatcaaggcaacagagaaacttgaaaaagcttatgtgagggatattatatcatcatctgaatatgagactgaatgccaaaagcttattgcccatttcaagaccttggcttcaacactcaaagatactgtccctagtattgaacgttttgcagatacatataaaatggactgtccggctgctataaatcgcttggtgacctctggggttccagccacggtggagcaccgggccgcggcggctgcctcagcgactacctcggctgccattgtggctgaatgtgtgcagaattttattact

SEQ ID NO: 202698 - DNA, 411 bp, Gossypium hirsutum
cccagactcactttgttgtcgtgtgtatatacagatgggcattatagaagcaaaagagcccatctctatatagactacctcaggatctgcaacatcggtacccaaggtactgactttcgctctgaattcctctgggtcaggaatttggagagtgatcactactgaatcaaaatcaaactttggggggaaatggagctttccaagatttttacgatctgtttttctgtattgctggagtactcctccttggcctatggtcaagcaaggagccctcctacggtcgcaatgagcccaactccagcaccagccccagcaccggcaccggcatatgtaaacctcacttatttactctcagtggctggtccatttcacactgtccttgactaccttgagtccactaaagtgattgac

SEQ ID NO: 202699 - DNA, 384 bp, Gossypium hirsutum
gagatagcgagagtttcttcttcttcttcttcttctgggtcgctcctgtagaaagtttatttgctcttcaacaataaaaaaaataaaaaaagctttcctacagcagcgctcaagtttttatcaatccagagtttgaatttgaattgaacaaatcaatattaagataagagaaatggctcgctctctctccaacgctaagcttttctctactttagttgtcgatggaatctctaacgttatctccagacgaggatatgcggcggcatcacaaggaattgtgtcgagtggaataagaggaagagcgggaaggagcgctgctacggtggccaagaaaacaagggaagagatgtctcgcggagctaaagagaaagtttcgtgggttcc

SEQ ID NO: 202700 - DNA, 406 bp, Gossypium hirsutum
ggacacccgaatttcatgtacttgaagaaactgtttgggctactattgctaaatgagaaaattagttcattgaactgtgaagtttgccaactgtctaaacacacttgggtcccttatcctttgaaaccttatgttcaatctcaacctttctctttaactcacagcgatctatggggagccagttgagtaaaaaacatcacaggggctaggtggctcataactttcattgatgaccacactagagtacgatgggtctatctgcttaaagaaaaatccgaagtctctagagtcttcagaaattctcattcaatgattcgaactcaggtcaattcaaatattcacacccttagaactgataatgggagagagtactttaattcaatcctaagttcttatctttctgagc

SEQ ID NO: 202701 - DNA, 403 bp, Gossypium hirsutum
gaactgcttaatatatggagaaatcccagagtatattggagatatgaagaaattgaaaaccctggatctcagctataataacttgaccggagaaattcctggatcattccacaaattgacaaaagcagatttcttgtatttgaccggaaatcagctcactggttcagtgcctcagtggatcgtggaaagaaatacaaacgcggatttgtcttacaataatttcacatgggagcctgcaagtccaatagaatgtcctcgagggagtgtgaacttggttgagagctactcaacatcagtagataaattgctttgctatcttggtgcagaagtagggatccttcatgtctaaggcacaagttcccatgatctgtctcatctaaacaatataagtactcattgcaca

SEQ ID NO: 202702 - DNA, 402 bp, Gossypium hirsutum
aagaaaaaggagaccataaaccactggtatagatggaaactacgaagaaaacaatggacattatcacgattgatagcttctaattaaagtttggaaagtggttatgaataattccagccaaaagaatggaaattacaagcatattaccagaagagtgcctgtgtctgatcatatcgttgacttcgccggaagatgcatgtcgatcggccatgatttctcacgcttccagatcggttgcaaaccgtgatgaagtgtgggaaaggtttctgccgtctgattgtagatcaatcatttcaggatcatcatcatcatcattgctttcgctgggaaagaaggatgtatatttccatctctgttttcatcccattctcattcaaaatggtaccatggtaaaccccaaag

SEQ ID NO: 202703 - DNA, 382 bp, Gossypium hirsutum
cttcgatgtgatagcagggaccagcaccggcggcttggtgacagccatgctaacttgtccgaacgaaaagaatcgaccattatttgctgccaaagacatcaaagacttctacctaactaattgtcctaacatatttcctcaaccaggatgtccattgttttctcgaacaacaaaagttatcaaagctctatcgggaccaaaatatgatggcaagttcttacataaagttgttagagacaggctaggagaaacaaggttgcaccagacattaactaacgttgttatcccaacatttgatgtcatgcatctccagccagccattatttcaagctatcaggtgaagaaaaaacctaatttggatgccttgctctcagacatatgc

SEQ ID NO: 202704 - DNA, 365 bp, Gossypium hirsutum
accaaggtcaaaaccaaaatttcaatgcttcgaaattctttgggggggggcacctggaattgcatgggaccacctgaggaggttaaaaggatcgttccacctttgaatgaacctgaagttccttctgaggatgttgtggaggttgttgtgagccctccattggttttccttacctttgggaaaagtctgttgcggtctgatttccatgttgctgctcaaaactgttgggttcgcaaaggtggcgcttttaccggagatattagtgctgagatgcttgttaatctgagcattccatgggttatcatcggtcactctgaaagaagggctctcttgaatgagtccaatgagtttgttggagacaaagt

SEQ ID NO: 202705 - DNA, 408 bp, Gossypium hirsutum
gggctgcaagctatgccacttgacccgcttaatgattggccaagaaatgcatattatatggatggggtgttcgccgccggtgatggtgtaccctatgtccgatcaaacatggtctgcatgtttgagaggtacacaggtgatatagggtggcggcatgcagagagtccaattacgggtatggagattaaggaagtaaggccaaaggtgacattagtggttcgaatggctgcatcggtggctaactatgattatattgttgactgggagttccaaacagatggacttatcaggattaaggttggacttagcggcattttgatggtgaaagggactgcatatgagaacatgaatcaagtggaagggcaagaaaatctgttcggtacccttctgtctgaaaacgtcattggc

SEQ ID NO: 202706 - DNA, 398 bp, Gossypium hirsutum
gaaagaacggattatccaattagtcggcaccctgagttgcgttacaagacagagttccagagccatgagcctgagtttgactacctcaaaagcttggaaatagaggaaaaaatcaacaaaatcagatggtgccaaacagccaacagtgcactgtttctcctctccgccaatgataaaaccatcaaattttggaaggtacaagaaaagaagatcaagaaaatttctaaaattattgctgacccttcgaaagctgttggaaatggaaatgttgctagttcaagtaattcaaatagcccaaaatcttttcttgcaaatggagtctcccccgacagatcctgcaaccatttgggcaatgacatctctttcccaccaggaggccttccatcgctatgtttacc

SEQ ID NO: 202707 - DNA, 403 bp, Gossypium hirsutum
gaagagttcaaagaagcaccaaatttacagcaaggaattccaggctatgttagatggtttagatgaagaagacagcttagaagaaggtggtcaagcaacagagaagaaaaggcgtttatctatgcatcaagttaaggctttggagaagaatttcgatgtgggaaacaagttagaaccagagagaaaagtgaagttagctgaagaattggggttacagccaaagcaagtggctatttggttccaaaaccgacgtgctcgttggaagaccaaggtgttggagaaagattatgcaatgcttaaagctaattatgatgctcttaagcttgatcatgacaatcttgaaaaagaaaaactgggtctaattgcaaaggttagtgtttatatttcaaaccccattttttag

SEQ ID NO: 202708 - DNA, 408 bp, Gossypium hirsutum
gccaactgcaccggacggtccatacgcatggggatattgctatgttcaggaacagggcaaccctggagattactgtgttgcaaatcaacaatggccttgtgcccctggtaaaaaatattttggccgtggtcctattcagatctcatacaactacaactatggtccagcaggagaagcaataaaggctgatattctgaatgaccccgatttggtagcaaaggacccgaccatttctttcaagacaggtctttggttctggatgacaccacagtcacctaaaccttcaagtcacgatgtcatcaccggccaatggaagccatctgcagaagacacggccgctggtcgggtccctggatacggtgtcatcaccaacatcatcaatggtggcatcgaatgtggcaaaggatc

SEQ ID NO: 202709 - DNA, 408 bp, Gossypium hirsutum
  unsure (1)..(408): unsure at all n locations
ccaaaatcgacgtggagtgggtgcatgtaatcagcgaaggctgggctaatcctttgaaaggatttatgagggaagatgagtatttgcaaagcttacattttagttctctgagattgaaagatgggtatgttgtcaacatgtcacttcccattgttttggctattgatgatgagactaaggagagaatcgggtcttcttcccatgttgggttggttggacctgatggagacttgatcgccattcttaggagcattgaaatctacaagcataacaaagaagaaagaatagctagaacatggggaacaactgcaccaggtttgccatacgtggaggaagtcattactcctgctggaaactggctcattggaggtgacctagaagttntgaaacctataaaatataatgatg

SEQ ID NO: 202710 - DNA, 309 bp, Gossypium hirsutum
atatacttgagctttacactttaagccgtaaattagtgcagggacagtttgggggtacttacttatgtaccgagatttccactgggatagaatatgcttgctggtccatatcgaaaaggaagttgattagcaaggaggatgtgcaggatgttaggagggagatccaaattatgcaccatttggctggtcataagaatatcgagacgatcaacggcgcgtacgacgatcctttatttgtgcatatcgtgatggagctatgctccggaagcaaactgtttgatagaattattcatagggggcattacaccg

SEQ ID NO: 202711 - DNA, 410 bp, Gossypium hirsutum
cgccctttccccttgttgtctccgcccccattgcttcggtcctctcttttatatggtcctccccactttctcttccttcttcacctcccattttctctccttttccttcttccctccccattaggaagaaaatggctacagctttctcaccttccaagttcgctgcccaaccattccctctcaacaccacttctcaaaacaaccctcttacaatccccactatcgcctaacccttcctcggatccacccgcaaactcatccgcctctgttcttcttccaatttgaatctccgccgtcgatctgctaccgtcgtcgccgtctccgacgtcgtcaaggaaaacaaatccaagtctacccccaatctgttaattacacaagacgaagggttggaattatacgaagatatggta

SEQ ID NO: 202712 - DNA, 400 bp, Gossypium hirsutum
cattaaatatcttcaactgcaatctggcgcaaaggttcgggtccagcgagatatgggtgcagatcctaattcctgactaggcctgtggagctcatgggtactgctgaacaaatagctaaggctgagcagttgataaatgatgttctggcggaggctgaagcaggaggttctggcatagtttctcgaaaattgacaggacacgctggaagtgagcactttgaaatgaagataccatataacaaggttggcctgctgattggtaaaggtggagaaacaattaaaaatatgcaagctagaactggagctcgtattcaggtgatcccgttgcacttgaccccaggtgatacatctacagaaaggacattacacatagatgggactagtgaacagattaaaactg

SEQ ID NO: 202713 - DNA, 386 bp, Gossypium hirsutum
gaaaaagactacattaagaatgttcttggtgagcaagggcagcatatggctgtcaactattacccgccatgtcccgaaccagagctgacttatggattgcctggacatacagaccccaatgctcttacaattttgcttcaggacttacaagttgcgggactccaagtactcaaacacggcaaatggctcgccgttaatcctcaaccggatgcttttgttattaacatcggtgatcaattacaggcgttgagtaatgggaggtacaagagcgtgtggcatcgagcggtcgtgaatgccaataaggaaaggatgtcagttgcttctttcctctgcccatttgaccgtgccttgatcagccccgcaaagcctctcactgaagacggatg

SEQ ID NO: 202714 - DNA, 372 bp, Gossypium hirsutum
atttcttccgttgatctttgttagagattagctggttaatttttcattatgggaaagatcaagatcggaatcaatggatttggaaggatcgggcgtttggttgcgagagttgctcttcaaagcgatgatattgagctcgttgctgttaacgatcctttcatcaccactgaatacatgacgtacatgtttaagtacgacagtgttcacggtcaatggaagcatcatgagcttaaagtgaaggacttaaagacccttctctttggtgaaaagcctgtcacagttttcggtatcagaaaccctgaggaaatcccatgggctgaagctggagctgagtatgttgttgagtctactggtgtttttactgacaaggac

SEQ ID NO: 202715 - DNA, 392 bp, Gossypium hirsutum
cgttagccggtgacggtttcgacaccgtcatcaaggcgaaacaagcggtcgatgcggttccgagttgtagaaacaaggtttcatgtgctgatattttgggcatggcgactcgtgatgtcattgctctgtcaggtggaccatcttatgcagttgaatttgggaggttggatgggttaagctccacagcagctagtgtcaatggcaagctgcctcatccagatttcaacttgaaccagctcaactctatgtttgcagcacatggactcacccaaactgacatgattgctctttcagctgcacacaccgttggattctctcattgcagcaagttttcaaaccggatatacaatttcagccgtcaaagtgcagtagacccgacattgaaccgagca

SEQ ID NO: 202716 - DNA, 338 bp, Gossypium hirsutum
  unsure (1)..(338): unsure at all n locations
gaaatacacaagaaaaaaaaacaagtgatctgatgaattgaagactttatttctggtaacatccattatgagtactgctggtcaagtcatccgttgcaaagctgcggtagcatgggagtcggggaagccactgtcaatagaggaagtggaagtggcaccaccgcagaaggatgaagtccgtattaagatactcttcacttctttatgtcacaccgatgtctacttctgggatgctaagggacaaaaccctctgtttcctcgcatactangtcatgaaactggagggattgttgaaagtgtaagtgagggggtgactgatctaaagccaggtgatcatg

SEQ ID NO: 202717 - DNA, 410 bp, Gossypium hirsutum
taatagcaaaggcagtggtggggtgtacaagaaagctggggttcagacgtcttcaagccaaccacctttgaaagtgagaaaggagaagcttggagatagaataacagcacttcaccagttagtttccccatttggaaagactgacacagcatctgtgttgttagaagctattggttatatcagattccttcaaagtcaaattgaggctcttagctccccttacttgggtactgcatcaccaaacatgagaaaccaacaatctgttcaaggagaaaggaattgtgcatttcctgaagatgaaggacaggaaaagcaagagcctaagccaaaggacttaaggagtagagggctgtgcttggttcctgtatcatgcacccaacaagtcggaagtgaaaatggtgccgactact

SEQ ID NO: 202718 - DNA, 390 bp, Gossypium hirsutum
tacaaacaagagagttaaagatattgaggtttgtgttcggattgtttatggaactattgctttttatctcggtcgaaaggctagtgagtcgcaatcacataagtggactgtttacgtgcgtggggcaacaaatgaagatcttggagcagtgataaagcatgttgtatttcaacttcatcccagtttcaataaccctacaagaattgttgaagcaccaccttttgagttatcagaatgtggttggggtgaatttgaaattggcattagcattttcttccatagtgatgtttgtgacaagcatttggatttgtgaagttgttatttggttgctcacttgatttgatgccttgtttactaactaggctctgtatttgtaggtatcacaatgtg

SEQ ID NO: 202719 - DNA, 403 bp, Gossypium hirsutum
tttttaagtccactttcagtcgttcctttggtatctctggttggttttgggctttacgaatttggctttcctggggttgccaaatgtgtggagattggactgcctcagctaattcttatagtatttgtctcacagtacgtgcctcatgtgataaagtctggaagaaatgtctttgatcgatttgctgtcttgttttcagtggtgattgtttggatttatgctcatttactcactgtgggtggagcttataatggtacagcaccaaaaacacaaacaagctgtagaactgatcgttctggtctaatagatgctgctccatggataagagttccttatccctttcaatggggagcgccatcatttgatgctggtgaagcctttgctatgatgatggcttcttttg

SEQ ID NO: 202720 - DNA, 411 bp, Gossypium hirsutum
  unsure (1)..(411): unsure at all n locations
gcagaatacagcgatgccttgaatgaagttactgcatggtatgttggcaaaaaaggattgggaaagcaggtggcagctaaaccaaaagagcaaaagagtgcagatggaaatagttctgataaggtgaacttaggtagcaggccctcatctgaaatagatcttccttgtgctgaattgggaaaggtgcgattgagatttgctcctgaacctagtggttatctccatatagggcactctaaagcagccttattaaatcaatactttgttcaacggtaccaaagtgaagtaatcttgcgctttgatgataccaatcccaccaaagaaagcaatgaatttgtagaaaatcttataaaagatgttgagacattgggcatcaagtatcaaatgatcacctatacttncgattacttc

SEQ ID NO: 202721 - DNA, 397 bp, Gossypium hirsutum
cttcgagtccgagccaaaggtctaatatgcctcattttagatgttccaacaactcccatagcgttagtccatatcaaaataaggacccttttctgaatatgcacccagaagtttcgatgcttagaggtgaagggaatcctatagtaacaaacccaagaaaggatagctctagtcccgagagcttaaggggcatgacgggttcaagtaattataatgaggctaagatcaaagtcattggtgtcggaagcggtgggtcaaatgctgttaaccgtatgatagagattgctttgaaaggtgtagagttctggattgttaacactgatattcaagccatgaaattgtcacctgtctttcctgagcaccgtttgcaaattggtcaggagctaactcggggtct

SEQ ID NO: 202722 - DNA, 384 bp, Gossypium hirsutum
gttgattggaagaaaaacaggcggaatatcagtttatcgatttacgtcatctatacgaggcaaggaagatcccagtagccatatcattgtccgaggcaaatcaatggctgggcgtgctgatgacctatttaatctgattaattgtgttcttcaagaagtacagtttacagaccaacaacggttcaagcagtttgtgtcccaaagcaaagccagaatggagaaccggttgagaggtggaggtcatggaattgccgcagctaggatggatgcgaagttaaatgttgctggctggatttctgagcaaatgggtggagtcagttacctggagtttcttcaagcactggaagaaaaagtggataatgactgggcaggaatttcatcatc

SEQ ID NO: 202723 - DNA, 389 bp, Gossypium hirsutum
cagcaaccatctaccatgcatcttctcattctagtgttgacctaccaagatcaaggaacctcaacaatcaacaactaccaactagatttgggttaagtcacccaaaaccaatcaaccaaccaagcaaccgagaagcaaaaagaatggattctgattatggcattcccagagaactttctgatcttcagaaactccgatctcaataccaaccacagctccctccttgcctcgagggaactactgtcagggttgagtttggtgataccactacatctttagacccggctgatgctcataccatatgccgagcttttcctcacacttatggcaagcccttggctcactttctcaaggcaactgccaaagtacctgatgctcagattataact

SEQ ID NO: 202724 - DNA, 392 bp, Gossypium hirsutum
aagaagaagaaaaaggaaacaaaagatggcaattgagattcctagagtgaaacttggaactcaaggatttgaggtttcaaagctgggatttgggtgtatgagtcttacaggtcacgatcattcagtgtcagatgaagatggcatagccatcattaagcatgcagtcgaaagaagagtcactcacatcgatacagccgacttatatggacccaaaactaacgaaattctggtcggaaaggcattgaagcatctgccacgagagaaggtacagttggctacaaaattcggtgttgaaagcatgggtccagatggtccggttatcaatggcactcctgaatttgctcgttcttcacttgaggctagccttcaacgccttgatgtggattatattg

SEQ ID NO: 202725 - DNA, 403 bp, Gossypium hirsutum
ggattatcaatttgaagccttcttcgaaattcctctttgaagatgcaaattttcgtcaagaccctcactggcaagaccatcacccttgaggtggaaagttctgataccatcgacaatgtaaagaccaagatccaagacaaggaagggatcccaccagaccagcagaggcttatctttgctggtaaacagctggaggatggccgtacccttgctgactacaacatccagaaggaatccacactccatttggtcctccgattgaggggtggtatgcaaatttttgtcaagaccctcaccggaaagaccatcacattggaggtggagagttctgatacgattgacaatgtcaaggccaagattcaggacaaggaaggcatccccccagaccagcaaaggctgatct

SEQ ID NO: 202726 - DNA, 410 bp, Gossypium hirsutum
  unsure (1)..(410): unsure at all n locations
aaaacacatcagtggtctgtcaaacttgaggagtctcacgttttcggagaaacagtgcaatcactgcacaaggaatggcctagtaaacctgatgaagctggacctggaaaaatgtcctgggattcatggggggcttattcacatcaaaggtttgacaatgttagagtctcttagtattaaatggtgtaattgcataacagatgctgatatgaagcctctttcagggcttacaaacttgaaaagcttacagatttcctgtagtaaggttacagattttggcatcacttatttaaaaggtctgcaaaatctttctgttttgaacttggagggctgcccagttacagcttcgtgctttgatactctntcagtgcttgtatctctgntatatttgaatcttagcagatgcaatt

SEQ ID NO: 202727 - DNA, 249 bp, Gossypium hirsutum
gatacactttagagttgtgaggatcttgataataggatgtttaaccacaacgatcgggggtcaagcacaatgaatgggccagatattagcgggaacctcaaagcattgaggaggtcgaggactgcttgagagaccgctcagatgactccttcatgatccgctgaatctatcatcacgatctattcaacgtgctagggtgctgacatactctccactggatctcactctagctatcaggagcccttcatg

SEQ ID NO: 202728 - DNA, 399 bp, Gossypium hirsutum
gcgaagtctacggtaacggcaagatattcgacatcagccataggtacaccgtcgacatgccgtcttgggaatccaaggacggcgtgggacagttcctatggttgcctaaaagcatgaagaacggttccctcgctaataattcggagatgaaactcccaactcacaccggcacccaccttgacgctcccggacacgtcatcgatcggtacttcgatgccggcttcgatgtcgataccctagatttggaagtacttaatggtcctgccctgttgatagatgttccaagggataaaaacattactgccgaagttatggagtctttgaaaataccaaagggagtacgtagagttcttttcagaacattaaatactgacaggcggctaatgtttaagaaagagt

SEQ ID NO: 202729 - DNA, 405 bp, Gossypium hirsutum
ctctgtgtgcttttcttcactgtttgttccccggcaaaatattgtgtcacaggaagaaaatcccaatttccacgagaaattttaaacaaaaaaagaaacccaaaaatggacaaagaaaagaaattaaaacaaacccaagaagaagaggaaatggaattcaaagactgtgaaaaccatagccaacaagctcaacaagaagaagaagaagaagaagaagaaaaaatcgagataggcgatgaaataattctaagcagaattggtatcatgagagcacttgcagagagagatgacccatcagttaaagaagtggatgattttatgatacggagattccttagagctcgtgatttggatatagagaaagcaaacaccatgttattgaagtatttgagttggagaagaacg

SEQ ID NO: 202730 - DNA, 386 bp, Gossypium hirsutum
tgaatgttaagatgattactggggatcagcttgccattgccaaagaaactggcaggaggcttggaatgggaacaaacatgtacccttcatcttctttactgggccaagacaaggacgcttccattgctgcccttcctatagatgaattgattgagaaggctgatggatttgcaggagtgtttccagaacacaagtatgaaattgttaagaggctacaggagagaaaacatatttgtggtatgacaggagatggtgtcaatgatgcccctgctttaaagaaggcagacattggaattgctgttgctgatgctacagatgctgcccgaagtgcttcagacattgtccttactgaacctgggctaaatgtcattatcagtgcagtgctg

SEQ ID NO: 202731 - DNA, 387 bp, Gossypium hirsutum
  unsure (1)..(387): unsure at all n locations
aaacaaccaaacacagtcctacattttaggagtgggtggttttcgaatctgcggcggagataatgatgcacagatttatttcggtcaggaggttattttcggaaactaaatgttctcttccttgccaactacgacgacgttgcttctctcaggtggctcgaaatgagattgataacagggatgatcttgttcgtaaaatgcctccttttgattactctccgnctacttacaccggtccttccgccgacgagatcctttccaaacgcaaggagtatcttagcccctgcatgttttacttttacaccaaaccgttgaacatagtggacgggaggatgcagtacttgttcgatgataagggacgaagatacctagacgcatttggaggga

SEQ ID NO: 202732 - DNA, 307 bp, Gossypium hirsutum
ctgagttttagccctcaggcatgatggtcaaatgcgaggctacgcatgtgaagtacatgggatgctgcctgatgtatcgaggagatgttgtgcctaatgatgttaatgctgctgatactactattaatacaaagaggactgtgcaggcagctgactggtgcccagctggttccaaatgcaggattaactataattctccaactgtcgctcctacaggagaacacgctaacgagcaatgagcatgttgcatgagtagcaacaagactgcagtggctgatgacgattcacgcaatgaccacaggtttga

SEQ ID NO: 202733 - DNA, 374 bp, Gossypium hirsutum
atgcggtgaatcatagagtgatgatgagcggtgataaagatcgatattcaatagccggcttcgccattccaggtgagggtaccataattaaggcacccatagagcttattgatgagcaacatcctcagatttacaaggactgtaatttcatggacttatttcgttatgccttttgcgaccgctcaaagaacatctaatccggccaacatctccacgcctttgcttctctctcaccaccaatttacgattaaaaacatgcccgctttgacaagttaaagcccgggtttcgctcacaatcgaagttacatataataaattgagttctttaccatattactatgatcatgattttcgtacttgtactgtattactat

SEQ ID NO: 202734 - DNA, 412 bp, Gossypium hirsutum
gctggtcccagtttgtgaaatggcaataaagctttgcggcactgatggtacaatctcttgcatggcttcatattttgtctgcaataacatattcaatggcatcatggcacttgctggcgatacaaattactatgacgttagaaagaaatgtgaagggagcctttgctatgacttctcaaacatggagtcatttctgaacaagaaatctgttagggatgcccttggtgttgggaatatagatttcgtgtcctgcagccctactgtgtatcaggccatgctggttgactggatgaagaatctcgaagttggcattcctgttctcctcgaggacggaatcaagcttctcgtgtatgctggggaatatgatctcatctgcaactggcttggcaattcaagatgggttcatgcaatg

SEQ ID NO: 202735 - DNA, 346 bp, Gossypium hirsutum
gaccaggagagccctaatcatggcttgaggtagctcggctatactgatcgagccgtcatactcgtggatcggaggccagcagacggtacctcaacgctcgggctcatccagtcggttcgccactcgcatagtctgacttacgaggcgtgctggcgctaacactgccgaactcatgacgaaccgccaacgctcttggttcacctgatccgggcatcctggccactgatgaaccgattgctacatgtgggaagagagtatcttctatgggcttagagactactgaacccaagcgtcaggcttacagacggattacgctcacaactcctggcctcttgacaatatatac

SEQ ID NO: 202736 - DNA, 374 bp, Gossypium hirsutum
ccgcatctttgaggtttgatggagccctgaatgtggatgtgactgagttccagactaacctggtcccatatcccaagatccactttatgctttcttcttatgcccctgtcatttcagctgaaaaggcttaccatgagcagctatcggtggctgagataaccaacagtgcttttgaaccctcttcaatgatggccaaatgtgacccacgacacgggaagtacatggcttgctgccttatgtaccgaggagatgttgtgcccaaagatgtgaatgcggctgtggccaccattaagaccaaacgcacaatccaatttgtggattggtgccctactggattcaagtgcggtatcaactaccagccaccaactgttgtt

SEQ ID NO: 202737 - DNA, 405 bp, Gossypium hirsutum
ctgtgtttgagccctcaagcatgatggcgaagtgcgatgctaggcatgggaagtacatggcatgctgcctgatgtatcgaggagatgttgtgcctaaggatgttaatgctgctgttgctactattaaaacaaagaggactgtgcagtttgttgactggtgcccaactggtttcaaatgcggtattaactatcagcccccaactgttgtacctggaggagatcttgctaaggtgcagcgagctgtttgcatgataagcaataatacagcagtggctgaggtgtttgcacgcattgaccacaagtttgatctcatgtactcaaagagagcttttgtgcattggtatgttggcgaaggcatggaagaaggtgaattctcagaagcccgtgaggatctggctgctcttg

SEQ ID NO: 202738 - DNA, 306 bp, Gossypium hirsutum
ttcccaaggtgcaagaaattgtatcagaaatatttggggagtctccaagcaaaggggttaatcctgatgaggcagttgcactttgagcttatatccaatccattatgctataaggtcccctaaatttactgcacctgaactatgtcactaagattaccatgctctactggatctatactactattgaatgacctgattatagaatactacctattgatgacccgattgcgacatgtccaatcctactaaaatctattggattagacattactgaaccctaccagcaggcttacatacagattatga

SEQ ID NO: 202739 - DNA, 357 bp, Gossypium hirsutum
ctcatcttccgttgcttatacgtttggttgctgatgaagaagtgctactaccatgggtacaaagaagagcgttggggacttgaaggaagctgatttgaagggaaagaaagtgtttgttagagtcgatctgaacgttccattggatgataacttcaacataactgatgacacaaggatccgtgccgttgttcccaccatcaagtatttgatgggtcatggctctaaagtcatcctctctagtcatttgggacgcccaaagggtgtcactcccaagtacagtttgaagcctcttgtgccaaggttatctgaactccttggagtcgaggttaaaatggcaaatgactgtattggtgaaga

SEQ ID NO: 202740 - DNA, 408 bp, Gossypium hirsutum
ttcccaaggtgcaagaaattgtatcagaaatatttggggggtctccaagcaaaggggttaatcctgatgaggcagttgcaatgggagctgctattcaaggtggtatccttcgaggtgatgttaaggagctgcttctgttggatgtaactcctctgtcacttggtatagaaacacttggaggaattttcaccaggttgatcaacagaaatacaactatccctacaaaaaaatcacaggttttctctactgcagcagacaaccagactcaagttggaattaaagttcttcaaggtgaacgtcacatggcagctgacaataagattttgggtgagtttgatcttgttggtattccacctgcacctagagggatgccacaaattgaagtcacattcgacatagatgccaatg

SEQ ID NO: 202741 - DNA, 400 bp, Gossypium hirsutum
agttgcttcagctataacccaaaccgtgttggctcagagctgtggctgtgcgccgagcttgtgttgcagtcaacatggctattgcggtcagggtaacgagtactgtggcactggttgcaaagaaggcccttgtttctccaagtgtcccactggtgcttcagttgcctccattgcttcacctcagttcttcaacgggataatcaaccaagctcgtgcggattgtgcaagcaagaaattctatacacgacaagctttactgactgcacttgattcctttcccgatttcggaaaattgggttctgatgttgaatccaagcgtgagattgctgcattcttcgcccatgctacccatgagactgaattcttttgctatacagaagagcaagataaaagtaatagc

SEQ ID NO: 202742 - DNA, 381 bp, Gossypium hirsutum
  unsure (1)..(381): unsure at all n locations
ggcatgttcgatggtgaaccatcagctcaaccgtatgggcatctcggtccgagacatgtgtgtaccccggatcataaacaactagccttggaagctgctaggcaaggcatagttttgttgaagaactctgggtctttaccgttgtctacttcacgtcatcgtaccgtcgcggttattgggccgaattcagatgtcacagaaacaatgataggaaactatgcaagggtggcatgtgattacacgagtcccttgaaaggcatttcaagatacgtgaggactgttcatcaagcaggctgttcaaacgttgcttgcaaagcaaacaatctgtttggattcgccgaggtcgctgcccgccatgctgatgncacagttctcataatg

SEQ ID NO: 202743 - DNA, 258 bp, Gossypium hirsutum
aatatgtgctttcttttatttctcatttatttgtgttttagtcgtgtgacaagagttatccaaatccattacaaaataatccagcttattcagttgtcgagcagtactttgttgatgaggatgataccgtcactgagaagattgttgtgcacaaggaaagtgcaagaggggtgcattttcgacgcgcaggacctcgccaaaaggtgtattttaaaccagatgatgttaatgcatgcattgtaacatgtggtggtctat

SEQ ID NO: 202744 - DNA, 362 bp, Gossypium hirsutum
ccaccatcttctttcaaagagcataaatttttccacgtgcgccactgaatgcctttttgatgtcgatttttctgccaccaatatcttgccataatgccttctaattcaacacatagagacttaggaattagggaacatgccatcgtataggttggaatagcttgaagaatagcttttataaacacctctttccccccttgagatagatgccttacactctagttatcaatccgttgtttcattctgtcctttagggtctgaaaagacattttcttctttcttcccatcatattaggcagacctggataccttttcaggttattagaactacgcacttcaagaacccttgatattactacttt

SEQ ID NO: 202745 - DNA, 323 bp, Gossypium hirsutum
gagctacttaaccatttaccaaatctactccctcctcttggttagcgtccttttcattgccgctcatgcagcgcgctttgaaatccgcaatgagtgctcctacaccgtctgggcagcagcctctcctggtggtggccgtcgcctagaccctcggcaaagttggaccatcgatgtgcctgctggcactgctatggctcgtattaggggtcgaaccaattgcaatttcgatgccactggtaggggtcattgccaaaccggtgattgtggtggactccttcaatgcacaggttggggtgtaccttcaaacaccctggctgaatatg

SEQ ID NO: 202746 - DNA, 366 bp, Gossypium hirsutum
  unsure (1)..(366): unsure at all n locations
cttttgcatgcaaaatcacattctttttcttttaatttcattttcaatattaagccaaactgaaaccctgtaaaaatacttatacctcaatgaactgccaatccaattctgatgataccaccctagagatggaacttccgggctttcgattccatccaacagaggaagaactccttggtttttacctcanaaacatgatttacggtaacaagttgcgtgatgatgtaattggatttctcaacatttatcaccatgatccctctgatttgcctggtacataagtgttcatttgtttgtttaaccacataggaaaatatgattgtttaatatatatgtctgattcggatggttttttttataggattg

SEQ ID NO: 202747 - DNA, 311 bp, Gossypium hirsutum
gtccagtgcgcaccgcattgtctcccatcctagggagtaggaaaaacaataatcttcttctcaatcttgcaatggtgcatatggatgatttggcaagggcattcaagcatcggagagaagatgattgctcagccatcgagtgctacatggaacaatatggcgtaacggcacaagaagcttatgatgaattcaacaagcatatagagagctcctggaaggacattaacgaagagtttctgaaaccaacagaaatgccagtacctggtctaaatagaagtctcaaccttgcaagagtgatggatgtgctttac

SEQ ID NO: 202748 - DNA, 388 bp, Gossypium hirsutum
aacccatttccctctttctctgtccatccatttctccctcttttcttctttttcttcttttttatcctctcaaagacctttttgtgttgcagaatttactcctttttagttttgtggactatgccaaaagctggggttcttcctggttaactaaggcctatttttgggtgggttgaacttatatcagtactagcagattagaggttctctcaagtttcagacatatttgagttcctatcttggaacaatgatgatgtttgacgagatgggaatttgtggggatatggatttcttcagtgctccacttgtggaaaaagatgtggcagcctcacaaattgaaccagaggcgacggtggaggatgattatagtgatgaagaaattgatgtg

SEQ ID NO: 202749 - DNA, 270 bp, Gossypium hirsutum
ccgcatcttgcaggtttgcgggagccatgattgtggatgggactgagtatcagactaacctgaatccatatacgaagatccacgttatgctgaactgtcatgcccatagtattgtagccgatatggcttaccatgagcacggctcggtggctgatataaccgaccgtgctcttgaaccctctaccatgacggccagatgtgacccaccacacgggaagaacatggcttgctgtcttatgtaccgacgaaatgttgtgcccaaggatgtga

SEQ ID NO: 202750 - DNA, 332 bp, Gossypium hirsutum
ttttattcgaccccatttgagaaaattgtctccttatcagcccattttaccttgtgaggttttgtcagcaaaactgggaagaaagcctgaggatatcatcaaattagatgcgaatgaaaatccttatggcccacctccggaggttcttgaagctttggggtcactgaaattcccatacatctaccctgatcctgaatctcgtcaattgcgtgctgcccttgctgaagattcggggattgaatctgattatattcttgtaggttgtggctgtgatgaacttattgatctgataatgcgatgcgtgcttgatcctggggacaagattgttgact

SEQ ID NO: 202751 - DNA, 285 bp, Gossypium hirsutum
cgacgacccgagacgcgcaaacctcgaccaatacatgcacgcaactggagctcgcaggcaaaccagcgattcagcgaatgataagagatacgccgagcaaaaccgccccggttcttgcttcaataaacaaccctttcattccttgggcatctgatgttgctgaaagtctctgcattccttctgcaatgctttgggtgcagtcttgcgcgtgtttcgccgcctattaccattacaatcatgggttagtgacgtttcctactgaaactgatcctgaatttgatgttc

SEQ ID NO: 202752 - DNA, 316 bp, Gossypium hirsutum
gggctgcaagctatgccacttgacccgcttaatgattgtccaagaaatgcatattatatggatggggtgttcgccgccggtgatggtgtaccctatgtccgatcaaacatggtctgcatgtttgagaggtacacaggtgatatagggtggcggcatgcagagagtccaattaccggtatggagattaaggaagtaaggccaaaggtgacattagtggttccaatggctgcattggtggctaactatgattatattggtgacttggaatttcaaacagatggacttatcaagattaaaggtggacttaacggcattt

SEQ ID NO: 202753 - DNA, 227 bp, Gossypium hirsutum
agagcattgatccagggaattttgaacgccactggggtattttttattttgatggacaggttaaataccctctcaaccttggaactacaaacagtggagcattaattcctgcaaaaggtgtacagtacttggaaaggaagtggtgcgtgatgaagccttcagccccacttgatgacccacaagtggcacaaagtgtgagctatgcatgtggccttgctgactgcact

SEQ ID NO: 202754 - DNA, 267 bp, Gossypium hirsutum
gggaaatgtatacaaagcgatatttttacggttggaggctacgattgggcgatttacttctaccccgacggtaaaaatccggaggatagtgcgatgtatgtttcggttttcattgccttggctagcgaaggtacggatgttcgagcgcttttcgagctcacccttgttgaccagagcgggaaagggaagcataagggtcatagtcactttgacagaacgttggaaagtgggccttataccttgaagttccgaggaagcctgttgggc

SEQ ID NO: 202755 - DNA, 354 bp, Gossypium hirsutum
ctaccaaagatattgaggttgttagtgaagatcatttaactgatggtggccaaaattctgattcccaaacttcagatgtcccttcgaagactgaccaagagaggccacaacaccctcaaaaagagagttcacaacatgtaattgctgattctcatgataacttcgaagctaagttgaaagaagttgatgttaaagtcgaaactcctgtgaatcaaaagaaatcacaggagcaaaatgctggtactccacaaacggtagtccaggaccaacttgatgaggctcaaggactgcttaaaaccaccaattctactggtcaatcaaaagaggcaagactagctcgggtttgtgctggac

SEQ ID NO: 202756 - DNA, 301 bp, Gossypium hirsutum
actttgcttttttgctttgtttgtttagtaagaaaaattgactttcctgggaaaataaaaaaacaaaatatgggtagaggtagggttcaactaagacggatcgagaacaatattagcagacaagtaacattctcaaagagacgaagtggtttattaaagaaagccaatgagatctcagttttatgcgatgctgatgttgctttgattgttttctctaacaaaggaaagctctttgagttctcttctgatcccagcatggagaggatcctagaacgatacgaacgacaaatatatgccccaa

SEQ ID NO: 202757 - DNA, 311 bp, Gossypium hirsutum
  unsure (1)..(311): unsure at all n locations
atatccttgagctttacactttaggccgtanattangacagggacagtttgnggttacttacttatgtaccgagatttcgactgggattgaatatgcttgtaagtccatatcgaaaaggaagttgatttgcaaggaggatgtggaggatgttaggagggagatccaaattatgcaccatttggctggtcataagaatatcgtgacgatcaaagggcgcgtacgaggatcctttatttgtgcatatcgtgatggagctttgctccggaggcgaactgtttgatagaattatccatagggggcattacaccga

SEQ ID NO: 202758 - DNA, 292 bp, Gossypium hirsutum
ttctaaagtggttgatgcatctgaacctgctaggacataccatgtcaatctttcgattttcacttcgatccctgatttttggagtattggtcagatttttcccatagtccccattcatcgattggatgaaaggcctgaagtgagggggattttgtctgatttaacctgtgacagtgatgggaagattgataagttcataggaggtgaaacaagcttgcctttacatgggttggaaaggtatggtggtgggagcagtggtggtgctaaagggcgggactatttaagggatgtc

SEQ ID NO: 202759 - DNA, 299 bp, Gossypium hirsutum
agaaattgcaatgggtgaagaaactgagtgttgcagaacaaaaggaccaggatatgaaactccactgaaagccatgtctggtcctaaagaagctcttctttatgttacttgtgtttatactggaacaggaagagagaagcctgatttcttggcaacggttgatgtagatccgaactcaccaacttattctaaagtcatccacaggctatctatgccgtatgtaggtgatgaactacatcactctgggtggaatgcttgcagctcttgccatggtgaaccggtcggcgatcgacgttttc

SEQ ID NO: 202760 - DNA, 324 bp, Gossypium hirsutum
attaaacccctccaaaaaagcttacttttagcactctgttgttgctctcaaactcgaagggattcggaagtatttgatatggcgcttgaagctctgaactcgccggcgacgcctttcaccaacaaatacgatgacgtggacaacaattacgtcgagacatggaagaaaggcaagcgttcgaagcgacaacgtggcgactctcctgctgctgttgaactttaacccacccaccgaagaagagtacctcgctctttgtctcatcatgctcgctcgcggctctttcggggctgatcgtgatgttattcgtcggtctttcccttcgtc

SEQ ID NO: 202761 - DNA, 329 bp, Gossypium hirsutum
agacaaagaacaacaaatagctcaagcaattataccagaaggcacgggctgtcaagtctgcagtaccacatcctagaatcatgggaataattcgtgaatgtggtggcaagatgcatatggctgagcgtcaatgggctgaggcagccacagatttctttgaagctttcaagaactatgatgaagctggaaatcagagacgtatacaatgcctaaaataccttgttctagctaacatgctgatggaatctgaagttaatccttttgatggtcaggaggcaaagccgtacaaaaatgaccctgagatcttggcgatgacaaaccttatagca

SEQ ID NO: 202762 - DNA, 348 bp, Gossypium hirsutum
cttctcttcatgggcaggcgcatgcactgcttcctcgaccagagcaggtttggcctcagcctttttcttcttctttgggaccgtgtcttgctcctcgagagcagtggagtttgttatttgcccaataagtgaatctgctgcagggttgtaggtcttagcaggagttatcaacccaggccccttcttccggtccttgtcatagacttctatcttcggcttgcctttagctgaacccgcaaaacggtccaattctttgcctttaagtgcccttaatcttgcttcaagcttggctcggttctcaagtcccatggaattatcttggtcatctacaagagcattacatcgaaa

SEQ ID NO: 202763 - DNA, 291 bp, Gossypium hirsutum
ctagtctcgagttcactcattaatatctatgtaaaatgggggcagttagacattgctggtactgtatttgatcaacttgggtccaaggacttgatttactggactgcaatcatgtcaggttatgccatgagtgggagaactagagaggcaagggaactctttaatatgatgccggaaccgaatgtaatctcatggaatgcaatgctagcacggcatactcctttgtctcagtgggaagatgccttagaatttatctttgttatgcggagaatgactaaagactttgaccat

SEQ ID NO: 202764 - DNA, 227 bp, Gossypium hirsutum
gttcttggaatcgatggaggatataagggtttttatgcaaagaacactatcaccttaacacctaagtttgtcgatgatatccataaacgtggaggtacgattcttggaacttctagaggaggtcatgaatctgtcaagattgttgaccgcattcaggatcgtgggatcaatcaggtctatataatcggaggtgaccggacacataaaggagcagctgggatttttga

SEQ ID NO: 202765 - DNA, 216 bp, Gossypium hirsutum
atttcttccattttctctcttttacttccttgcttttctccaattgcaaccatgggttcgaaaggtttcgttgagggaggcattgcatctatcgtcgccggcgcttcaactcatcctctcgaccttatcaaggtccgtatgcaacttcaaggtgaatcccatctgcctaatccttcccttcaactttatcgtcccgcacttgccgtcaactctgct

SEQ ID NO: 202766 - DNA, 385 bp, Gossypium hirsutum
gaattacctcattgatgaagcaagaaaaccataatgagatgaattcgacatcatctagtaagcttgaaagtgttatttggcctggaggaactatgaacattccgagaggttggtctctacatggcaagaggctgaggattggtgttccagcaaataatggattcagagaaataattagcgtgactcgtgatccccgaacaaatgaaactactgtaactggatattgtgttgatgtgtttaaagaagccgttcaaagtttaagttatgaagtacattatgattttatcccggttgaaaatgccagcggaaaaattgcaggaacttacgatgatcttatccttcaggtttattataagaattacgatgcttgtgtgggggatacgac

SEQ ID NO: 202767 - DNA, 279 bp, Gossypium hirsutum
caagaggctgtttcagcagtgagaaaaaacagaggaagaaagaaaagaaaaagaaatagagaaaaggagaacagaagggtcaaagtaactcagatatcaaccgttatttctcatattcatttctgattcctaccaaactgtttctggaggcttaacatctcatttgcaaattggatgtgactgcttcactgtagattgtcaggattaattgtcgatgtctttggagatttagcagtggtagcatcatctgctgcttgggttgagaaatacaaatcaaaa

SEQ ID NO: 202768 - DNA, 401 bp, Gossypium hirsutum
ctaatcatgaactgcactgttggagtagtcagaactcgcgttgagggaccaaaactggcttgtattcctgtaccgccatcagacatgggtcagaatcttagagctttgttagaatccgaagttgggtgtgatataatgtttcaagttggtgatgagacatttaaagcacataagttgatccttgctgcacgttcacctgtttttaaagcacagtttttcgggctcgttggagaccctaacttggataaaatagtagtaaaagattttgagccttctatcttcaaagcaatgctcttgtttatttataccgacaaggcttctgatgtacaagaaaatgtggactccacatctatgtgtacatctgccaacatgggtcagcatcttttggctgctgctgatct

SEQ ID NO: 202769 - DNA, 277 bp, Gossypium hirsutum
gtcaagggctaaaacaacggctgccaagttaggaaagggtttgtctaaggatgaaaatgctcaaaaactagcacttcaacattggcttgaagctattgatccacgccatcgttacgtacacaatttgcacttttactatgatgtttggtctgcaagcaagagctcacaacctttcttctactggttatgtacttttgtaaaactaaactccaaagttacataagtgaaagctactctttttcacccttatgttctgatatttgaaattcattttcta

SEQ ID NO: 202770 - DNA, 351 bp, Gossypium hirsutum
  unsure (1)..(351): unsure at all n locations
gcccctcaactctcttctctctttccccttcactggttcgactggaagaaatggcggaggagaagaaagctcaatctgctggggtttggcctacagttaaaccttttgtcaatggtggtgcctctggtatgcttgctacctgtgtcatccaacccatcgatatgatcaaggtaagaatccaactgggtcaaggatcggcagcaactgttaccaagaacatgcttagggaggagggtgttggtgccttttacaagggtctatcatcaggactgctcangcaagctacatacactactgctcgattgggatcattcaaaatgttgacaaacaaagcaatttgaagccaatgat

SEQ ID NO: 202771 - DNA, 323 bp, Gossypium hirsutum
cgatggctatcttttctacatcaatggctgctatgctccttcttctagggctcttcgctgcaaacttggatcctactgctgcacagattggtgtttgctatgggatgcttggcaataatctcccaaattcatgggaagtcattcaactttacaaatcaaacaacatccggcgattgaggctctacgatccaaatcaacaagcattacaagctcttagaggctccaacattgaagtaatgttaggtgttccaaatgatcaacttcaaaacctcgctgacccttcaaagcacgatcatgggttcaatcaaatggtgtagcttact

SEQ ID NO: 202772 - DNA, 306 bp, Gossypium hirsutum
ggaatgtcctggagttgtttcttgtgctgatatccttgttctgtctgctagagaaggcatcgtttcgttgggaggcccttacattcctctcaaaactggaagaagagacggtagaaggagcagagcagatgttgtggaggagtatcttccggaccacaatgagaccatctctggcgttctcgacaggtttgccgccatgggtattgacacccctggagtcgttgcccttctatgagctcacagtgtcggcagaacttactgtgtgaagctggtgcatcggttggacccacaagttgaccctggcct

SEQ ID NO: 202773 - DNA, 340 bp, Gossypium hirsutum
ggaaattctcgaggtgacccaagttaccccaacctttaactcaccaaaatcaacgactgagttccgtcttccactcactttctccgacataatctggttcaagtttcctcctgttgagcgcctcttcttttaccaattcgacgagttaacccctgcctgtttcaactcagttatcctcccaaaactcaagcgctctctttccctcacactcgtccattacctccccctcgctggcaatctcaagtggccaccaaacgaacctaaacccatcattttatacactccaaacgatggagtttccctcacagttgcccactccgatgccgactttaacatactc

SEQ ID NO: 202774 - DNA, 306 bp, Gossypium hirsutum
agggaatagggttaaagcagttgtgataggtcttggtgcgggcttacttcctatgtttcttcatggatgtatgcaatctatgcaaattgagggagtggagctagatcctgttatgcttaaccttgcaagagactattttggttttactgaagataaacgaatgaaggtacatattgctgatggcatccagtttgtccgggactacagaaacttattttcagctggcaatgaagtgctcctttctttcaacggaagttgcaaactttcagatgctgaaagcagaagtaccgctattgacataattat

SEQ ID NO: 202775 - DNA, 350 bp, Gossypium hirsutum
gctgcatctgcttcagtacatggaagaagtgctgctgcaggaaaagctgcatcaagtgataaaactgctgctcgaattgctatgcacatggctggagagagggcacctgtgaatgctaagatggtgaagagccgttttacaactggtgctgcttcacgatcctttacttctacctcctatgatcctgttaccaaaaatgaatttgagtatgttaaagttgagaaaaatcctaaaaagaaaggttacgttcagctgcatacaacacatggtgatttgaacattgagttgcactgtgatattactccaaggacatgtgagaacttcctcactctttgtgatcaaggctatta

SEQ ID NO: 202776 - DNA, 336 bp, Gossypium hirsutum
gtaccccggatcataaacaactagccttggaagctgctaggcaaggcatagttttgttgaagaactctgggtctttgccgttgtctacttcacgtcatcgtaccatcgcggttattgggccgaattcagatgtcacggaaacaatgataggaaactatgcaggggtggcatgcgattacacgagtcccttgaaaggcatttcaagatacgtgaggactgttcatcaagtaggctgttcaaacgttgcttgcaaagcaaacaatctgtttggattcgccgaggtcgctgcccgccatgctgatgcgacagttctcataatggggcttgaccaatcga

SEQ ID NO: 202777 - DNA, 323 bp, Gossypium hirsutum
atcagtcttcttggtccacaactttggaatctgaaggaaagtcggatcatctacttactatggaagaaaatacagaaaaattggatcaatcttcttggtccatgacttcagaatttgaagggaagtctgatcatctagttgcaaaggaggtatcctctagtaaagttggggttcaacgacattcggaaatagcaactattgatttatttcttgatagatccatcagttgcattcctggtttaagtaaaaggcactctcgccagctagaagaatgtggcttttacactttgcggaaactgttacatcattttcctcggacctat

SEQ ID NO: 202778 - DNA, 344 bp, Gossypium hirsutum
cttcgtcagagatatacaagacattgcctattagggaagagcttttacgtgcctttttgaatgcggatttaatcgggtttcatacttttgattatgcaaggcattttttgtcgtgctgtagtcgaatgcttggtcttacttatgaatccaagagggggtacataggtgttgagtattatggaagaactgttagtatcaaaattctccctatggggatacacatgggtcagctggagtcggttttgagccttccagagactgaagccaaggttacagagcttcttaagcagtattgcgatcaagggaagacaatgttgcttggggtggatgatatggacatattt

SEQ ID NO: 202779 - DNA, 260 bp, Gossypium hirsutum
gcacccagtgaactgaaaaaagaaaacccggaattttaaagacaaaaaaatgccttcttctccgttgattcttctctcaaaaaccatgattttcccagaccaaaaatcaaaccttgaagacctcaagctttcagtttccgatcttcctatgctatcttgccattacattcaaaaaggttgcctctttactcgcccttcaatccccattaattcactgatttcccttctcaaacaatccttgtccaagacgcttgtcgttt

SEQ ID NO: 202780 - DNA, 296 bp, Gossypium hirsutum
attctctgctgctttcagtttccgaaggaaattcgccatttgtctctcgtctgccaatggtgttattttcttcggtgatggtccctatgtgttcctccctggagttgatgcatcagaatcgcttactttcacaccgctcttcattaaccctatcagcacagccccttctttccctctcggtgaaccttccgccgagtatttcatcggcgttaagtccatcaaagtgaacgaaaaacccgtctcactgaatacaacgttactgtccattaacagcgaaggtgttgggggcacaaaga

SEQ ID NO: 202781 - DNA, 295 bp, Gossypium hirsutum
actaagtgcaaccaagagagggagtccatcatcggcaccaaatacagtcagatcctccgagtgcctttcaggactgaaaccggtatcctacgccgatgggtttcgcgtttcgacatttatccttatctcgagacgtttgctcaggatgttacatccaagatcttggatgcaatggagggtaaaccagaccttattattggaaactacactgatgggaacttagtatcatctctagtagctagcaaacttgggataacacaggctacgattgcgcatgctttagagaaaaccaaat

SEQ ID NO: 202782 - DNA, 254 bp, Gossypium hirsutum
gttataaatgactgcagtgagtatgatgttgaaggtgttgaagatgagccgaacttcgatgtgcaagagcgcaaacccaggactatcagttctaatttggtcatggagagaatgagggctatccaacaaccaccttattcgattaagggggaagttgtcagtaatttggatttcacgcgaaagaggaaaccattcaatgatttaaacatgggtggacaaaaaatctacacttgggaattcctccagtggcctta

SEQ ID NO: 202783 - DNA, 298 bp, Gossypium hirsutum
actacatgttcctgttcatgcaatggaatcatctatggcgggttcggatctagagcaatcacgccaaagatgaacaggtgtatcttcatgcgaaggcactggtgcaaccatgtctgatgatcataactaagttctagatagtgataccagcttgtcagatggaagtttgcatgggatcgacagcatgaggtttggaccggtcgctccattcaagactgctagatctctaatggagcgtgttacgcaatagctgaagcacaagctgaaacagtgcttcatagagaaaattgaggacatt

SEQ ID NO: 202784 - DNA, 275 bp, Gossypium hirsutum
gattacgccggcgccgccgtgctcggctggggagacgggtattacaaaggggaagaagataaagagaaagcaaagtcaaaagcttctttatctacaatcgccgagcaacagcatcgtaaaaaggttctcagagaactcaactctttgatttccggttcaaccgccaacactgacgacgccgtcgatgatgaagtcaccgacaccgaatgggtctttttagtttccatgacccaatctttcgttaacggcaacggacttccgggacaagctttttt

SEQ ID NO: 202785 - DNA, 376 bp, Gossypium hirsutum
gccagttccaagcattcaggagattatgagaagcgattctgaatcagttccccaaagatacattcatgaaaataaggataggccaattatttccgaggatttggctgattctcctgaaattcccgtcatagatttctcatttctagccaaaggtaatgaagatgaagtccagaaactacaccttgcttgcaaggactggggctttttccaggtaataaatcatggggtgaaagaggagatcctggagaagatgaaagcagcggtagcagctttctttgagctgccattccaagagaaaaagaaatatgcaaagggcagaaaatgaaatagaaagatatggtcaaaacttttgtggtctctgagcaccaaaagcttg

SEQ ID NO: 202786 - DNA, 324 bp, Gossypium hirsutum
agacacagaacaacaaaaagctcaagcaattataccagagagcacttgctgtcaagtctgcggtaccacatcctagaatcatgggaataattcgtgaatgtggtggcaagatgcatatggctgagcgtcaatgggctgaggcagccacagatttctttgaagctttcaagaactatgatgaagctggaaatcagagacgtatacaatgcctaaaataccttgttctagctaacatgctgatggaatctgaagttaatccttttgatggtcaggaagcaaagccgtacaaaaatgaccctgagattttggcgatgaccaacctta

SEQ ID NO: 202787 - DNA, 222 bp, Gossypium hirsutum
atccggcaaaaggaggattattcagagcgggttcaatggagaacggggatggaatagcccgtgggtggttagggcaccctatctttagagataaagacgggcgtgaactttttgtacgtcgtatgcctactttttttgaaacatttccggttgttttggtagacggagaccgaattgttagagcggatgtcccttttagaaaggcggaatcaaagtatagtg

SEQ ID NO: 202788 - DNA, 245 bp, Gossypium hirsutum
gaagaacacagatacatagaaccaagaaacagaaaaacatgggttctgaaaagcaagggtttatatggttatcagggcttttgtttctaaatatccttgccttatccacagctgaagtcctttattacgagttttttttgcaagaatcccagttcactaagctgtgtagcacgaagagcatcttgaccgtcaatggcagctttccagggcctgagattcgggttcggagaagggacacagttttt

SEQ ID NO: 202789 - DNA, 341 bp, Gossypium hirsutum
ggcacattggcaacttttgttggctttaggattcaacatgacaatgctagaggtcctatgaaaggaggaatcagatatcaccctgaggttgaccctgatgaagtgaatgcattggcgcaactaatgacatggaagacagcagttgcaaacatcccatatggtggggctaaaggtggtataggatgtaaccctggagagttgagcaaatccgaactagaacgcctcactcgagttttcacccagaaaatacatgatcttataggaattcataccgatgttccagcacctgatatgggtactggtccgcaaacaatggcatggatactagatgagtactcaaa

SEQ ID NO: 202790 - DNA, 277 bp, Gossypium hirsutum
tgcggaggaattaaggactgaacttgatgctagtaagttgctggctgacaaaaggaagcaggaactagatatggagaagaaatgtgcagaagaattgaaggaagcaatgcagatggctatggcgggacatgcaagaatgcttgaacagtatgctgatcttgaggaaaaacacatgcaattgcttgcaaggcataggaatattcaagagggaatagatgatgttaaaaaggcagctgctatggcaagggtcaagggtgctgaatccaagttcataaat

SEQ ID NO: 202791 - DNA, 269 bp, Gossypium hirsutum
ggatcatatacggtgcagcagaactacactagcttagacatacatgtagggcagtcatattcgtttctgctaaccacggatcagaatgcaagtagcgattactacattgtagcaagtgccaggtttgtgaatgaatcgcagtggaaacgagttaccggtgttgccattttgcgttattctaattcgaaaggaaaggcattcggtcccctccctgatccaccgcaggatgaattcgacaaaaccttttcaatgaacccaagctagatcta

SEQ ID NO: 202792 - DNA, 252 bp, Gossypium hirsutum
agaaactgatggcagaacatggaaaagtgcaacttgggaatatggctgttgatatggtcattggtggaatgagaggaatgacagggttgctttgggaaacctcattacttgacccagatgagggaattcgctttaggggcttgtcaattcccgaatgtcaaaaactattaccagctgcaaagcctgatggagagcctttacctgagggtcttttatggcttcttttgactggaaagatgccaagcaaagctc

SEQ ID NO: 202793 - DNA, 384 bp, Gossypium hirsutum
atgacattcgctactatatatatgaacttctcaaggcggtatattattgccattcacaaggaataatgcatagagatgtcaagcctcacaatgtcatgatagatcatgagctgcgcaaacttcgcttgatagattggggacttgctgaattttaccatcctggcaaagagtataatgttcgtgtggcttctcggtactttaaagggcccgagcttctggtagatttgcaggactacgattattccttggacatgtggagccttggttgtatgtttgcaggaatgatattccggaaggaaccattcttctatggccatgataactatgatcaactagttaaaatcgccaaggtactatggactgatgagttaaatgcatatttaa

SEQ ID NO: 202794 - DNA, 356 bp, Gossypium hirsutum
aaacaaggcattgcttcacactatatattgagtaccgccgatgtgtaactgcatgaggagaaggtgctacatagtgtgataagtttgcaaggtattatcgtgccttgtgtcctgtagaatggatagatcgatggattgagcaaagggagaatggtacttctccaggtcctatctagatgagatggtacccctatcggtattcgaaaaatccctgttttgactttaatttgcctctggtatatcaaaccgtaacagttgaaccacagatgaatttccaggatgaaagcttaatttctcaggaaatatccaatttgaaaaggatgagttaataattaaatttggcctgtaccctaact

SEQ ID NO: 202795 - DNA, 333 bp, Gossypium hirsutum
attgatactacctcttgagtcagaccaagttcttgggacagtcatttatgctggtgtaaacgcaggtgatgtgaactttagcgcatgccgttattttcaaggaaccaagaaagaccctggatttgatgcaatgggaataattgctgccattggagattctgtaagaaatttgcaagttggaactcctgctgcagtcatgactataggatgttatgctgaattcatgaaggttccttcaaagcaaatacttccaattccaagacctgacccggaaggtgatgctctgcttacttcaagattaacagcatcaatcgctttggaagaacttggtca

SEQ ID NO: 202796 - DNA, 321 bp, Gossypium hirsutum
gtttcacacatctcacttctctgcagtttcactcccggagagagaaaaaaccatggcggccgcagctcaaatcagcaaaaagcgaaagttcgtcgctgacggagtcttcttcgctgaactcaatgaggtcttgactagggaactggccgaagatggatactctggtgtcgaagtcagagttactcccatgcgtactgagatcattatcagagccactcgtacccaaaatgttctgggtgagaaagggaggaggattaaggaactgacctctgttgttcaaaagcgattcaagttccctgaaaacagcgtggagctttacgc

SEQ ID NO: 202797 - DNA, 246 bp, Gossypium hirsutum
ccgcagcctagaaaacacaccttatggcagacaactgtagagtttactgatggtcaagctagcatacataggcaacattttctgcaatgtccccaaaggttgttaaacaaacattttgaaaaactggtccaatgggatatgcgtttgaactgtttaagcagacagccagagataattttggattcaccgtactttgaatcacgaagttctggttttgaggatcccagtgaacctaaagggcatgac

SEQ ID NO: 202798 - DNA, 283 bp, Gossypium hirsutum
agaaagaggggattttccttatagagatagatcgggtgctcaagcctggaggttattttgttttaacctcaccaacaagtaagccacaaggaagttcaacaagtatgaagaaaagaaacatgttaacaccactggaacaatatactgaaaaaatttgttggagtcttattgctcagcaggatgatactttcatctggcagaaaacagccgatgctcattgctattcttctaacaagaagaacgatgtacctttttgcaaaaaaagatatgatgcaccctatta

SEQ ID NO: 202799 - DNA, 307 bp, Gossypium hirsutum
gacggattgaatccttttaaaatcatgagcacctcggacagtacttggcctgtggttcttgttccttataatcagtctccatggctctgcatgaagcaatcttctttgatattatctatgattatccctggagagaaaggccccgtaaatgatattgacatatatctgcagccacttattgaagagttaaaacaattatgggcgggtattgagacgtatgatgtattgagaaaggataacttttacctacgtgctgctttgctgtggacaattaatgatttcccgacatatgcgaatttatctggtt

SEQ ID NO: 202800 - DNA, 298 bp, Gossypium hirsutum
ataggattgaaactgctagctaaggcacgatactctgtggcaagattcaaagaggaacagattgtaatcttatcacaggtcttggcaaatgaagtgaacattggatatgaggacatgagcaaccagcaggttttgaagtttaatggaactcgaataaaaaacattcgtcacctggcacaccttgttgcttgttgccaagacaagtatctggttttcgaatttgaagacaattacctagctgttctggaaagggaagcagcaatggccacctcatctagcattctcaaagattacggta

SEQ ID NO: 202801 - DNA, 319 bp, Gossypium hirsutum
aaacaaggcattgcttcacacgatatattgagtaccgccgttgtgtagctgcaggaggagaaggtgctccagagtgtgataagtttgcaaggtattatcgtgccttgtgtcctggagaatggatagatcgatggaatgagcaaagggagaatggtacttttccaggtcctctctagatgagatggtacccctattgttatccgaaaaatccctggtttgacttttttttccctctgttatatcaaaccgtaacagttgaaccacagatgaatttccaggatgaaagcagaatttctcaagaaatattcaatttgaaaag

SEQ ID NO: 202802 - DNA, 365 bp, Gossypium hirsutum
agcaactcattcattgcagacatccgcagaatcattggttagaaaataaaaagaacaatcatgtctgaaacctctttcgctcgaccaagattggtcactaagaagtttcttcccaagcatcaacgcgagggtgacggtgctgttgtccgcagatgcattggaaggagtgaattgaagactttggatcctttcctcatgatggatgattttacagtgtctcctccggctggatttcctgatcatcctcacagagggtttgaaacagttacatacatgttacagggaggtatcactcatcaagattttgcaaggcataaaggtacaattcataccggtgatgtgcaatggatgacaacaggaagagg

SEQ ID NO: 202803 - DNA, 271 bp, Gossypium hirsutum
gctttcccagctgaaaaatctacaggtactcgatttgtgacaacaataacatgacgggggagttgccggtttccgtcacggagcttcccaatttgcgtcacttgcatttgggagggaactatttcagcggtcagatcccgtcaagttacggccgttgggagcatcttgaatatttagccgtttcgggtaacgaactcagcggtaaaatcccacccgaaatcggcaacctaacgaagctgaagcagttgtacattggctacttcaatagttt

SEQ ID NO: 202804 - DNA, 344 bp, Gossypium hirsutum
agaaagaggggattttccttatagagatagatcggtgactcaagcctggaggttattttgttttaacctcaccaacaagtaagccacaaggaagttcaacaagtatgaagaaaagaaacatgttaacaccactggaacaatatactgaaaaaatttgttggagtcttattgctcagcaggatgatactttcatctggcagaaaacagccgatgctcattgctattcttctaacaagaagaacgatgtacctctttgcaaagaaggatatgatgcaccctattatcaggccttggtaccatgtatttctggaacttccagcaaacgctggattcctattcagaac

SEQ ID NO: 202805 - DNA, 228 bp, Gossypium hirsutum
gagcagtatttaaaatcagctcattcaagctactgctgtatgaaatgagaaagatgaatatgctctgaaagtacaagatgagttgaatgatacaaagatgaagttctctgaagctgaaactgtcatagaacgaattgcagaactcacaaaccgactagttatctcagttaaagatgaagacaataatgtgtttaggcctgttgatgatgtgagcatcgaatttatgca

SEQ ID NO: 202806 - DNA, 343 bp, Gossypium hirsutum
gtttgaactgatgtctcctgttgagtctgtgaaaagggttttaaacatattgcgaggcatttttcatccaaaagggattgttgttcctgatcctgtccaggctgtttgtacccggtggggaaaggatcgcttcacgtatggatcctactctcatgttgctattggttcatccggggatgattatgatattctagctgagagtgttggagatgggagagtcttctttgctggtgaggcaactaataagcaatatcctgccacaatgcatggagcctttttaagtggcatgagagaggccgctaacatgcttatagtggccaagatgaagtcattggttctatct

SEQ ID NO: 202807 - DNA, 226 bp, Gossypium hirsutum
ggagtgctttacacatgggtgaattacgggaaaggggggaaaccgagatggttcgttttgcatgactgaattacatcatattatacaatccacagtcctgataaaatcgtcgttagccaagatacggaaagacgatccaatgttatcggcgaaaaatctcttccgcttatctccgacattgcaattccatatctcgtcatttccaaaaccgtctggaaccctttgg

SEQ ID NO: 202808 - DNA, 332 bp, Gossypium hirsutum
accagttgtttgtctcgttggtctcggtctctttgcgcgaggcttcccattggtgatttttctttgaacactttaatgcttggttgggacaaataatatgctgatataaataatgcagttaatgtatgatacagcttggtaactgcgtggaaatcggcctgcctatgcttattctactgattatttctcaacagtacctgaagcgtgtcccctcgaaagcccatctaatactcgaaaggtttgccttgcttatttgcattggaattgtgtgggcttttgctgctatactaaccgtgtctggtgcttacaacaacgtttaaactgctactaaa

SEQ ID NO: 202809 - DNA, 310 bp, Gossypium hirsutum
  unsure (1)..(310): unsure at all n locations
caacggtgttttgtgattaaaaaaactaccaagattgtggcaaaacaagatggcttccctgcatgaaccatggctagtggagaacgggttgaaggggtctagcaaggagattcgccatggcaggactgcacacaacatgtcgtcttcgtcgttgcggaaaaaatcggacctgacgcttgtttccaaggttcggtatgcaatgcttaggcagttcctcgccaatcttcaagaggtcatattagggaccaagctctccgntctcttcccagctattccattggccattagtgctgaatgttatggatttgga

SEQ ID NO: 202810 - DNA, 253 bp, Gossypium hirsutum
ccaccacgaaacctgccgaaagatcaaggcccttcaccagtatgattgtttgagagctaacaaagcaacatctgcatggggattggaggctcgagtcccattcttagacaagcaattcatcaatgttgccatgtctatagaccctgaatcaaagatgataaaaagggatgaaggacgcattgagaagtggattcttaggagggccttcgatgatgaagagcattcctatctgccaaagcatatcctttacaga

SEQ ID NO: 202811 - DNA, 374 bp, Gossypium hirsutum
ggcatttgctttaattcaagtggtcaatatcatcatgcctatgtcccaatgtggcttggcaatctttccttctttcctttgccatcctaatatctccttctggtatcagaactattatattacgactgctagggaactgcccggatggttggattagaaagctcctatttacatcatttctcagaatctatcacaggcgcaacaacaattcgttgttttggccaggaagacaggttcatggagaaaaacttgagcttaatcgatgaatactctcgtgtagccttccataactccagcacaatggaatggttgtgtgttcgaatcaaattttcttttcaacttcgttttctttcctggtgttggtcatcctggtt

SEQ ID NO: 202812 - DNA, 295 bp, Gossypium hirsutum
cttagttcaaagagggtccaatcgtttcgaactataagagaagaagaagttgcagcaatgttgaatcatattgatatagcttcctcgtcatcagcccctgtaaatcttaaaaaactatcacttttgttagcgaaccacgttgtatgtcgcgttacatttggtaaaaaatacggtggcggaggtgacggtggtacgaacagattcgacagggtgttgcatgaagttcagcatctggtgggagaatttgttgtgtcggattactttccgtggatgtggtgggtgaataagttgaatg

SEQ ID NO: 202813 - DNA, 360 bp, Gossypium hirsutum
acttgacatgctggtggaaagtaacttggatctggaggacctatccaaggattcgatggccatgctttctgagattcagctgctaacccgagcagtgaaaagaacgtgtaggaagatggctgacttgctcatacattattctatcagtagtaacgatggatactcgaataagtatatctttccaccgaatgttgaaggtgctggtggaatcacacctttacatttggctgcatgtacatctggttccgatgatatggtagatgtgctgacgaatgatcctcacgagattgggttaacctgctggagttcccttctggatgctaatgggcagtctgcatatgcctatgctatgatgagaaa

SEQ ID NO: 202814 - DNA, 365 bp, Gossypium hirsutum
aaagggcttctgggtaatgggtaatggtcatggactgcagaaattgaaatcttgcacagttacatcctgccgtggagcgacagattcgggacttgaagctgttggaaaaggttgcccgaatttgaagcagttatgcctcagtaaatgccctttcttatctgataaggggttgtcgtctttagccaaagcagccggttcactagagtgcttgcaactggaggagtgccacagaatctcccagtttgggtttttttgctcccttattaactgtggtgcaaagttgaaggttatttcctttgcaaactgtttaggcattaaggacctaaactcgggattggcaactttattcccttgggaatccctta

SEQ ID NO: 202815 - DNA, 153 bp, Gossypium hirsutum
aaaaaatcttctgatttttctgagtctttttcttatgttctgtttggctcctgagaaagtgttttaagaagaacaatgaatgcattagtggcaaccaacagaaacttcaagctagcagccaggcttcttggtttggattctaagcttgaaaag

SEQ ID NO: 202816 - DNA, 238 bp, Gossypium hirsutum
ggaaagcagcttcaacttcagcttttgggagtgcaagttcagccccatgtcttattgctaatccaatccaccacctacagaccaaacacttctccataggaatcctccctgatggggtcaatcgtagctccgacaattttgtccagaattccgatgccatggaacgtctcttgtctgaccttcaatcccatatcaacaaggttcttgctggaggaggagaaactgctgtgaaaaggaa

SEQ ID NO: 202817 - DNA, 353 bp, Gossypium hirsutum
  unsure (1)..(353): unsure at all n locations
gtttaatgttgttcttgtgtttctttctctttactggaagttctgtcaacattgtatgcagccgtagtctgcaaaaagatcatatcgccttgtttgtctttggggattcagtgtatgatcctggaaataataactacatcgacacgattgctcgggcaaattattatccatatggtgaaaccttcttcaaataccccactgggaggttatctgatggtcgcttaattccagactttattgccgagtatgcaaatttaccactaattccaccatatcttcaacctgngaatcatgaagttactactggggtcaactttgcttcagctggagctggtgctttgnctgaaactaat

SEQ ID NO: 202818 - DNA, 383 bp, Gossypium hirsutum
gaagtcttcaaaaccgagaataagggctggggggtcagggctggtgaaccaattctgagtggcacattcgtgtgtgaatatgttggggagatctttggcgagcaagaggcaaacaataggcttaccaggtatggtagagatggttgcaactatatgttcaacattggttctcaaataaatgatatgagccggttgattgaaggacaagcacgatattttattgatgcatccaaatacggaaatgttttcccgttcatcaatcatagctgctcgccaaatcttgtgaatcatcaagttcttgtggaccgcatggattgtcaccgagctcacattggtctctatgccaggccaagatatatctgtaggtgaagagctgacttttt

SEQ ID NO: 202819 - DNA, 357 bp, Gossypium hirsutum
ggaatgtcctggagttgtttcttgtgctgatatcctggttctgtctgctagagaaggcatcgtttcgttgggaggcccttacattcctctcaaaactggaagaagagacggttgaaggagcagagcagatgttgtggaggagtatcttccggaccacaatgagaccatctctggcgttctcgacaggtttgccgccatgggtattgacacccctggagtcgttgccctcctaggagctcacagtgtcggcagaactcactgggtgaagctggtgcatcggttgtacccaaaggttgaccctgacctcagccccgaacatgttccacacatgctccataaatgccctgatcaaatccc

SEQ ID NO: 202820 - DNA, 302 bp, Gossypium hirsutum
gtggaaggtcacatgactggactgagtgtccgtacggtcaccctggtgagaaggcccgaagaagggacccgcaaaagtttcattactctggaactgcttgccccgattttcgcaagggaagctgtaagaaaggcgattcatgtgaattcgctcacggcgtttttgagtgttggctccaccctgctcgttaccgtactcagccttgcaaagacggtaccagttgtcaaagaagggtttgttttttcgctcacacaccggatcagcttcgcgtgttgccgcagcagagtccgagaggaaatggg

SEQ ID NO: 202821 - DNA, 361 bp, Gossypium hirsutum
gaagagttcaaagaagcaccatattgacagcatggagtgccatgctatgttagagggcttagatgaagaagacagcttataacaaggtggtcaagcctcagagaagaaacggcgtatatctatgcatcaagttaaggctttggagaagaatttcacatgtgggaaacacgttataaccagatagaaaagtgaagttagctgaagaattgcggttacagccaacgcaagtggctatttggctccaaaaccgacgtgctcgttgtaagaccaacgtgttggagaaagattatgcaatgcttaaagctaattatgatgctattaagcttgatcatgacaatcttgaaaaacaaatactgggtct

SEQ ID NO: 202822 - DNA, 267 bp, Gossypium hirsutum
gttttaatcttctgtttctttttaaagttatttatagctggagcttatgaaaaaaatggcggaaaaaggtaaaaccgatcatccggctttgcttcatggaaaatacgagcttggtcgaatgttgggtcacgggacttttgccaaagtttaccatgcacggcatgttacgacggggaagagcgttgccatgaaagttgtgggcaaagaaaaagtgatcagagtcgggatgatggaacagatccagcgagagatttccgtcatgaatat

SEQ ID NO: 202823 - DNA, 288 bp, Gossypium hirsutum
atcatggaatccatgagacaggatgagcctgatttggacggggttattgagcttgtgagggaagtgagggatgaaatatgtgagctggctcctcgaagttggagagaagaaataactgatgctattgatttggaaattcttgcccaggtgctgaagtcaggcaacctggacattcattatcttggacggattctggaattcgctttgatcactttgcagaagctatccgctccagccaatgatgatgaaatgaaggccgctaaccaaaagttattgaaagaattggct

SEQ ID NO: 202824 - DNA, 399 bp, Gossypium hirsutum
ccgcatctttgaggtttgatggagccctgaatgtggatgggactgagttccagactaacctggtcccatatcccaggatccactttatgctttcttcttatgcccctgtcatttcagctgagaaggcttaccatgagcagctatcggtggctgagataaccaacagtgcttttgaaccctcttcaatgatggccaaatgtgacccacgacacgggaagtacatggcttgctgccttatgtaccgaggagatgttgtgcccaaagatgtgaatgcggctgtggccaccattaagaccaaacgcacaatccaaattgtggattggtgccctactggattcaagtgcggtatcaactaccagccaccaaactgttgttccaagaaggggaccttgccaaggt

SEQ ID NO: 202825 - DNA, 359 bp, Gossypium hirsutum
cttcgatgtgacagcagggaccagtacctgcagctgggtgacagccatgctaacgtgtcctaacgaaaagaatcgaccattatctgctgccaaagacatcaaagacttctacctaactaattgacctaacatatttcctcaaccaggatgtccattgttttctcgaacaccaaaagttatcaaagctctatcgggaccaaaatatgatggcaagttcttacataaagttgatagagacaggctacgagaaacaaggttgcaccagacattaactaacgttgctatcccaacatttgatgtcatgcatatccagccaggcatgttttcaagctatcaagtgaaagaagaacctaatttgg

SEQ ID NO: 202826 - DNA, 360 bp, Gossypium hirsutum
cattgattattgttccaacctcaaaagcacaagcagtgcagagaagtggacgtgcagggcgtgaaggacctgggaagtgtttccgtctctatcctgagagcgagtttgaaaagcttgaggattcaaccaagccagagattaagcgttgcaacctctcgaatgtcattttgcagctcaaggccctgggtgttgatgatatatttgggtttgacttcatagagaaaccctcaaggacagctattaaaaagtcattggaggagttgctcttgctaggtgctttaactgatgaattcaaactgtcagatccagttggtcgtcaaatggctcgggtcccattagatccttgtcattctaaagctt

SEQ ID NO: 202827 - DNA, 250 bp, Gossypium hirsutum
ctaatcttgaactgcactgttggagtagtcagaacgggccttgagggaccaaagctgtcttctattcctgtaccgccatcagacatgggtcagaatcttagagctttgttagaatccgaagttgggtgtgatataatgtttcacgttggtgatgagacatttaaagcacataagtagatccttgctgcacgttcacctgtttttaaagcacaggttttcacactcggtggagaccccaacttggataaaa

SEQ ID NO: 202828 - DNA, 387 bp, Gossypium hirsutum
  unsure (1)..(387): unsure at all n locations
cgaaagtggaaatnggctgtgcctgtatnggtacctaacatggtcaagtcaagggtcttgttaatggaactcaggttttttcaattttggctttaaccggcaattcctggaggatgatggttgcgcggagaaagtggtttttgcgcgggtatggatcccaaaacattacaaggtgggaacacactttatgttcctgtaacacagaaaggatactggcagttcgatatgggtgatgttctgattggtgaccaaacaactggactttgtgccagtggctgcagtgctattgttgattccggaacttccttgttgactggacctacggctattattggtcaaggcaatcttgctattggtgcaacaggggttgtaagtcaagaatgccag

SEQ ID NO: 202829 - DNA, 315 bp, Gossypium hirsutum
gttgttgcatgatttgttggacttgaaagggaacatccgggtattttgccgagtgcggccattcacgttggaagaaagtataggaagaggtataggagctgtagtagctttggatacaagtaaccttcttttaaaacttggtgataacaaaactaaaagatatacatttgacaatgtgttccagggttcatcccaagatggagttttctctgaagttgagccagtcatcaagtcagtccttgacgggtacaatgcctgcatttttgcttacggtcaaacaggaaccgggaaaaccttcacaatggaaggtacctt

SEQ ID NO: 202830 - DNA, 280 bp, Gossypium hirsutum
gctcgtcgtatggatctcaaccgtcaatcataatagtaaggatctccaagacgaccacgttgctaaatcactgacgactctatcctccagatctgagttcaataaaaaggcttctttaatcgggtcgggtatccatgaaacctctcaaaagattggtcgacttgctaaattggcgaaaaggctcatcaatgtccgatgatcccggtgttgaaaatacaagaactgacttgcgtgataaaaactgatattaccaccttgaatatggcactttcctgattta

SEQ ID NO: 202831 - DNA, 357 bp, Gossypium hirsutum
gaagtctgtgacgtggtcctccatgctgatgccatggacagaggtggtgggcagatgattccaacagctaggagggctttctatgcttctcagctcacagccaagccaaggcttctcgaacctgtttacttggtcgagatccaagccccggagcaggcacttggtggtatttacagttgtcttaaccagaagcgtggacatgtatttgacgaaatgcaaagacctggcactccactttacaacatcaaggcataccttcctgtcattgagtcctttggattctctagcactgtgagggctgcaacatcaggacaagctttcccacaatgtgggtttgatcactgggatatgatggca

SEQ ID NO: 202832 - DNA, 375 bp, Gossypium hirsutum
cagcgtagaggcccatcctcggccgatactcttctggtctcaagatcggaatcgtgggactgcctaatgttggaaagtctactcttttcaacacgctcactaagctttcaataccagctgagaacttccctttttgtacaatcgagcctaatgaagcccgagttaatgtccctgatgagcgattcgaagggctttgccaatggttcaaccccaaatgtgaggtttcagttttcctagaaattcatgatatacctggactggttaggggtgctcatgaagggcaaggatcgggcatcaacttcttgactcacattcgtgcagttaatggcatcttccatgttttacgcgcttttgaagattcagacataatccatg

SEQ ID NO: 202833 - DNA, 304 bp, Gossypium hirsutum
ctcatatccactttggaggaaatttctgttgtgggcgcccaataaacatgcagagactccaacaattgcgttcaacaggcgagtacagtgacattagcatttacattgagggtcaaggtctcattgctcgggctcataaagtcattctcgggttatatagtgtcccatttacaaagatgttcacgaatggaatgtgtgagagcaactcacctgaggtttgtttaagggatgtgtctccagcagcattgaaggctatgcttgaattcatgtactgcggagatctcaggattgaagataatgaaga

SEQ ID NO: 202834 - DNA, 253 bp, Gossypium hirsutum
gtttgatgcatagaggaattctatctgatcctcatcgatgtcttgtaaaaaatggccagcttttacagtttcttaggatattaaaggagaaggggaagagacttttcttgctgacaaattcaccgtattactttgtggatggagggatgcagtttatgttggaggattcaacgggcaacagcgattcatggaaggagctttttgatgttgtaattgcaaaagccaataagccgggtttctacacttctgagca

SEQ ID NO: 202835 - DNA, 268 bp, Gossypium hirsutum
cactgtttttgttgatagcaaaaaagctaaacaaagggatgaatgtcatggatagatactcttcgtctgtaagacgggaatgagctgatcgacaatgacttttttattgcatgtacccttggtagctgcattaaatggtttcaaacatactctctagatcgctatgatatcatggatgactctgacacacgcataggtcatgcatgttaggtcacacttccttactttgggatgattgctattactgatgcattaagactgcgaatcc

SEQ ID NO: 202836 - DNA, 347 bp, Gossypium hirsutum
attgggttcctactggtggacctgatctgatcgtcggtgatggtggtgatgctagtttgttgatccacgaaggtgttaaagctgaggaagtttatgagaaaactgggcaactcccagatccggcttcgactgataacgctgagtttcagattgttctaaccattatcagagatgggttgaaagcagatcccaagaagtatagaaggatgaaggagagattggtaggtgtttctgaagaaactacaactggagtaaagatgctttatcagatgcaggccaatggtaccttgctgttccctgccattaatgtcaacgactctgttactaatagcaagtttgataacttg

SEQ ID NO: 202837 - DNA, 295 bp, Gossypium hirsutum
  unsure (1)..(295): unsure at all n locations
aagcggtgaatcatagagtgatgatgagcggagataaagatcgatattcaatagccgccttcgccattccaggtgagggtaccataattaaggcacccaaagagcttatagatgagcaacatcctcagctttacaaggactntaatttcatggacttctttcgttttgccttttccgaccgcgcaaagaacatcgaatccggccaacaactccacgcctttgcttctctctcaccacccatttccgattaaaaacatgcccgctttgacaagttaaaagcccggtttcgctcaaa

SEQ ID NO: 202838 - DNA, 354 bp, Gossypium hirsutum
atgcacagaaagattgcatccaaagaccacaagctggtgtattgggtggctggtgctttatctgctctttctgtattgctggtgaaaaaatctagacgcagcgaacttgctctatatgttcttccacgagccacagaatcgttgtggtatatttcagtaaatcggcaccttcttcctgatgttaaaaattctgaggtggcgttattttgtgcatgcatgggaggaatcatgtactacctagaatatgaaccagatagcatagcaccattccttaagggtcttatccgccggttcctatctagcagaataagcaaccccggcagttcatttgatcggaccgcttcctacacctac

SEQ ID NO: 202839 - DNA, 364 bp, Gossypium hirsutum
atcaatttgaagccttcttcgaaattcctctttcaagatgcaaattttcgtcaagaccctgactggcaagaccatcacccttgaggtggaaagttctgataccatcgacaatgtaaagaccaagatccaagacaaggaagggatcccaccagaccaacagaggcttatctttgctggtaaacagctggaggatggccgtacccttgctgactacaacatccagaaggaatccacactccatttggtcctccgattgaggggtggtatgcaaatttttgtcaagaccctcaccgggaagaccatcacccttgaggtggaaagttctgataccatcgacaatgtaaaggccaagatccaagacaaa

SEQ ID NO: 202840 - DNA, 373 bp, Gossypium hirsutum
agccaaatttgaacatcaataataaggggaaagcaagtgttgaaaaacagagtaaaagggggaaaaagttgagaacaaatgggagatgttattttgtttgtcgataatttctcatcgaattcttcaatttcactctgtagaatttgccatgaagaagagttggaaagctttaagagcttggaagttccttgtgcttgttcaggcactgttaagtttgctcatagagattgtatacagagatggtgtaacgagaagggaaacacaacttgtgaaatttgtcttcaggaatatgaaccaggatatacagtaacagttccttcaaagaaggctcagctgattgaagatgctgtaaccatcagagatagcctacaaa

SEQ ID NO: 202841 - DNA, 411 bp, Gossypium hirsutum
cctattgcaagtgatcttactttctcaaggtactggaattgcttgaggaagcaaacattggttttggaatcatatataagcacggttaattggctaatgaatagagcactgtttttaacccacttctatctgtcatggggatttgttgcaccgtacttcatggctatggttcatgttgcagcagcactacaaatctatataaaagattattcatatggcgaaacaacctgtacttctggtggattgttattggcaatttggctagctatatgtaccttcacggagctactttctatgtggaacttaacaaggattgaagttcaactatgcaacattttatctccagaggcacctaagctctcacttgattattacaactggagcatgatttttgttgcaatgctggttgat

SEQ ID NO: 202842 - DNA, 394 bp, Gossypium hirsutum
ccggaaactgatcctaccgtttattcattcactcttgctgcttattctcccgatgaccatgttcgttccagaggctgagcttcctgcatgggttgtttgttacatccctgctacaatgtcgttccttaacatccttccggcaccaaaatccttcccgttcattgttccttaccttcttttcgagaataccatgtcggtgaccaagttcaatgctatgatatctggtcttttccaactcggcagtgcatacgagtgggtcgttacgaaaaaatccggacgatcttcggagggtgatcttgtttcattggttgagaaaaagccaaaacaccatcgggttggatcagaacccaatcttgaggaaatgaaagctgatctccagcaagaacaggaacaa

SEQ ID NO: 202843 - DNA, 410 bp, Gossypium hirsutum
  unsure (1)..(410): unsure at all n locations
caatgattttattgttggcaggaaagctgaacagagggttgtctgtcattgatagctacaatttgttgaaagaagggaaagagctgagtgatgatgaattttttcttgcatgtgcccttggttggtgcattgaatggcttcaagcatactttcttgttctcgatgatatcatggatggctctcacacacgcagaggtcatccatgttggttcaggcttcctcaggttgggatgattgctatcagtgatgccttaattctgcgaaaccaaatcttcagaattctcaataagcactttagaggaaagccttattatgtatatttactagatttattcaatgaggtgangtttgtgttgcactgacttgagactgccgatgttcactcgcatttgatataatcaagtgctgct

SEQ ID NO: 202844 - DNA, 404 bp, Gossypium hirsutum
catactttcaaggttgtaggaaagtgaagaaatggggaggatttgttgtattggagctgggtatgttggaggtccaacaatggcagtcattgcactcaactgtccctccattgaagttgtcgttgttgacatctcggctactcgaatctcagcctggaacagtgaccaattaccaatctatgagccaagtcttaatgaagtggtcaaacaatgcaagggaaggaacctgttcttcagcaccgacatataaaaacatgtctccgaagcagacataatctttgtttctgtaaacacgcccaccaaaacccgaggtctcggtgctggcaaagctgcggaccttacatattgggaaagcgcagcaaggatgattgctgatgtatcaaaatccaacaaaatcgtcgtcg

SEQ ID NO: 202845 - DNA, 413 bp, Gossypium hirsutum
ggaatctatgaccactaatccaatggcatgggaaggttgagttaacccaagggtgaagcaaatggagcaagctcagaattgtctccttcctatgggtattacgtcagagaacgttgctcatcgctttggtgtgacaaggcaggagcaggatcaggctgcggttgaatctcacaggaaagcagctgctgctacagcttctggtaaattcaaagatgaaatagtccctgtggccaccaagattgttgatccaaagactggtgatgagaaacctgtcacaatctctgttgatgatgggatccgagctaacacatcagtgtcagatctgggaaaattgaaacctgtattcaagaaaaatgggaccactactgctggaaattctagtcaagtgagtgatggtgctggagctgttctgc

SEQ ID NO: 202846 - DNA, 407 bp, Gossypium hirsutum
ctggaatgttgttgaatatgtggatttttcaggaagggatttctcaagtgcaattccggacaaagtttgtgatcggaataatgatttgagatatcttgcctttagtggcaatctactggcagggattctaccacgatctttgattaattgcggtgaactggtagtttttaatgttgtagacaacaagttaagtgatacttttccccattggctaagcatgcttccaaaacttcgagtccttattttgagatccaacagatttcacggttcgattcaaagttcgataccaacatctttcttctccaaattgcaaatcattgatctctctcataatcacttcacttgcctattgccaactcagttcttccaaaatctcaaggcttctgaaaaaagttgaataccgaaat

SEQ ID NO: 202847 - DNA, 379 bp, Gossypium hirsutum
gacaacccttgctgttcttcccactgtttggctcagagacctcagtgtccttagttatatctctgctggtggagttgttgcatcattcttggtagtgttgtgcttgttttgggttggattggtagatcaagttgggtttcagaacaaagggacagtattgaatctttctacacttccagttgctgttggactttatggtttctgctactcaggccatgctgttttcccgaatatatatacttcaatggcagaaccaagaaaattctcttcagttctcttatcatgtttcggaatctgttctttgttgtatgctggaacagcagttatggggtacaaaatgtttggagaagcaacagaatcacagtttacacttaacatg

SEQ ID NO: 202848 - DNA, 362 bp, Gossypium hirsutum
gacaaatctaatgcttagcggcctagaaaacgtgagcgagaagggattttgggtcatggggaatgctcaaggcttacaaaagttggtctctttgacgatcacatcctgccggggggtaacagatgtgagtcttgaagccatgggaaagggatgtgcaaacctgaggcagatgtgccttcgctggtgttgctttatttcggatgacggattggtggcttttgccaaatctgcaggttctcttgagtccttacagttagaggagtgcaacagaatcacccaatccgggactattggtgtcctctcaaactgttcgttaaaatcccttaccgtagtaaagtgcatgggaattaaggatatatcct

SEQ ID NO: 202849 - DNA, 375 bp, Gossypium hirsutum
gttgtatacaaaggaacgcttgcagatggtactttggtggctgtgaaacagatccttgatttggatttggaaagccacgaagatttctcgaatgaagtccagatcataagcaaaatcagacaccggaaccttctttcgctccgaagttgttgtgttacgagtgacataatgaaaggcagaagaagatatctggtctatgatttcatgtcaaatggcagccttggtgaccatctattcaatgatttcactaggcaaaaactgagctggcctcaacggaagaacataattcttgatgtagcccagggtctagcttacttacactatggaatcaaaccatcgatttatcatcgagacataaaagccaccaacatacta

SEQ ID NO: 202850 - DNA, 377 bp, Gossypium hirsutum
ccggaaactgatcctaccgttttattcattcactctttgctgcattattctcccgatgaccatgttcgttccagaggctgagcttcctgcatgggttgtttgttacatccctgctacaatgtcgttccttaacatccttccggcaccaaaatccttcccgttcattggtccttaccttcttttcgagaataccatgtcggtgaccaagttcaatgctatgatatctggtcttttccaactcggcagtgcatacgagtgggtcgttacgaaaaaatccggacgatcttcggagggtgatcttgtgtcattgggtgagaaaaagccaaaacaccatcgggttggatcagaacccaatctttaggaaatgaaagctgatc

SEQ ID NO: 202851 - DNA, 409 bp, Gossypium hirsutum
gcggcggctgctgcttctcaggcagccgcagcctccgtgcccgtctctgatgacgtggcggttgtagaaggttgtattgacaacgatagtgtacagattggggattcatatgattccaagacatcgtttttgatctccgatgggagcatcactgttcatgctggtgaaagattaggtcgcggtatagttactgatgcaattactactccagtggttaatacttctgcatatttctttaagaaaactcaggagcttattgacttcaaggaaaaacgccatacaagttttgaatatgggcggtatggaaatccaacaaaatttattggtggacacaatgatgtccttgctggttgtataagtggttctgagaagttggttacagaaattcgtactttgcatcatattttgg

SEQ ID NO: 202852 - DNA, 412 bp, Gossypium hirsutum
agattctggttttgcttgcagggttgctcgagaacgcggaattggctttggattcactctccatttgcatgacgatatctggatgggtgtttatgatttcggtggggttcaatgccgcagcaagtgtaagagttgggaacgagctaggagcgggacatccaaaatcggcggcgttctcggtggtcatagtgacggtactttcattcataatctcggtggcggcggcaataataataatggttctacgtgatgtcattagctacgccttcacagagggtgaagtggtggcggaggctgtttcagatctctgtccgcttctagcattaacccttatcctcaacggagttcagcctgttttgtccggggtggcagttgggtgtggatggcaaacttttgttgcatatgtcaacgt

SEQ ID NO: 202853 - DNA, 338 bp, Gossypium hirsutum
agatctacaaaatttgcgcatatcactttcccctgggtgcagtatttctctgaccggtgcgcgatggtgtttttgaagggagtatcagcgctatccaggctaaggtcacgtgttaaacagcattccagtctcagcaactctgttagatggcttcaaatgcagtcctctttcgatcttgatcttcattcgcagttgaaggaattgattcctgaacaacatgagcgcctgaagaaactgaaggcagaacatgtaaaagtgcaacttgggaatattactgctgatatggacaatggtggaatgtgaggaatgacagagtttctttgggaaaccttattact

SEQ ID NO: 202854 - DNA, 272 bp, Gossypium hirsutum
gcagtttggtgttacctacttagtgactcacaatgaaagcggtcagcaattcgcttgtgaatccatcgccacccgtaagcttatcaaccgcgatgacatcgaagacgtccgccgagaagtccacattatgtaccatgtaaccggccacaggaatattgtggagctgaaaggggcttatgaggatcgtcactccatgaatctgataatggaattgtgtgcaggaggtgagttgtttgaccggattataacgaaaggccattattcagagaggg

SEQ ID NO: 202855 - DNA, 373 bp, Gossypium hirsutum
ctttctttgttttttcttttttacaaatggatgcttcacagaaaactattcttgttactggtggtgctgggttcattggcactcacacagtggtacagctactcaatgaaggttttaaagtgtcaattattgacaatcttgataactctgttattgaggctgttgatagggttaaggaattagtgggtcctgagctctctaagaaactccagttcaacttgggtgatttgaggaacagggatgacttggataagcttttctctaagacaaagtttgatgctgtcatccattttgctggccttaaggctgttggggagagtgtcggtaaccctcgtcggtattttgacaataatttgattggcactatcaatct

SEQ ID NO: 202856 - DNA, 393 bp, Gossypium hirsutum
caacctccctcctcctcttcaactccacagatgagtttagaagaaaagtttaagattataagaagtgtacgggaagaatgtattcaagaggatgaactgctaaatcttctaaatcacaaacctgaacccatttgctatgatggcttcgagccttctggcagaatgcacattgctcagggagttatgaaggcaataaatgttaacaaactgacctccgctgggtgtagagtaaaaatctggattgcagattggtttgcacagctaaacaataaaatgggtggtgacttgaagaaaatcaaagtagttggacagtatttgattgaaatctggaaagcagttggcatggacctgaatgaaaaggttgaattcttgtggtcttcagatgaaattaac

SEQ ID NO: 202857 - DNA, 411 bp, Gossypium hirsutum
gtttcacgcaaacatatgggatagacttcacagaaacttttgcacctgtggcaaagcttaacactattcgagtactcctaagtttggctgtaaattgcgattggaaattacaccaacttgatgtaaaaaacgcatttcttaatggcaagcttgaggaagaagtctatatgcaattgccacctggctcaaagtctattgaaggtagcaacaaggtttgcaagctcaacaagtctctatacgggttaaaacaatcacccagagcttggttcgagaggttcactaaagtcattcttcaaaatggctacaagcagtcccttgccgatcatacgcttttcatcaaggtaacttctacaaataagaaagctatcctaattgtgtatgtggatgacatcattcttactggagatgatg

SEQ ID NO: 202858 - DNA, 386 bp, Gossypium hirsutum
ccacagtggagcaatgcggataaagctttgacaacgttgaggaatggacctttaattgagtactcgaagaacagatgaaaagctgatcgtgcaacacctccatttctttccccccatttgcattatggggaggttagtgtccgaaaagtctttcatctcgtccgaatgaaccacgttttatgggctaatgaaggcaacaaagctgctgaaaagagtgctaacttgattctgaagtctattggctagagggaatactcaagatacttgagtcataaccatgcttacagtcatgaaaagcctcttctcagacatcttaagtccttccctagggttgacaatgatgggttattcactgcatggagacatggaagaacacgttatccatt

SEQ ID NO: 202859 - DNA, 215 bp, Gossypium hirsutum
gaaacgagtagtcggggatcctttcaagaccgggatcggacaaaggcctcaaattggtaatgaaccattcaagaagaaccttaagtacctaaaggctggccttgaaaggggggcctactttggaatctgaagtgaacaatttggctcccaaagctactatattccacccactgttttctccaatggtcaagatgacctgttgatagctaaggatg

SEQ ID NO: 202860 - DNA, 387 bp, Gossypium hirsutum
  unsure (1)..(387): unsure at all n locations
aaaacacatcagtggtctgtcaaacttgaggagtctcacttttcggagaaacagtgcaatcactgcacaaggaatggcctagtaaacctgatgaagctggacctggaaaaatgtcctgggattcatggggggcttattcacatcaaaggtttgacaatgttagagtctcttagtattaaatggtgtaattgcataacagatgctgatatgaagcctctttcagggcttacaaacttgaaaagcttacagatttcctgtagtaaggttacagattttggcatcacttatttaaaaggtctgcaaaatctttctgttttgaacttggagggctgcccagttacagcttcgtgctttgatactctttcagtgcttgtatctctgntatat

SEQ ID NO: 202861 - DNA, 391 bp, Gossypium hirsutum
ctcgcattttgtgctgccggcaaaccaaagttggagggcggcaatggccaacacgccaatcgggctacaaccaatggtcctatccctatcatcctccaagaacaacgaatacagactcactaatcgactccaagagggcaaacgccccctgtacaccgtcgatttcaacttcatcgactctcgttacttcaacgtgtttgccactgacggtagtcatcgggtgacggtataccactgcctcgcatgaggagttatagctgctttgcagccttatgttgatgaacataacgatgaggctttctacactcgtaacttgtgcctgcaacattgatggcacaccatctgtggttgctgcaggaactaatggcataatccgcgtaattgatgcgag

SEQ ID NO: 202862 - DNA, 384 bp, Gossypium hirsutum
gcaagtttcaatggcaaaggcaaacattctcttggtttgcttgtgttcactgggattgctactgcttgggggtgttggagtggaaggaaatccgaattacagagatgcactacaaaaatcctttctcttcttccaaggccagagatcaggcaagctgcctgccaatcagaaagtttcatggaggtccaactctggtctttctgatggctcccttgaccatgtagatttgactggtggctactacgatgctggagacaatgtgaaatttaacttcccaatggcattcaccaccacaatgctttcatggggtacacttgaatatggaaagagaatgggtccccagttacaagaagcaagggcagctattcgttgggcgactgacta

SEQ ID NO: 202863 - DNA, 406 bp, Gossypium hirsutum
  unsure (1)..(406): unsure at all n locations
ggccaaacggtgtcagatctttgtgatctataaccggaggggtcatttccagttcgacgatctcatccttcgatctttccactttcttcagcctaccatgaatcccgaatatgactatcttttcaagctacttcttattggaaattccggtgttggaaaatcttgccttcttttgagatttgctgatgatccatatgtacaaagttacatacgcaccattggggtggattttaaaatacgcactgtggaacaggatgggcagaccattaaacttcaaatttgggacactcgctgtcaagaaagatctacgacaattactagcagctactacccgggggctcatggcataataactgnttatgatgtgacagaccaagaaagcttcaataacgctaggcaatggctg

SEQ ID NO: 202864 - DNA, 420 bp, Gossypium hirsutum
aaacaaatgccccaagaaaatatcaaacacgacaatgcggaatccaatgcgtccgtaccttcttctatctctagttttcttcttcaacctgtatcattcaatggcagtttcagatcctactcatcaagcccttcttcaatgtttaacccaatccattcccactgacacagcttcctccattatagtctctaaatccaacccttcatatacttctgttctacgtgcttacattcgtaacgcccgtttcaacacttcttcaacccctaaaccactcatcatcatcactcctttagatgaatcccatgtttccgccgccgttatttgttcccgaaaacttgggtttcaactcaaaatccgtagcggcggccatgattatgaagggttgtcttatggttttgataaaacccttttttggtctcg

SEQ ID NO: 202865 - DNA, 383 bp, Gossypium hirsutum
cggaaccaccggcgatgatactactcgtaaaagagaaagggctgccttcttggctgaaacttcccatgaaactacaggtgggtggccaactgcaccggacggtccatacgcatggggatattgctatgttcaggaacagggcaaccctggagattactgtgttccaaatcaacaatggccttgtgcccctggtaaaaaatattttggccgtggtcctattcagatctcttacaactacaactatggtccagcaggagaagcaataaaggctaatattctgaatgaccccgatttggtagccaaggacccgaccatttctttcaagacaggtctttggttctggatgactccacagtcaccgaaaccttcaagtcacgatgtca

SEQ ID NO: 202866 - DNA, 305 bp, Gossypium hirsutum
cgttagccggtgacggtttcgacaccgtcatcaaggcgaggcaagcggtcgatgcggttccgagttgtagaaacaaagtttcatgtgctgatattttggcaatggcgactcgtgatgtcattgctctgtcaggtggaccatcttatgcagttgaattggggaggttggatgggttaagctccacagcagctagtgtcaatggcaagctgtctcatccagatttcaccttgaaccagctcaactctatgtttgcagcacatggactcacccaaactgacatgattgctctttcagctgcacacacc

SEQ ID NO: 202867 - DNA, 319 bp, Gossypium hirsutum
gagctacttaaccatttcccaaatcttctccctcctcgtgtgtagcgtccttttcatttccgctcatgcagcgcgctttgaaatccccaatgagtgctcctacaccgtctgggcaacaagcttttctgggggggggccgtcgactaaaaccctcggaaagttggacccttcgatgtgcctgctggcactgctatggctcgtatttggggtcgaaccaattgcaatttcgatgccaagggtaggggtcattgccaaaccggtgattggggtggacttcttcaatgcaaaggttggggtgtaccttcaaacaccctggctg

SEQ ID NO: 202868 - DNA, 322 bp, Gossypium hirsutum
cggagaatgataaatgggagtatgtgcgttaattaatttaatcctgtaccaactgtcccggagacaatatgataggcaaaaatcagggcagatggtgctttgattgatgcaacatacacaaacatattactaaccaggttagtgacagtgtgttttagaagcttgtatgccatatggcatcgtcgccctccccgcatcgctgatgcacttcctgcatcctctccacggacttgcaaatgccactgcagctccaatcaaaagatgcaccacatggattccctgcttgagctttccactcgcaatccaagagagtaccacaagc

SEQ ID NO: 202869 - DNA, 407 bp, Gossypium hirsutum
gctcgagatcctattatggttccattgcctctctgaatcggagtttccgatccgtaatcaggagcggagagatctacaagtcaaggaggcagaagggtgttactgaacattgggtttacttttcttgtgacctccttcaatgggaggcatttgatccaatccaatgcaagtggatgcatttgccaccgatgcctcccaatggttgtttcatttttggggacaaggaatccttggccgtgggaactgagttgcttgtatttgggaaggaactgaattcccaagtgatatatagatatagtattttgacaaattcttggactttcgggactagtatgaattctcctaggtgcttgttcgggtcagctagtcttggagagattgcgattttagctggtggctgtgattct

SEQ ID NO: 202870 - DNA, 414 bp, Gossypium hirsutum
gttaaggaaagtatgcgttatcaagatgcttagcaggggtactttggataaagtatatagtcttcgccgtcaagaagtacgagaaaccataggttatttatatagtaaggccggttcgcctgtaaacgtgggagagcagatgtttttaactatcttgaatgtggtgaccaatatgatatggggcgggtccatggaaggggaggccagggcgagccttggtgcagagttcaggcaagtcatctcagaagtaacagaacttttgggtctacctaatgtttcggatttcttcccggcgttggccccgcttgatttgcaaggtgcagtgaaacgtgtccgaaaatcaacggagaagttggacgcaattattgataagataatcaatcaaaggttggaggagaagcaaagtgggcacac

SEQ ID NO: 202871 - DNA, 355 bp, Gossypium hirsutum
tataaaaaatggctgctcctataacaatgctgattctttgtacatcttttttatcccttagtttactttctactgctttcacttctcgagattacgctgatgctcttgaaaagtctattcttttctttgagggacaacggtcgggtccgttgccgtctaatcaacgcctcaaatggaggggtaactctggtttgtccgacggtgcttcttatcacgtggaccttgtgggtggctattatgatgctggagataatgtcaagtttggccttccaatggccttcaccacaacaatgttggcatggagtgttattgaatttggcggttcaatgcatagtcagattgggaatgcaaagac

SEQ ID NO: 202872 - DNA, 384 bp, Gossypium hirsutum
  unsure (1)..(384): unsure at all n locations
gttcttggaatcgatggaggatataagggttcttatgcgagagaacactatcaccttaacacctaagtttgtcgatgatatccataaacgtggaggtaccattcttggaacttctagaggaggtcatgattcttgcaagattgttgaccgcattcaagatcgtgggatcaatcaagtctatataatcggaagggacgggacacataaaggagcaacttggatttttgaaggaaataagccacgttgttttgaagtagcttgtgctggaaattcccaaaaccatggacaatgacattcccggtattgacaaatcattttggtttcgatacttgcggttgangaagctcaacgtgccattaaagcagcacatgttgaatctgaaag

SEQ ID NO: 202873 - DNA, 416 bp, Gossypium hirsutum
aaacaaggcattgcttcacacgatatattgagtaccacgcggtgtgtagctgcaaaaggagaaggtgctccagagtgtgataagtttgcaaggtattatcgtgccttgtgtcctggagaatggatagatcgatggaatgagcaaagggagaatggtactttttcaggtcctctctagatgagatggtacccctattgttatccgaaaaatccctgttttgactgttttttccctctgttatatcaaaccgtaacagttgaaccacagatgaatttccaggatgaaagcataatttctcaggaaatatccaatatgaaaaggatcagttaataataaaatttggcgtgtaccctagcttagactagatcaatggaccatacaattgtgtagctcataaaatgaaattcattgctcat

SEQ ID NO: 202874 - DNA, 298 bp, Gossypium hirsutum
acaggagcaaaatgctgatactccacaaacggtagtccaggaccaacttgatgaggctcaaggactgcttaaaaccaccaacttcaccggtcaatcaaaagaggcaagactagctcgggtttgggctggactttcatcccgtctccaagaatacaaatctgagaatgcacagcttgaggagcttctaattgctgtaaaggagctgaagtaatcttatgaggctcggaaaaacaactgcagcaagatttatcttgatctaagaagtgaagtaccaaggtagagtcaaatatgcctgatg

SEQ ID NO: 202875 - DNA, 399 bp, Gossypium hirsutum
attcgccgcacggcatcagtctcatcaggcggcgaagagtgtctcacaggaagtgtgaacacccaaggcatggctcccttggatttcttccgaggaagcgagcttctcgtcacagagggaaagtgaaggcatttcctaaggatgacccaagcaaaccttgcaagctcactgcctttttgggctacaaggcaagcatgacacacattgtccgagaggtcgaaaaacctggatctaagcttcacaagaaagagacatgtgaagctgttacgatcgttgaaacccctcctatggtgattgttggggttgttggttatgtcaagacaccacgtggtctttgcagcttgaacaccggttgggcttagcatctgagcgaagaagtccaacgtaagttctacaagc

SEQ ID NO: 202876 - DNA, 387 bp, Gossypium hirsutum
gttgagaaagtgaggattaagtgtctggggtatcaagagagggctaagatttctaagaatccaactgggaaaaagctgtttgagattatggttaagaaagagagtaatctctgtttggcggctgatgttgccactgctgctgagttgcttgatattgctgagaaggttggacctgaaatttgcctattgaagacccatgttgacatattccctgatttcactccagagttcggatctaagcttcgcgcgattgcagaaaaacataacttcatgatatttgaagaccgtaaatttgcagacatcggtaacacagtaacaatgcagtatgaagggggtatcttccgtattttggaatgggctgatattgttaatgctcatataatctct

SEQ ID NO: 202877 - DNA, 365 bp, Gossypium hirsutum
gttcgaagcttgtgggagaacagtgaaccctgtgaacggagccgtggggcttttgtggaacggaaactggcacgtttgccaagcggcggtggaaaccgtcctgcgaggaggatctctacgttccatgcctgaattcatggctccgacgccagcatccgacgaagcgtccgaagccacgtgcacggacatgtggaaattgcgggagacattcacgaatctcaactccaactgtcgattctcaaattcgagatccagggtttcacccaagcgtaaaagagtcgaagaagaattcaagaaactacagccctctgatctaaatcttggcttgaccccgagcttttcgggcaagcgagttaccgataatc

SEQ ID NO: 202878 - DNA, 385 bp, Gossypium hirsutum
atgacattcgctactatatatatgaacttctcaaggcatgagattattgccattcacaaggaataatgcatagagatgtcaagcctcacaatgtcatgatagatcatgagctgcgcaaacttcgcttgatagattggggacttgctgaattttaccatcctggcaaagagtataatgttcgtgtggcttctcggtactttaaagggcccgagcttctggtagatttgcaggactacgattattccttggacatgtggagccttggttgtatgtttgcaggaatgatattccggaaggaaccattcttctatggccatgataactatgatcaactagttaaaatcgccaaggtactaaggactgatgagttaaatgcatatttaaa

SEQ ID NO: 202879 - DNA, 403 bp, Gossypium hirsutum
ctgacagctctctctttattcgacgatcgggagggcaccttgtctatgtactagtctacgttgatgatattatcatcacgggtactgactctgttgctattgataggtttgtcaaagatctagatattcacttctccttgaaagatttgggacggctgaattattttcttggtatcgaagttacgtcaacattacatggtgtctctttgagtcagaagaaatacatcttggagttacttcagaaagcttccatggacaagtccaaggcttctcctactccaatgatgaccacttgtagaatttctgctcatgaagggactccgatggaagatgaacacttgttcaggagcattgtcggtgccttacaatatgtggtcataactagaccagacattgctttttc

SEQ ID NO: 202880 - DNA, 412 bp, Gossypium hirsutum
gccacttgatctacaagcttggaggtattgacaagcgtgtcattgaaaggtttgagaaggaagctgctgagatgaacaagaggtcattcaagtatgcttgggtgcttgacaagttgaaggctgagcgtgaacgtggtattaccattgatattgccttgtggaagtttgagaccaccaaatattactgcactgtcatcgatgcccctggacatcgtgactttatcaagaacatgattactggtacctcccaggccgattgtgctgtacttatcattgactctaccactggaggttttgaggcaggtatttccaaggatggacagacccgtgagcatgctctgcttgctttcactctcggtgtcaagcaaatgatctgctgctgcaacaagatggatgccacaacccccaaata

SEQ ID NO: 202881 - DNA, 406 bp, Gossypium hirsutum
acggtggtgatgagtgaaggtacagttccacttgaagggcaaattcgaacaaaggagatgcatctgcaagctgagtttggctttgcagctcactggagatacaaggagggtgactgtaagtactcttcatttgtacttcagatggttgagtgggctcgatgggttgtgacttggcattgtgaaacaatgagcaaggaccaatcgtcaatatgctacattgattctgtcaagccaccctgcaccttccctactcattccgatgattgcccgttctcttataagcctcactgcagccaggatggacctgtctatgttatcatgatcgaaaatgataaggtatgtttcttaaatagcacttcattgctttttcaggttgagcctgtagtcatgctttgggattggaaat

SEQ ID NO: 202882 - DNA, 194 bp, Gossypium hirsutum
gggaaatccaagttcataattggtgatggcaacaatgtggatgatttcacttatgttgagaatgtggctcatgctcatatttgggcttaaccaactttagcatctggaagagaaattgcagaaaaagctgcagggaaagcatattttataaccaatttggagcctatcaagtcttggagtttggttctctaata

SEQ ID NO: 202883 - DNA, 374 bp, Gossypium hirsutum
attccactcacagaattcaaagttgtagattccgaaactggtgaaatcctcccacctggctccaaaggcattataaaagtcaagggaccgccagtgatgaaaggttactataagaatccattggctacgaggcaagccctagacgaatatggttggctaaatactggtgatataggttggattgctcctcatcattcagtagggcgaagtcgtcgatgtggaggtgtgatagttttcgaaggacgtgccaaggacactattgttctttcttctggtgaaaatgttgaacctttagagatcgaagaagctgccttaaggagtactcttattcaacagatcgttgtcatcggccaagatcaacgacgccttggcgc

SEQ ID NO: 202884 - DNA, 344 bp, Gossypium hirsutum
aacacacagaaaagccccattctgatccacatttgcttgaagatcctctcaaacatcaaaatttgtttgcaaacagaccaaaaaaatccagctatgggcaatacggagaagctgttgaaccagatcatggacctcaaattcacctccaaatcgctgcaacgccaggccaagaagtgcgagaaggaggagaaatctgagaaattgaaggtgaaaaaggcgatcgagaaaggtaacatggactgtgctcggatctacgccgagaacgccatccgtaagcgcactgagcagatgaactacctgcgtctagctttccgactcgatgctgtagttgccaggctcgatac

SEQ ID NO: 202885 - DNA, 372 bp, Gossypium hirsutum
  unsure (1)..(372): unsure at all n locations
ccgattttgggcggcttcggccagatcaagggtcattggtgaangatgtcgtaatgccttattcgcatcgggtcagtacttacacaggagattttggggtgaaagataggacgaccttgctctttttcatggggaatcggtatagaaaagagggaggcaaaatccgtgattggcttttccaaatactcgaaaatgaagaggatgttgtgataaaacacggaacacaatccagggagaatcgaagagctgcttcacggnggatgcacacatcaaagttctgtttgaatcctgctggggatactccatcagcttgcagactctttgattctatagttagcttgtgtgtccctgtgatagtcagtgatagcattg

SEQ ID NO: 202886 - DNA, 414 bp, Gossypium hirsutum
  unsure (1)..(414): unsure at all n locations
aaatggcccttcgatcgttagccaccaggaaaaccctagccttggctctcaactccaccaggctggctcagtctcgagccttgcagaccttctcgctccccgatcttccgtacgactatggcgcactcgagcccgccatcagcggagagatcatgcagctccatcaccagaagcatcaccaaacttacatcactaactataacaaggctgtggagcagctccatgacgctatccagaaaggagattcttccaccgtcgttaagttgcaaagcgccatcaagttcaacggcggaggtcatatcaaccactcaattatttgggaagaatcttgcccctattcgtgaaggaggaggtgagcccncacatgggtctttgggttgggccatcgataccaactttggttcatcggaatca

SEQ ID NO: 202887 - DNA, 400 bp, Gossypium hirsutum
cgatggctatcttttctacatcaatggctgctatgctccttgttctagggctcttcgctgcaaacttggatcctactgctgcacagattggtgtttgctatgggatgcttggcaataatctcccaaattcatgggaagtcattcaactttacaaatcaaacaacatccggcgattgaggctctacgatccaaatcaacaagcattacaagctcttagaggctccaacattgaagtaatgttaggtgttccaaatgatcaacttcaaaacctcgctgacccttccaaagcacgatcatgggttcaatcaaatgttgtagcttactggccgagtgttcggttccgatacattgctgtcgggaatgaagtccctcattcatcttggttagctcaattcgtttt

SEQ ID NO: 202888 - DNA, 386 bp, Gossypium hirsutum
  unsure (1)..(386): unsure at all n locations
ggtggttcaagagaggataagaggaggagtaagcgaccgtggtctaactcttgaagggttcctttttcttcatgctctttttatagaaaaagggcgtcttgagacaacttgggctgtcttgaggaagtttggatataatgacgagttaaagctcagggatgatattcttccagttccaaccaagcatgcccctgatcagactgtggagctgacaaatgaagctatcgactttttgcgtgggatcttccgattgtatgacagtgataatgatggatctttgcaaccttctgagtttgatgatatctttgtaactgcaccagaaagtgggccttgatgacaactctggatccttcatattgnttggctaacttgatttgcattggata

SEQ ID NO: 202889 - DNA, 361 bp, Gossypium hirsutum
aaatgccggcggtcactaagtagattggccgccccgtcatacactccgcggaacctttattcattacagtatttttggcaacttatttgagatcacgtctaaatatcggcctcccattacgccaatcggtcgtgcagcctacagaatcggctgctccatgttgaattcggacacgaatgagcacggtagctgtaaagaaactagccaacgctttcgataatcacatggacgctaaacctacgcttcgcgaaattaagcttatcctacatttggatcactagaatggtatcactaattagagatgtcattcctacgcctttgctgagagacttaatgatgtctacattgccttggagctcat

SEQ ID NO: 202890 - DNA, 374 bp, Gossypium hirsutum
tgaatgttaagatgattactggggatcagcttgccattgccaaagaaactggcaggaggcttggaatgggaacaaacatgtacccttcatcttctttactgggccaagacaaggacgcttccattgctgcccttcctatagatgaattgattgagaaggctgatggatttgcaggagtgtttccagaacacaagtatgaaattgttaagaggctacaggagagaaaacatatttgtggtatgacaggagatggtgtcaatgatgcccctgctttaaagaaggcagacattggaattgctgttgctgatgctacagatgctgcccgaagtgcttcagacattgtccttactgaacctgggctaagtgtcattatc

SEQ ID NO: 202891 - DNA, 351 bp, Gossypium hirsutum
atggctagcaagtctcatcaagatgcagatcccaatgctatcatagcaaacgagggagattttatatttaaacccaaagcatttaacattgtatggggaaatgacagtcgttattggcgcattcctcgctcacctataccagatgagcaggaagcagcagagctgattcaggtatcttggttggaagtaacgggttcagtgaaactagagcctttaaccagacatgaaatcagctttaaactcagcttcagaagggattcttttggatggagcggggcacctattttcttgatggccaaagtagggaagaaaggtaagtacaagtggaaaaagctcaaggaactagacaac

SEQ ID NO: 202892 - DNA, 383 bp, Gossypium hirsutum
attcgaccccatttgataaaattgtctccttatcagcccattctacctgtggaggttttgtcagcatagctgggaacaaaccctgatgatatcatcaaattagatgccaatgaaaatccttatggtccacctccagaggttcttgaagctatggggtcactgaaatacccatacatctaccctgatcctgaatctctcaaaacagcgtgctggcctcggtgaagattcggggattgaatctgattatattctcgtaggctgacctgtgatgaacttattgatctgataatgcgatccgtgctcgatcccctggacacgattggcagcacgtactacaaccttgacaatgtatgaatgtgatgctggtgctaatggggcacaag

SEQ ID NO: 202893 - DNA, 224 bp, Gossypium hirsutum
cagaatttgttctgcctatatcaaccaacgctttcttggggggactctgtccaccaagcgacttggttacgaccgaaacaggttcgagcatcttgcatgaattaacttcgccctgaaagtggactgcttagcttggtcttacatagcgattaagctttgatccagtataagcattggcggagctcccttgtggacttatcggactgttggaatcacaaatacaa

SEQ ID NO: 202894 - DNA, 107 bp, Gossypium hirsutum
ccggacggtccatacgcatggggatattgctatggtcaggaacagagcgaccccggtgaaaaatattttgggcgcggtcctatttagaactcatacaactacaacta

SEQ ID NO: 202895 - DNA, 217 bp, Gossypium hirsutum
ggaccatgtaacagttggtgatcttgtagttaaacatgaggagtttattgaggcaacaaaggagtccagcttaacatttttgattgccaagtttgatggtatacttggacttggatttaaagagatttcagttggaaatgctgtgcctgtatggtacaacatggtcaatcaaggtcttgttaatgaaccagttttttcattttggcttaaccgcaat

SEQ ID NO: 202896 - DNA, 148 bp, Gossypium hirsutum
tattggatgaccatagccaactcgaatcaggtccggtgagcttatatgaatcggggcctcacggtacatatgttggaatttacgatggtcatggtggtccggctactgttaggtttatttctgaacaccttttctgatttatcatgta

SEQ ID NO: 202897 - DNA, 380 bp, Gossypium hirsutum
caaaagagttccatgtttttcgctgccatttccagagccgattctactttagaaattttgatacaagtaaagtaatagaatcttaaagaaaaaaaagtgctaaaaaagctaactttttttttctttctattgttccttctttactctgggttcgtttttcaaagcataaaaacctaatttctaacagagcagctgcaactatcatcacccatggcggcaccgatctgggtatgggctttttacgtagccctaactctatttccttccgttttgggaaactcagaaggcgatgctctttatactttgagaagaagcctatcggatcctgataacgtgcttcagagctgggatcccacccttgttaacccttgtacttggtt

SEQ ID NO: 202898 - DNA, 406 bp, Gossypium hirsutum
caaaagcctgatgtgtttaggggaactgtacgttatgcgagtgtgcatgctcatttgggtaggacaggcagtcgaagggatgaccttgagtcattggcttatacactaatatttttacttaggggaaaacttccctggcaaggttacattggggagaacaaaggatttcttgtttgtaagaagaagatggcaacttctcctgagatgctttgttacttgtgcccttctccttttcaacaatttcttgagattgtgaccaacatgaaatttgatgaagaaccaaattactcaaagctcatttctcttttccgtaatagcattgatttcaattcatcaatatttcctatccaaattgatggagctattaagcttggtcaaataaggggaagagcactttttgagctgg

SEQ ID NO: 202899 - DNA, 301 bp, Gossypium hirsutum
ggtgtttcttagaaaaagagaaaaaatcaaattacaaagtgaatatcttcaggtttgcaggtgatatgactcatttgatcagcatcttagtgctgctcctcaaaatctacgctactaaatcttgctcaggtatttcgctgaagacgcatgagctatatgcgctagtatttttgacccgctacttggatctatgcacggattttatatctgtgtacaacaccattatgaagctggtctttattgccagctatctcgccattgattggtgtatgataatgcacctagtcttgagtcgttccta

SEQ ID NO: 202900 - DNA, 331 bp, Gossypium hirsutum
ctacatttggctgctttggagcaaaaaagggctgatgaggatgtaatgaaattggctgaagatcagaagaggcagaaggaggaacttcacaacaggataattcagcttgagaaataattagatcaaaaacaggcattggaactggaaattgagcaactgcgaggatcactgaatgtaattaggcacatgggagatgaagatgatatagaagttcttgagaaagtggatgcaagtcttaaagagttgagagaaaaagaggcagagcttgaatacttagaagcattaaaccaaactcttattgtaggatagcgcaagatcaattatgaactgc

SEQ ID NO: 202901 - DNA, 285 bp, Gossypium hirsutum
ctcttgctctctttagagtaaatttcttttgcaatcctgggtagagctccgggatccattgtcaccatgtcttgctcaaatctgacaatgtgggtgtcctcaaaaccctctctttctgacacttcttcactctctttccgttctttcatcagcccttttcagctcccatctcagagctcaacccccggtaacccttccaggtcctcatctgtaaccccagttcactgtggtcttcgtgagcttatataccgtattgattcattaaagaacacgcagaagatcact

SEQ ID NO: 202902 - DNA, 403 bp, Gossypium hirsutum
  unsure (1)..(403): unsure at all n locations
gttgaacaaattagcagcagaaccaaatgcatggggctttaagcaaacagactatatctatacactagtactgatatcaaggtaaatggacttcttggatcctgtgtaggcgttgtgtttatctagctcaaccatttctatgcttgtgaatggaatctgagcaagcggattctcacaaaatggattttaacgcgacggaggaagaggaatttggattctcaagaaactatttcttagcaaaagaaatgggcagttctgggaagaaatctgctcctaaactcagtgatatcaatgtcgttgacgaacaggtattttgcctcattgaatccccatctcaaaaaaagctttgntttttttattcttttaaattttgttgttttaaaattgcattaaaacgacattg

SEQ ID NO: 202903 - DNA, 299 bp, Gossypium hirsutum
ctgaaatctgagtccaggacataaaatatgaattcaaagcaggagcttcttgaagagcccataagaatggcttccattcttgagccatcaaagcctagtttctttcctgcaatgactaaaatagtggggacacttggtccgaagtcgcgatctgttgaaataatatccgattgtcttaaggctggaatgtctgtggcgaggttcgattattcgtggggtgatattgaaattcaccaagagacattggaaaattcggagactgctgttaaaagcactaggaagcttcgtgccattattct

SEQ ID NO: 202904 - DNA, 377 bp, Gossypium hirsutum
ccgatgcaatatgaatcttcaacaaactcccgacgggaggaatgagaagacatcgaacccaaaactttccctgcatgtgacaaacgccattcagaattgattccctgcttagacagacgtttaatataccaaacgagattaaagctggactcgactgtgatggagcactaccaacgtcactgccctcctcctgaaaggagatacaatcgcttgatacctactactgcatgatacaacgtcccaattaagtggcctcaaagcagagatgaagtatggatagcaaatattccccatacacaccttgcacatgagacatctgaccagaactgtatgagttgacaaggttgaaagatttgaaacccaaggcgaggaaccca

SEQ ID NO: 202905 - DNA, 414 bp, Gossypium hirsutum
gggaagcaatatgaatcttcaacaaaattcggacaggaggaaggagaagacatcgtaccaaaaactttccctgtttgtgacgatcgtcattcagaattgattccctgcttagacagacatttaatataccaaatgagattaaagctggacttgtctgtgatggagcactacgaacgtcactgccctcctcctgaaaggagatacaattgcttgattcctcctccttcaggatacaaggtcccaattaagtggcctcaaagcagagatgaagtatggaaggcaaatattccccatacacaccttgcacatgagaaatctgaccagaactggatggttgtacaaggtgaaaagatagtatttccagggggaggaacccattgtcactatggagctgacaagtttattgcttcgatt

SEQ ID NO: 202906 - DNA, 326 bp, Gossypium hirsutum
gggaagcaatatgaatcttcaacaaaattcggacggggggaaggagaagacatcgtaccaaaaactttccctgtttgtgacgatcgtcattcagaattgattccctgcttagacagacatttaatataccaaatgagattaaagctggactagtctgtgatggatcactacgaacgtcactgccctcctcctgtaaaggagatacaattgcttgattccgccttcgacaggatacaaggtcctaattaagaggcctcaaagcagagatgaagtatggaaggcaaatattcccgatacacaccttgcacatgaaatatctgaccaga

SEQ ID NO: 202907 - DNA, 398 bp, Gossypium hirsutum
gctacaatagcggaattgaatcctcccttcatcttattgcgctttcggatcgaaattacccttgtgctcctggtaaacaatattttggccggggtcccatgcaactttcttggaactacaactacgggcagtgtggaagggccataggggtcgacttgttaaacaacccagacctgctatcaagtgatcccacaatttccttcaagtctgcgttttggttttggatgactccacaatcaccgaagccatcttgccacaatgtgatcatcggagcatggtcaccctccagtagcgatcgggcagcaggtcgggttccagggtatggtgtgatcacaaatattatcaatggaggccttgaatgtggtaagggttggaatgcacaggttgaagaccgcatt

SEQ ID NO: 202908 - DNA, 365 bp, Gossypium hirsutum
gttgattgcaacaagtgttgcagctaggggtttagatgtaaaggagcttgaattagtgattaattttgatgtcccaaatcattatgaagattatgttcaccgtgttggtaggactggtagagccgttcggaaaggctgtgctatcacatttatctctgaggatgatgcaagatatgcaccgtatctcgtaaaagctttagaactctctgagcaagttgttccagatgacctgaaagctctcgcagatggctgtatggcataagtcaatcatggacttgagcaggctcatggaacaggttatggttgaagtggttttaaattcaatgaagaggaagatgaaaagagaaaagcagcatagaaagcac

SEQ ID NO: 202909 - DNA, 249 bp, Gossypium hirsutum
acgcgcgagccgcatctttcaggcttgatggatccctgtatgtggaggtgactgagtaccagactaaccagttcccatatcccaagatccacttaatgctcacatcttatgcccatgccattttagctgatatggcttaccacgagcagctatcggtcgctgacataaccaacagtgctttcgaaccctagtcaatgatgtccaaatgtgacccacgacacgtgttgtacatgacttgctgccttatgt

SEQ ID NO: 202910 - DNA, 291 bp, Gossypium hirsutum
ccgcatctttgaggtttgatggagccctgaatgtggaggtgactgagttccagactaacctggtcccatatcccaggatccactttatgctttcttcttatgcccctgtcatttcagctgagaaggcttaccatgagcagctatcggtggctgagataaccaacagtgcttttgaaccctcttcaatgatggccaaatgtgacccacgacacggtaagtacattgcttgctgccttatgtaccgaggagatgttgtgcccaaagatgtgaatgctgctgtggccaccatta

SEQ ID NO: 202911 - DNA, 372 bp, Gossypium hirsutum
atcaccaacaaaaagggaatgaaagctctagtgaagtggaagctattaaagccaagatcatagctcatcctcagtactctaatctccttgaagcttacatggattgtcaaaaagtaggagctccacctgaagtagtggtacgactagcagctgttcgacaagagttcgaagcaaggcaaagatcttcagtaacatcaagagataactcaaaagacccagaacttgatcagtttatggaagcttactatgatatgttggtgaaatatctggaggaactaacgagaccaattcatgaagcttgggatttcatgctgaggatcgaagctcaacttaacatgcatgactttggtcctgcgctgatctttaattctg

SEQ ID NO: 202912 - DNA, 211 bp, Gossypium hirsutum
ctagatcaaggatactgcttgtaggtgcttagtgtacagggggtccaagaagaaatgcatctataccattgatgatgactgctttgttgctaaagatccatctggcaaagacatcaatgcattggaacagcacatacagaacctactgagttcatccactccatgatcctataacactctatatgacccataccgatccggtgctgacttc

SEQ ID NO: 202913 - DNA, 304 bp, Gossypium hirsutum
  unsure (1)..(304): unsure at all n locations
gaatggctctttcagctgccactcttctcactgcgcttgccgtactctgctctttcttttttcattctattttacatctcatcaagcaaaaatggaaaaggaaaaggaaaagggaaagccattccgggtccgcgacccttgccaattattggaaacctccacatgttaggcatgcttccacaccaatccctttatcacttggccaaaaaatatggtcctatgatgtccatagggctaggcgttgtgccaactgttgtcgtttcatcccctcaagccgncgagatatttctcaagacacatgatg

SEQ ID NO: 202914 - DNA, 148 bp, Gossypium hirsutum
acaggagcaaaatgctgatactccacaaacggtagtcggggggcaacttgatgaggctcaaggactgcttaaaaccaccaactccaccggtcaatcaaatgaggcaagactagctcgtggttgtgctggactttcatcctgtctccaa

SEQ ID NO: 202915 - DNA, 371 bp, Gossypium hirsutum
ctacatttggctgctttggagcaaaaaagggctgatgaaaatgtaatgaaattggctgaagatcagaagaggcagaaggaggaacttcacaacaggataattcagcttgagaaaaaattagatcaaaaacaggcattggaactggaaattgagcaactgcgaggatcactgaatgtaattaggcacatgggagatgaagatgatatagaagttcttgagaaagtggatgcaagtcttaaagagttgagagaaaaagaggcagagcttgaagacttagaagcatttaaccaaactcttattgtaagagagcgcaagagcaatgtataactgcaagatgctctcaaagaattgattaatggattaaaagaaat

SEQ ID NO: 202916 - DNA, 256 bp, Gossypium hirsutum
tggaaatgctgtgcctgtatggtacaacatggtcaatcgaggtcttgttaatgaaccagttttttcattttggcttaaccgcaatcctgaggatgatgttggcggagaagtggtgattggcgggatggatccaaaacattacaagggggaacacacttatgttcctgtaacacataaaggatactggcagttcgatatgggtgatgttctgattgtttaccatatctctggactttgtgccagttgctacagtgct

SEQ ID NO: 202917 - DNA, 253 bp, Gossypium hirsutum
atcaagaaggaagcttgctggaccatctcaaacatcagcgctggaaatgtagatcagatacaggctgtaattgaggctgggattattgcccctctagtccatctccttcaaaatgccgagtttgagatcaagaaagaagctgcttgggcaatttcaaatgctacatctggtggtacccatgaacaaataaagtttttggtgagccaaggttgcattaagccattattgtgatcttctgaactgtcctgaccca

SEQ ID NO: 202918 - DNA, 320 bp, Gossypium hirsutum
ttcccaaatctcctccctcctcttctttagcgtcgtttgcatttccgctcatgcagcgcgctttgaaatccgcaatgagtgctcctacaccgtctgggcagcagcctctcctggtggtggccgtcgcctagaccctcggcaaagttggaccatcgatgtgcctgctggcactgctatggctcgtatttggggtcgaaccaattgcaatttcgatgccagtggtaggggtcattgccaaaccggtgattgtggtggactccttcaatgcaaaggttggggtgtaccttcaaacaccctggctgaatatgcacttaaccaat

SEQ ID NO: 202919 - DNA, 408 bp, Gossypium hirsutum
gccattcctccctttcttcttgttcggttgactgactgggtattattgcttttacagcacaaccaaaaacaagctctttttccaattccaaccggcaaaagcctctctttcccacaaaaaaacactccccttttgctgttctaaaaattgggactttaaactgcgcgagagtagctggggagatggaaatcggaaagggtattgctgcagcaggaaaacccattgttgatcttcatggtattgatgacggcttgattcaaaagattgtatatgatgctcttgtttggagttctcttcatggccttgttgttggtgacagaaatgatcagagatctgggaaactacctggtgttggcatggtgcacgctccaattgctttgatgcccacgtcattttcagaatttcact

SEQ ID NO: 202920 - DNA, 333 bp, Gossypium hirsutum
gtggaaggtcacatgactggactgagtgtccgtacgctgaccctggtgagaaggcccgaagaagggacccgcaaaagtttcattactctggaactgcttgccccgattttcgcaagggaagctgtaagaaaggcgattcatgtgaattcgctcacggcgtttttgagtgttggctccaccctgctcgttaccgtactcagccttgcaaagactgtaccagttgtcaaagaagggtttgttttttcgctcacacaccggagcagcttctcgtgttgccgcagcagagtccgagaggaaatgggttcgcttcagctgatttggattatcttggtt

SEQ ID NO: 202921 - DNA, 355 bp, Gossypium hirsutum
gggcaatgaaaaggagggatctcttgttgcggcgctattggagaagagaagatgatggaacatatgttatcctctaccactcagtgtttcacaagaattgtcccccgcagaaaagctatgtccgtgcctgccttaaaagtggtggatatgtcatatctcctgtgaatgaaggaaaacagtctgttgtaaaacacatgcttgcaattgattggaaattctggaaatcttatcttcgaacttcagcagctctgcctattaccattaggatgcttgagagagttgctgcattacgagaagtattcagagcattacaagtaaaatatccgtcggacaatctttcttctggagagtttat

SEQ ID NO: 202922 - DNA, 393 bp, Gossypium hirsutum
gaaaaacgaaaaatcaaatgaaaaaacagtattgaagacgaactctttcgaccaagaattcttgctgccataatcggagaaacggcattaaaattggtgaaggttttgaagagaagacgaaaatggatgctgccaagaagaagtacagtataatagtaccaacgtataacgagcgcctcaacattgctctcatcgtctatctcatcttcaaacatctacggtatgttgattgagaaataattgttgtggatgatgggagcccaaatggtactcaagaagttgtgaaacatctgcagacactctatggtgaagatcgaattttattgatacctatacctaataagctagtattgggaacggcttatatacatggattgaagcatgctacaggaa

SEQ ID NO: 202923 - DNA, 390 bp, Gossypium hirsutum
attgagactacctcttgagtcagaccaagttcttctgagagtcatttatgctggtgtaaacgcaggtgatgtgaactttagcgcaggccgttattttcaaggaaccaagaaagaccctggatttgaggcagtgggaataattgctgccattggagattctgtaagaaatttggaagttggaactcctgctgcagtcatgactattggatgttatgctgaattcatgaaggttccttcaaagcaaatacttccaattccaagacctgacccggaagttgttgctctgcttacttcaggattaacagcatcaatcgctttggaagagcttggtcagatgaaatctggaaaagttgtccttgtaactgctgctgctggagggactggacaatt

SEQ ID NO: 202924 - DNA, 267 bp, Gossypium hirsutum
  unsure (1)..(267): unsure at all n locations
gcagcttgaagatggtcgcaccttagctgattacaatatgcaaaaagagtccaccctccacctagaacttcgtcttcgaggtggcatgcanatctttgtcaaaactctcactggaaagacaattaccttggaggtggagagttcggataccattgataatgtgaaagccaagattcaggacaaagaaggaatcccaccagaccaacaaagattgatttttgctggaaaacaacttgaaaatggaagggactctgccgattataatat

SEQ ID NO: 202925 - DNA, 271 bp, Gossypium hirsutum
ggaaacatggatttctacgacatttccttagttgatgggtttaacatccccatggtgtttggtccaactaatggcggttgtcacaacattcggtgcactgcagacatcaacggacaatgcccgaatgagttaagagctcctggtgggtgcaataacccatgctcggtgtttaagaccaatgaatattggttcactcaagggtacgggtcctgttgtccgactcgttattcaaggtttttcaaggactcgtgccgtgatccatacagttatc

SEQ ID NO: 202926 - DNA, 333 bp, Gossypium hirsutum
ggcatttgctttaattcagttgttcagtatcatcatcgttatgtcccatgttgcctggcaaatcttccttctcttccttgccatcctcagtatctccttctggtatcagaactattatattacgactgctagggagctagccaggatggttggaattagaaaggctcctattttacatcatttctcagaatctatcacaggcgcaacaacaattcgttgttttggccaggaagacaggtttatggagaaaaacttgagcttaatcgatgattactctcgtgtagccttccataactgctgcacaagggaatggttgtgtgttcgaatcaattt

SEQ ID NO: 202927 - DNA, 206 bp, Gossypium hirsutum
ctctttcaaggattctgcttgtaggttctttgggtacatggtttccaagaagaaatacatctataccattgatgatgactgctttgatgctaaagatccatctggcaaagacatcaatgcattggaacagcacatacataacctactgagtccaatcactccatttatctttaacactctttatgacctataccgatccggtgctg

SEQ ID NO: 202928 - DNA, 262 bp, Gossypium hirsutum
cggagacggagaaacatttgcgccatgagaaacgtgtacgaggtatattagctgtcatgatgttgcttattgggctcggagttttgatcaggacctcgtgagagcttgtagggatcattatcacaagaggtattggagagtttgacttggtttagcgtttaggcttgttgctttggagcctaactccacgaagctactaggggatactcttaactttgcctactagatgaccagatgccgattgatccacttggactactta

SEQ ID NO: 202929 - DNA, 280 bp, Gossypium hirsutum
aatgcatgcaggttgtccagtggtttgttaaaagaggttgtcgagacatgaactctgtctggccctcactgccgctacttccagcagccaagttggtgtggctgcatatctcctcccccatgttcctaagcatgtcctaacggccctcagcatcgaaattcttaaggctgcgggtgaacgaagtgggggatctcttgatggtgttgcgtttctcctccactttgacttcttaagtgatgctgctgctacttatgcttttgcagacagcattgcaaagtct

SEQ ID NO: 202930 - DNA, 370 bp, Gossypium hirsutum
ggaaagttgttggctgggccctaagccatcagtttatgcattcttctggagtattgttgaaagatgctaaacttgtagtttcaactgaaagcattaagtatggtctggacattttgcaaggcattcaaaatgaaagcaaaactttgaagaaatcacttaaggatgtggtcactgagaatgaatttgaaaagaaacttcttgctgatgttattccaccaagttgatattgaggttagttttgatgatattggagcccttgaaaatgtcaaagacaccttgaaggaattggtgatgcttccccttcaaaggccctgattgttttgcaaggtacagtttgacaatccctttaaaggaatattgctttttgggc

SEQ ID NO: 202931 - DNA, 402 bp, Gossypium hirsutum
atttcgatttgattgaagaagaagatttagcggttcgagtgcaagcgattcgtgggcttcctttgttttgtaaggatacaaaggagtacatttctaaaatagtagacattttagggcaactccttactgctgatgagattgtggagcgtgatgctgttcataaagccttaatgtctgtattaaggcaggatgtgaaggaacttattggaataattgaagggcaggctgatttagatgcacaatttgacgtctctgatgcagatcatattgataggttgatatcgtgtctggtcatggctattccattttttgtgaggtgtgcacctggcagcaaggtttctcaactacttaaacaaacacattatacctggttttgataagctgtccgaggaacggtagctg

SEQ ID NO: 202932 - DNA, 390 bp, Gossypium hirsutum
attgagactacctcttgagtcagaccaagttcttctgagagtcatttatgctggtgtaaacgcaggtgatgtgaactttagcgcaggccgttattttcaaggaaccaagaaagaccctggatttgaggcagtgggaataattgctgccattggagattctgtaagaaatttggaagttggaactcctgctgcagtcatgactattggatgttatgctgaattcatgaaggttccttcaaagcaaatacttccaattccaagacctgaccctgaagttgttgctctgcttacttcatgtttaacagcatcaatcgcttaggaagagcttggtcagatgaaatcttgaaaagttgtccttgtaactgctgctatttgattgactggacaatt

SEQ ID NO: 202933 - DNA, 412 bp, Gossypium hirsutum
acctgttgctgtcaaacgcattcttccatcactttcagatgacagattagtgattcaggatttccggcatgaagtgaagttgcttgtaaagctccgccatcctaatattgttcaatttctcggagctgtcactgacaggaagcctcttatgttaattactgagtatttaagggggggtgatcttcatcagcatctcaaggaaaagggtgcacttcatccatcaactgccatcaactttgctttggacatcgctaggggtatggcttatcttcacactgagccaaatgtgattattcatcgggacctaaaaccgaggaatgtgcttttggtcaactctagtgcataccatttgaaagtcggagactttggactgagcaagcttatcaaagttcaaaattctcatgatgtctac

SEQ ID NO: 202934 - DNA, 418 bp, Gossypium hirsutum
gtcgtacgtgggatccttccaaggccaatttgttgtacggacctttctacggcggtctgcatgtgtccagcaatttccgcgaaccaaaccacgcgattcgcgacgcattggccgtgaaattggtagactacctccaagctcaacccacgtggcggaagaacaacgggaaggaccacttccttgcactagggagaacctcatgggatttcatgagaaccgacagtggacctgacttcggggcaagctgtcttctcaacctgccatgtgttaaaaacatgtcggtgctgaccgtggagaggaacccctggaaaggttcaaaccaacacggtatcccgtacccttcatactttcatcctttcacgtcagatcaaatgatgacgtggcagaacatgatgcgacagtcaaaccgaccctactt

SEQ ID NO: 202935 - DNA, 435 bp, Gossypium hirsutum
  unsure (1)..(435): unsure at all n locations
ccaacaggaagtttatcagttcaatgtgccgactttcggccctggtgtggtgtttgatgtggattactcaataaggcaagagcagttccggttctttacggaggcccttcgagttaataaacttaagggttatgtagatcagatggttactgaagctgaggactacttctctaaatggggggatagtggtgaggtggacctcaaatatgagttggagcatctgattatcttgacggctagcaggtgtcttttgggtcgagaagtacgtgataagcttttcgatgatgtgtctgcactctntcatgatcttgataacggcatgctccctatcagtgttatcttcccttacctgcccatccctgctcatcttcgtcgtgatcaagcttgaaagaagcttgcagaaattttgcaaatatcatttcctctcgtaaaaat

SEQ ID NO: 202936 - DNA, 437 bp, Gossypium hirsutum
gcttactggacgggattcaagtcacctgaacaaatttcacgtgttcggaacactggggttaaacccgagatattgaagaatgttggcaaagcaatcacaacccttccagataattttaagcctcatagagcggtgaagaaggtttatgagcaacgtgcacagatgattgagacaggggagggccttgactgggctatgggtgaagcacttgcatttgctacattactggtagaaggtaaccacgttaggttgagtggtcaggatgttgaaaggggtacattcagtcatcggcattctgtgattcatgatcaggaaaccggggaacagtattgccctctggaccatgttatcatcaaccaaaatgaggagatgtttactgtcagcaatagttctctttctgagtttggtgtgcttggattcgaattgggttactcgat

SEQ ID NO: 202937 - DNA, 193 bp, Gossypium hirsutum
gcgtgatcttcacggtttgcataactgggaggggcttattgagccactccatccttggttgagacgggaggttgtcaagtacggagagttcgttgaggcgacttacgatgcttttgatttcgatccattatcggagttttgtggaagctgtatgtacaacccgaataaactgttttgagaactaggacttact

SEQ ID NO: 202938 - DNA, 313 bp, Gossypium hirsutum
  unsure (1)..(313): unsure at all n locations
gttgcttccgtcatcgccgcctccgctgttccttccctcgtcatggcacgtggccaccgcattgaggctgtaccggagatgccgctggtcatttctgatgctgttgagagcgttgagaaaacctcgggtgcaatcaaggttttgaaacagatcggagcatatcctgatgttgaaaaggctaaggacagccaaggaatccgacccggaaaaggaaaaatgaggaatcggaggtacatttcccgtaaaggtcctttgattgtttacgggactganggagctaagcttataaagccttccgtaacatttctggagt

SEQ ID NO: 202939 - DNA, 354 bp, Gossypium hirsutum
aaacatttcattgcttcacacgatatattgagtaccagcggtgtgtagctgcaaaaggagaaggtgctccagagtgtgataagtttgcaaggtattatcgtgccttgtgtcctggagaatggatagatcgatggaatgagcaaagggagaatggtactttttcaggttctctctagatgagatggtacccctattgttatccgaaaaatccctgttttgaacttttttccctctgttataataaaccgttacaagtgatacccagattaatttccaggattaaagcagaatttctcaagtaatatttatttttaaaaggattagttaatttttaaatttggcgtgtaccctaac

SEQ ID NO: 202940 - DNA, 370 bp, Gossypium hirsutum
  unsure (1)..(370): unsure at all n locations
cggaaaaggaaatgttccatttcattcaagcattgcaaaaaataatggattattaaagtataaagacaagacaccaatgtgatgtatgaagactatgttaaagaagctcctccaactcgattggaatcattactttgtaccttgtatggtgttgggtttaatctcctgatgtgatcaggcctcatttgctcaagctgtttgatgcaatggtccctaatgtccttcagagctggtaactctttccttactttacctgattttccaggccagtaacacttaagaagctcctncacacgctttggtaccacatatgctctttggattcactaaaagggtgacggcatatgattcgttctccaacctttggaca

SEQ ID NO: 202941 - DNA, 417 bp, Gossypium hirsutum
  unsure (1)..(417): unsure at all n locations
cggacttgtgggactagatcctacaagagtcgttgaaatggttaaagatcggccttcatggtatcatgattgccgagctgtggatgttacaaacgtgttgtccactggaaatggtggaaccattgaactgctttatatgcaagtaagttaattaatatcaaatntatcctacttttccaactaagtctatgtgaatatttgggacaaaccagagatctaagtatgtgtatttaaattgttcaccatacccaattattgatggtatatngagcatgtgagtacatacgctatccccacaaatttcaacttccaagacctggttctgatataaatccaagaaaagaatagcataataaatagtatagtggtaaattattaggaaaataaagaaaagcatttctattttcgggatccaag

SEQ ID NO: 202942 - DNA, 347 bp, Gossypium hirsutum
ggcatgttcgatggtgaaccatcagctcaaccgtatgggcatctcggtccgagacatgtgtgtaccccggatcataaacaactagccttggaagctgctaggcaaggcatagttttgttgaagaactctgggtctttaccgttgtctacttcacgtcatcgtaccgtcgcggttattgggccgaattcagatgtcacagaaacaatgataggaaactatgcaggggtggcatgtgattacacgagtcccttgaaaggcatttcaagatacgtgaggactgttcatcaagcaggctgttcaaactttgcttgcaaagcaaacaatctgtttggattcgccaaggtcgc

SEQ ID NO: 202943 - DNA, 400 bp, Gossypium hirsutum
  unsure (1)..(400): unsure at all n locations
tagcggaaaaggtaaatgttccaatttcattcaagcattgcaaagagaataatggattattnaaagtattaaagacaagacatccaatgtgatgtantgaagactatgttaanagaaagctcctncaactcgattggaatcattactttgtaccttgtatggtgttgggtttaatctcctgatgtgatcaggcctcatttgctcaagctgtttgatgcaatggtccctaatgtccttcagagctggtaactcttcccttactttacctgattttccaggccagtaacacttaagaagctcctncacacgctttggtaccacatatgctncttgggattcactaaaagggtgacggcatatgattccgttctcaaaccttggacatggttcaatttcccct

SEQ ID NO: 202944 - DNA, 384 bp, Gossypium hirsutum
ctgcaagctacgagggggaatcgaatcccccttcatcttattgcgcttcggatccaaattacccttgtgctcctggtaaacaatattttggccggggtcccatgcaactttcttggaactacaactacgggcagtgtggaagggccataggggtcgacttgttaaacaacccagacctgctatcaagtgatcccacaatttccttcaagtctgcgttttggttttggatgactccacaatcaccgaagccatcttgccacaatgtgatcatcggagcatggtcaccctccagtagcgatcgggcagcaggtcgggttccaaggtatggtgtgatcacaaatattatcaatggaggccttgaatgtggtaagggttggaatgcac

SEQ ID NO: 202945 - DNA, 383 bp, Gossypium hirsutum
cttacaaaaggataaatagattgattggtactgcaagatacagaaacgtgatggacatgaatgccggtcttggaggatttgcagcagctctcgaatcacccaagtcttgggtgatgaatgttgtgcccacaattggcaaggacaccttaggtgtgatctatgagagaggtctaattggaatatatcatgactggtgcgaaggtttctctacgtatccaagaacatatgaccttattcatgctaatggtgtctttagcttgtatcaagataagtgtagctttgaagacatccttctggaaatggatcgcattttacgggctgaaagggctgggatattccgggatgatgtcgatgtcctaaacaaggttaggaaaattgctgga

SEQ ID NO: 202946 - DNA, 402 bp, Gossypium hirsutum
ggcaatttgggttgatacttgcttggtttcattgcttttgatcattgttgctgttgaagctagaattcctggtgtttattctgatggtgcttggcaaagtgcccatgccactttctatggtggcagcgatgcttctggcacaatgggtacttttttatttctcaaaacgaagatgattttgacttcacaatctgccctttttttaatgatttttaaggtggagcttgtggctatggaaacttatacagccaaggctatggtgtcaacacagctgctttgagtactgctcttttcaacattgggttcagctgtggtgcctgttttgaaatcaaatgtgtaaatcaaccacaatggtgtcattctggtagtccctcaattttcatcacagcaaccattttttgc

SEQ ID NO: 202947 - DNA, 387 bp, Gossypium hirsutum
tgataaagaaggcgttcaatgctactgaagaagagtttttacatttggtgaagcaatcattgcccgtaaggcctcaaattgcttcagttggatcatgttgccttgttggtgcgatatccaacgatgtgttgtatgtggcgaatctcggcgactcgagagcagttcttggcaaaagagtttcggaggataagaaaaacaaggttgtggcagagaggctatcaacagatcacaatgttggagttgaggaagtgaggaaagaagttgaggctcttcatcctgatgattcgcatgtcgtggtttacactcgccgagtttggaagattaaaggcataattcaggttgtaagatctattggtgatgtttacttgaagaaaccccatttttata

SEQ ID NO: 202948 - DNA, 304 bp, Gossypium hirsutum
caccaataagttttttagaaattaaaaacttgtctgggtttccaaattgcaaatcaaatttcgattgaatcagacacaatttcttttttcaattttataatgaagaacaaaagggcgagaacgagtgttgacaaggcggtggttgatgtttggcaacgggaagttggggaactctccactaggaatttcgcccaccggcttgccgcttctgaggatcttgtgctccgactcgagatttacaagaaactcaaaaagcacctatgttgggtgaacactgtgagctttaatgctgatggtaacattt

SEQ ID NO: 202949 - DNA, 261 bp, Gossypium hirsutum
gaaacttctttgcaagttctcaggggttttgatgctgatgtttctattgaagtgaatgaaatcaagagatctgttgcatcaaccactagaagaactaccattcggtttgcagatctcaaagaaaggagatattggtttccactgatggttggaattggattacttatgctgcaacagctttgtggcattaatggtgttctattctattccagtacaatttttgaagctgctggagttaaaataagcaatgcagccaccctt

SEQ ID NO: 202950 - DNA, 396 bp, Gossypium hirsutum
aattagaaaatatattagggtatactaatcattcttattccacaaatgcgagcaatgaggaataaaagaggcaacccacatgcaaactaaatccaaaatcaaaggttccttttcctgatgaggtgtaactaaaatatccgagtgaagacgtactgaaattttgcacgacaccaaaaaataagggttcacagtttgaatccccttaactcatgctgcatgggatgatagtttataacaaagcatttctctcatagccgactgatgactgcttccacctctgaaggggtgtacagatggtatatcggtgctactttggcaatatcaacattgttgggagtcaccttttcttccattacttgctttaaaatggacagagcaattgtttcagcttcttga

SEQ ID NO: 202951 - DNA, 401 bp, Gossypium hirsutum
ccatgatattgatgttgatgatttaaaaaataatacacggtatactggtggctattctgagggaagtcgaactgttaaacttttctgggaggttatgaatgattttgagcccaaagaacgttgcatgctgctaaaatttgtgaccagctgttcgcgagctcctttattggggttcaaatacttgcagccggctttcacaattcataaggttgcaagtgatgctcctctttgggctgcaatcggaggttcagatgtggagcgacttccatcagcttctacatgctataacactctcaagcttccaacatacaagcggtcaagtactctgaaagcaaagcttcgttatgcaattaattctaatgctggatttgaactttcttaaggacctgagatttttaact

SEQ ID NO: 202952 - DNA, 354 bp, Gossypium hirsutum
cagcaatgtcccacgctgtgatatatgtgaaaatgcacctgctttcttttactgtgaagtggatggtagttccctttgcctgcaatgtgatatgattgtacatgttggaggtaaaaggacccatgggaggtatctcttgttgaggcagagagttgagtttccaggggataagcctggtcgtttggaggaaccaggtttacaaccgctcagtccggatgaagtaaggaaggatctgaatcagcagtcaaagcttgcagtgagagagaaccggcaaaaccgtggagtctctcatgttccattgcttgatgataatgctaaaggtgatggaaaggtaggaaatgagttgattgatct

SEQ ID NO: 202953 - DNA, 387 bp, Gossypium hirsutum
gttgagaaagtgaggattaagtgtctggggtatcaagaaagggctaagatttctaagaatccaactgggaaaaagctgtttgagattatggttaagaaagagagtaatctctgtttggcggctgatgttgccactgctgctgagttgcttgatattgctgagaaagttggacctgaaatttgcctattgaagacccatgttgacatattccctgatttcactccagagttcggatctaagcttcgcgcgattgcagaaaaacataacttcatgatattttgagacccgtaatttgcagacatcgggtacacagttacaatgcagtatgaaaggggtatctttcgcattttgggatgggctgatattggtaatgctcatataatctct

SEQ ID NO: 202954 - DNA, 406 bp, Gossypium hirsutum
ccagattccgacatctactggaagaagctcgaggataaagatcatttctcctgccaatttacagctgatcttttcgctatgaaccatacggatttcatcatcaccagtaccttccaagaaattgctggaagcaaggacactgttggtcaatacgagagtcacactgctttcactcttcccggtctctaccgtgttgttcacggaattgatgtgtttgatcctaaattcaacattgtgtcccctggtgccgacatgagcatatactacccttacaccgaggagaagaagaggttgaagcatttccattccgagattgaagaacttctttacagcaaaagtggaaattgagaacactggtgtgtgctaaaacaccgcaacaagccaattctatttacaatggccaggc

SEQ ID NO: 202955 - DNA, 341 bp, Gossypium hirsutum
caggatccaggttgccctcaagtaaggttagcaagattggcggctgataaagttttaactgcaccatgcggaacctccattttgtacccgaaaactgggggcaatctgcattgttttacggcagtcaccccttgtgccgtgcttgatgtacttgctcctccttacagagaagatctaggtcggaaatgcacttactatgtcgactatccgtattctgccttggtaagttaatctttccattcctaatatatcattcttgttgtgcttcgatttttcgcccggttttgtgcaacatgaaaaccatatgacttatgtcatcatacatgttacaagggaatgac

SEQ ID NO: 202956 - DNA, 425 bp, Gossypium hirsutum
aaaaggcaaaggcgagggtctattttcttcacaaactacaatggcttccgagtctttagtaaccaagaggctagatggtaaggtggcactgataactggtggtgccagtggtttaggagagtgttcagccaggctatttctcaaacatggagccaaggttctgattgctgatattcaagacgaattgggccactccctttgcaaagagcttggaactgaaaacttcagctatgtccattgtgatgtaacatgcgaatctgatgtcgaaaatgccgtaaacttagcggtctccaagtatggaaaactcgatatcatgttcaacaatgcaggccttattggtgatggtgaagtcagagtgacagacgccagcactgacaacttcaagagagtgttcgatatcaatgtcttgggtggattcttgggag

SEQ ID NO: 202957 - DNA, 392 bp, Gossypium hirsutum
gtttgaggcttaactcactgatatcatactttctagtgcccctagaaccggcacagcctggttaaaatatctcactttggctactattacaagagcttcatacgattattctaccacccctttgcttttgaggatgcctcatgatgttgcgcctatcatggagcttgatcatgctcatagttccgctgatcgacatcttggaattcctctcttggccactcatgctccttattctgtcttacctacatcaataattgattctggttgtacaattatttacatttgcagggaccccaaggatacatctgtttcaatgtctcacatctgtaccaggtatgcagaatcccaaaacacttaacccattgaactagattaaacgtctgagttatttt

SEQ ID NO: 202958 - DNA, 397 bp, Gossypium hirsutum
gttttggtattagctatcttgttaaagatgatcatgaaacggcggttttctatcattcagtgggaggctcttgctttgttgcttattggaattagcataaaccagttgcggtctttaccagagggtactacttcatttggtcttccggttgcaactggcgcatacttgtatacactaattttcgttactgttccatccctagcatctgtctttaatgaatatgctttaaagagtcagtttgagacaagcatttaccatcagaacttggttctttatggatatggggccattttcaatttcctagccattcttggaacttgcatttttaaaggtcccaatagcttggatatcctgcagggacattcaaaggcctccgtgcttttaatattcaacaatt

SEQ ID NO: 202959 - DNA, 428 bp, Gossypium hirsutum
ccttgtccgttcactaataccccttcacaaaccaaaatgcgtggccgatgtaccaccagcagttgtcttactgcatcacgcagtttgtcgagaaagactgcaaactagctgatactgttataaggggattgttgaaatactggccaattactaatagctcaaaggaagtcatgttccttaatgagcttgaagaaattttggaagctactcagcctgctgaatttcagagatgtatggaactcttgttccaaaatattgcacgatgtttgagcagttcacactttcaggtagcagagagggctttggacttgtggaataacgatcacatcgagagcttgattagacaaaaccgcagagttatactgcccattatattccctgccttggaacaaaatgggcataaccatttgaaccaggttgtacagagc

SEQ ID NO: 202960 - DNA, 377 bp, Gossypium hirsutum
ctctgtgtgcttttcttcactgtttgttccccgtcaaaatattgtgtcacaggaagaaaatcccaatttccacgagaaattttaaacaaaaaaagaaacccaaaaatggacaaagaaaagaaattaaaacaaacccaagaagaagaggaaatggaattcaaagactgtgaaaaccatagccaacaagctcaacaagaagaagaagaagaagaagaagaaaaaatcgagataggcgatgaaataattcgaagcaaaattggtatcatgagagcacttgcagagagagatgacccatcagttaaagaagtggatgattttatgatacggagattccttagagctcgggatttggatatagagaaaggcaacaccatgtt

SEQ ID NO: 202961 - DNA, 241 bp, Gossypium hirsutum
gccgtatggttacaaggaagttggggattccgttgagatcggagttccatccgctgctgcgaaagcgtatagagcaaatagccagaagagactgtcgactagcgggaactattataaggcgactgatgaaaaagggcccgagatctaataactcagatggaggaaagttccgaagcgagcttgaacaaattttggaggctactgattgtgctgaatttcagagatgcatggtaccctggtt

SEQ ID NO: 202962 - DNA, 431 bp, Gossypium hirsutum
gccagtggttggtttaggtgtttggcgtatggatggaaaagacgttagagacctcatcatcaactccatcaagcttggttatcgtcattttgattgtgctgctgactacaagaatgaagcagaagttggtgaggcattgtctgaagcattcaaaactgggcttgttaagagagaggacctctttattacaaccaagctttggaattctgatcacgggcatgttcttgaggcctgtaaagacagtcttaagaagcttcaattggattatctggatttgtatctagttcactttcccgttgctgtaaagcacactggagtcggtcaaacggacagtcctttggacaaggatggagtcctggacatagacacgactatatcgttggagactacctggcacgcgatggaagatttggtttccaagggtttagttc

SEQ ID NO: 202963 - DNA, 392 bp, Gossypium hirsutum
cttaaccatttcccaaatctcctccctcctcttctttagcgtccttttcatttccgctcatgcagcgcgctttgaaatccgcaatgagtgctcctacaccgtctgggcagcagcctctcctggtggtggccgtcgcctagaccctcggcaaagttggaccatcgatgtgcctgctggcactgctatggctcgtatttggggtcgaaccaattgcaatttcgatgccagtggtaggggtcattgccaaaccggtgattgtggtggactccttcaatgcaaaggttggggtgtaccttcaaacaccctggctgaatatgcacttaaccaatttggaaacatggatttctacgacatttccttaattgatgggtttaacatccccatggtgtttg

SEQ ID NO: 202964 - DNA, 425 bp, Gossypium hirsutum
ctaccacacacttgctaatattgctacttggagtggtggctctcgccactccctcttttggtacctatgagtctcccaactatgggaagccccctactcctgtttataaacctcctaaggtgaaacccccaccttatgaacatcctgtttataaacctcctaaggtgaaacccccaccttatgaacataagccccctgtctatgaaccaccaaagaaggaaaagcctgagcctaagccaccagtttatacaccttcaaagaaaggagagcctggacccaaaccaccagtatatgaaccttcaaagaaggaaaagcctgagcctaaaccaccagtttatacaccaccaaagaaagagaagcctgaacccaaaccaccagtatatgaacccccaaagaaagaaaagcctgaacctaaaccaccagtt

SEQ ID NO: 202965 - DNA, 396 bp, Gossypium hirsutum
aaaacacatttggggtttggcaaacttgaggagtctcacgattcggagcatcagttcagtcacttctcaatgaatggcctagtagcacctgttgcacctggaccttgaagaatgcccctggctccatggattgcccatgatccatcatgggcagtcttcatgggagtcatcccaaattacttggtataggcgcataacggtttcagctacgacatatcagtatccaccaagcctttaccaaaggtgcctactacattgggaagatgattcggaacaaaggctatggggagctacttgaactacttaatgatcaccaaaaggagctcgctggtcttgagattgatctatacggcaatggataggacttccatcaagtttaagaagctttttacaagc

SEQ ID NO: 202966 - DNA, 439 bp, Gossypium hirsutum
ggacatcttcagggcaaagattgtggatatctcagaacatgcactaactattgaggtaacaggagatccagggaagatggttgctgtgcaaagaaatttaagcaagtttgggatcaaagaaattgctagaacaggaaagattgctcttagaagggaaaaaatgggtgcatctgctccattctggcgattttcagcagcttcatatcctgatcttgaagaaacagtacctgataacgctcttgcaggggctagaaagcaatcagtatttagcgaggccgatgtttctggatggggagacgtctatccggtggagtcgcctgatggctttacaatcaatcaagttcttgatgctcattggggtgttctcactgatgaagatacaagtggacatcaatctcatactttatccatgctcgtaaatgactctccgggagttcta

SEQ ID NO: 202967 - DNA, 377 bp, Gossypium hirsutum
  unsure (1)..(377): unsure at all n locations
ctctgtgtgcttttcttcactgtttgttccccgtcaaaatattgtgtcacaggaagaaaatcccaatttccacgagaaattttaaacaaaaaaagaaacccaaaaatggacaaagaaaagaaattaaaacaaacccaagaagaagaggaaatggaattcaaagactgtgaaaaccatagccaacaagctcaacaagaagaagaagaagaagaagaagaaaaaatcgagataggcgatgaaataattcgaagcaaaattggtatcatgagagcactngcagagagagatgacccatcagttaaggaagtggatgattttatgatacggagattccttagagctcgtgatttggatatagagaaagcaaacaccatgtt

SEQ ID NO: 202968 - DNA, 252 bp, Gossypium hirsutum
cttcttaatgtaacttgggttaatactggaccaggaagagggaggcctgatttcttggcaacggttgatgtagatccgaactcaccaacttattctaaagtcatccacaggctatctatgccgtatgtaggtgatgaactacatcactctgggtggaatgcttgcagctcttgccatggtgatccgtcggccgatcgacgttttctgatccttccttcattggtatcgggtcgtgtctatgtgatagacaca

SEQ ID NO: 202969 - DNA, 446 bp, Gossypium hirsutum
attcagtttacgatctacacacggtggctaccaaaagcatcggtcctccattcattcacggttcacttttcctgcgggaaatccgatcctggaacctagtgtggagatgaattttactagtaaactacttctaggttcccatggcaggctttacaggaatgctttgaaaatgcctgcattaattttggatgagaaagagaaaaaggtctcgaggtttatctctagtaatggattagttgaagatccatgtgccattgagaaggaaagagctttgatcaatccttggacatcccaggagaaggaaatttttatggataagttggctgcctttgggaaggacttcagaaaagttgcttcttttcttgatcacaagacaactgctgactgtgttgagttctattacaaaaatcacaaatcagaatgttttgagaaaacaaagaagaatg

SEQ ID NO: 202970 - DNA, 426 bp, Gossypium hirsutum
  unsure (1)..(426): unsure at all n locations
gttttcctcatttccctttactcgttgaccgaaatttctcgactcaccgtgttcacaacctctagatctgttacttcctaggcccgatttcataatttcaagatctgcttccagcatctaaacgcgaccgtttccggaactcaactcggagattcaatttttaagggtttcgaatttggatgtgcttgtcttttatntggtctactggaaatgtcgattttgcccaaaggtgattcagttcatattcgagaagtttggaacgataatctagaaaaagagtttgctttgatccgtgaaattggtgatacctataattacgtagctatggataccgagttcccgggtgtagttctacgtcctggtggttctttcaagaatatcagtggttattacttccaaactttgaaagattacctggatatgttg

SEQ ID NO: 202971 - DNA, 351 bp, Gossypium hirsutum
ggtatttagcatcaagggatcctgatttgaacaagcttttgaataatgggcttgcttgttcatccaaggtcatcactagtgtaatcctgtcgagttacaaacaagggttgagctccattggatcattggttgatgttggaggtgggattggaggcttaatatcagagatcgtcaaagcatatccacacatcaaaggtgttaattttgatttgccgcatgtcgtctcgacagcaccaacatacaatgcagtctcccatattggtggtgacatgtttcatgacgccatttcaaatgctgacgcaatcattatgaagtggatattgcatgattggactgacgaagaatgcataa

SEQ ID NO: 202972 - DNA, 434 bp, Gossypium hirsutum
atttggagtatgtgaagagagaaaaaaatggacaattccaagcatttcttctgaaatatgtaaatagttgggttgtaagcatctattgccataaggtaattaggttgtccgctgccacccaggattaccccagatccatcatctgcaatgttcatggagttaatcccaagttccttgagataggcaaggaaaggtttgagcaacaacatagcagtatccaccaggccttcaccaaaggtgcttactacattgggaagatgatttggaacaaaggctatggggagctacttaaactacttaatgatcaccaaaaggagctcgctggtcttgagattgatctatacggcaatggagaggactccgatcaagttaaagaagctgctaacaagctgaaactgacagttagagttcatccgggtcgtgatcatgctgat

SEQ ID NO: 202973 - DNA, 408 bp, Gossypium hirsutum
  unsure (1)..(408): unsure at all n locations
ccaagacatcaccaactcgactcttagggatgcggcggacggatcgttgtcaaacccatgggcacatggggctggccacgtcgatccccaaaaagctctttcaccaggcctagtatacgacatctcgaccgaagaatacatcacattcttgtgctcactcggctacaccgtcgaccatgtcaagaccatagtgaaacgccccaacattacatgttcgacgaaattcaaggaccctggtgaactcaattacccatcgttttcagtcttgtttgggggcaaaagggttgttcgatacactcgtgaattaacaaacgtaagccctgcaaggtccatatacaaagtcacagtaaatggaccatcgacagtatggatctcagttaggcccaagacactcatncttagatccgt

SEQ ID NO: 202974 - DNA, 233 bp, Gossypium hirsutum
attcgccgcacggcttcagtctaataagccggggaaaatggtctcacaggaagtttgaacacccaaggcatggctcccttggatttcttccgaggaagcgagcttctcgtcacagagggaaagtgaaggcatttcctaaggatgacccaagcaaaccttgcaagctcactgcctttttgggctacaaggcaggcatgacacacatggtccgagaggtcgaaaaacctggatct

SEQ ID NO: 202975 - DNA, 432 bp, Gossypium hirsutum
actttgcttttttgctttgtttgtttagtaagagaaattgactttcctgggaaaataaaaaaacaaaatatgggtagaggtagggttcaactaagacggatcgagaacaatattagcagacaagtaacattctcaaagagacgaagtggtttattaaagaaagccaatgagatctcagttttatgcgatgctgatgttgctttgattgttttctctaacaaaggaaagctctttgagttctcttctgatcccagcatggagaggatcctagaacgatacgaacgacaaatatatgccccaactggttctgaatcacaggcaaattggtctttggaatcttccaaactcatgtcaactattgaagtcttgcaaaggaacttgaggaactttcgtggagaagagcttgaacccttgagttcaagggacctgcaa

SEQ ID NO: 202976 - DNA, 437 bp, Gossypium hirsutum
aatcgtttctgagacaagcaaagccaccaagacacctttgctctctgtttcttcctaataatgtcaatggcaagttaagcaaacaaacccttgcctgttgatcacccaccatactcaaatcctgtttaagcttcatcttcaaggacagaaataagggaaaaagagagccatgttagatatcttcatatggcttatttctttcttcatcatcattgccattattgttctcctcatttatcagctcacatgcttggctgatttagagttcgattacatcaatccgtatgactcttcatctcggataaacaaagtcgtcttgccagaattcttcgtgcaaggatttttatgcttattctatctagtaacaggacattggttcatgtcactgttatgcactccatatttatactacaatgtcaaagtttacatgtcgaaac

SEQ ID NO: 202977 - DNA, 322 bp, Gossypium hirsutum
gttgattgcatcaagtgttgcagctaggggtttagatgtagaggagcttgaattagtgattaattttgatgtcccaaatcattatgaagattatgttcaccgtgttggtaggactggtagagccgggcggaaaggctgtgctatcacatttatctctgaggatgatgcatgatatgcaccggatctcgtaaaagctttagaactctctgagcaagttgttcctgatgacctgaaagctctcgcagatggctttatggcaaaagtcaatcagggacttgagcatgctcatggaacagtgtatggtggaagtggttttaaattc

SEQ ID NO: 202978 - DNA, 335 bp, Gossypium hirsutum
gcaaaactgttggacttggtgatgtcctcggtggacttcctcccgcaatggctgccaaaggacaccgtgttatgacagtgtgtcctcgctatgatcagtacaaggatgcatgggatacaagtgtgttagttgatctaaaagtcggagacaaagttgtaactgttcggttcttccactgctacaaacgtggagttgatcgtgtctttgtcgatcaccccatgttccttgagaaggtatggggcaaaacagcatccaaaatctatggccccagagcaggttttggactacgaagacaatcaactgcggttcaacttgttatgccaggctgctttgga

SEQ ID NO: 202979 - DNA, 278 bp, Gossypium hirsutum
gcggctgctgctgcttctcaggcagccgcagcctgcgttgccgtctctgatgacgtggcggttgtagaaggttgtattgacaacgatagtgtacagattggggattcatatgattccaagacatcgtttttgatctccgatgggagcatcactgttcatgctggtgaaagattaggtcgcggtatagttactgatgcaattactactccagtggttaatacttctgcatatttctttaagaaaactcaggagcttattgacttcaaagaaaaacgcca

SEQ ID NO: 202980 - DNA, 694 bp, Gossypium hirsutum
  unsure (1)..(694): unsure at all n locations
actttgcttttttgctttgtttgtttagtaagaaaaatttactttcctgggaaaataaaaaaacaaaatatgggtagaggtagggttcaactaagacggatcgagaacaatattagcagacaagtaacattctcaaagagacgaagtggtttattaaagaaagccaatgagatctcagttttatgcgatgctgatgttgctttgattgttttctctaacaaaggaaagctctttgagttctcttctgatcccagcatggagaggatcctagaacgatacgaacgacaaatatatgccccaactggttctgaatcacaggcaaattggtctttggaatcttccaaactcatgtcaactattgaagtcttgcaaaggaacttgaggaactttcgtggagaagagcttgaacccttgagttcaagggacctgcaactnttggaacaacaaattggtaattctctgaagcgaatacgaactagaaagaacaaactcatgaatgaatccatttcagtgctgcagaagagagaaaagacattgcaagaccagaacaacatgctagctaanaagcttaaagaaaaacagcagacaccgacagaacatgcacaacatgaagtgcaacanaaacttgtccaaaactcaccaccatcaacatccatacaaccaccaacaccaccaccggctgaacancggtttc

SEQ ID NO: 202981 - DNA, 410 bp, Gossypium hirsutum
catctccctctacaaaagacaaaagctattttctgaaatcggccatcttttgatcaaagcaaaaacaaccagaattcaatggggaagaaagctgtgttgattggaatcaactatccaggtacaaaggctgaactgaaaggctgcataaacgatgtgaagagaatgtacaaatgccttacagaacgctatggattctctgaagaagacatcacggtattgatagacaccgataattcttatgatcaacccacagggaagaacatcagaagggctttgaatgatcttgtgagatcggctgagcctggggattttctgtttgtgcactacaatggccatgggactaggctttctgctgagactggggacgatgatgatactggctacgatgagtgcaatcgcccctgcgatat

SEQ ID NO: 202982 - DNA, 442 bp, Gossypium hirsutum
ggaaacccttgaactccaaattttaaagcatttgaagaatgtgcactaacgagatggaaattgattccgagtcggaaaaaccaagtgttaaaatcccagaagaaggcggttcaatgcatatgaattcctcggaaaaaaagggaggcgatgatgaaaaagagcagcttgctggtattatggacaagttaaatatcgagtcatcttcttccggcttcaagaaaaaaccagtaattatcattgttgttggaatggcagggagtgggaaaacgacgttgcttcataggcttgtttgccatactcaagcttcgaatattatgggttatgtgatgaatcttgaccccgctgtaatgacccttccatttggtgctaatattgatataagagatactgttaaatacaaggaagttatgaagcaattcaaatctggacctaatggtggaat

SEQ ID NO: 202983 - DNA, 431 bp, Gossypium hirsutum
gcaaagccgcctcttcttttccactggactttgttttgatccgtagcttctcctcttacataaattaataaagcagtagtggcttttatggagaattatcaaatgttcttccctatctcggccccatcaacagcagctcaatcattaccgttaaacatggcacctaattcccaagcttttaacagttttcatgggaattcggttgatgggttcttaggtttgaagagtaccgaagacttgattcagaaaccagaagctaaggacttcatgaaatcaagtcaaaaaatggaaaagaagattaggaagcctagatatgcttttcaaacaaggagtcaggttgatatacttgacgatggatatccgtggaagaaatatgggcaaaaagctgttaagaacaacaaattcccaagaagctattatcgatgcacaca

SEQ ID NO: 202984 - DNA, 428 bp, Gossypium hirsutum
ccagattcaagacttggatgcacagagatttattggcaaatgtctagtaaatgcttctaacagattatcagcggaacaactattgcttgacccatttctcgctaaggatgaagcgacgaggcttgggagtccaaagctctttctaaatcaaagtgaaatcgagaaattgcacctcaacgataatccaccgagaacagacatgaccatcactgggaagcttaatcctgaagatgataccatcttccttaaagttcagattgcagatacagagggttctactaggaacatctactttccctttgatattgtggaagatacgccattggatgtggcaactgaaatggtgaaggagcttgagataaccgattgggatccacttgaaattgcagaaatgattgatggtgaaatttcagctctagtcccacaat

SEQ ID NO: 202985 - DNA, 443 bp, Gossypium hirsutum
ggactcggttgttgatgtaggaaacaacaataacctctacactatcataaaagcagacttccctccttatgggagggattttttgaatcacaaaccaaccggaagattctgtaatggaaaattagcctcggacttcactggttcttaatcccataaaaccctttttaacaccatcttgaatttgcttgctcatttttatattggttcatcttaacaaatggttttggtttggtagcttaaaaccttggctttaatgaatacccaacaacttattttaaccaaaagggccaaaggaaataccctgttaatggaagccaattttgcatcagcttcttctggttattatgagactacagcaaagttatatcatacactttcattgagtaagcaattggagaactacaagcagtatcaaattaatatggtggccattgcagggaaat

SEQ ID NO: 202986 - DNA, 309 bp, Gossypium hirsutum
gttggcaatattcagcaaagggttagtgaatccaccccaagagctgcagagtccagcttcactcacttcatcaatgaagcctaagcttccctttgaaatccttaatggttttgtctcttcaaatcccaccaacgctttttcaatgcggtttggatcttcggcttctttggcttatgttccaccccacaatccttcctccacttataaaaggttgtttagtggagtggatgaaatgcattgcatattcatgggtaatttgaacaatctatgtagcctcttaaggcaatatggtctatcaaggggcaccaa

SEQ ID NO: 202987 - DNA, 256 bp, Gossypium hirsutum
caaagctattgaaaatctgaatggttctgaattcaaggggaagaagataaaatgttcaacatctcaagcaaagaataagttatttattggtaatgttcccagaaactggggggaggaagatgtgaagaaggttgtaaaagatgttggtcctggagtcaatagtattgaattgttgaaggatccaatgaaccctatccgaaaccgtggatttgttttcatagagtactataatcatgcatgtgctgaatactcaaga

SEQ ID NO: 202988 - DNA, 364 bp, Gossypium hirsutum
gaatggctctttcagctgccactcttctcactgcccttgcggtactctgctctttctttttcattctattttacatctcatcaagcaaaaatggaaaaggaaaaggaaaagggaaagccattccgggtccgcgacccttgccaattattggaaacctccacatgttaggcatgcttccacaccaatccctttatcacttggccaaaaaatatggtcctatgatgtccataaggctaggcgttgtgccaactgatgtcgtttcatcccctcaagccgtcgagatatttctcaagacacatgatgctgatttcgcaagcaagccaagacttaaagtcctaaaattaaattacaatggccaaaaggg

SEQ ID NO: 202989 - DNA, 254 bp, Gossypium hirsutum
ataatcccgatgaccactaaaaacacggtttttaaggcatggggatatttgaagcttaacggtgatagtgaaaatcctgctattcttgctgtcaacaggcatctcgggacgtattatatagaagatgggccgttactagctactgatttcgattcacttcctaagggcgcatttgaattcccgattctcaaggcggtcactgagccagcacatgttggagatcatccccaacagtcccgcgctcctcatatctc

SEQ ID NO: 202990 - DNA, 413 bp, Gossypium hirsutum
ggaatcccatattgagaaacaaaatagagatgtgcttcaaaaatctttcaaagagatgatatctactctccctaaagagaattgttggggtattcctgaagctctatatcaatatcagggtttttggctcacccccccttttctacaaggagcattgtcggctcaacaacaattccaggctcaacccactgatatcatcctttgtagctctccaagaacaggtgcagcctggttaaaatccctcactttcgccactattacaagaacttcatacaatgattccaccacccctttactttccaagatgcctcatgatgttgtgcctttcatggagttcgatcatgcccagttttccactaatcgacatcttggaaatcctcttttaaccactcatcttgcttattccttcttac

SEQ ID NO: 202991 - DNA, 348 bp, Gossypium hirsutum
gtggggcggaggcacaggtggcaaggctattggctttgaagtccggggccgaggttaagcccgataggccttatgctgagttttggatgggaacacatgactcggggccaagttttttggctgatggctatggagaaggtcaaaatgtgggtttaaaagagtggattcggaagaatccgaatgtgcttggtcataaggttttggaaaaatgggggcccgatcttccttttctcttcaaggtactttcagtggcaaaagccctttcaatacaggctcatccggataaagaattggccaaagaattgcttaagttgaagccaaatctctataaggatgggaatcacaaac

SEQ ID NO: 202992 - DNA, 407 bp, Gossypium hirsutum
ctcaccagtgcgaagctccctcacgttccgtcgagaccaagccgaaggagctccttacctttttccgagacatggcgctgatgcgtcggatggagatcgctgccgattcactctacaaggctaagcttatccgtggtttctgtcatctatacgacgggcaagaagccgtcgccgttggcatggaagccgccattaccaaaaaggactgcatcataactgcctaccgcgaccattgcacgttcgtcagtcgcggtggaaccctgctggaagtttttgctgagctgatgggacgccaggctggttgctctaaaggcaaaggaggttcgatgcatttttacaagaaggattcgaatttttatggcggtcacgggattgttggagctcaggttccgttaggatgtggcttg

SEQ ID NO: 202993 - DNA, 324 bp, Gossypium hirsutum
  unsure (1)..(324): unsure at all n locations
ccatgatattgatgttgatgatttaaaaaataatacacggtatactggtggctattctgagggaagtcgaactgttaaacttttctgggaggttatgaatgattttgagcccaaagaacgttgcatgctgctaaaatttgtgaccagctgttcgcgagctcctttattggggttcaaatacttgcagccggctttcacaattcataaggttgcaagtgatgctcctctttgggctgcaatcggaggttcagatgtggagcgacttccatcagcttctacatgctataacactctcaagcttncaacatacaagcggtcaagtac

SEQ ID NO: 202994 - DNA, 429 bp, Gossypium hirsutum
ccgaccctttgcaattccaagacacatgaaccaagacacataccacgatggcaacaacgacggagaagcaagccatggttgttggaatcgacgacagcgagcacagtacgtacgcgctgcagtggatcctcgatcacttctttgctcctttcgcttccaatcctcctttcaagctcgtcatcgttcatgccaagccttctgcttcttctgctgttggtctcgccggacctggagctgctgatgtattgccctatgtggatgcggatttgaggaagatcgctgccagggttgttgagaaagccaaggaactctgccttagcaaatcggtacatgatgccgtagttgaagtgggggaaggtgatgcaaggaatgttctctgtgacgctgtaaaaaaacaccatgcctccattctcgctgttggtagccatg

SEQ ID NO: 202995 - DNA, 311 bp, Gossypium hirsutum
cctagggtcgtcgaagcttagactacttcattaaaatcttgatttttaggtaaaaaagaaacacacaaatggttgtgctgtcatcggcaacttcaatgagaaccaaaaaaaccaaagcagtagggattcccgtcgttgatctttccctcgataggtccaccgtatcggagctaatcgtcaaagcttgtgaagactatggtttcttcaaggtcatcaaccatggcgtacctagtgatacaatatcgagacttgaagacgaaggggttcgtttctttgacaaggaagcaggtgaatagcaacgtgcaaggcct

SEQ ID NO: 202996 - DNA, 437 bp, Gossypium hirsutum
tgcttttatatcggggatttttggttgttgaactccagtctaggttctagaatgtataccaaaaatccattaagtcaaaactcttatcttccagcaagaagagaaagacatatcttggtttttttttttgctgtaaatcttgatgctgcgtaaattgttgtggttgatccttgagactcatgtctccagttgtaagtgaaatcctccgatccggttttatgataaattcctccctcagacgcaggacccatctcgttcaatctttctcagttgtcttcctctactggttctatgttttttcataaatgacatgcttattttctttactatatatatatatataattatctgttgctagtataggtgtccagtcgcctttgagggtagattatcctgaaatattagtaatttatatttgaagttttagcagtgagttt

SEQ ID NO: 202997 - DNA, 340 bp, Gossypium hirsutum
gggaaatgtatacaaagcgatatttttacggttggaggctacgattgggcgatttacttctaccccgacggtaaaaatccggaggatagtgcgatgtatgtttcggttttcattgccttggctagcgaaggtacggatgttcgagcgcttttcgagctcacccttgttgaccagagcgggaaagggaagcataaggttcatagtcactttgacagagcgttggagagtgggccttatacgttgaagtacagaggaagcatgtggggctacaaacgattctttagaagaacaactttagaaagttctgactacattaaagatgattgcctaatcatgaact

SEQ ID NO: 202998 - DNA, 423 bp, Gossypium hirsutum
  unsure (1)..(423): unsure at all n locations
gcaaaatcaagctgagttaattgataacttcgtaaagcaagcgtcggctcagaagggaaccgcccttggttctgtaatcctcgaagcgacgtcacatccttccctctttgccttctccgagattcttgccgtgcccaccgtcgctgagcttgaaggaactgaaaactcggtgtacctcaaggtgcttcagttgtttgcccatggcacatggagtgattacaggagcaactgttccagtcttcctcaattggtccctgatcaagttctcaagctaaagcaactcactgtccttacactagctgagacaaacaaggtactaccatatgatgaactaatgatggagttagatgtcatgaatgtccgtgaactggaagatttcttatcaatgagtgcatgtatgccgntatagtaagaggaaagctg

SEQ ID NO: 202999 - DNA, 370 bp, Gossypium hirsutum
cactttgattcccatgttgagcaacataacgaagattagtgtcagaaatctttcaaagagatgatttctactctccctaaagggaacagctggggtcttcccgatcatctatatcagtatcaagatttttggttcacctcacctttcctacaaggagtcctgttagctcaacaacagtttgaggctcaacccactgatatcatactttctagtgcccctagaaccggcacagcctggttaaaatctctcactttcgctactattacaagaacttcatacgatgattctaccacccctttgcttttcaggatgcctcatgatgttgtgcctttcatggagcttgatcatgctcatttttccgctatcgaca

SEQ ID NO: 203000 - DNA, 435 bp, Gossypium hirsutum
tccgtagtcctcttgctgtttttgttcagatccagggatgtgtaatatgcttgactcttgctattgggtgggcttttgctgcttatgtcaggaacagagagatcaatagaatgaaggatgccatgaaatgtggcaatagctttgcttttttgtgccatgatattaatgaacttgagcactctaatcaggtcaatctaccaagagttacagtcgtgatgcctttaaaaggttttggagaacataatctgcacaactggaagagtcagatcacatctctctatggtggtcctctagaatttctttttgtggtggaaagtactgaagatcccgcttaccatgctgtatctcggttaataagggattttaagggggcatcatttgagtgtcttctctgaggctttacttcttgccttcctgattacattgcatgttttt

SEQ ID NO: 203001 - DNA, 417 bp, Gossypium hirsutum
atctcctttccttctccttcatgaaggctacgatttgaagactgtttttgatttccattagcatgcgaattaggccttttcgttataattcatcgcctgaaatatctgttatcgaatacgcttctacttttttttgtttcctgattttgattttagtgataacaactggaaattttgaatgctcgagctgtaatatgggatatttgaattcggttttgcaatcttcaagtcaggttcatgctgaatatggaccggttagcggcggaggccttagccagaatggaaagtttagctacggctgtgcaagctctcctggaaagaggtcttcaatggaagatttttatgaaacaaggattgacggtgttgatggagagatagttggtctttttggagtttttgatggtcatggaggtgcac

SEQ ID NO: 203002 - DNA, 318 bp, Gossypium hirsutum
cagttgtaaaagctgcagttgatgaaagattaagggggctgcaaatttggagggaatcacagggccgggcatctaagctatatggttttaagcatgattctatgtcatcgcttaggaaaacaagtaagacaggagaattggttgattcaaaaactaatggagatctttcacgttccaagtccgaatcaatgaatgaggatgaaaatcttctttgtctgacaggagatgctaagtcggattctgttccagatcttcaacagcaggttgtaaggttaaaggtcgagttgtgcaagttgcttgaagagaaaagatcagctg

SEQ ID NO: 203003 - DNA, 355 bp, Gossypium hirsutum
cactgagcatcaaagtgaagccaggttcaatgagaaaggatggaccaccaaggaaaccaacaactacaatggcaactattacaatggtaacaatgaggccttgttcactgagaaagggtggagtactaaggaaaaccagaatagcaacaactattacaatggtaacaatgaggccatgttcactgagaaaggatggagtactaaggaaaaccagaacaacaacaactattacaatggtaacaatgagtacaacaatgttgagaagcaaggtatgagtgatactaggtacttggagaatgggaagtactactatcgtgtgggttctgagaacaactactacccgaaccggttcgag

SEQ ID NO: 203004 - DNA, 427 bp, Gossypium hirsutum
atggctagcaagtctcatcaagatgcagatcccaatgctgtcatagcaaacgagggagattttatatttaaacccaaagcatttaacattgtatggggaaatgacagtcgttattggcgcattcctcgctcacctataccagatgagcaggaagcagcagagctgattcaggtatcttggttggaagtaacgggttcagtgaaactagagcctttaaccagacatgaaatcagctttaaactcagcttcagaagggattcttttggatggagcggggcacctattttcttgatggccaaggtagggaagaaaggtaagtacaagtggaaaaggctcaaggaactagacaacttgcctaaggaccccattatggttccaaccgatgattccttcactatcgaacctattccttcaaacgaacccgaca

SEQ ID NO: 203005 - DNA, 378 bp, Gossypium hirsutum
ccgctctagaacagtggatccccagtggctgcggcattacgaatcgggggcgagggttcacgctaacatatgggatagacttcacagaaacttgggcacctgtggcaaagcttaacactattcgagtactcctaagtttggctgtaaattgcgattggaaattacaccaacttgatgtacaaaacgcatttcttaatggcaagcttgaagaagaagtctatatgcaattgccacctggctcaaaggctattgaaagtagcaacaagggttggaagctcaacaaggctttataccggttaaaaccatcaaccagagcttggttcgagaggttcacttaaggcattcttcaaaatggcttcaagcagtcccttggcgatc

SEQ ID NO: 203006 - DNA, 442 bp, Gossypium hirsutum
gtaacatcgtccttttgcccaccattatcaaatttccagattttccaggaaaaagaaatcaaaaccacaaggtgaagaaggtaaaaaccagcagcggcaaaggcaataaaaggtgaagccaaagagagagagatatatacataataaaaaagattcttcaaaagaacacagctatggctcctcatggagaaggatcagatgcttcagtggaagccatggttgctcaagtcgaaaaacacccaatttcatcaatccttatcatcattgctatgcaaacagaagctttgccggtggtgaataagttccagttgattgaaaaccctcattcttcgtttccaaaaggggtcccttggatccattatcatggtgcatacaaggacatcataatcaatctagtgtggcccggaaaagatttaacctttggggttgatagtgttggcac

SEQ ID NO: 203007 - DNA, 433 bp, Gossypium hirsutum
  unsure (1)..(433): unsure at all n locations
atttcgagtatgtgaagagagaaaaaaatggacaattccaagcatttcttctgaaatatgtaaatagttgggatgcaagcatatattgccataaggtaattaggttgtccgctgccacccaggattaccccagatccatcatctgcaatgttcatggagttaatcccaagttccttgagataggcaaggaaaggtttgagcaacaacatagcagtatccaccaggccttcaccaaaggtgcttactacattgggaagatgatttggaacaaaggctatggggagctacttaaactacttaatgatcaccaaaaggagctcgcttgtcttgagaatgatctatacggcaatggagaggactccgatcaagtaaaagaaagctgctacaagctgaaactgacagntagaagtcatncgggtcgtgatcatgctga

SEQ ID NO: 203008 - DNA, 314 bp, Gossypium hirsutum
ctcggattttgtgctgccgggaaaccaaagtttgaaagcggcaatggccaagacgccgatagggctagaaccagtggtgggatccctatcatcctctaagaagaaagaatacagagtcactaatcgactccaagagggcaaacgccccctgtacgccgtcgttttcaacttcatcgactctcgttacttcaacgtgtttgccactgtcggtggtaatcgggtgacggtataccaatgcctcgaaggaggtgttatagctgttttgcagtcttatgttgatgaagataaggatgagtctttctacactgtaagtt

SEQ ID NO: 203009 - DNA, 291 bp, Gossypium hirsutum
aaaacatccagtttttctttttctttttccttcagttttctggttttccgacatggggtttgaagatccagacagggtttcaagacatataaagataagggaagtttggtctgataatttagattcggagttcgagttgatcagtcaagcaatcgatgagtaccctttcatctccatggacactgaatttccgggtcttgttttcagacccaaagtggatccaacccggccttacggcgcccagttccggccgtccgatcattacaagatcctcaaatacaacgttgatgc

SEQ ID NO: 203010 - DNA, 366 bp, Gossypium hirsutum
  unsure (1)..(366): unsure at all n locations
gaaagctgctggtttttcatactttgacatatgcactagatttgaagccaaactatgtgcgtgcttgggcaaacatgggtatcagttacgccaaccaggtttgagtttttgttggatgcatggtccaggattagctgaattcatgcatagtgacgacttgtttgagctaattgctgatcttaaagtgtacattctatcattattttgttctatttgtattttgttagatttctggtgtagtatgataagtccggtattttgtttgattgttattgataaactntntatttggtgggatatatanttatatcatagatgttattcttctttttcatattttgaatatggaatttaattttttttaat

SEQ ID NO: 203011 - DNA, 420 bp, Gossypium hirsutum
agtaacactaatggttgtgatgatatcaacgaaaatgaaccagatgctaaaagatggtaagcttggatcatagccaaaaatgaaaaacagattctcccattaatgggttcttgtttatagcttacgcttttgtgattttttttttttgcaggaaaggtgaaaatgagaatgagggtatggtaggttgtggtagcaaaactgtgaaagagcctagaatagtggtgcaaacaacaagtgatattgatattcttgatgatgggtatagatggaggaaatatggacagaaagtagtcaagggaaaccccaatccaaggttagtcattattcttcacctaattgtctactaataggaagcctggatgtgcagtctattcaactaaaattgttgacttcgtcaaaatcttctatacaggagctact

SEQ ID NO: 203012 - DNA, 441 bp, Gossypium hirsutum
cgaggcaccagggatttagcatcaagggatcctgattcgaacaggcttttgaataatgggcttgcttgttcatccaaggtcatcactagcgtaatcctgtcgagttacaaacaagggttgagctccattggatcattggttgatgttggacgtgggattggaggcttaatatcagagatcgtcaaagcatatccacacatcaaaggtgttaattttgatttgccgcatgtcgtctcgacagcaccaacatacaatgcagtctcccatattggtggtgacatgtttcatgacgccattccaaatgctgacgcagtcattatgaagtggatattgcatgattggactgacgaagaatgcataaaaatattaaggaattgtaagaaagcaataccaagagagaatggaaaagtgatacttggtgaaataattttgaaagaagat

SEQ ID NO: 203013 - DNA, 423 bp, Gossypium hirsutum
gcgaagtctacggtaacggcaagatattcgacatcagccataggtacaccgtcgacatgccgtcttgggaatccaaggacggcgtgggacagttcctatggttgcctaaaagcatgaagaacggttccctcgctaataattcggagatgaaactcccaactcacaccggcacccaccttgacgctcccggacacgtcatcgatcggtacttcgatgccggcttcgatgtcgataccctagatttggaagtacttaatggtcctgccctgttgatagatgttccaagggataaaaacattactgccgaggttatggagtctttgaaaataccaaagggagtacgtagagttcttttcagaacattaaatactgacaggcggctaatgtttaagaaagagtttgatacaagctacgttggattta

SEQ ID NO: 203014 - DNA, 230 bp, Gossypium hirsutum
gtaccttccatcgttttgataaattcaaccttaagtataggccttggggtcaaagtaggctcagggaaattttcctcaagccggataatcttatccaaggtcgattccttggggagctgacaaagcaggtcttttctgatcttgccgcaagcaaataccagatggctgaatacagactatctatatatggcccgaagcaaagtgagtgggatcaactggctagttggatc

SEQ ID NO: 203015 - DNA, 433 bp, Gossypium hirsutum
gtgcgtgctttaatgagaacacggcttgggtggagttccataacaaaaccggcagtgaatttggcggtggaactctacatataaaggtcagctacccccatagttggacttgtatggatctttatgtgttcgcaactccgtaccgcgtaacttgggattattattttttgtctcgagagcatacgctcgaaatcaaggaatggcaagataaagctgagtatgaatatgtgaaaaacagggggatttcaatttttctgatgcaagcagggatgcttggaacacttcaagctctatgggatgtgtttcccttggttacaaataccggatggggtgagaattctaatattgggtttcttgagaaacatatgggggctacttttgaagaacgacctcagtcgtggtttactaacatcagtgtcgatgatgtacactc

SEQ ID NO: 203016 - DNA, 434 bp, Gossypium hirsutum
gttttcctcatttccctttactcgttgaccgaaatttctcgactcaccgtgttcacaacctctagatctgttacttcctaggcccgatttcataatttcaagatctgcttccagcatctaaacgcgaccgtttccggaactcaactcggagattcaatttttaagggtttcgaatttggatgtgcttgtcttttatttggtctactggaaatgtcgattttgcccaaaggtgattcagttcatattcgagaagtttggaacgataatctagaagaagagtttgctttgatccgtgaaattgttgatacctataattacgtagctatggatactgagttcccgggtgtagttctacgtcctgttggttctttcaagaatatcagtgattataactaccaaactttgaaagataacgtggatatgttgaagttaat

SEQ ID NO: 203017 - DNA, 288 bp, Gossypium hirsutum
  unsure (1)..(288): unsure at all n locations
gtttcacacatctcacttctctgcagtttcactcccttagagagaaaaaaccatggcggccgcagctcaaatcagcaaaaagcgaaagttcgtcgctgacggagtcttcttcgctgaactcaatgaggtcttgactagggaactggccgaagatggatactctggtgtcgaagtcagagttactcccatgcgtactgagatcattatcagagccactcgtacccaaaatgttctgggtgagaaagggaggaggattagggaactgacctctngtgttcaaaagcgatt

SEQ ID NO: 203018 - DNA, 430 bp, Gossypium hirsutum
gactaaccctaacccaaacccaaaccctgtcaaaggttctggtcactttgaaacagatacttgtataaatccttacaagaatcatatatatagaatctctcactttatacttcgttacttattgcaagaaagagtagtggatgatgatgaagttagtaatgtgacggatggtggtagtatctgcggccctggagatgattgtggtggcggcggctcatggttatttgggactgacagcactgatgtttactaccagaaaatgattgaagcaaatcctgataatccgctttttcttgggaattatgccaagtttttgaaagagattagaggggattttggcagagctgaggagtactgcgagcgaacaattttggcaaatactattgatggaaatgttttgtcactctatgctcatctaatttgggaaaac

SEQ ID NO: 203019 - DNA, 284 bp, Gossypium hirsutum
gcttagttggaccatcgatgtgcctgctgacacgtgctatggctcgtatttggggtcgaaccaattgcaatttcgatgccagtggtaggggtcattgccaaaccggtgattgtggtggactccttcaatgcaaaggttggggtgtacctccaaacaccctggctgaatatgcacttaaccaatttggaaacatggatttctacgacatttccttagttgatgggtttaacatccccatggtgtttggtccaactaatggcggttgtcacaacattcggtgcact

SEQ ID NO: 203020 - DNA, 255 bp, Gossypium hirsutum
ctttcctacacaatggatttctcaacattctgaggctttggcattttcatccttcctctcctttcgtccttctcttgattcttcttctgcagttcgagaccctgaatctgtcgtagctgaagttcataagagcataaatgcttcgaggaggcacttgagttactcgtcatgtggaacggggaaccctattgatgactgctgtaggtgtgaccccaattgggaaagtaatcgtcaaaagctatctgatttctgaat

SEQ ID NO: 203021 - DNA, 366 bp, Gossypium hirsutum
acatgctgttattgagttaactagaaaggctgaggaaataaccaaagctctgaatcttgaccatgttcttgaagtttctaacaaacagtgcccttgttacaattcaatgggagaagctgacattgacaacaataagctaaggaaagcagcttctcgagaagatgccactgacaactatttatattgtccaaaagctaaagatattgagagcggagatttgaaacatttccaaaagcactgggctaatggtgagcctgttattgtcagcaatgtccttgagaatgcatctggtttgagctgggagccaatggttatgtggcgtgcttttcgtcaagtaacaaattaaaaaagtgatcaccaattgga

SEQ ID NO: 203022 - DNA, 382 bp, Gossypium hirsutum
caccagtaaggagtggatcagggccgtccatttctactctgccgttttccaagatctgatatccgagggtttgctctcgcctcactccaagtctctctgcgtggagactcccttgggacaggaagtgttcgcgttgaaagagatcggtgtggagaactccatcggtattttcaagaaagcggccaagcctttggtggttaaaggtgaggggcatcagataccgttcgatgataattcttttgacttcatattctccggcggagctcgcctcgacacatctgctcgcccggcggatttcgcgtcggaaatagctcggaccctgaaacccgaagggtttgtggtggtccacgtcaaggctaatgatacatacagtttcaactca

SEQ ID NO: 203023 - DNA, 254 bp, Gossypium hirsutum
cggagacggagaaacatttgcgccatgagaaacattacaagtatattagctctcatgatgttgcttattgggctcggagttttgatcaggacctcgtgagagcttgtagggatcattatcacaagaggtattggagagttggacttggtttagcgtttaggcttgttgctttggagcctaacttcaggaagctcctaggggatactctcaactctgcctacaagataaccagtagccgattgatccctttggac

SEQ ID NO: 203024 - DNA, 363 bp, Gossypium hirsutum
  unsure (1)..(363): unsure at all n locations
gaaatacacaagaaaaaaaaacaagtgatctgataaattgaagactttatttctgttaacatccattatgagtactgctggtcaagtcatccgttgcaaagctgcggtagcatgggagtcggggaagccactgtcaatagaggaagtggaagtggcaccaccgcagaaggatgaagtccgtattaagatactcttcacttctttatgtcacaccgatgtctacttctgggatgctaagggacaaaaccctctgtttcctcgcatactaggtcatgaagctggagggattgtggagagtgtaggtgagggggtgactgatctaaagccaggtgatcatgttctccccatcttcacnggggaatg

SEQ ID NO: 203025 - DNA, 273 bp, Gossypium hirsutum
cccatgtggtgttatggaccaaatgacttcagcatgtggtgaggcaaataaactacttgcaatggtttgtcagcctgctgagataattggtcttgtaacaattccaagtcatatccgattttggggaatcgattcaggaatacgacacagtgttggaggtgcagactatggatctgttcgaataggagcccttatggggtcgaaggatattaaaagctacagcatcaactaggttgtctcaatcaatgtctactgctaatggggcatcccctg

SEQ ID NO: 203026 - DNA, 444 bp, Gossypium hirsutum
actttgcttttttgctttgtttgtttagtaagaaaaattgactttcctgggaaaataaaaaaacaaaatatgggtagaggtagggttcaactaagacggatcgagaacaatattagcagacaagtaacattctcaaagagacgaagtggtttattaaagaaagccaatgagatctcagttttatgcgatgctgatgttgctttgattgttttctctaacaaaggaaagctctttgagttctcttctgatcccagcatggagaggatcctagaacgatacgaacgacaaatatatgccccaactggttctgaatcacaggcaaattggtctttggaatcttccaaactcatgtcaactattgaagtcttgcaaaggaacttgaggaactttcgtggagaagagcttgaacccttgagttcaagggacctgcaacttttggaacaa

SEQ ID NO: 203027 - DNA, 367 bp, Gossypium hirsutum
gcagctgccaaaggtggtgtgaccaagaagaaaagtaaacattctgatgaagatcactcccctgaacatagccaggctgatgagaatgaacgggttgccggtgatgatgacgacgacgatgttcagtggcaaactgatacttctcttgcggctgcccaacaacgcatccaagagcagttgagtgctgttactgctgatatggtgatgctctctaccgatgaagagaagaaaaagtcgggtaagaagtctcccgagcctgagaccaaagttcatgagaatggtggtggtgctcatgataaacttggtgatgagataaaggtatacttcaagaaaggatcggctccaaatcagcttaaatcctttctag

SEQ ID NO: 203028 - DNA, 322 bp, Gossypium hirsutum
  unsure (1)..(322): unsure at all n locations
tcaagttcaaggattacaattgtaccgctgagtactaccgatctcctttccttgttgtacaaagcangccgcctgccgggtctccgcaaaacatcaagacaacccttaagttggatcgaatggattggaattcatttaggtggaaagatgccgatttgttggtcttcaacaccggccattggtggaactacgagaagaccgttagagggggatgttactttcaagtcggggaaaaaatcgaaaccaagatgaccatagaacatgcgtatcagaggtctttggagactgtgatgcagtggctacgcaacgaggtgaatatgag

SEQ ID NO: 203029 - DNA, 328 bp, Gossypium hirsutum
gaggagttacgagagttacgtggtggttatgaaagtgagcgcgccaatcgcgacgcatcgtgggttgaaacgtgccgcgattgatttggttacggtgttggatattagcgggagtgcgatgaggttgcagatggtgaaacgggcgatgcggttgattatctctttgctcgacgagaaagaccgtttgtcgatcgtgattttctcgtcgagctcgaaacggttgttgccattgaaaagaatgagttccggcggacgacgatcggcgaggaggatcgtcgatgcgttgggaagtaaccgacaagggatgagtgtcaacgacgcgctcaaa

SEQ ID NO: 203030 - DNA, 435 bp, Gossypium hirsutum
catggcatccaatccaagattcgtgttgtccccaatttcccaaaaccaggtattatgtttcaagacataactactcttttactggatcctaaagcattcaaggatacagtggatttgttcgttgagagatacaaagggaagaacatttcagttgttacaggtatagaagctcggggttttatcttcggtactcccattgcattggaaattggagcaaagtttgttcccttaagaaaaccgaacaagttgcctggtaaagttatttcagaagagtatgaactggaatatggaagggattgtctggagatgcatcttggagctgttgaacccggtgagcgggctttggttgttgatgacttgatagcaactggaggcactctttgtgctgctatgaagttactggaacgcgctggagcagaggtagttgaatgtgca

SEQ ID NO: 203031 - DNA, 403 bp, Gossypium hirsutum
ggaatgtcctggagttgtttcttgtgctgatatccttggtctgtctgctagagaaggcatcgtttcgttgggaggcccttacattcctctcaaaactggaagaagagacggtagaaggagcagagcagatgttgtggaggagtatcttccggaccacaatgagaccatctctggcgttctcgacaggtttgccgccatgggtattgacacccctggagtcgttgccctcctaggagctcacagtgtcggcagaactcactgtgtgaagctggtgcatcggttgtacccagaggttgaccctgccctcagccccgaccatgttccacacatgctccataaatgccctgatcaaatcccagaccccaagggccgtccagtatgtgagaaacgatcgtgggacacc

SEQ ID NO: 203032 - DNA, 384 bp, Gossypium hirsutum
gccggatggctacaaggaagttggggattccggtgagggaagagttccttccgttgctccgaaagcgtcaagagcgaatagcgagaggaggggttcgaatcgagggatttattccaattcaacaaaggagaaagggcctgggagcatggaattcacgatggaggaaattttgaaggccacgaggaacttctcccctgctttcaagattggacagggtggatttgtgacggtttataagggaagacttgatgatggaacctttgttgctattaagcgtgctaaacagagtgtatacgataagcatttaggtgtggaattccagagtgaaataagaacactggcacaagtggaacacttgcatttggttaagttttgtgggtattt

SEQ ID NO: 203033 - DNA, 358 bp, Gossypium hirsutum
gtttcttcttcttccatggcggatcctagcaacttctgaactgtatccgccgaagatgaggcgaagtatggcttcacgcgcgaggagatgtactcgagtaacctcgctggcaccgtcaatccttacgaccgtcacttgttcctccgccataggtcctataccgattgggcttcccgcgttgaagaggactccctacctaagcttttctcctccactcttaagtctcgcaaaaacgacatccctgttaagacactgttgacggttattgaaggagagcaatctgatggagatgtgctgaatttccctgaaatgatcaaattcaagggtttgaccgaaggtgaactggatggctttggtg

SEQ ID NO: 203034 - DNA, 412 bp, Gossypium hirsutum
aagaaagcaagccactagggttttaagagaagatcaaaatggcttcaaaaaaattagcttccatggccttctttttggcactcaacattctcttcttttccctagtcagtgcttgtggctcttgctcttcacccacccctaaaccaaggccaaacccaaaacccaacacccccacccctactgcatccgcacgaggcaggtgccctagagatgccctcaaattaggtgtatgtgccaatgtgcttaacttagtcaatgtcaccgttggttcacctccagtgatgccatgctgttcccttctcaatggccttgtcgacctcgaagctgctgcttgcctttgtactgctatcagagctaacatcttaggcatcaaccttaacatcccagtttctcttagcttgctcctcaacgt

SEQ ID NO: 203035 - DNA, 377 bp, Gossypium hirsutum
gtttcaagatgataacttggtggcaatgtataagaagagttacagaggagatttcaagtgtccgccatggttctcacctgaagctcggaggctaatatccaagcttttagacccgaacccgaaaacccgaatcgccatctgcaagatcacggaatcatcttggttcaaaaaatcaatccccaagactaaaacaactaaggaagaaatagaattcgaagcattcaatggagagaaatcttctaaacccgagaccttaaacgcattccacataatttcattgtcggaaggcttcgatttatctccgttgttcgaagagaaaaagaaggacgagaaagatgagttgaggctcgccacgactaggccgtgaagcagcgtga

SEQ ID NO: 203036 - DNA, 387 bp, Gossypium hirsutum
gagcagtaaagaaaatcagctcattcaagctactgctggattaaaggagaaagatgaatatgctctgaaagtacaagatgagttgaatgatacaaagatgaagttctctgaagctgaaactgtcatagaacgaattgcagaactcacaaaccgactagttatctcagttaaggatgaagacaataatgtgttgaggcctgttgatgatgtgagcagcgaattaatgcatcagctggtagataggccttctagtgattttggattgcagaaaaagcaacttgaaactgaactcagattcactaaagagagcttaaaagataaagaaatggaagttcttgctgcacatagggctcttgcaatataagatgaagagctcaatatggttct

SEQ ID NO: 203037 - DNA, 399 bp, Gossypium hirsutum
ctgggatggacctcgtgttcttggcgtgttagccatgtgcatagcgattggggataattatttaaaaccctttgttatatcggaacctgaggtaacaataacgaagagaaaaggggaagaggagtgtttgatattagcgagcgatgggttatgggatgtggtaccaaatgatacagcatgtggagttgcgcgtatgtgtttacgcgctgaaaaaccgctgtcgccaccagtgtcaccgagtagtgaagcggctgtgaagggtggcacagccgagagttccgataaggcctgttgggatgcttcaattttattaacaaaattggccttggccaggcacagtacggataatgttagcgttgttgtggttgatttgaagaaaaatcagccgctgtgatgaaa

SEQ ID NO: 203038 - DNA, 412 bp, Gossypium hirsutum
ctcttttacactcccttcatttttggtctttgaaaccggataagcccttttcactcctttttatactctcattttacgtttatttcttctttctttcatagatccaggccttcttcttcttcttcttcttcttcttctatcaaagttaatataggcaaatataagagaagaaatcgaattaaagtttatctgtggaactagataaagaacagtacgatttgttttgatccaaagcacattcgagccatgtcgtttattggtacccaacagaaatgcaaggcttgtgagaagactgtttatccagttgaacttttgtctgcagatggagttccttaccataaatcttgcttcaagtgcagtcattgcaaagggacactaaagttggctaattactcctcaatggaaggtgttc

SEQ ID NO: 203039 - DNA, 368 bp, Gossypium hirsutum
aaaagattgaggatgttgccaaactcctttgctgggagaagaagcatgagaagggtgaaattgccatttggcaaaagagagtcaatgatgagtcttgtcgtggtagagaagatgattctcaagccaaattctgcaaggctgaagaggctaacgatgtctggtacaagaaaatggatgtgtgcgttactccataccctgatgttagtagttcgagtgaagttgctggtggggaattgaagccattcccagagaggctatttgctgtccctcctagaattgctagtggaagtgttcctggagtttcagttgagacatatgaagaggaccataacttatggaagaaacatgtcaatgcatataagaaaatc

SEQ ID NO: 203040 - DNA, 415 bp, Gossypium hirsutum
  unsure (1)..(415): unsure at all n locations
cttagttcaaagagggtccaatcgtttcgaactataagagaagaagaagttgcagcaatgttgaatcatattgatatagcttcctcgtcatcagcccctgtaaatcttaaaaaactatcacttttgttagcgaaccacgttgtatgtcgcgttacatttggtaaaaaatacggtggcggaggtgacggtggtacgaacagattcgacagggtgttgcatgaagttcagcatctggtgggagaatttgttgtgtcggattactttccgtggatgtggtgggtgaataagttgaatggtatggaaacaagagttgaaaagaacttcgaagaacttgacaagttgtacgatgaagtaattgccgatcatgttgctccgacaagaactaaagctaaccatgaagacattgntgatgttc

SEQ ID NO: 203041 - DNA, 409 bp, Gossypium hirsutum
gtagaaggggagcagggagctgctatccatattgttctagttgactccaacactgcgcgtgttgtaacaaccggacctgaagcctctatgaagctagatgttgtggtgcttgaaggtgattttagcaatgaggatgatgaagattggacacaggaggaatttgatagccatttggtaaaagagcgtccaggaaaaagaccactgctgacgggtgacttgcaagtgaccctgaaagagggggttggaacactaggagacctcacttttactgacaattcaagttggataagaagcaggaaattcaggcttggcttgaaggttgcttctggatactgtgagggtatacgtgttcgggaagctaagacagaggcttttactgtcaaggatcacagaggggaattgtataaga

SEQ ID NO: 203042 - DNA, 389 bp, Gossypium hirsutum
ggctgcaagagcagctgattatagtattggaaagttcaggtttctcaaaagattaatacttgttcatggccgttattcctacaatcgtacagcatttctttcccagtattccttctacaaatcactagttatatgtttcatccaaatttttttctcttttatttcaggtgtctctggaactagtcttttcaattctgttagcttgatggcctataatgttttctacactagtattcctgttctagtcagtgtccttgacaaagatcttagtgaaggaacagttatgcagcatccacaaattttattttactgccaagcgggaaggtttactgtttctccgccttttttggcctttttcctcctatataacagggttaggaaatgggact

SEQ ID NO: 203043 - DNA, 412 bp, Gossypium hirsutum
  unsure (1)..(412): unsure at all n locations
caaaagagttccatgtttttcgctgccatttccaaagccgattctactttagaaattttgatacaagtaaagtaatagaatcttaaagaaaaaaaagtgctaaaaaagctaactttttttttctttctattgttccttctttactctgggttcgtttttcaaagcataaaaacctaatttctaacagagcagctgcaactatcatcacccatggcggcaccgatctgggtatgggctttttacgtagccctaactctatttccttccgttttgggaaactcagaaggcgatgctctttatactttgagaagaagcctatcggatcctgataacgtgctccagagctgggatcccacccttgttaaccctngtacttggttccaaatcacttgcaatcaagataatcgagtca

SEQ ID NO: 203044 - DNA, 380 bp, Gossypium hirsutum
cctctctcatcttccgttgtttatacgtttggttgttagtgaagaagtgctactaccatggctacaaagaagagcgttggggacttgaaggaagctgatttgaagggaaagaaagtgtttgttagagtcgatctgaacgttccattggatgataacttcaacataactgatgacacaaggatccgtgccgctgttcccaccatcaagtatttgatgggtcatggctctaaagtcatcctctctagtcatttgggacgcccaaagggtgtcactcccaagtacagtttgaagcctcttgtgccaaggttatctgaactccttggagtcgaggttaaaatggcaaatgactgtattggtgaaaaagttgagaaaatggtggc

SEQ ID NO: 203045 - DNA, 374 bp, Gossypium hirsutum
gaaaagtcaaaaacaaaaatttcatggctcggaaattctgggtcggtggcaactggaaatgcaatgggacaactgaggaggttaaaaagatcgttacaacattgaatgaagctgaagttccttctgaggatgttgtggaggttgttgtgagccctccatttgtttatcttacctttgtgaaaagtctgttgcggtctgatttccatgttgctgctcagaactgttgggttcgcaaaggtggtgcttttaccggagaaattagtgctgagatgcttgttaatctgagcattccatgggttatcatcggtcactctgaaagaagggctctcttgaatgagtccaatgagtttgttggagacaaagtagcgtatgca

SEQ ID NO: 203046 - DNA, 359 bp, Gossypium hirsutum
  unsure (1)..(359): unsure at all n locations
tgagaaaagataatcgatattcacaangaaaaaagttgaatttggggtggtacatgcttggaggtgcccggcttgggatgttaagtcttggaagaagggattcaaagaccgccagcttttctgctgcgaatagtggtgtcatcccacctccgaccgccacccttagtcaactcatcaacagattccaagcgcgaggtctttctgccaaggacatggttgctttatctggtataatagaccattctttcctcccctgcactgcactactttattatatctatacatctcttctaagctaaattgctttatggtgccgagccaggggctcacacaattgggaaggcaaggtgcgtgctttc

SEQ ID NO: 203047 - DNA, 391 bp, Gossypium hirsutum
tcttacttttcacatagcaaaagggaaagtaatatattgtcaacgtcattggttttgagagggaaaaaagaatggtgaaatatggctgattacagagcagaggatgactatgactaccttttcaaggtaattttgatcggtgattcaagtgtggggaagtctaatttactatccaggttcaccaggaactagttcagcctccagtccaagtctactatctgcgtagagttcactactcgtagtttgaatgttgatggcaaagtcattaaagctcaaatttgggacactgctggtcaaaaaaggtatcacttttactattcccttgccttgcttttctttattactgatctgagtatctttagatctcttctgattttgcattgaatttggt

SEQ ID NO: 203048 - DNA, 388 bp, Gossypium hirsutum
  unsure (1)..(388): unsure at all n locations
aaaacacccatctttaccgtgaagtagttcagaagatcgacggtcgattgggtcctaattatgcgatggatgctgcatggtgctctacgattgagcggaaagctgagcagaggaaagaaaagctcgaaagtgaactcaatgcttataggacgaatttaattaaagaaagtataagaatgggatacaatgattttggtgatttttactatgctcatggtgcattgggggatgcttttaaaagctatgttcgaactcgcgattattgtactacgtcgaagcatattattcagatgtgtttgaatgcaattcttgtgagcattgaaatggttcaatttagtaatgtgactagctacgttagtaaagctgagcanacacctgaagcacttga

SEQ ID NO: 203049 - DNA, 400 bp, Gossypium hirsutum
agagcattgatccagggaattttgaacgccactggggtgttttttattttgatggacagcgttaaataccctctcaaccttggaactacaaacagcggagcattaatatctcctgaaagtggtccccacttttaaaaggaaaggtgccccatgaaaaacttcatccaccctttgatgaaccaccaattagacaaaaagtgagctatttatgtgggcttgctgactgcactagcctcggttatgggacatcttgtggaaacctagatgctaggggaaacatttcttatgcctttaacagttattttcagaagaataaccagtttgaaaaagcctgcgaatttccaaatgtttcagttataacgaaaacggatcccacccctacggtgggaaattgcaaatt

SEQ ID NO: 203050 - DNA, 414 bp, Gossypium hirsutum
aaagtaccaatgacaaacatgggaatgaggccatcccgaggctatcccggaagaacctaccggttctacaaaggtccagtcgtgtttccatttggtcacggcttgagctacacaaactttaaacaatcattagccttagctccaactgatctctcagtgctcattaacaccaatttatttgccactaaaaactactcaacattatcaagcaaagccattagggtgaaacatactaattgtgattcactttcattacccctccacattgatgttgaaaacactggcaacatggatgggactcacactttgctccttttctctgaaccgcccgctgctgtaaaatggtcaccgaacaaacaattaataagtttccatagagtccatgtcattgctgggtcgaaacaacgagtgaaa

SEQ ID NO: 203051 - DNA, 413 bp, Gossypium hirsutum
caatggctataaatcaggagccacaacaacaacagctggtgaacaaccccaagctacccacatccctgaaaaaccaggcactcaagcaccatggaagccagtggttccaaccccaagtgccaagcctgccccaaaaagtgacaccatccttggcaaaccatatgaagacataaggttgcactacacaattggtaaagaactgggaaaaggtcagtttggtgtaacttatctttgcattgagaattcaactgggaaacaatatgcttgcaagactatatcaaagaggaagttaatcacaaagaatgataaagaagatatgagaagggagatacaaattatgcagcatttgagtgggcaacctaatattgtggagtttaaaggtgcatatgaagataagttatcagttcaccttg

SEQ ID NO: 203052 - DNA, 379 bp, Gossypium hirsutum
  unsure (1)..(379): unsure at all n locations
gtcagtggangagctgttggtgaaatggcgttacatttgtgtgaacgttacaagttaatggtcttgaatatcagctcaaaatttgaactgaggcgtctttgccgcactacaggaacttctgctcttttaaaactcagccaaccaaagccggatgatttgggatttattgattcaatttcagtcgaggaaattggtggttctcgggtcactgttgtgagaagcgaataaggtggtaacaagattgccactgtggttctacgaggaagtactgatagtatattggatgatcttgaaagagctgttgatgatggagtgaacacatataaggcaatgtgcatggacagtcgaatggtacctggagcttgagctactgaaattg

SEQ ID NO: 203053 - DNA, 419 bp, Gossypium hirsutum
  unsure (1)..(419): unsure at all n locations
cgaagacgtggcaaaatacgaggtgcaaggcagagatattagcccaccctgtgtacgagcagctactgtcggcgcacgtgtcgtgtcttaggatcgccacgccggtggaccagctcccgaggattgacgctcagctggatcagtcgcagcacgtggtggccaagtactccgctctcggcggcgcagcccagggcttggttgcggacgacaaagaactcgatcagttcatgacgcaatatgttgtattgctatgttcgtttaaagaacaattgcaacaacatgttcgggtccacgcaatggaagcagttatggcatgctgggaaattgaacaatccttacagagcttaacaggagtttcaccgggggaaggtacggnggcaacaatgtcagatgatgatgaagaccaagtggagagtgat

SEQ ID NO: 203054 - DNA, 411 bp, Gossypium hirsutum
  unsure (1)..(411): unsure at all n locations
aacaataacagaagcaaaaaagaaaagggttctttgctcactaagttttattcttttatcatttcatttgatcgccaaaaaaggaaaagcttaatccaaattgaagaggaaaaaaaaagggtgcaccatggatcatgcagctgatgcccatagaactgatttgatgaccatcactcgccatgtccttaatgaacaaaccaagtaccctgaatctcgtggtgatttcaccatcttgctcaatcatattgttcttggctgtaaattcgtttgctcttctgttagcaaggcgggtcttgccaaactatttggacttgctggagaaaccaatatccaaggtgaagaacanaagaaattggatgtgctttctaatgaagtttttgttaaagctttgattagcagtggaagaacatg

SEQ ID NO: 203055 - DNA, 394 bp, Gossypium hirsutum
  unsure (1)..(394): unsure at all n locations
cattccattgctttctttctgattcaatcttcaataagttcccaatatggctgggaaattaactacaggaaatatcactggtattgagaaactgcatattgttggtggagctgaagatcgtactgctattacaaacggcaacgctgcaaagaataaacctctagttgtttgcttcggtgaattgttgatcgactttgtaccgacggttggaggggtttctctggctgaagcacctgctttcaagaaggctcctggtggtgctcctgcaaatgtggctgttggggtatcacgattaggaggatcatccgctttcgtaggaaaggtaggtgatgatgaatttggctacatgttagctgacattttaaaacanaacaatgttgacaactctggcatg

SEQ ID NO: 203056 - DNA, 415 bp, Gossypium hirsutum
gcaaagccgcctcttcttttccactggactttgttttgatccgtagcttctcctcttacataaattaataaagcagtagtggcttttatggagaattatcaaatgttcttccctatctcggccccatcaacagcagctcaatcattaccgttaaacatggcacctaattcccaagcttttaacagttttcatgggaattcggttgatgggttcttaggtttgaagagtaccgaagacttgattcagaaaccagaagctaaggacttcatgaaatcaagtcaaaaaatggaaaagaagattaggaagcctagatatgcttttcaaacaaggagtcaggttgatatacttgacgatggatatcgttggaggaaatatgggcaaaaagctgttaagaacaacaaattcccaagaagct

SEQ ID NO: 203057 - DNA, 265 bp, Gossypium hirsutum
agaaagataaggctttaaaggaaaaggagactggaaaggatgcttataagaagaaagacttagagacggctattcaacattacaccaaagcaatggagattgatgatgaagatatttcatacataaccaatcgggctgctatttatttggaaatggccaagtatggagactgcattaatgattgggagaaggcttgtgaaagaagtatagagctcatagcacacgatgaaacgattgctttaagcatgactagtaatggaactgc

SEQ ID NO: 203058 - DNA, 411 bp, Gossypium hirsutum
cgttagccggtgacggtttcgacaccgtcatcaaggcggaacaagcggtcgatgcggttccgagttgtagaaacaaggtttcatgtgctgatattttggcaatggcgactcgtgatgtcattgctctgtcaggtggaccatcttatgcagttgaattggggaggttggatgggttaagctccacagcagctagtgtcaatggcaagctgcctcatccagatttcaacttgaaccagctcaactctatgtttgcagcacatggactcacccaaactgacatgattgctctttcagctgcacacaccgttggattctctcattgcagcaagttttcaaaccggatatacaatttcagccgtcaaagtgcagtagacccgacattgaaccgagcatatgcgacccaactacaac

SEQ ID NO: 203059 - DNA, 337 bp, Gossypium hirsutum
atcaattttaagccttcttcgaaattcctctttcaagagtctaattttcgtcatgtccctcactgtcaagaccatcactcttgatgtttaaaggtctgataccttctacaatgtaaagaccaatatccaagacaagtaagggttaccaccagaccaactgaagcttatctgtgcttttaaactactagaggatggccacacacattctgactacagcatacatacctaattctcacttcatctggacctacacatgtgaagctgtttgcatagttgtgtcaagtcctatagcgattgtaccatctgtcggtattgtgaaagttctgattccatttac

SEQ ID NO: 203060 - DNA, 408 bp, Gossypium hirsutum
ggactcggttgttgatgtaggaaacaacaataacctctacactatcataaaagcagacttccctccttatgggagggattttttgaatcacaaaccaaccggaagattctgtaatggaaaattagcctcggacttcactggttcttaatcccataaaaccctttttaacaccatcttgaatttgcttgctcatttttatattgtttcatcttacaaattggttttgttttgttagctgagaacattggcttcactgattacccaccagcttatctcagcaaaaaggccaaaggaaataacctgttaattggagccaattttgcatcagcttcttctggttattatgagactacagcaaagttatatcatacactttcattgagtaagcaattggagaactacaagcag

SEQ ID NO: 203061 - DNA, 283 bp, Gossypium hirsutum
atctcattctctccgtcgactcctttctctaaccgtttgcggtgagatctcgaggttggatcctatctctacccgattcatagtgtctctttgacctagatcctaaccaccatggctccagtttcggctttggccaaatacaagcttgttttcttgggagatcaatctgtcgggaaaaccaggatcatcactctctttatgtacgataaattcgataatacttaccagtctaccattgctattgactttctatcgaaatccatgtaccttgtagatcgtacag

SEQ ID NO: 203062 - DNA, 391 bp, Gossypium hirsutum
gcccaaggttttggatctcttggattgatgacatctgggctggggtgcccagatgggaagacaatagaagcagaagctgctcatggtactgttacacggcatttcagagttcaccaaaagggtggtgagaccagcacgaacagcatatcatctatctttgcttggacgcgtgggcttgcacacagggcaaaattggatgacaatcctaaactcttggatttcactgagaaactagaggcagcttgtattggaactgtggaatctggaaagatgaccaaagatcttgcactaatcattcacggctctaagcttgctagggacaagtacctgaatactgaggagttcattgatgcttgtgcagcagatcttaaagcatgactttcttaagcat

SEQ ID NO: 203063 - DNA, 321 bp, Gossypium hirsutum
gcccaactttatctatctattagattcatgacatccgtgctagggtgcctaaactggaagacgatagaatcataaactcctaatcttactcttacactgcatctgatattccacaaaacaaatggttagaccaacactaactgcatatcatctatgcttgattggacgcttatacttacacacatatctaaatcgtatatcaatcctaaactcttgaacttcactgagaaactatatgcatcttgtattgcatctgataaatctacaaagactaccaatcatcttgcactaatcacttacaactctaatcatgctatggac

SEQ ID NO: 203064 - DNA, 421 bp, Gossypium hirsutum
ggatttagcatcaagggatcctgatttgaacaagctttttaataatgggcttgcttgttcatccaaggtcatcactagtgtaatcctgtcgagttacaaacaagggttgagctccattggatcattggttgatgttggaggtgggattggaggcttaatatcagagatcgtcaaagcatatccacacatcaaaggtgttaattttgatttgccgcatgtcgtctcgacagcaccaacatacaatgcagtctcccatattggtggtgacatgtttcatgacgccattccaaatgctgacgcagtcattatgaagtggatattgcatgattggactgacgaggaatgcataaaaatattaaggaattgtaagaaagcaataccaagagagaatggaaaagtgatacttggtgaaataattttg

SEQ ID NO: 203065 - DNA, 417 bp, Gossypium hirsutum
ccaaaacgccaatattgtaatgggagaaatataagtccgcctacggtttctcttcgcggactcgccctcgatctcagcgaaccgatctccagagggaagaatatactcataagtataagcaaattagatcgaggttctctgataaggtcttcaatttgatattggcttggtacttgcttctccaaaattcaatatggttgtacttgcggcttctgttttaagcaagtctggcaaagtgcttgtctctaggcaatttgtggacatgactcgcataagaattgaaggtcttcttgcagcttttcccaagttggtgggcacggggaagcaacacacatatgttgagactgagaatgttcgatatgtttatcaaccaatagaagctctttatttgctacttgtaaccaacaaacagagcaa

SEQ ID NO: 203066 - DNA, 402 bp, Gossypium hirsutum
aaaaaatcttctgatttttctgagtctttttcttatcttctgtttggctcctgagaaagtgttttaagaagaacaatgaatgcattagtggcaaccaacagaaacttcaagctagcagccaggcttcttggtttggattctaagcttgaaaagagtctcctcattcccttcagggaaatcaaggttgaatgcaccatacccaaagatgatggcacattggcaacttttgttggctttaggattcaacatgacaatgctagaggtcctatgaaaggaggaatcagatatcaccctgaggttgaccctgatgaagtgaatgcattggcgcaactaatgacatggaagacagcagttgcaaacatcccatatggtggggctaaaggtggtataggatgtaaccct

SEQ ID NO: 203067 - DNA, 412 bp, Gossypium hirsutum
ctcaccaggacaactcgtttctttatactgaacctaaaacttgcactggtctgtggctagctctagaagatgctacagttgtaaacggctgcctttgggccattcctgaatctcaaaaaaatggtcttgttagaaggttcattaggggtgatgatggagtttactttgataggccgtccccatcgtatgaccagaaagattttgtgcctattgaagtaaaagctgggtctttggttgtaattcatggtgaccttattcatcaaagttttgaaaatcagtcttcaaattcacggcatgcatacagcttgcatgcggtagatactgatggctgcaagtgggcagaagataattggatccgaagaaaagttgaacctaagcccctttacgcttctggacagacttgagagttcgt

SEQ ID NO: 203068 - DNA, 405 bp, Gossypium hirsutum
tgcctctcttcttcccaaaattctcttcagatttcttcctccccaaatcaagcatccattcgcccttcatcttcatctccccaaatattgtaaagggctgctcgcaagtcagcaccgacaacatgaggtgtgaagaagcctcaccgatatcgccctgaaactgtagctctgcgtgaaatccgaagtaccagaaaagtactgaactccttatcaggaaactgcctttccaaaggctcgttcgtgaaattgcccaagactttaaggcaattacctccgccggaacaaagaaaggtgatcttttcttggctgatgttaatagccaactgaagtctaagaatgttataactgatatcaaagctatcaaagtagacatcagctccaatttaaagaagataacggacatga

SEQ ID NO: 203069 - DNA, 371 bp, Gossypium hirsutum
attgatgatcctgtaaacaagcatgctcggagggtctggtcatcagttgcagtttatggaagtttgattgtgatgctggtatttttgccagtcaagtttgctatgaagatggcaccatctatcttcccacttgatatatcggtatctgatccatttactgagatcccagctgacatgcttctctttcaaatatgcattccatttgccattgagcattttaaattgcggacaacattcaagtctcttctccgctactggtttactgcatttggctgggcattaggcttaacagagtttttacttcccagacctgatgagaatggtggccagtaaaatgctaatgtagaaccaggtcagctagatagaccaca

SEQ ID NO: 203070 - DNA, 398 bp, Gossypium hirsutum
gcagaatacagcgatgccttgaatgaagttactgcattgtatgttggcaaaaaaggattgggaaagcaggtggcagctaaaccaaaagagcaaaagagtgcagatggaaatagttctgataaggtgaacttaggtagcaggccctcatctgaaatagatcttccttgtgctgaattgggaaaggtgcgattgagatttgctcctgaacctagtggttatctccatatagggcactctaaagcagccttattaaatcaatactttgttcaacggtaccaaggtgaagtaatcttgcgctttgatgataccaatcccaccaaagaaagcaatgaatttgtagaaaatcttataaaagatgttgagacattgggcatcaagtatcaaatgatcacctatac

SEQ ID NO: 203071 - DNA, 358 bp, Gossypium hirsutum
aaacaaacaagacgtcagctaagatgaatatgggcaatgctaatggggaggatgctattgaggcactccaatcacaagctcacatttggagacatgctttcaacttcgtaagcttcatgtctctaaaatgtgcacttgatttaggcatccttgatatcattcatgatcatggcaagcccatgactattacccagctggttgctgcgctacagattctcaaccctactaaagcatgcgacatttataggctcatgcgcattctagttcactcggacttctttgcacgccaaaagcttgacaatgatgctcaagaagaaggttatgttcttaccaactcttctcgaattttgctcaagaa

SEQ ID NO: 203072 - DNA, 397 bp, Gossypium hirsutum
cagacttagagacttatgtacaggcaaacatggagaaagttggaagtgacaacaatctaggtttggtgaagcaggttgtatcatctatatacaagcgaaacatccagaggttgacccagacatatttaacgctctcacttcaggacatagctaacacggtgcaactgaatagccccaaggaggctgaaatgcatgtccttcaaatgatccaagatggtgagatatatgcaacaatcaaccagaatgatgggatggttagattcgtagaggatcctgaactatataagacctgtgaaatgattgagcatattgacttatcgatccaaaagttgatgaccctctcaaataagctgactgtcatggatgaactcatgtcatgtgatccattgtatctagg

SEQ ID NO: 203073 - DNA, 398 bp, Gossypium hirsutum
gttatgccggaacatttaacgagaagaaatgtggaactgattgtggaggggcctctcaaagatggtaccacgttcctcgttcatggctcaacccaacagggaatttgttggttgtgtttgaggaatggggtggagatccgaatggaattactttggtacgccgagaaactgacagtgtctgtgctgatatctacgagtggcaaccgaacctaatgaattacctgatgaaagcctctggtaaagtcaacaaacccctaaggccaaaagtgcatttagagtgcgatgctgggcaaaaaatctcagcagttaagtttgccagttttggaacaccaagaggagtctgtggaaactaccgcgaatgaagctgtcacgctcaccactcttatgatgcttttact

SEQ ID NO: 203074 - DNA, 417 bp, Gossypium hirsutum
  unsure (1)..(417): unsure at all n locations
ggtgaacttccctgatgagactccacgtaccactccaaagcatgctgttaaaatgaattctcagaaacctctttccgggtcaaatttgagttctgttcaatcaagtctcaacccagatttcagttactcgaacaaacttgagcagggctactatgataccgtgggtttcattgaagagaagtcactaatggatcagtttgcatatgcagaccctgttagagctgctgtagatgatgggttaaaaccctttgctgaacctgagaataccgcttcgtattttaactcagatcagggaagtaacaactttgacagttccgaccttgtctggggcgaacagggtgccaagactcctgaaatatcatcctctcttgaacctactctagaggtcaacgagtttctggacaacgcanaccctac

SEQ ID NO: 203075 - DNA, 408 bp, Gossypium hirsutum
gtttcacacatctcacttctctgcagtttcactcccttagagagaaaaaaccatggcggccgcagctcaaatcagcaaaaagcgaaagttcgtcgctgacggagtcttcttcgctgaactcaatgaggtcttgactagggaactggccgaagatggatactctggtgtcgaagtcagagttactcccatgcgtactgagatcattatcagagccactcgtacccaaaatgttctgggtgagaaagggaggaggattagggaactgacctctgttgttcaaaagcgattcaagttccctgaaaacagcgtggagctttacgctgagaaggtcaataacagaggcctgtgtgccattgctcaggctgagtcccttcgctataagctcctcggaggtctcgccgtccgtag

SEQ ID NO: 203076 - DNA, 410 bp, Gossypium hirsutum
ccaaaatcgacgtggagtgggtgcatgtaatcagcgaatgctgggctaatcctttgaaaggatttatgagggaagatgagtatttgcaaagcttacattttagttctctgagattgaaagatgggtatgttgtcaacatgtcacttcccattgttttggctattgatgatgagactaaggagagaatcgggtcttcttcccatgttgggttggttggacctgatggagacttgatcgccattcttaggagcattgaaatctacaagcataacatagaagaaagaatagctagaacatggggaacaactgcaccaggtttgccatacgtggaggaagtcattactcctgctggaaactggctcattggaggtgacctagaagttttgaaacctataaaatataatgatggg

SEQ ID NO: 203077 - DNA, 401 bp, Gossypium hirsutum
atacttcaaaagctcatctgtcaccccagagccccttgtctccgccgaatctcctttttcccccgtaaaaaatgtctctggtggccaacgaagattttcagcacattttgcgtgtcctgaacaccaacgttgatggaaagcagaagattatgtttgctttgacctccatcaagggtatcggaaggcgttttgccaacattgtttgcaagaaagccgatgtagacatgaacaagagggctggtgaactgactgcacaggaattggacaatctcatgacgattgtggcgaacccgaggcagtttaaaatcccagattggtttttgaacaggcagaaggattacaaggatggaaagtattcccaagttgtgtcccatgctctcgacatgaagttgatagatgac

SEQ ID NO: 203078 - DNA, 325 bp, Gossypium hirsutum
attcttctaaagctcatctgtcacctcatatcggctggggttcgtctaatcgcctgtatccatcgctcaaaatgtctcagtatgccaacgcctatcttcagcacattttgcgtagtcctgtacaccaaccttgatccaaagcagatgattatgtttgctatataccgacagtaacgatatcggaatgcgtttggccaacatcgcatgctcgaatgccgatatatacatgaacctcaaggctcgtgaacagtctgcacctgatttctacaatcctctgacgattgtggcgaacttgaggcagactaaaatcccaaattggtttgtg

SEQ ID NO: 203079 - DNA, 371 bp, Gossypium hirsutum
cacaactccacttcctggaaagatccactgctgttttctttccccaaagaaatcccattgtttttatttagagattccttgtacaacttttcttgtttctcaaagaaggtccaagttgagtcagagaggatgttggagatgtgcacaaggccgttagagatgtgctttggaggaggtggaggtggaggcgatgagctcttatggcatatggatttgaagccctacgtttctggggactattccatagcagttgttcaagccaattcctctttggaagatcaaggtcaggtgtttacttccccttccgtcacttacgtcggcgtctacgacggccatggtggacctgaggcttcccgtttcatcactcaaca

SEQ ID NO: 203080 - DNA, 405 bp, Gossypium hirsutum
ggcaagcatgactacaatagctgatataaatgacaaatgggcttcccatgctggacctggaggatggaatgatcctgatatgctggaagttggtaatggaggcatgacttatcaggaataccgtgctcattttagcatttgggctttgatgaaggcccctcttttaattggttgtgatgtaagaaacatgactgctgaaacccttgaaattttaagcaataaggaggtcatttctgtaaaccaagactcactaggtgtccagggaaggaaagtttatgtttctggagaagctaactgccttcaggtttgggcaggacctttgtctggcaatcgcttagtcgtagctttctggaatagatgttccaaagctgcaactataacagctaggtgggatgtccctcgtct

SEQ ID NO: 203081 - DNA, 357 bp, Gossypium hirsutum
cggaaactaactatgttccaattacacgaggcaatagagtggtactcatgattaatggcttgggtgccactcctgtgatggaactaatgattgcagctggaaaaactgtccctaagttacagctggaatttggacttgctgttgaaagagtgtatacagggtcatttatgacctctcttgatatggctggattttcaatatctataatgaaggcagatcaaactctgttgcaacgcctggatgctcccactaaggctccacattggcctgttggttctgctggtaatcgtccacctgccaagattcctgttccattgccaccatctcgttcaacatagagtgaggagtcattaagtc

SEQ ID NO: 203082 - DNA, 375 bp, Gossypium hirsutum
cggagactggatcggacctttggtgacgaacgcggtggaacaagtgatggaagtgatgcacgcaccggtttacttcgagaagtacgacgttcacggcgacatgaaacgggtaccacaagaagtgttggattcgataaagaagaacaaggtttgtttgaaaggagggttaagaacacccatgggaggtggagtcagttcattgaatatgcaattgaggaaagaactggatctatacgcttcattggtcaactgttgtaacttacccggattgccgacccgccatgaaaacgtggatatcgtcgtaattagagagaacactgaaggggaatactcgggtcttgaacatgatgtggtgcctggtgttgttgaaagcct

SEQ ID NO: 203083 - DNA, 361 bp, Gossypium hirsutum
gaacatcttgaaggacgagcatgtctaaatgacttgcggtcacgtgaccatagaaaatcccacatgcgaagggctgaaaacatggaattctacaggtttggaccaacatgtgatccaaataatataggattgaagggtttcaaacagccagaactagacgtgaatgattggatggcatttcagaacatgggtgcttatactgcatctcctgtgaacgatttcactggctctataccctcaactgttccaacttatatactgactcttattgcagacgcaagacgagaacgttaatatggtcggacttatatacttgactgcttatatattctcgcattcatgacacgatcaaagacctggt

SEQ ID NO: 203084 - DNA, 362 bp, Gossypium hirsutum
cttttagattccctctccattgtactgatctttctttctttagaattactcactcctgttctagatgaaggttctctccccaattcttgcttgcctagcgcttgctgtggtggcaagtcatgctgctctctcacccgagcaatattggagctataagctgccaaatactccaatgccaaaggctgtcaaagaaattctacatccagaactgatggacgagaaaagtacctctgtaaatgtacgaggtggtggtgtaaacgtcaacacaggaaaagggaagccagcgggtggcactcatgtgaacgttgggcgccaaagatttggagtgaacaccggtaaacccagggggtggcactcatgtg

SEQ ID NO: 203085 - DNA, 418 bp, Gossypium hirsutum
ggcatgttcgatggtgaaccatcagctcaaccgtatgggcatctcggtccgagacatgtgtgtaccccggatcataaacaactagccttggaagctgctaggcaaggcatagttttgttgaagaactctgggtctttaccgttgtctacttcacgtcatcgtaccgtcgcggttattgggccgaattcagatgtcacagaaacaatgataggaaactatgcaggggtggcatgtgattacacgagtcccttgaaaggcatttcaagatacgtgaggactgttcatcaagcatgctgttcaaacgttgcttgcaaagcaaacaatctggttggattcgccgaggtcgctgcccgccatgctgatgcaacagttctcataatggggctcgaccaatcgatagaagcagaattcaaggaca

SEQ ID NO: 203086 - DNA, 407 bp, Gossypium hirsutum
ccgcatctttgaggtttgatggagccctgaatgtggatgtgactgagttccagactaacctggtcccatatcccaggatccactttatgctttcttcttatgcccctgtcatttcagctgagaaggcttaccatgagcagctatcggtggctgagataaccaacagtgctttcgaaccctcttcaatgatggccaaatgtgacccacgacacgggaagtacatggcttgctgccttatgtaccgaggagatgttgtgcccaaagatgtgaatgcggctgtggccaccattaagaccaaacgcacaatccaatttgtggattggtgccctactggattcaagtgcggtatcaactaccagccaccaactgttgttccaggaggtgaccttgccaaggttcagagagct

SEQ ID NO: 203087 - DNA, 401 bp, Gossypium hirsutum
  unsure (1)..(401): unsure at all n locations
aaatcattgaagaagttccatgacactgtttgcagtacgctgcaaagatataaaactaacttatttcatcatgatttttgcctctgttcactttgttctctctcaccttcccaacttcaactccatttcgggtgtctccttggctgccgccgtcatgtctttgagttattctaccattgcttggggagcttcagtggataagggagttcaacaagatgtgcaatatggctacaaagctaagactacagcaggaacagttttcaacttcttcagtgccttgggggatgtggcttttgcctatgctggccacaatgtantgttggagatccaagctacaatcccctctacacctgagaagccatcgaaggaaccaatgtggagaggtgttatcgttgcctata

SEQ ID NO: 203088 - DNA, 394 bp, Gossypium hirsutum
gtcttcaacctcggcaaatggcgttattttcttcggcgagggtccttacgtgttcctccctggtgttgatgcatcacagtcgcttacttacacgccactcttcataaaccccgtaagcacagcatccgctttccctatgggcgaagcctccgccgaatatttcatcggcgtaaagtccatcaaggtaaacgaaaactccatctcattgaatacatctttattatccatcaacaacgaaggtgttggtggcacaaaaatcagcaccgtggatccctacactgttctcgaatcttcaatcttcaaagccgtcaccgaagccttcattaatgaagctactgccatgaacatcagtagagttgccggtgtggctccatttgaggtgtgtttcagctcg

SEQ ID NO: 203089 - DNA, 405 bp, Gossypium hirsutum
ccaatgccaagcttctatcaggaacctacacctccaaaggtggaattaaagaagataccacctacaagagctaaatctccaaagcttggtcggaggaaaagctcaactccttcagacattgatggtaacagcaataacaatcaccaaccaggccggctaagtctggatgagaaagcatctcagagcatctctgccaaagtgatttctcctgtccatgcgaagaagtcacagaggaaatcacttcccaaactgccttctcagaagacaagtttgtccggtgcaaaaaatgaggaacagaaatccaaggagtctgatcaggaaacgacttctaaaccgaaagcaacatctaaagtaacaagggaagagagtaccgcatcatcttatttgaaaaatgaagaatcatct

SEQ ID NO: 203090 - DNA, 423 bp, Gossypium hirsutum
  unsure (1)..(423): unsure at all n locations
ccaccgggtgcttccattcacgtcatcgattgcttccgttcacgctgctttcttcatcgtctccatcaattgcttgcttcacttttcacttagtggctcgctattttttttttcaaagcattgcaccatattcttaagttgcttcatccgcaacttaggttgtaaccgtgaagttctggtggttgcttgctttaccttaccttaaaaatgtcatcattaaagaatgctatcagcagacgtgctcacaaggaacgtgctcaaccttcatcgaggaaaaaatttgggcttcttgagaaacaccaggattatgtcgtccgtgctaaagcattccacaagaaagaagaaatgttaccgaaactcaaggagaaagctgcattcagaaacccagatgaattntactttcagatgataaaaacgagaact

SEQ ID NO: 203091 - DNA, 410 bp, Gossypium hirsutum
gcctgatcgatggccagaaaggttggaaaaagcaccttattggttgagttcccaagttggagtttatggcaaagcagcactagaggattttgctgcagacaatgagcactggaaacgggtggtaactaagtcatacctaaatgggatgggaataagctggtcatctgtcagaaatgtcatggacatgaatgctgtttatggaggatttgctgctgcactaaaagatttgagtttatgggtcatgaatgtggtcccaattgactctccagatacacttcccataatatatgaaagaggtctatttggcatgtatcatgattggtgtgaatcgtttagcacctatccaaggtcttacgatcttctccatgccgaccatctattctcaaagcttaacaagaggtgtaatttgg

SEQ ID NO: 203092 - DNA, 387 bp, Gossypium hirsutum
actcatagctagtttactcccccaattaaactatgtttgttctcttttcttttcttttgttactttgctttgggtctacttttcctctcaaattcctcattttcagccatgatttcacttaaaccttgatcgattcttctcatatcagccattttccgtgtgggtttaatcctatttggtgaatggcaagatacccatgtggcagttcgatacacagatgtggattatctcgtcttctccgatgctgcttctttaatggcttccggtcaatctccttataaaagaaccacttatcgctattcacctttacttgctttcttattaatccccaattcttttacttctcgatgttggggcaaatttctcttctcagcttcacatttgttc

SEQ ID NO: 203093 - DNA, 365 bp, Gossypium hirsutum
cttcactcttctctcaccatgtcatggctgtctttctaggtcttgttgctgattacttgtagtgccaaagctgacggtccttcatctgacacttttatgactgtcaacgacgtagaatttgcgccgtttgttgtcgaatatgacgcacatctccgggtcatatgcatagctgatgcccgcttccaacttgcgttgcataacaccacccctaatgccttaacccttgctggacgcatggctacaacgctgttccgagtcgctcttccgataagtttgggaggccaacatgatgaaccctgctcgcgagagctccacgtactatctctggtctgtcaggagccttgacttggctgatgccgattgtc

SEQ ID NO: 203094 - DNA, 380 bp, Gossypium hirsutum
gggatttaacctcaaggagcttattgatgagcgtactggcatagcaggagctttcaatcttgcagatgttgttccttttctgggtgctttcgacctacagggactcaaagcacgtacaaagaaactcggtgaaaaacttgacaaagccctcgagacgatcattgacgaccatgaacaacataagcaggatgatttcgtcggtacactgcttaaagagttaaatcaaccaatgaacaatgatggtgatataatggatcggaatagcatcaaagccataacaatagatatgatggtgggtgccttggacacttcagctgccacattggagtgggcattatcagagctcctaaggcatccaagggtaatgttaaaacttcaac

SEQ ID NO: 203095 - DNA, 398 bp, Gossypium hirsutum
gtttcataaaacatgaagtcccttcaccgttctttgccattgcttttcgttgttgtttgctcattgtcatgggttaatgtttcagctaacagccatgatgattctcttgattgcctttcttcatatcatcccgatgaatcctcttccatttctaaagttacttacactgaaacaaactcatcatattcggcagttttggaatcttccattaggaatcacaggttctcaacgccaaatacccccgaaaccattggttattgcaacaccattgaacatttcccatgttcaagcaacgattcgttgctccaaaaagcatggcctccaaatcagaactcgaagtggtggtcatgactacgaaggtctttcttatgtctcccatgtcccatttgttgttatcg

SEQ ID NO: 203096 - DNA, 410 bp, Gossypium hirsutum
ccaaaacgccaatattgtaatgggagaaatataagtggtcctacggtttctcttcgcggactcgccctcgatctcagcgaaccgatctccagagggaagaatatactcataagtataagcaaattagatcgaggttctctgataaggtcttcaatttgatattggcttggtacttgcttctccaaaattcaatatggttgtacttgcggcttctgttttaagcaagtctggcaaagtgcttgtctctaggcaatttgtggacatgactcgcataagaattgaaggtcttcttgcagcttttcccaagttggtgggcacggggaagcaacacacatatgttgagactgagaatgttcgatatgtttatcaaccaatagaagctctttatttgctacttgtaaccaacaaac

SEQ ID NO: 203097 - DNA, 399 bp, Gossypium hirsutum
ctcggattttgtgctgccgggaaaccaaagggtgaaagcggcaatggccaagacgccgatagggctagaaccagtggtgggatccctatcatcctctaagaagaaagaatacagagtcactaatcgactccaagagggcaaacgccccctgtacgccgtcgttttcaacttcatcgactctcgttacttcaacgtgtttgccactgtcggtggtaatcgggtgacggtataccaatgcctcgaaggaggtgttatagctgttttgcagtcttatgttgatgaagataaggatgagtctttctacactgtaagttgggcctgcaacattgatggtacaccatttgtggttgctggaggtattaatggcataatccgtgtaattgatgcgagcaatgagaa

SEQ ID NO: 203098 - DNA, 404 bp, Gossypium hirsutum
ccatgatattgatgttgatgatttaaaaaataatacacggtatactggtggctattctgagggaagtcgaactgttaaacttttctgggaggttatgaatgattttgagcccaaagaacgttgcatgctgctaaaatttgtgaccagctgttcgcgagctcctttattggggttcaaatacttgcagccggctttcacaattcataaggttgcaagtgatgctcctctttgggctgcaatcggaggttcagatgtggagcgacttccatcagcttctacatgctataacactctcaagcttccaacatacaagcggtcaagtactctgaaagcaaagcttcgttatgcaattaattctaatgctggatttgaactttcttaaggacctgagatttttaactggc

SEQ ID NO: 203099 - DNA, 396 bp, Gossypium hirsutum
acggtgttgatgagtgaaggtacagttccacttgaaggtcaagttctaacaaaggagatgcatctgcatgctgagtttggctttgcagctcactggagatacaaggagggtgactgtaagtactcttcatttgtacttcagatggttgagtgggctcgatgggttgtgacttggcattgtgaaacaatgagcaaggaccaatcgtcaatatgctacattgattctgtcaagccaccctgcaccttccctactcattccgatgattgcccgttctcttataagcctcactgcaaccaggatggacctgtctatgttatcatgatcgaaaatgataaggtatgattcttaaatagcacttcattgcttttttaagctgagcctgtagtcatgcttttg

SEQ ID NO: 203100 - DNA, 410 bp, Gossypium hirsutum
  unsure (1)..(410): unsure at all n locations
actgtaaagaatataatatagatatgagtgatctacagtgcctttctccaacacatgagccacgtgtttctgatcacatggagcagatcaaagatatgataactcagattataaacaaagactttggatatgttgttgacggcgatgtgtttttcgctgttgataaattcccaaattatggcaagttatctgggcagaagctggaaaacaatagagcgggtgaacgtgttgctgttgactcaaggaagcgtaatccttccgactttgcattatggaaggctgcaaagccaggtgagccatcttgggacagctcatggggacctggacgacctgngtggcacatagaatgtagtgcaatgagtgcgcattatttaagcttcaaatttgacattcatggtggtgggcttgat

SEQ ID NO: 203101 - DNA, 378 bp, Gossypium hirsutum
caaaagcctgacgtgtttaggggaactgtacgctatgcaagtgcgcatgctcatttgggtaggacaggcactcgaagggatgaccttgagtcattggcttatacactaatacttatacttacgggaaaacttccctggcaaggttacattgcggagaacaaaggatttcttgtttgtaagaagaagatggcaacttctcctgagatgctttgttacttgcgccctcctcctttccaacagtctcttgagattgtgaccaacatgaaatttgatgaagaaccaaattactcaaagctcatttctattttacgtagtagcattgatcccaattcatcaatatgtactatccaaattgatggagctattaagatgggtcaa

SEQ ID NO: 203102 - DNA, 413 bp, Gossypium hirsutum
gtcagcttcaaaaaccatgtcatccagtggttcgaagtgcttgatgggttgctgggtccatactggaaggcagctggacttgctttcaactgtactttcctcttattcggatctgtcatacaactcatagcttgtgctagtaatatttactacatcaatgacaagctggataaacggacatggacctacatctttggtgcttgctgcgcaaccacagttttcataccatcctttcacaactatcggatttggtctttcattggccttgggatgactacctatacggcctggtacatggccatagctgctgttcttcacggccaggccgagggcgtaactcacagtggtccaacaaagctagtactctacttcaccggagctaccaacattctctacacctttggcggacatgc

SEQ ID NO: 203103 - DNA, 401 bp, Gossypium hirsutum
ctcagcttcaacaaccttgtcatacagtgtattaaagggctttatgatttgatgggtccatactggatgacaacttgacttactatcaactgtactttgctcgtattctgatctgacatacatctcataagttgtgctaataatatgtactacatcaatgacacgcatgataaacagacatggacctacatcttctgagcttgcttcgcatccacactactgataccatactttcacaactatcggattaacgatttcattgtccttggcatgactacctataccgcctggtacatggacatagctgctgtgctttacggtcagaccgtaggcgcaaactcacagtgatccaacacagctagtactctactttaccgatgctaccagcattgtctacacct

SEQ ID NO: 203104 - DNA, 255 bp, Gossypium hirsutum
ccttcaaggaaatttccaacaccatttcattgggaccagtcggccttcttgacatggtcaacagtagcggtgccgtggcgaagttcgaagtacacatgacatccaatgagaaactgcagttctttgatggcgaggttcactcggagttgacaacttcactcatcaacaaccggaatccatcagcagcgatcactctcacagtccgacgttgcgggaggtttcggtcctactcatccctaaatacggtaaactccc

SEQ ID NO: 203105 - DNA, 375 bp, Gossypium hirsutum
ctaaagttcatagctgataaggtcgacacaatgattgctaaagacactggtttggtcgatgaccttgataaagagctcagcacatctgcaacgagggctcatgaacggtgtgcgatggctctgtcatatgtcactaggagcatacaggacaatactatctatgccaagggcttgaaactaatgggtgaccaggctaatgctggcacggatcacttataaaaggtcttactagatgcgacagcgacttaattaaatgccgcagcactgatctgcatgaggactgtaattcgtgaccttgatctcgatcccagtacataattatgagaacacgatcctagtcttattgcatcccaaagctagatatctgaccattta

SEQ ID NO: 203106 - DNA, 350 bp, Gossypium hirsutum
gttgtattctcacggaacgcttgcagatagtacggtcgtggctctgaaacacacccgggatttggatttggaaggcaaccaagatttctcgaccgaagtctatatcataagcaaaatcagacaccggaaccttctttccctcccaggttgtcagcgttaccaatgacatcctgacacgcagacgacgatctctggcctatgatctcatatcaaatggcagcctcggtcaccatctattcactgatctcactaggcaaaaactgatccggcctcaccggacgaacatacttcttgatgcaccccacagtctagcttacttacactatggaatcaaaccatcgatttatcat

SEQ ID NO: 203107 - DNA, 397 bp, Gossypium hirsutum
attgcttcccacaacattatttctcatgtcgggggcggggatttgatgaaaaatggcggggtacactctcctcagcagatgtcccacctttaccctggcaggaaccctatgatttcaatgccgacgtctcttgattctcctaatgaacgtgttagaagcttctcacaccgtagaaatgaactgaattctagtaatgctgataagaaacaatatgaacttgacattgaccgcatcatacgtggggatgacagcagaacaacacttatgattaaaaacatacccaacaagtacacttcaaagatgcttctggcagccattgatgaacattgccgaggaacttatgattctatttatttgccaattgacttcaagatcaaatgccatgtgggctatgccg

SEQ ID NO: 203108 - DNA, 424 bp, Gossypium hirsutum
cagcaatgtcccacgctgtgatatatgtgaaaatgcacctgctttcttttactgtgaagtggatggtagttccctttgcctgcaatgtgatatgattgtacatgttggaggtaaaaggacccatgggaggtatctcttgttgaggcagagagttgagtttccaggggataagcctggtcgtttggaggaaccaggtttacaaccgctcagtccggatgaagtaaggaaggatctgaatcagcagtcaaagcttgcagtgagagagaaccggcaaaaccgtggagtctctcatgttccattgcttgatgataatgctaagggtgatggagaggtaggaaatgagttgattgatctaaatgccaggccacaacatgtgcaagggcaagcttctatcaatcaggagcatgccatggatgtttcgagt

SEQ ID NO: 203109 - DNA, 404 bp, Gossypium hirsutum
gaatccttatgtttgccaaaactggaatctcggtacggcaaattatgaggctgatggaacttgagaagtgtgtggagccaggatatctgcctttcactgagaaggatgtgagaaatttgcttcagtcgttcaggaaatcagatcaagaagatgaaagcatagatttattaagaatgtgtagaaacaataaggataaggatcccaacttcaaatttgagtatacgcttgattcaaacaacaggttaggcaactagtactggagttgaagtcgatctacattgtgaggaaacccaaaggcaagctgaaaactcatccgacaactctactgaaaatgcagttgaagctacagagtacagggatgttcttcttttgtttagatttgattggatagaaacctgggagat

SEQ ID NO: 203110 - DNA, 396 bp, Gossypium hirsutum
aacaattacagatgcaaaaaagaaaagggttctttgggcactgagttttattcttgttatcatttcatttgatcgccaaaaaaggaaaagcttaatccaaattgaagaggaaaaaaaaagggtgcaccatggatcatgcagctgatgcccatagaactgatttgatgaccatcactcgccatgtccttaatgaacaaaccaagtaccctgaatctcgtggtgatttcaccatcttgctcaatcatattgttcttggctgtaaattcgtttgctcttctgttagcaaggctggtcttgccaaactatttggacttgctggagaaaccaatatccagggtgaagaacaaaagaaattggatgtgctttctaatgaagtttttgataaagctttgatta

SEQ ID NO: 203111 - DNA, 328 bp, Gossypium hirsutum
atctatacttccattatatataccatcactcagatctggggatcatgttggctctttttcacacggcatccgctactccaccacaagagccgaatagcacaacttatcataaatctaccaagacacctaaacactcttaagaaaccctaactgattacctatctaatcaccctcacaacactctatccatgacctatcccaaccactctgttctggcttatgttccccatgaacgtgctacttcagttcatcaaacgttcacacgtgagtttgatgacatatcctggctcttcattaaaacctcgcccaatttatttatgttaaatcc

SEQ ID NO: 203112 - DNA, 376 bp, Gossypium hirsutum
aatctctcatgtatcaagacagcaatcacgggggggacaatatcggaactcgtttagtaaagctcatctctctggcaataggtttttgagtggccaaaataggtttaggtcaagctatgcagtcaatttaggtcgcagactccgagatgctgatgaagctagtgaagctgctagtttaagagaaatttaccatagaaatgatcctgaagcagtgataagactatttgaaactcagccatcattacattctaatcgttctgcactttctgagtatgctaaagcattagtcaaagttgacaggcttgatgaaagtgagttacttaagacattgcacagaggtatctccagttcatcagtggatgaagagagtaaaagt

SEQ ID NO: 203113 - DNA, 411 bp, Gossypium hirsutum
gaaggagttaaatttgtcgtcaatgcaaatattggaggagacccgtcctactcccttgaccggcttcgagaggaaaatgatgccattgttttggcaattggagccacaaaacccagggacctttctgtaccaggacgagatttatctggtgttcattttgcaatggaattcctacatgcaaatactaaaagcttgcttgatagtgatctccaagatggtaactacatatcagctaagggcaagaaagtagtagtcatcggtggaggtgacactggtacagattgcattgggacatctatccggcatggatgtagcagcattgtcaatcttgagttgcttcctcagtcaccgcagacaagagctcctggcaatccttggccacagtggcctcgcatattccgtgtagactat

SEQ ID NO: 203114 - DNA, 368 bp, Gossypium hirsutum
attcgccgcacggcatcagtctcatcaggcggtgaagaatgtctcacaggaagtttgaacacccaaggcatggctcccttggatttcttccgaggaagcgagcttctcgtcacagagggaaagtgaaggcatttcctaaggatgacccaagcaaaccttgcaagctcactgcctttttgggctacaaggcaggcatgacacacattgtccgagaggtcgaaaaacctggatctaagcttcacaagaaagagacatgtgaagctgttacgatcgttgaaacccctgctatggtgattgttggcgttgttggttatgtcaagacaccacgtgggctttgcagcttgaacaccgtttgggctcagcatctg

SEQ ID NO: 203115 - DNA, 400 bp, Gossypium hirsutum
caaaagcctgatgtgtttaggggaactgtacgttatggaagcgtgcatgctcatctgggtaggacaggcagtccaagggatgaccttgagtcattggcttatacactaatatttttacttaggggaaaacttccctggcaaggttacattggggagaacaaaggatttcttgtttgtacgaagaagatggcaacttctcctgagatgctttgttacttgagccctactccttttcaacaatttcttgagattgtgaccaacatgaaatttgatgaagaaccaaattactcaaagctcatttctcttttccgtaatagcattgatttcaattcatcaatatgtcctatccaaattgatggagctattaagctgggtcaaaaaaggggaagagcactttttg

SEQ ID NO: 203116 - DNA, 370 bp, Gossypium hirsutum
cctcaactcgtcgattgtgttagcactatcagatcggtgattcaaaatacaagcggtgttcgggttatcctaatctaagatcgcgttaataccgggtgttcacattatagaagaaggtgtaagatcagagcaccttgttgcaatgaggtttcttattgcagacattgccataatgaatctaagaattccccggaatctagtcctcttaagtaacatgacattccacgccatgaagttgaaaaggtcatttgctccctatgtgacacagaacatgatgtacaacagtcttgcatcaattgtggagtctgtatggggcagtacttatgaggtaactgacaattcttcgatgatgactgtctattaaatccaa

SEQ ID NO: 203117 - DNA, 391 bp, Gossypium hirsutum
ctacatttggctgctttggagcaaaaaagggctgatgaaaatgtaatgaaattggctgaagatcagaagaggcagaaggaggaacttcacaacaggataattcagcttgagaaaaaattagatcaaaaacaggcattggaactggaaattgagcaactgcgaggatcactgaatgtaattaggcacatgggagatgaagatgatatagaagttcttgagaaagtggatgcaagccttaaagagctgagagacaaagaggcagagcttgacgacttagaagcattaaaccaaactcttattgcaagagagcgcaagagcaatgatgaactgcaggatgctcgcaaagaattgattaatggattaaaagaaatatccacccgttcacaaattg

SEQ ID NO: 203118 - DNA, 408 bp, Gossypium hirsutum
aaataaaaaatgagctttcttcggctcttgtcagttggccttttgttcttatcctatgtagtcataggatcagctgagcagtgtggaaggcaagcaggcggtgctctttgccccggtggtctatgttgtagccaaattggttggtgtggcagtactgctaactactgcacagttccgggttgccaaagtcagtgcagcggtagtggccctgcccctgggcctggtgggctaaccaatcttatatcaagagagacgtttgatcggatgcttttgcataaggacgatgggggttgtcctgcccgtggcttctatacctatgatgctttcattgctgctgcacgttctttttctgcctttgctacaactggttaccaagctacctcgaagagggaaatagctgcctttctt

SEQ ID NO: 203119 - DNA, 370 bp, Gossypium hirsutum
attccactcacagaattcaaaggtgtagattccgaagctggtgaaatcctaccacctggctccaagggcattataaaggtcaggggaccgccagtgatgaaaggttactataagaatccattggctacgaggcaagccctatacgaatatggttggctaaatactggtgatataggttggattgctcctcatcattcagtagggcgaagtcgtcgatgtggatgtgtgattgtccacgaaggacgtgccaaggacactatagctctttcttctggtgaaaatcgttgaacctttatagatcgaagaagctgtcttaaagagttctcttaattaacagatcgttgtcatcggccaggatcaacgacacctt

SEQ ID NO: 203120 - DNA, 323 bp, Gossypium hirsutum
ttaccgtgtatatctatcatgatcacatagagggctggttcaatagttcgggacggagcgatacgtacaataatcattcagaacttgtatgtaccgcacaaggaccatatgctgatgttctacttacatggaacagcatataccatttactggaatattaagctaactagccgattactattcacactttttaaattgtaaccgattaaagtttcattattattactgtgcttatcttactggtgacagcgaaaataatggatcacaatttctatttacaggccaacctatattgatagctccaatggttgatttaatgttaa

SEQ ID NO: 203121 - DNA, 357 bp, Gossypium hirsutum
gtcattggtgattgaattgagtttgccacatgcggagggggatcaactaggtgctgttagcaaggtttacacacctacagaacatggagttgaaggttcaatatggcagttggctaaagcttatgttgctgtaaatgactatggtgttcatcaactcataagccattggctgaacactcatgcaacaatggagccattcgtgattgcaacgaaccgacaacttagtgtagttcatccaatttataagcttctctatcctcactttcgggacacgatgaacatcaatgcttttgctaggcagattctgattaatggacgtggtgttctgtaattaacagtttttcctggaaagtatgc

SEQ ID NO: 203122 - DNA, 406 bp, Gossypium hirsutum; identical to SEQ ID NO: 191524

SEQ ID NO: 203123 - DNA, 355 bp, Gossypium hirsutum
gagctacttaaccatttcccaaatctcctcccggctctgctttaacgtccttttgatttccgctcatgcagcgcgctttgaaatccgcaatgagtgctcctacaccgtctgggcagcagcctctcctggtggtggccgtcgcctagaccctcggcaaagatggaccatcgatgtgcctgctggcactgctatggctcgaatttggggtcgaaccaattgcaattccgatgccacaggtaggggtcattgccaaaccggtcattgtagtggactcctccaatgcaaaaactggggtagtacttccagccaccctgtctgaatatgcacttaaccaatttggaaacacggatttcta

SEQ ID NO: 203124 - DNA, 398 bp, Gossypium hirsutum
gttgattggaagaaaaacaggcggaatatcaggttatcgatttacgtcatctatacgaggcaaggaagatcccagtagccatatcattgtccgaggcaaatcaatggctgggcgtgctgatgacctatttaatctgattaattgtgttcttcaagaagtacagtttacagaccaacaacggttcaagcagtttgtgtcccaaagcaaagccagaatggagaaccggttgagaggtggaggtcatggaattgccgcagctaggatggatgcgaagttaaatgttgctggctggatttctgagcaaatgggtggagtcagttacctggagtttcttcaagcactggaagaaaaagtggataatgactgggcaggaatttcatcatctctcgaggagatcc

SEQ ID NO: 203125 - DNA, 413 bp, Gossypium hirsutum
ggaattaaaggcaaaagctcaggtttctcatgcacagccggatgaccttattgacttttaccatttaaagagtcgaaagggtatgagtcagctggaattggaggatgaggttcaagatgatttaaaacgagcaactggagagtttgtcaaggatccagatgatgcaaataagctcaaccgcattcttcaactgacaggatttagtgatccggtatatgccgaagcatatgtcactgtccatcactatgatattgttcttgatattactgttatcaaccgaaccagggaaacccttcagaatttgtgcttggagttggctactatgggtgatctgaaacttgtggaacgtcctcaaaattataccctagctcctgaatctagcaagccaattaatggtcaacatcaaagtgttt

SEQ ID NO: 203126 - DNA, 383 bp, Gossypium hirsutum
ctacatttggctgctttggagcaaaaaagggcggatgagaatgtaatgaaattggctgaagatcagaagaggcagaaggaggaacttcacaacaggataattcagcttgacaaaaaattagatcaaaaacaggcattggaactggaaattgagcaactgcgaggatcactgaatgtaattaggcacatgggagatgaagatgatatagaagctcttgagaaactggatgcaagtcttaaagagctgagagataaagaggcagatctcgaccacttagaagcatttaaccaaactctcattgtcagagagcgcaagaccaatgatgaactgcatgatgctcgcaaagaatcgatttatgcgttaaaagaaaatatccaccccgt

SEQ ID NO: 203127 - DNA, 400 bp, Gossypium hirsutum
caccaattagttttttagaaattaaaaacttgtctggggttccaaattgcaaatgaaatttcgattgaatcagacacaatttcttttttcaattttataatgaagaacaaaagggcgagaacgagtgtggacaaggcggtggttgatgtttggcaacgggaagttggggaactctccactaggaatttcgcccaccggcttgccgcttctgaggatcttgtgctccgactcgagatttacaagaaactcaaaaagcaccgaggttgtgtgaacactgcgagctttaatgctgatggtaacattttagtatctggttctgacgataagagggttatactatgggattgggaaactgggaatgctaagcttactttccaatcaggccatgtcaacaatgttt

SEQ ID NO: 203128 - DNA, 352 bp, Gossypium hirsutum
ttatgaacactccactgtctgccgcacatataagtcatgcatcacttatgggttagctccttttcaacttataaatttttactataaatttctcactacggttcaccatgaaacctactcatcttgtgacagatcattattcaaactactatctcgatctgatcgcttcgcttcctaccatcatggccacgaactacatacttccacatctggacactctcaaagtcaactttatccctactctaatcatccccgctatccccacttccacaactatggacacttgtctcatctctctccatctttacaaaactctatatcgaagacacaaactgtatgactaccttcacac

SEQ ID NO: 203129 - DNA, 256 bp, Gossypium hirsutum
cggagacgggatcggacctttggtgacgaacgctggggaacaagtgatggaagtgatgcacgcaccggtttacttcgagaagtacgacgttcacggcgacatgaaacgggtaccacaagaagtgttggattcgataaagaagaacaaggtttgtttgaaaggagggttaagaacacccatgggaggtggagtcagttcattgaatatgcaattgaagaaagaactggatctatactcttcattggtcaactgttgt

SEQ ID NO: 203130 - DNA, 295 bp, Gossypium hirsutum
tgcactttcacctcttcttcgaccacgttcagtgatgattcgtaccaaggaagcagtgggaagaagaggaaatggtaggagtttttaaggaggttgaccaatgaggttattgagaaacaagaggagttgttgaacatgttcttgctaaccatagagagatgccaacaacatgggttggctcgtgaagaagcttgtatggtgcacgaaatggcaaggatatacattgaacatgagcttttagtccaagatagatccatggctgttgttaaatatgatgccgtgcttgcattcttgc

SEQ ID NO: 203131 - DNA, 382 bp, Gossypium hirsutum
aacaatcacaccagcaaaaacgaaaacggttgtgcgctcactaagttttattctttgcatcatttcatctgatcgccaaaaaaggaaaagcttaacccaaatcgaagaggaaaaaaaaagggtgcaccatggatcatgcacctgatgcccatagaactgatttgatgaccatcactcgccatgtccttaatgaacaaaccaagtcccctgaatctcgtgctgattccaccatcttgctcaatcatattgttcttggctgccaattcgcctgctcttctgttagccaggcgggtcttgccaaactatttggacttgctggagaaaccaatatccagggtgaagaacaaaagacattggatgtgctttctaatgaagtttttgc

SEQ ID NO: 203132 - DNA, 339 bp, Gossypium hirsutum
agatggtgctaaagccacaaccgaaaccgtaggggctttgagaaccggagctgctgcaatgaaggcaatgcacaaagcatcgaatatagatgatgttgacaaaacaatggacgagatcaatgaacaaaccgaaaacatgaaacagatccaagaagcactgtcaactcctattggagctgcagctgattttgacgaggatgaattggaggcagaactcgaagagcttgaaggcgctgagttagaagaacaacttattcagcctgcaacaacagctcctgcagcaccaattcatgtgcctgctggaaggcaacccggttggcctattccttaaaagcacac

SEQ ID NO: 203133 - DNA, 416 bp, Gossypium hirsutum
gagcagtaaagaaaatcagctcattcaagctactgctgtattaaaggagaaagatgaatatgctctgaaagtacaagatgagttgaatgatacaaagatgaagttctctgaagctgaaactgtcatagaacgaattgcagaactcacaaaccgactagttatctcagttaaggatgaagacaataatgtgttgaggcctgttgatgatgtgagcagcgaattaatgcatcagctggtagataggccttctagtgattttggattgcagaaaaagcaacttgaaactgaactcagattcactaaagagagcttaaaagataaagaaatggaagttcttgctgcacagagggctcttgcaataaaagatgaagagctcaaaatggttcttggaaggttggaggcaagagaaaaagaac

SEQ ID NO: 203134 - DNA, 368 bp, Gossypium hirsutum
ggatttagcatcaagggatcctgatttgaacaagctttttaataatgggcttgcttgttcatccaaggtcatcactagtgtaatcctgtcgagttacaaacaagggttgagctccattggatcattggttgatgttggaggtgggattggaggcttaatatcagagatcgccaacgcatatccacacatgaaaggtgctaattttgatctgccgcatgtcgtctagacagcaccaacatacaatgcagtctcccatattggtggcgacatgtcctcatgacgccattccaaatgctgacgcagtcattatgaactggatatcgcacgactggactgactagtaatgcatacaaatgttaaggaattgc

SEQ ID NO: 203135 - DNA, 340 bp, Gossypium hirsutum
gttaggttgctgaaggaggatggtgaagtgggtgctatgaccggcgatggagttaacgatgctcctgccttgaagttggctgatattggagtggcaatggtcattgccgagactgaggtattcactaccctgtgctataatatacatgatgtacatatggttactggctaatcgtgtattgccagctgtacttgtgaaatagcattatgggtgatgattcacagacccggttgaatgcaatgcagtatgcaaggttgggctgatgtttattcagaatgcatatatgccggaacaggtttgcaactatacgactatttccagacattctatagatattgat

SEQ ID NO: 203136 - DNA, 229 bp, Gossypium hirsutum
cggcgccgatgggcatgatttaatggaggctgttggccctgatttctactgtgtccggcagatctttgatggtgagggtgctccaggagctcacgattgaattgtaacacggtgttaaatctagaatcgcagatgtgacgggggaaattttacggaaaagaagggctgggaaaataccacgtgtcacaacttctgtgctatagaacatctggaggcaccactctcagtg

SEQ ID NO: 203137 - DNA, 375 bp, Gossypium hirsutum
cttgctaactgtctctttcgcatgggtggctcagcggtcctgttgtcgtaccgccgctcatagaggcggggagccaagtaccgacttgtgcacgttgttcgaacccacaaaggggccgatgacaaggcctaccgatgcgtgtttgaagaagaagactaatacggcaaagttgggatatcattatctaaagatctcatgggtatagctggagaggctttataatccaacattaccacaatagggcctttggtgctttcagggtggggacaactcctattttttctcactctgttcgggcgttaagtcttcaacccccagtggaagccttatattccagacttcaagctggcgtttgagcacttttgcatccatgct

SEQ ID NO: 203138 - DNA, 310 bp, Gossypium hirsutum
ctcacttctgcaattgcgagaagaaacgagacgggggaaatccaatggatttggaaacggcgaagaaatacttggagaaaggagttggggctgacggcgatgacaagaacgcctcaaccatcaatggcatgccttctagattcttcgaaaacttcatcatgcaaggtctccatgttgaccaaatcgtaaagggtcgagtcctttgctccatgaaagtccctcctcgtttgctgaacgctggtaatttcttgcacggtggagctactgcatcactggtggattttgttggatcagcggttatttacaccta

SEQ ID NO: 203139 - DNA, 286 bp, Gossypium hirsutum
gacgattcttgttttcttcattgtaagggcttatggggactacatcatatctagtggtggtcgtttcttacccagagctgttttaatggaccttgaaccatgaaccatggatagcttgcttactggtccgtacggacaactttttagacctgattactacatttttggtcaaaatggatctaggaataactcgggctaagggtcattacactgaatgagctccatcgattgattcggttcttgatgttgttcttaaagaaactaagaattgtgattgcttacaaag

SEQ ID NO: 203140 - DNA, 345 bp, Gossypium hirsutum
tcctgttcctaatcaagatgagaacactgtgtacggggagccttctgcgcctcaaccaccacggttccatgtgcattccttttgcatgaccctcactgtctcagattcatgcacccatggtgggttttcggcgctcatgcggcatgcagattaatgtgttccaccattggacatgtcactgcaacctacaacccaggagttggttgcttaggatatgcatggcatagagtggcgattccagcatattttcaggggtgaaccactattgcacttgcttcaaagcggatggagtgttcatgttagctcctccaggctatgttctagggatgctttaatatattttag

SEQ ID NO: 203141 - DNA, 395 bp, Gossypium hirsutum
gaaaaacgctgcttgcaggtatgtcatcatccgataagccagaattagttgaaagggatgttaaggacaaggtggatgacaaagaagacaacagtggatttatagacaaggtcaagggtttcattcatgacattggtgagaagatcgaggaaacaatcggctttggcaagcctactgcagatgtagctgagattcacctcccttgtatcaatcttgagaaagcagaaattgtcgttgatgtcctcataaagaacccaaaccctgttccaatccccctcgtcgacattgactacctcattgaaagtgatggtagaaaactcctttcaagcttgattccagatgctggaaccatccatgctcatggtgaggagactgtcaaaataccagttactttg

SEQ ID NO: 203142 - DNA, 367 bp, Gossypium hirsutum
ctgaatacatcttggcagcttttgacgatgccattgctgatggagttgatcttataacagcttcattaggatcattcttcgtgtttgaattctacagtgactctgtagctataggtgctttccatgctgccgagaaaggtgtacttgatgtacaatctgcaggaaatagtggtctagcagggtttcaatcggtggcaagtgtagcaccatggatacttagcgttgccacatgcgcaatggaccggcattttgtcaacaaggtagttcttgggaatgggaagacactaactgggctgtcaataaacactattagtattaatagagcaatggttccattggttaatgggatgcatgcatcatccgattg

SEQ ID NO: 203143 - DNA, 388 bp, Gossypium hirsutum
cggagatgaacttggacaacgattccaataatctggttcaagctccgacaaacggcgactctgagaagctttcgccctccactttatcttctcttttgggttctaaagatcgcgattatcttctctgctccactgcagcagctgctgaaactgatcacgtgaaaatttctgatctagagggcaaggtgatcggaatttacttctcagctaactggtacccaccatgtagaaatttcaaccgagtattgattggtgcgtatgagcagctgaagagcaatggatctaactttgagattggatttgcgtcatctgatgaagacttggatgccttcaacatctaccgtgaaaacatgccatggctttcgattcccttttctgatttggagac

SEQ ID NO: 203144 - DNA, 345 bp, Gossypium hirsutum
gggataaaacattagctcaaatagctccggcgccgccgttaaaggtggacaacatcacttccatcctcgaaaaaggtggccaattcaccactttcatcaagctattgaaagccacacaggtggctgatcaactaaacaaccagctaagcacaccggaccctaacgacgggataacggtgtttgcaccgagtgacaacgcgttctccggactcaaacccgggacgttaaactcactttccgaccaagagaagcttcagttggttcagttccatatactcccgacgttaatgtcgacgtcgcagtttcaaaccgcgagtaaccctttgagaacccaagctggggatg

SEQ ID NO: 203145 - DNA, 386 bp, Gossypium hirsutum
aattgggaagccgaagaagaagctactgcgattgcgattgccaactcattcttccgtcatgggcaactgtggcactagagaggaatctgacgttgttactcatgctcaagttcaacagctccacaaccacatcgtatccgacaagaagcttactcaaagtcagagccagactcagaatcgtaccctctcagatctgagcgacttcgaggattccaggaaaaatgcgcttctctatacccacatcattgccttcactttattcgagcttgagactattaccaagagcttccgttctgactatattctcggggaaggtggcttcggaaccgtctataaaggttacattgacgagaatgtgcgggtcggtctcaaatctctgcctgtcg

SEQ ID NO: 203146 - DNA, 449 bp, Gossypium hirsutum
gaaaagccctaatttgacagctctctcagtctctcattttgcctgataaccatgtcgaggagaaaggttagggatcccaaggaggagaatactacccttgggccggctgtacgagatggcgagcatgttttcggggtggctcacatttttgcttcatttaatgacacatttattcatgtgacagatttgtctggaagggaaacaatggttcgcattactggtggtatgaaggtgaaagctgatagggatgagtcttccccttatgctgccatgcttgcagcacaagatgtttctcaacgctgcaaggaattgggtattacagcccttcatataaagcttcgagctactggagggaacaaaaccaagacacctggtcctggtgcccagtcagcacttagagcccttgctcgttcttgcatgaaaaatggacgcatagaggatgttacccc

SEQ ID NO: 203147 - DNA, 381 bp, Gossypium hirsutum
aatcttgaaccgtagcatggtatataagtccggggtttaaagctttattggggttaacatgaccagctcccatggctaaaggatcagccggtcggagatttccgcctatatcctttatcggactacctgtgttatcgatttgatcggatgttgtcatcaaagccgatcgaattgccgcagggctccaattaggataaacagcttttaaaagggctgctatacccgaaacatggggacatgccatggatgttcccgacaataagttgaaattggtgaacacaaggtcttgatttacacgagctgctgcaatatttggaggccatgcagcgaggactgagtcaccaggtgccataatatcaagctttaaaaccaggggacaac

SEQ ID NO: 203148 - DNA, 458 bp, Gossypium hirsutum
ggaaaatggaggcaccaaagacgattcagcacgaaattggaggagtccagaacgacgccctgcgattcggtctccacggcgttaagagcgacctcgtcggatctcaccctctccaatctgcttacgaatcagcaaagaaaacgcaggaagagatgaagagaaaagttctggccaatacttatgggacagcaatgccactcaaaatggatctcgataggcaaattctctggcggtttcagaggccattgctaccatcttcgatgctagggttggaagcggtgacaggaactttagatgattttggctttgaggattatctgaatgatcctcgagattcggagactgttcggccattggacttgcaccacagcatggaagttcgtctcggcctctccaaaggaccagtctgtcctagttttatgtgagattttcattgactacttcagtgttgtcccatg

SEQ ID NO: 203149 - DNA, 341 bp, Gossypium hirsutum
cttgctgggagctttactgtctcgagcatggaatccagcctgatggtcagatgccaagtgacaaaactgtcggaggaggtgatgatgcttttaacacctttttcagtgaaactggtgctgggaagcacgtccctcgtgccgtcttcgtggatcttgaacccactgttattgatgaagtgagaactggtgcttaccgccagctcttccacccagaacaactcatcagcggcaaggaagacgcagctaacaactttgcccgtggtcactacaccattggcaaggagattgtcgacctctgtttggaccgcatcaggaaacttgctgataactgcactggtctt

SEQ ID NO: 203150 - DNA, 428 bp, Gossypium hirsutum
aacacacttgctagtattcctacttggagtggtgactctcagcactcccacatttggtacctatgagtcaccaaattatgggaaaccccctactcctgtattcaagcctcccaaggtgaaaccaccaccatatgaacctaagccaccagtgtatgaaccaccaaaaaaggagaagcctgaacctaagccaccggtttatgcacctccaaagaaagagaagcatggacccaaaccaccaatgtatgaacctccaaagaaggagaagcctgagccaaagccaccagtttatacaccttcaaagaaagaggagcctaaacctaaaccaccagtatatgaaccttcaaagaaggagaaacctgagccaaaaccaccgatttatacaccttctaaagaagagaaacctgaacccaaaccacccgtatatgaac

SEQ ID NO: 203151 - DNA, 349 bp, Gossypium hirsutum
catctgcaggcgttctttggacattgaacgacccacttatgcgaatcttaaccgccttgtctctcaggttatctcatctcttaccgcatctttgaggtttgatggagccctgaatgtggatgtgactgagttccagactaacctggtcccatatcccaggatccactttatgctttcttcttatgcccctgtcatttcagctgagaaggcttaccatgagcagctatcggtggctgagataaccaacagtgcttttgaaccctcttcaatgatggccaaatgtgacccacgccatgggaagtacatggcttgctgccttatgtaccgaggagatgttgtgcccaaagat

SEQ ID NO: 203152 - DNA, 327 bp, Gossypium hirsutum
agaacgtcaatggtaggagattcaagctcctggtccaccgctctcgtcaagatttcaccttacactttctccgccatcggtatcgcaatcgccatcggtgtctccgtcctcggcgctgcttggggaatatacataactgggagtagtttaatcggtgctgctattaaagctcctcgaatcacttccaagaatctaattagtgtaatcttttgtgaagctgttgctatatatggtgtaattgttgcaattattttacaaacaaagttagagagtgttccatcatcacagatatatgcgcctgagtctcttagagcaggatatgcaatc

SEQ ID NO: 203153 - DNA, 407 bp, Gossypium hirsutum
accgtgcactttattcatagaaaataccaaaaactagtacattatccgaggtattcaaccctgaaaacacacatccaaaatcaacaagaaaatacatcacagtagcaaacggataacggtacatccctcaatactcctcctcatccccttcgtctccttcaccagactcagcgccaacttcttcataatctttttccagggcagcgagatcttcacgtgcctcggaaaactctccttcctccatgccctcaccaacataccagtgcacaaatgcacgcttggcatacatgagatcaaatttatgatcaatgcgggaaaacacttccgcaacgctggttgagttggagatcatgcagacagctctctgaaccttggcaaggtcctctcctggaacaacagttgggtgc

SEQ ID NO: 203154 - DNA, 381 bp, Gossypium hirsutum
atttaccatggagatgagatatgccaggagaaatccaagtggttgttggaggaagtaggcatgccaagggggcttttgccacttagagacatcgaagaatgtgggtacgtgaaggacacaggtttcgtgtggctcaaacaaaagaagagcatcacccacaggttcgaaaagatagggaagctggtttcctatgcaactgaagtcacggctgtcgttgagaaaggcaagatcaagaagctgactggggtgaagaccaaagagcttttggtttggatcacactgagtgatatccaagtggatgatcctcccactgggaagatcactttcaagacttcttcagggctgtttaggactttccctgtatcagctttttgagattga

SEQ ID NO: 203155 - DNA, 410 bp, Gossypium hirsutum
gttaacagctgcccaggttctaagtcatccatggattaaagaagatggtgaagcacctgatacaccacttgataatgcagtgctaagcaggctcaaacagttcaaagcaatgaaccaattcaagaaagttgctttgaaggtgattgcagggtgtttatcagaggaagaaataaggggattgaaagaaatgtttaaggcaatggacacagataacagtggaaccataacacttgaagaactcaggcaaggtctagctaaacaaggcactaaattatctgaatatgaagttaaacaactcatggaagctgctgatgcagatggtaatggaacaattgactatgatgaggtcataacaggcacattgcctatgaacagaatggatagagaagaaccatctttccatgcttttc

SEQ ID NO: 203156 - DNA, 229 bp, Gossypium hirsutum
gaaaagataaggccaacaacatcattggcgaagctctggtgatgattagtgcagggactaatgatttcgttttcaattgccatgatattccgaccagacgattggagttcgacattgttggataccaacattttctgcttcataaactataagatttcctcagggattattatgaactcggatgccgaaaaatgatgttagccgaactgcttcctattggttgctaacc

SEQ ID NO: 203157 - DNA, 360 bp, Gossypium hirsutum
gagacaccaccgttaagaagaaaaatatccatgggatactgaatactgtgagttggggaattttgtttccacttggagctatgattgctaggtacataagaagctttgagtcagcagatccagcttggttttatcttcatgttttctgtcaaatatcagcttatgccataggagttgctggctggggaactggtcttaagcttggaagtgaatcctctggtatcacatattcgggtcatagatacattgggattgcccttttcgtcctcgctactgtccagatctttgctttgttttaaggcctaaaaaggatcacaagctccgtttctactggaacatttaccaccacagttttggata

SEQ ID NO: 203158 - DNA, 342 bp, Gossypium hirsutum
gctgaatctgccaacccttccacactaatcaaggaagcaaggcatgtcatcagctgtggctatgaagagaagactgcatgggggaaagagattggatggatatatggttcagtcactgaggatatcttaaccggcttcaaaatgcactgccgaggatggagatcgatttactgcatgcccttaaggccagcattcaaaggatctgcacccatcaatctgtctgatcggttgcaccaggttcttcgatgggctcttggatctgttgaaattttcctaagcaggcattgccctctatggtatggctttggaagtggtcgtgctaaatggcttcaaagactagca

SEQ ID NO: 203159 - DNA, 360 bp, Gossypium hirsutum
cgtcatgatctatatgctaatcgaaatgttgtctggtttgggatcaacatgttgggattatatggacttcaaggccctgtatatgtatgcacagggtgtgttttcaacaggcaggcattgtatggctacgatccatcagtctctgagaaacgaccaatgatgacatgtgattgctggccttcttggtgttgctgatgatgcggaggttctaggaagaaatcatagaagaaaggtgaaatgaatggcttactacgaggtcttttatacggaaaatagaagaatatgatgggcataatctatgtgaaaaaagggtctgtaccagtctttgatctcgaagaaattgattaatggcttgaagga

SEQ ID NO: 203160 - DNA, 342 bp, Gossypium hirsutum
gatagtataatatggagaaatggtatggggtttcagggctggtgttggttttgagtttgttctttggggttaaaggagaaccccaagtcccatgttacttcatttttggagattcattggtagataatgggaacaataatgaacttcgttcattggctagagctgattacttgccttatgggattgactttgctaatggaccgaccggccggttttcgaacggtcgaactacggtggatgtcatagcttgaacttattgggtttgacgattacattcctccatacttaaatgcaagtggtagacaaatactgggatgatttaactatgcttttgcttgctgc

SEQ ID NO: 203161 - DNA, 280 bp, Gossypium hirsutum
ataaaattatcaaatttggcattatatcaaatgaaaatatagtctacatacagaacacaattattggtatccttaacttgaaacaaattgttcaaggatccagattaactggttttaaatacacaaacaatttattgtgaagtttgaaactttaagcaccaccagtcagctgaaggtgcttgatgtttgtaatctgttttcctgggttcagacccttcgggcaagcacgagcacaattcaatatcgtatggcaacgatacaactttaactcgtcatttat

SEQ ID NO: 203162 - DNA, 334 bp, Gossypium hirsutum
caaaagggagtgagttgagagcacactgatgtggctgttcttcttgacaatgaggctatctatgacatttgcaggcgctctcttgacattgagcgacccacttacaccaatcttaaccgtcttgtctcccaggtgatctcctctttgactgcttcacttaggttcgatggtgccttgaacgtggatgtaacagaattccagaccaacttggtcccttacccaagaatacacttcatgctttcttcatacgctccagtcatctctgctgagatggcttaccatgagcagctatcagttgctgaaattaccaatagtgcctttgaagccctatcta

SEQ ID NO: 203163 - DNA, 186 bp, Gossypium hirsutum
cagatgcatgccataggtacctcgttgatccttgccattaatgtcaatgactctggaactaagagcaagctcgataactagtatggatgccgcatctaactttccgatggatagatgagagctactgatgagatgattgccggcaaggtcgccgatgactgaggtatatcggtgatgtctaaaagg

SEQ ID NO: 203164 - DNA, 309 bp, Gossypium hirsutum
ccagatggcattggaaacagcatctcggccggctactccaagtgcccaagttgttggaaatgctttcactgaacagtattaccacattctttacaactctcctgaatgggctcatagattctatcatgattcaagtgtgattagccgaccggattccagtggtgtgatgacatcagtgacaaccatgcaaggtattaatgagaagattctttccttcgattacacatatcataaggctgagattaataccgatgatgctcagaaatcttatcacgaaggtagtactatattaggaactgggtgtctaac

SEQ ID NO: 203165 - DNA, 283 bp, Gossypium hirsutum
ttttcctctccatcattgcaactggagtgcttgaacttcgatggagcggtgttggcatgggagactggtggcgcaatgaacaattctgggtgatcggaggtgtcttcgcccatcttttcgccgtcttccaaggccttcttaaagtcctagctggagtatacaccaactttaccgtatcagctaaagcagccttggatacataatttggggaactttatctcttcaaatggacaactcttttaattcctcccacaactttgataatactgaacatggtctgagt

SEQ ID NO: 203166 - DNA, 358 bp, Gossypium hirsutum
cacaccactcatggtgccttcgtttccctggtcaattaaactcagatctacgcaagcttgccgtcaatctcattccattccctcgcctgcatttctttatggttggctttgctccacttacttctcgagggtcacagcaatacagggctcttactgttcccgagctcactcaacaaatgtgggatgccaaaaacatgatgtgtgctgctgatcctcgccatgggcgatacttgactgcttcagccatgttccgtggcaagatgagcaccaaggaagtcgatgaacaaatgattaatgtgcagaataagaactcatcatactttgtggagtggatcctcaataaatgtgaagtctactg

SEQ ID NO: 203167 - DNA, 368 bp, Gossypium hirsutum
aaaaaacacgttcacagaaatgattgaaggcatatgcatcactaataaaagagaatcaagcatggagctcaccttgagtgtcaatgccttctcaaagatgaaaaaattgagattgctcaaagtgcttatgcctctcaaattgtgatgatctcaaatatctctctaatgaactacgacttttagatcggaaaggatgccctttacgatcgttgccctcaagcttccaaccagacaaccttgtcgcactttttataccatatagtaacattaaacatctatggaagggaaatagacccttgtataagttgacaatgatgaaccttgaatggtcccaatacctgatcaagacaccaaacttcacaacagta

SEQ ID NO: 203168 - DNA, 287 bp, Gossypium hirsutum
aaaatctcaagtttcttcgagcattgttcttttccctggttgcttttttgaagagaagcagccgcccaatatgtcgttgagaccgagcaccagaaccgaggtccgccgcaaccgctacaaggtggcggttgacgcggaggaaggccgccgcaggagggaagacaacatggtggagatccgcaaaagcaagcgcgaagagagcttacagaagaagcgtcgcgaaggccttcaggctcaacagttgtccgcttctcttcaatcctccaacgtcgaaaaaaaattagaga

SEQ ID NO: 203169 - DNA, 184 bp, Gossypium hirsutum
ctaacttttaccaaacaaataatccgggaagaatactatgagaaatacatgaacaaacaacttcgaagctattctttctccatggttgattgctcaagcctacccttcaagcagtaacctgaccaaagagccacttgcggatctctggaagttttttattgaatgcaacattcaatcgtgcatc

SEQ ID NO: 203170 - DNA, 338 bp, Gossypium hirsutum
cttatgcctcattcatggcattttaccccttgaatgaagccaatttcactaccaccaacatcttgcctcatctaaaggcctcgctttctgaaaccctaaacatcttatatccaatttccggtcggatcaaagataacatattcatcgatcatttccatgaaggtgtgccatttttatcagctcaagctggttgtcgattgtctgagtttcttaagcaccatgaggttaagttattgaacaaattgcttccatgccaacctttctccaaggaattcaacaatgaggctcccctccttgtgtgccaagtcactattttcgcttgtggcgggatagctcta

SEQ ID NO: 203171 - DNA, 203 bp, Gossypium hirsutum
gagagagagagagagagagagagagagagagagagagagagagagagagagagagagagagagagagagagagagagagtgtatattgaagatttctttctcgattttctctttagccaaaatagatgcagatcttcgtcaagactctaaccggcaagacgatcactctcgaggtcgagagctccgactcgatcgacaacgtg

SEQ ID NO: 203172 - DNA, 247 bp, Gossypium hirsutum
ttccggaccagccgcaacccattctaagggttcccaaacttgctcagattcgcgcgcaattcccctaataagaccaacaccgcgaccgctcaaggccggaccgtccccatccagaacactggaatcttcatccacatctacacatgttcagtagcttacaatctgaagccagtgcccaacttggagaaaacatatctacggtggccatcgatacactatgagatgacggtttgcatgaaaaccaatc

SEQ ID NO: 203173 - DNA, 373 bp, Gossypium hirsutum
taacagcctcggcaatgtttcgaggcaaaatgagcaccaaggaagttgatgaacaaatgatcaatgtccaaaacaagaactcttcgtattttgtggagtggattccgaacaatgttaaatcaagtgtttgcgacatcccaccaaccgggttgacgatgtcatcgacgtttatggggaactcgacgtcgatacaagagatgtttcgacgtgtttcggaacagttcacagtgatgtttaggaggaaagcatttttgcattggtatacaggggaagggatggatgaaatggagtttactgaggctgaaagtaatatgaatgatttggtttctgaatatcaacaatatcaagatgctgtggttgatgaagatggtga

SEQ ID NO: 203174 - DNA, 393 bp, Gossypium hirsutum
gtgaaacaatggcgtcctcggatcttattggcaagctcgagactgatgtcgagatcgatatttctcccgaaaagttccaccatatgtggtgccacaggccgcaccatgtccaccacactagctctgaaaaagtacaaggatgcgatttacatgaaggtgaatttggaactcccggcgtcgttatctgctggagatatgtgcatgatggaaaggctaaaactgcaaagcaggtagttgaagttatggaccatgagaaaaagtcaataactttcaaaatgcttgaaggagatctgatggaggaatacaaaagcttcgtgattacaatccaaacttcccccaagagcgacggtaaaggcagtatagtgcactggactctggattatgaaaagctgc

SEQ ID NO: 203175 - DNA, 398 bp, Gossypium hirsutum
aagctgctagcctttgcctttcttttcttcttcttttgggataaaacattagctcaaatagctccggcgccgccgataaaggtggacaacatcacttccatcctcgaaaaaggtggccaattcaccactttcatcaagctattgaaagccacacaggtggctgatcaactaaacaaccagctaagcacaccggaccctaacgacgggttaacggtgtttgcgccgagtgacagcgcgttctccggactcaaacccgggacgttaaactcactttccgacaaagagaagcttcagttggttcagttccatatactcccgacgttaatgtcgacgtcccagtttcaaacggcgagtaaccctttgagaacccaagctggggatgttaaaggtgggaagtt

SEQ ID NO: 203176 - DNA, 395 bp, Gossypium hirsutum
tgtaattctcctctcagtcatggcttttctccatcaccaacaacgacaacggcagcagtatctcatccttctgaacccaactccaagccaccatctgcagtggtttccagggcggagctcacatctaaagatcaatcaaccacaacaactactaccgttgaacttgaagaacagacagaaaaactgggttctggtagtggtaaaaaattgaggcctgatttatctatattaagaagaaccaaaagagataagatgattaaaaagactttattgggatttagaatttctgggtttgttttttgtttggtttctttctctgttttagctgctgataaaaatcaaggttgggctctagattctttctaccgctacaaggaattcaggttttgtatggc

SEQ ID NO: 203177 - DNA, 404 bp, Gossypium hirsutum
gttttctggaatggacatgagccttctcctggaaatgattattttgaggatagatatgatctggttcgatttattaagctggtccaacaagctggcctttatgttcatctccggattggtccctatatttgtgctgaatggaactttgggggatttcctgtttggctcaaatatgtccccggcattgctttcaggactgataatgaaccttttaaggcagcaatgcaaaaatttacagagaagatagtgagtatgatgaaagctgaaaagctgtttgagactcaaggaagtccaataataatgtctcagattgagaatgaatttggtccggttgaatgggaaatcggtgatccaggtaaagcttacaccaaatgggcagcacaaatggcagtggggctcgacac

SEQ ID NO: 203178 - DNA, 396 bp, Gossypium hirsutum
gacgaaatgaaaataaaaggagatattctcttttctagatcctttttgaggtgtgtcttcatttcatctcaaatccatcatcgaaattacttgtagttatcagaatggggacaataggcaaaactactacggccactatttttctttgtcttcttctgtttcctattgtcttttccacgcctaatgacagatttgttagaattggactcaaaaagagaaagattgaccgaaacaatcggatggctgcacaccttgaatccaaggaggaaaaggcatctgaagcttttcttagaaagtatcgtcttcatgggaacttgggggaatcagaggacattgatattgtggcactaaagaactacatggatgctcagtactttggtgaagatggtattggca

SEQ ID NO: 203179 - DNA, 303 bp, Gossypium hirsutum
gtcaaaccggatagacacatcgatagtcatagtgcagtgtaagtgatgaactcgagcggtggctcaagtgttaaatgtgcggcctgtgataagactgcttatccaattgcaagggatactgtgaatggggcaatgtaccacacgagctgatttaagtgtacccatcgagggctgtcagattagcccatcaaactatataatcccatgaaggaaaactttactgcgaacatctccatcttcagctgtttaaggtgcaaggtaactacagccaactagggaccgaactacacgaacaagccatga

SEQ ID NO: 203180 - DNA, 349 bp, Gossypium hirsutum
catcagtcaagataagcaaggggctccacaagttgagctctggtcctgaaaaagaaacaaaatacgttattttgggagagaaagcaaaggctcaattgattcgtgactctaagaaggacattgagttaatcataactgagctacagaagaaccctttgaactacactcaggtctctgttcttgcagatgagatcttaaagaatgtcgagtatgatgctttgaggattgtcttcaacaagtttcactcagtagtttcattcgtgccaacagtgtcaactgtaatatcacctgaaattgttgaaagggaagctgaatctgggggaaagcttggtgatctagactcgtatga

SEQ ID NO: 203181 - DNA, 363 bp, Gossypium hirsutum
cgaagcagagaagactcaacagaaggaaaaggaaaggaagaagatgtttgctatttcacccattgcaaagcccctcgctggcaaaaagctctctaagaaaaccctcaagtttgtccgcaaagccgctgagcacaagtgtttgaagagaggagtaaaggaagtagttaaaagtattcggcgtggtcataaggggttatgtgttatagctggaaatatatctcccattgatgtcataactcatgttccaatcctgtgtgaagaggctgacattccctatgtttatgttccctcaaaagaggatcttgcaactgccgggtctaccaagagaccgacatgctgtgttctggtgctaaccaagcccac

SEQ ID NO: 203182 - DNA, 369 bp, Gossypium hirsutum
ctcgtgccgctttattgctttttagaatttttctgggtcgaaaatgagagagtgcatttcgatccacatcggtcaggccggtatccaggtcggaaacgcttgctgggagctttactgtctcgagcatggaatccagcctgatggtcagatgccaagtgacaaaactgtcggaggaggtgatgatgcttttaacacctttttcagtgaaactggtgctgggaagcacgtccctagtgccgtcttcgtggatcttgaacccactgttattgatgaagtgagaactggtgcttaccgtcagctcttccacccagaacaactcatcagcggcaaggaagacgcagctaacaactttgcccgtggtcactacac

SEQ ID NO: 203183 - DNA, 401 bp, Gossypium hirsutum
cctccgatcacccagaattgttcttttcgccgtcttccaaggcctcctcaaagtcctagctggagtagacaccaacttcaccgtaacagcaaaagcagcagaggatacagaattcggtgaactttatctcttcaaatggacaactctcttaatccctcccacaactctgataatactgaacatggtcggagttgtggccggagtttcagacgcaatcaacaacggctatggttcatggggtccattgttcggcaaactgttcttcgcattctgggtcattcttcatctttacccattcctcaaaggtttgatggggagacaaaacaggacgcccaccattgtagtgctttggtccatacttttggcatcgattttctcacttgtttgggtactgatcgatc

SEQ ID NO: 203184 - DNA, 412 bp, Gossypium hirsutum
ttttcgtctctatttttgccactggaatacttgagcttaggtggagtggtgtcagtatcgaagactggtggagaaatgaacaattctgggtcattggtgggacatcagctcacctctttgctgttttccaaggtcttctgaaagtgcttgctggaatagataccaacttcactgtcacttcaaaggcgtctgatgatgatggcgagtttgccgaactttatgttttcaaatggacatcacttctcattcctccaaccacagtacttattatcaacctggtgggcattgtggctggcgtatcatatgctataaacagtggttaccaatcctggggtcctctttttggcaagcttttctttgccatctgggtgattgctcatttgtatcctttcttgaaaggtttggtgggtcg

SEQ ID NO: 203185 - DNA, 395 bp, Gossypium hirsutum
tgtaggagatccttagacattgaaaggcccacttataccaacttgaaccgattgatatcccaaattatatcttctttgaccacttcattgaggtttgatggtgccataaatgtagatattacagagtttcagactaaccttgtgccatatcctcgtatccatttcatgctttcatcatatgcaccagtaatctcagctgcaaaggcttaccatgagcagctatcggttcccgagattacaagtgctgtttttgaaccctcaagcatgatggctaaatgtgatccgaggcatgggaagtacatggcatgttgtttaatgtaccgtggagacattgtacccaatgatgtcaatgctgctgttgctaccatcaaaactaagcggactgttcagtttgt

SEQ ID NO: 203186 - DNA, 399 bp, Gossypium hirsutum
gttgggaaagccgtttgtaagaaaaaattcagagcctttcatgaactcttttcaaaagacttcatcgatgaatgaaaacttatccaacggtcaccccactgatattgatcctaatacaatgggtggtgctggttcattaagtatgttggttcgcactattctaattgataaaaagcctgaagaagttcccctgctggttgaatctttgcttggtaaagttgtagaggagtttgagcatcgtctggcaagccaatatgaagtgatgaaaacaacttcaacagacatcactgcttccaatttcaacaagcctctatcggaaccaatttctggggataaaaagatggaggaaaaaaatatcaaaatgatgaagaaagatgattgctctcatagaagcatcac

SEQ ID NO: 203187 - DNA, 367 bp, Gossypium hirsutum
cggcaccgatgggcatgatttaatgggttttggtcccttgattcctactgaatccgaaagatctttgatggagagggttcgccaggagctcaagattgaattgaaacagggttttaaatctagaatcgaagatgtgagggaggaaattttacggaaaagaagggctgggaaattaccaggtgacacaactacggtgctaaagaactggtggcaacaacactcaaagtggccatacccaactgaagatgataaggccaaacttgtggaggaaacatgattgcagctaaagcaaatcaacaactggttcatcaaccagaggaagcgtaactggcatagcaactctcaatctgtcacctctttaaagtcg

SEQ ID NO: 203188 - DNA, 389 bp, Gossypium hirsutum
  unsure (1)..(389): unsure at all n locations
aaaaagtgatgtaccggttattacaccgaacgatcttgctgaggccgatgggtttgtttttggtttcccgacaagattcggaatgatgtccgcacaattcaaagcttttctggatgcaaccggaggtctatggagaactcagcaacttgcaggaaaacctgctgggatcttctatagcaccggatcacagggcggtggacaagagactacagcgttgactgcaatcactcaactcgttcaccatgggatgatatttgttcccatcggatacaccttcggtgctggcatgtctgagatggagcaagtgaaaagtggaagtccatatggtgctggaacatatgccggggacggatcaagaatgccgtcngaacttgagttggcacaagctt

SEQ ID NO: 203189 - DNA, 367 bp, Gossypium hirsutum
ttttaatttgtgaattaaaattaagtaagcggaagagtagttgatattatttatcatcatcatcatcatcatcctccatattaaattatacaggatgggtcaccattcttgctgcaatcaacaaaaggttaagcgaggcctttggtcccctgaggaagatgaaaagctcattaggttcatcaccactcatgtatatggatgttggagtgaagtccctgagaaagctggtcttcagagatgtgggaaaagttgtaggctgagatggattaattatttaaggcctgatataagaagaggaaggtttacacctgaagaagagaagttgatcattagcctccatggggttgtaggcaacaagtgggctcat

SEQ ID NO: 203190 - DNA, 379 bp, Gossypium hirsutum
gaatactgcgccgttcgcgttaagagtgggagaagggtgcggatattacggagctttattcgactcggttgagtcgaccgtgttgagggataacccggagcgagcgcagctagaggaagggctgttacgcaaaatcgccaactcagttgcttgtgaaggtagggaccgcgttgaaagatgcgaggttttcgggaagtggcgggcccggatgagcatggcggggttcgagttaaagccactgagccaaaccgttgccgaaacgatgcgcgccaaactcaactcatgcaaccgagtcaacccaggctttaccgttaaagaagaaaacagaggtgttagcttcggttggctgtgccgaacactcaccgtagcatctgcttgg

SEQ ID NO: 203191 - DNA, 369 bp, Gossypium hirsutum
tgaaaattcattttctttggactttctctgaaatgcgagtcctaggaaagatgcgtgagattcttcatattcaggcagggcagtgcggcaaccagatcggtgccaagttttgggaggtggtttgcgccgagcacggcatagattcaacgggacgctatcaaggggacaatgatttgcaactggagcgcgttaacgtttactacaatgaagcgagttgcgggaggttcgttccacgagccgtccttatggacttggagcctggcactatggatagtgttagatccgggccgtacgggcagattttcaggcctgacaactttgttttcggccagtccggtgcagggaataactgggccaaaggtcattaca

SEQ ID NO: 203192 - DNA, 402 bp, Gossypium hirsutum
aagaaatggatattgcaacagaggcacccaaagctcctttgacaagtgaaaggaaggttcgagcagaccttgaagataaaatacccaaaccctatttggcaagggcattgaacacttcaagtgtggaaaatccacatggaacagtaccaggacacgacaacaatgtaatgagtgttcttcagcaacatgcttcctttttttgatcaagacaaagatggaattgtttatccccgggaaacctacagaggtatgagaaatctaggtttcggtcggttcgaaagctttcttgctgcaatcctcatcaatggggcattgagttactggactctccctggatggctaccaaatttacatttccctttatacatagatagaatacataaatgcaagcatggaaatgac

SEQ ID NO: 203193 - DNA, 239 bp, Gossypium hirsutum
gttcagtcagccagctacaagtgagaagaaggatatcaggttccaaagactcatcacaaatatcgtaagtgatatccgaaagcgctgatgttaggattaaggaagtagactagaatctctgaaccaagctcaacgcggcatgttccggtactgccaatacaatcttgtccagaaattatgaattaggactgtaagtaagtgatcagtaacgagaagctatcctaaagaaaaaaaacacg

SEQ ID NO: 203194 - DNA, 396 bp, Gossypium hirsutum
tttgaattcagctgtttttagtgatgggtcgttttgttacattccaaaggatacgaaatgcccgatgccaatttcgacttatttccggattaatgcattggaaactgggcagtttgagaggactttgattgttgctgatgagggaagctttgtggagtatttagaaggatgtacggcgccttcttatgataggaatcagcttcatgctgctgttgttgagttgtattgtgctaagggtgcagagattaaatactccactgtacagaactggtatgccggtgatgaggaaggaaaaggaaggatttataattttgttactaagcgtggactttgtgctggagatcgttcgaagatatcctggacccaagtggagactgggtctgcaattacttggaa

SEQ ID NO: 203195 - DNA, 283 bp, Gossypium hirsutum
aagcaaccattttccttacaagtatgattctcttgtgattaatccatatggctagctcaatgccccttaagcttgcatgtctgttggagttgtgcatggtgatgggtgcacccctggctcatggggccataacccgtgctgatggcttagtcagtctcccacgctgccttcctatgttgtcagggaatgctgacggtgctgatgccacaggttgctgtgccatcgtcatgaatgccttgtgatcgctctgtggtgatacataggaaccgatctagcttgaaat

SEQ ID NO: 203196 - DNA, 371 bp, Gossypium hirsutum
gtgaaatgagtgagaatcatgtgatccaccccactcggctctctcacactctttgtctctaaatccaaaatccaactaaaaaagatcataaatttatccatccatcaaaactacccaagcttttttctttttcttttttttttctgtatttgctttattgttttgtgtttcaatggcttcaagcgcttcaagatttatcaaatgtgtaacagttggagatggagctgttggcaagacttgcatgcttatttgctatacaagtgacaagttcccgacagattacataccaacagtttttgataacttcagtgccaacgttgtagttgaaggcacaactgtgaacttaggtctttgggacacggctggacaag

SEQ ID NO: 203197 - DNA, 402 bp, Gossypium hirsutum
gtcttctacactcttctctggtaagttcatcgaaagatcaaatcaagatccctgccaaaatgaacgacgctgatgtatccaagcagatccagcagatggtgagattcatccgccaggaagcggaggaaaaggctaacgagatctctgtttccgctgaagaggagttcaacatcgagaagcttcaattggtggaagcggagaagaagaagattaggcaggagtacgagaagaaggagaagcaagttgaaatccgaaagaaaattgagtattcgatgcagcttaatgcatctaggatcaaggtccttcaggctcaagatgatgtggttaatgcaatgaaagaatcagcatccaaagaccttctcaatgtgagccatgatcaccatgtttacaaaaaggcttttg

SEQ ID NO: 203198 - DNA, 378 bp, Gossypium hirsutum
gcagattcaggggaaagtcaacaatataaccattgacaaatgcactaagatgggagtggtatttaaggatgttgtggctgcttgtgaggtagtaaactgcaacggtgttgaggtgcaatgtcagggttctgctccaacaatttcagtggacaacacatatggctgtcagttgtacttaagcaaagactctttagggacatctataacaacagcatagtcaagtgagataaatgtgttagtgcctactggacctgatggtgactggggggagcattcattgccgcaacagtatatccatgtatttaaagatggtcaatttgaaactatccccatgtcgcactcaggaacatatgtgagatctatttgaattgaaaactc

SEQ ID NO: 203199 - DNA, 403 bp, Gossypium hirsutum
attaattgagctcagcatggatcaatgcacggtgggcttgaattcaagactgaaattgaattactttccagagttcatcacaaaaaccttgtcggtcttgttgggttttgttttgatcaaggagagcaaatgctggtttatgaatttatggccaatgtaacacttcgagagagcctgtctgggagatctggcatttatcttgactggaaaaggagactccggatagctcttggctcagctagaggtctagcttacctacatgagcttgcaaatccttccattatccacagagatattaagtccaccaacattttgttggatgaaaatttaaccgcaaaggttgcggactctggcttgtcgaaattggtatcagacagttcaaagggccatgtttcaacccaag

SEQ ID NO: 203200 - DNA, 386 bp, Gossypium hirsutum
cacccttgctgacattatcatgacatgtaacctgtgctagggtttctcccagatcatgactcatagttttacctaggagttccctcatgttgagaggtactttcggaccttggttaatcagccaaaaatcaagaagattcttggtgaagtgaagcaggcagtctctctaccacctgttccttcatagaagcctgctgcccagccaaaagaaactaatccaaacgctgaaccaacgaaagaagccaaaaaggaggttgagaaacaggcagcatatgcagaggcagctgatgaggaggaggcaccaaagcccataccaaagaatcctctagatttgctgtctgcaagtaagatggtactggatgactggaagaggctttactctaaca

SEQ ID NO: 203201 - DNA, 399 bp, Gossypium hirsutum
cttcccaactgtctcttccgcatgggtggcgcagcaatcctgttgtcgaaccgccgctcagagaggcggagagccaagtaccgacttgtccacgttgttcgaacccacaaaggggccgatgacaaggcctaccgatgcgtgtttgaagaagaagacaaagacggcaaagttgggatatcattatctaaagatctcatggctatagctggagaggctttaaaatccaacattaccacaatagggcctttggtgcttccagggtcggaacaactcctatttcttctcactctgatcgggcgtaaagtcttcaaccccaagtggaagccttatatcccagacttcaagctggcgtttgagcacttctgcatccatgctggagggcgagcagtgatagatgaa

SEQ ID NO: 203202 - DNA, 387 bp, Gossypium hirsutum
ggtacttctcgtgttcagcttgagagggttaatgtttactacaacgaagctagtggtggtcgttacgtacccagagctgttttaatggaccttgaaccaggaaccatggatagcttgcgtactggtccgcacggacaactttttagacctgataacttcatttttggtcaaaatggatcagggaataactgggctaagggtcattacactgaaggagctgaattgattgattcggttcttgatgttgttcgtaaagaagctgagaattgtgattgcttacaaggcttccagatttgtcattcttcgggaggtggaactggttcggggatggggacactgttgatatcaaagatcaaggaaagaataccctgatcggatgatgctgac

SEQ ID NO: 203203 - DNA, 395 bp, Gossypium hirsutum
tcctgagcctaatcaagatgagaacactgtgaacaaggagcctcctgcgcctcaaccaccacggttccatgtgcattccttttgcaagaccctcactgcctcagatacaagcacccatggtgggttttcggtgctcaggcggcatgcagatgaatgtcttccaccattggacatgtcacggcaacctccaacccaggagttggttgctaaggatttgcatggaaatgagtggcgattccggcatattttcaggggtcaaccacgaaggcacttgcttcaaagtggatggagtgttcatgttagctccaagaggcttgttgcaggggatgcttttatatttttaagaggcgagaatggagaattacgtgttggtgtacgacgtgcaatgaggcatc

SEQ ID NO: 203204 - DNA, 403 bp, Gossypium hirsutum
ggtgagccagctttcagtgtcctggtttctagtctggtgcttggagagagcttccctcctgcggtttacctctcccttgttcccatcattggtggttgcgctcttgctgccgtaactgagctcaactttaatatgaccggttttatgggagctatgatatcgaacttggcatttgtcttccgtaacatattctccaagaagggcatgaaaggaaactccgttagtgggatgaactactatgcttgtctatctatgttgtctcttgtaatactcacacctttcgcgattgctgtagaaggaccgcagatgtgggcagcaggatgggaaaaggccttatcccaaattggaccacagttcatctggtgggtggcggcccaaagtattttctatcatctctacaatc

SEQ ID NO: 203205 - DNA, 341 bp, Gossypium hirsutum
cgacaacgttaaggcgaaaatccaagacatggaagggatcctaccagaccaacaacgtctgatcttcgccggaaaacagctcgaagatggcctgaccttggccgattacaacatccataaggagtccacccttcatatcgtcctccgtctacgtggtggcatgcacatcttcgtcaaaaccctgaccggctagaccataactgtcgaagtcgaaagctctgacaccattgacaaccgtcatgcctagatccaagacatggaatgcattcaaacagaccagcaaaggctcatctttgccaggaaacaactcgaggactgtcgcaccttggccgattacaaca

SEQ ID NO: 203206 - DNA, 375 bp, Gossypium hirsutum
ctatctctttgacaaaggagagcacaaaaaaaaggtgttcttgttcttgttcaagttcttgatcaatggctaaggatgttgaggttggtggtgagttccaagccaaggactaccatgatcctccaccagctccattggtagatgcccaagagttaactcagtggtctttttatagggctataatagctgaattcattgccacccttttgtttttatacatcactgtgttaacagtgattggatacaagagccaagttgatccagataagggtggtcaagattgtgatggtgttggcattcttggtattgcttgggcctttggtggcatgattttcatccttgattactgcactgctggtatctcagggggacata

SEQ ID NO: 203207 - DNA, 375 bp, Gossypium hirsutum
aagcgacagagttctgtacgatattcttatccaagcgggaagagtattagacctgtacatccctcgagataaggaaaccgataagcccaaaggatttgcctttgttgaatacgaaaccgaggacgttgctgattatgctgtcaggctcttttctggccttgttactctttataaccgaaccttgaaatttgcgatctccgggcaagacaagtcttctcaaaaccctgccaatgcagccatgcctgctacaaattcatcctacaaatcaaggcattaccatggagtagttaaccacatggaaacctctcagcagccgaagaagtcttcaaccccttctaggattccggattatcctgcgcgttacagccaagcgcc

SEQ ID NO: 203208 - DNA, 393 bp, Gossypium hirsutum
tttacttctgcaattgcgagaagaaacgagacggtcaaaatccaatggatttggaaacggtgaagaaatacttggagaaaggagttggggctgacggcgatgacaagaacgcctcaaccatcaatggcatgccttctagattcttcgaaaacttcatcatgcaaggtctccatgttgaccaaatcgaaaagggtcgagtcctttgctccatgaaagtccctcctcgtttgctgaacgctggtaatttcttgcacggtggagctactgcatcactggtggatttggttggatcagcggttatttacacctacggagttagcaccagtggagtttctgtcgaaatcagtatcacttacttggatgctgcttatgttggcgaggaaatcgagatag

SEQ ID NO: 203209 - DNA, 396 bp, Gossypium hirsutum
cgacaatggtgacaatccctttctttgtcctaaacatcctccttttcctctccagctccgcggctacaccaaagagcggtgcagatcacgacctggtccgttcatcatgtgtccacgccagctatccaagcctctgttttcgcaccctttcttcctactccggcccagccaacaccccacgtgagttagcccaagccgccgtaaaagtcagcctgtcccgtgcccgtaaagtgtcgaactacttgtcgacgagtgtgacggggtacaacaagagggaacgagtcgcactgagtgactgcgtggagcaaatagatgagtcgatggaggagttgagcaagacattaggggagttgaagcacttgagaggggagacgttcgagtttcagatgagtaatg

SEQ ID NO: 203210 - DNA, 378 bp, Gossypium hirsutum
cgtggataagggtggcagtgctacgcaatcaatatgggaccgatacaatgactcctacctgaggagaattggaagtacagttttgtcttacgtaaatatggtctgcgctactttgcgccactcgattccaaagtccattgtttattgtcaagtccgtgaagctcaaagaagcctgcttgactttttctacacggaattgggtaaactggagcaaaaacgattatcagcgttactgaatgaggatccagcaatcatggaacgccgatccgctcttgcgaagagactggaattatataggagtgcacaagctgaaatcgatacggtcgcttggtccaagtaagagtgggtaaaattagatccatggggcatggtattggg

SEQ ID NO: 203211 - DNA, 400 bp, Gossypium hirsutum
caaaattcttttctttctatttggttaaccatggctcataacttttgtcatcctttcttccttttccaacttttactcattactgtctcactaataatcggtagtcacaccgtctcgtcagcggctcgacatttattccagacacaaacaacctcatcagagctgccacaattggcttcaaaatacgaaaagcacaaagagtctgaatacaaacaaccaaaatatcacgaaaagtacccaaaacatgagaagcctaaaatgcacaaggaggaaaaacaaaaaccctgcaaacatcatgaagagtaccacgagtcacgcgaatcgaaggagcacgaagagtacgataaagaaaaacccgatttccccaaatgggaaaagcctaaagagcacaagaaacacg

SEQ ID NO: 203212 - DNA, 387 bp, Gossypium hirsutum
acagttatacacgccggtaattctaccaaaagatatatattgtccataatcagcaatttaagcatgttaaagcttgaacatgtctaagaaatagggccaaccatgcatttttttaggcctttcctatcagagatcaattcaaccaaaattgctctagttttccaatggccgactagtctctgtgaagttcatctgcgggtggagcaaatctcacatttgctggccgtgctactactacagattcatctgcaaacatcgctttaataaaggatggagtttttaggggtcgacgtccggtcattcgtggatatacatcttcaagaaaatagtaggcatgaccagcaatcattcccaggagatccacccaagcactagcaccaacaagga

SEQ ID NO: 203213 - DNA, 389 bp, Gossypium hirsutum
cacacttgctcttccgtactcctcgttttataaaaaccctaaaccgcctgatatttatctcttagaacgaaaaaccccaaacgcctcactcttaagaaaaaaacagttatggcaagcaaagaacccgaacacgagcacagagaagatcaagaagctcctgccgccgaggatgaagacactggagctcaagtcgcccctattgtcaagttagaggaagtcgctgtcagtacaggcgaggaaaacgaagatccgatccttgatctgaagtcgaagctgtatcgatttgataaagaagggaatcaatggaaagagagaggtgctggtactgcgaagctgttgaagcacaaagagacaggaaaagttcgccttgttatgaggcaatctaagac

SEQ ID NO: 203214 - DNA, 409 bp, Gossypium hirsutum
gcaaagtgcaaggagcttatcggacactacatctgggcacccccacctgaaattttgccgaggccaacaaccatacgtgcattggcattgaaggacagtttcgacttgggagaatctcatacacataattcgagcgatgaggccagggttaagacagcaaagaaaattcctaatcagaaattggctgagctttcgggtaatgacatatctaagggtgacgttctgccaggttctgccgataagccacttagtatggcgaaaatgcgggagataagcggcagcaacatcttcgctgatggaaaggttgagtctcgagactactttggtggtgttcgcaagcccccaggtggtgaaagcagcattgctttggtttaacttatgtctaaccctgtcagtttgctgttggttt

SEQ ID NO: 203215 - DNA, 412 bp, Gossypium hirsutum
gagaactagtctctaaatttttttttactctaagcagaaattttatttatttatcgctacacacattaaatccaaaaatgtaataccaagaaaacggtaactaaaaacatggaagaattctcaactggtaccgaccctcgtgtgccggcggtcaagccggactctaagccatcttccttcgagggagttccactcgaagctgcctccgctgctgtttcagaagatgccgaggtggataaggacttgctgtgtccgatttgtatgcagataattaaggacgccttcctcacgtcttgcggtcacagcttttgctacatgtgtataattacccatcttcgaaacaagagcgattgcccttgttgctctcaatttctcactaataatcagcttttccccaatattttgctcgata

SEQ ID NO: 203216 - DNA, 342 bp, Gossypium hirsutum
gagaactagtctctaaattcctttttactctaagcgtaaattttatttatttatcggttcacacattaaatccaaaaatgtaataccaagaaaacggtaactaaaaacatggaataattctcaactggtaccaaccctcatgtgccagctgacaagccagactctaagccatcttccttcgagggagttccactcgaatctgcctacgttgctgtttcagaatatgccgtggtggataaggacttgctgtgtccgataagtatgcatataattaatgacgccttaatcacattttgctgacacagctattgctacatttatttaattacccatcttcgaaac

SEQ ID NO: 203217 - DNA, 399 bp, Gossypium hirsutum
  unsure (1)..(399): unsure at all n locations
ttctgccaaggctgccgcttgggagacaggatgaagaccattctttcttccgagacgatggacatccccgatgggattagcatcaaaataaaagccaaggttatcgaagttgagggtcccaggggtaagctcatccgcgacttcaagcacctcaacctcgacttccatctcattaaggacgaggagaccggcaagcgtaagctcaggcttgaggcttggttcggctccaggaagactagcgccgccatccgcaccgctctcagccacgtcgagaacctcatcaccggcgtcaccaagggataccgttacaaaatgaggttcgtctatgctcactttcccatcaacgcctncatcactaatgccaacaagtccatcgagatccgtaatttccttggcgag

SEQ ID NO: 203218 - DNA, 397 bp, Gossypium hirsutum
gacatgtctgcagcaagacttcatgtggttatggagtggcaactgggggaccattggcttggggtctatgctacaacaaagaaatgagtcccagcaaattgtattgagatgattactacagatacacctacccttgcactcctggagtttcttaccatggccgtggtgccttgcctatctattggaactacaactatggagaaacaggagacgcattgaaggtggacttattgaaccaccctgaatacatagaaaacaatgcaaccttagctttccaggcagcaatctggagatggatgacaccggtgaagaaacaccaaccgtcggcccacgatgtgtttgtcggcaactggaaaccgaccaagaacgacacgttggccaagcgggtcctggggtt

SEQ ID NO: 203219 - DNA, 393 bp, Gossypium hirsutum
atattccccctccccccttttatctacccttaaacgtttctctttgctcatacagaattgaatgaatttcttcttactataatgggtttgccttgattgttcatttaatggcgtctgtgatttgatgggtttaggttatatttctcggatctcaggtcttgctcactttcataaacatctggttgccctctttcttttgagggaaaatctgatcgcctcgtttggttgtttgggaaaagaaatcaaggaaaatggcttatcactctagttttgacggagaggaaggaattactaaagcttgcggctcacctttacttcctttgaaaagccatataaagggtcctgctcctgtatcagatcaaggtaaaactgatatagccgatgaagcgatca

SEQ ID NO: 203220 - DNA, 351 bp, Gossypium hirsutum
tttaagttctgcatatggactgtcatctctccacgaagattgtcatcctacgatcattcaccgtgatattcacgccggtaatatgctgttggatcccaagttcgaatcaccggttggcgatccgggacttgctaaaattgctttcgatgtcaacactctctttttcaccagtgtgatgtgtacgaatccggtatttagccccctgagtatgcttcaagtggaaagctcactgattaatcagatgttgccttctccagggccatgcttttggagttgattaccggtcacagaccggatctctcttcatttatggatgacattccggtggatcgagctacgccttagctcaca

SEQ ID NO: 203221 - DNA, 405 bp, Gossypium hirsutum
tttactccctccatggcctcatttatagcttgcctgtcaaccagaaggagaggaacctgttgttcaactttcatatttaatccttcataaaattcttggatttcaaggtagagaggttggcattcatgagtatccataattgcagaatctagacactctaggcacagcctacgaccatcatcaagtgatatatattttacatctacaggctccattctttcgcaactacaacagcgaggagtgccatcacgctcatgagaggggcagtacttttgcatccagtagggatgtgccctgtactcaattagaccagctggatttgtcggtataaatttcctgcaaacatcacattttggatgatgctgctctttatagcaggatttatgaaaaggactattccctgaa

SEQ ID NO: 203222 - DNA, 396 bp, Gossypium hirsutum
gccttttctcccttttcatccgttgaaggaatggctgcagatcctaaagtgcacattttcgaggaggttgccaaccacaacaaaaccaaagattgttggctgattatttctgggaaggtttatgatgtaactccgttcatggatgatcatcctggaggtgatgaagttttgctgtcagctactgggaaggatgccaccaatgattttgaagatgtgggtcacagtgattcatcaagagaaatgatggaaaaatactatattggtgagattgatccaaaaactgtcccggcaaagcgcacttacattccaccccagcaaacgccttacaatcccgataagacccctgagtttgtcatcaagatcctacaatttcttgttcccctattgatcctgggc

SEQ ID NO: 203223 - DNA, 386 bp, Gossypium hirsutum
caatgagaaaagaaattcaggaccttaggacaaatgccaggatatttcagctgagcaagtgcactgcttgcacttttacccttgacctacctgctgtgcatttcatgtgtatgcactcatttcatcagcgttgccttggtgataatgaaaaggaatgccctgagtgtgctccagagtacagatctgtaatggaaatgaaaagaagcttggaacagaattcaaaagatcaagatcaattcttccaacaagtcaagagctcaaaggatggattttccgtgattgctgaatattttggaaagggggtcattagtaaaacgagtaatggttccacaggaactgctagatcagacagcgtctcttccagcagtggcttctgattttcttga

SEQ ID NO: 203224 - DNA, 387 bp, Gossypium hirsutum
tcgagtttttttttttttttcatttaatgggaatcggtccactggatgaagaagattattacacgggatgaacagcaaatcaaaacaagatgaggaccaaacaattagggaagaacatcatattggaaacttaaaagttacgatgaatttactttaaaaaagaaatatccattttaataacactgtaaaagtttcgtgcttttagatcacaaccccaagcagcagggaacgagagatgagaaaaacaaccttaggccttagctgaagtatatggaaacctgaggaatgtcgacatcattgtccgagtcgtcctcacaagccacgaccacatcaagatgctgtctattcggaagcagttctacctttgccactttccgggctagatct

SEQ ID NO: 203225 - DNA, 350 bp, Gossypium hirsutum
ccggccgtttaaaacctggggattccccgggcctgaaggattccggaccaggttaaaccctgttgcgagcctattcaaggtcacagggtgcatggacatcgtaatgtatgtgatgcgggccaagatggtagtctgatgctttgtaaccctgtgctgcttgcgcctgacgatactcattggtatggatgctcgttacagaggtcgtggcaacttacagatgaatgttcatataagccgacctcattacgattcctgtgacaactgatccatccgaaaatctacgctaaggggatcatctgccttgatagactacaaagtaactggtgccctagttttgaatgtacatctat

SEQ ID NO: 203226 - DNA, 407 bp, Gossypium hirsutum
ctggaataggcagccgaccgcatgttgatggcacgggtatgtgaggcaaacggagattacgaggcggctcttgagcaccttgtcctagccagcatggcaatgatagccaatgagcaggagaatgaagtagcttcaattgatgtcagcattggcaatatttacatgtctctatgtcgctttgatgaggccatcttctcctaccagaaggcactaacagtgttcaaatcatcaaagggtgacaaccacccttcagttgccttcgtctttgtacgacttgcggatctataccacagaacatgaaagctccgagaatcaaagtcctattgtgaaaatgccctgaagatctttgcaaaacccgtgcctggaaccacagcagaagagatagctggtgggttaacctaaatttc

SEQ ID NO: 203227 - DNA, 399 bp, Gossypium hirsutum
tctatattctctctctctctccttctctgcctaaacccaaattattaaaacagtcgtcgtctgcaaccgacaccaatgtccaccgcagttccacccgttatccctgtctcctccgtgcaatccgtcgaatcccaaccgcccgctgccagccccgcctttctctctttcgtttcccgtctcaatgaatcccttcgcaacggcctctcccagcgccgtccttgggctgagctcgttgaccgttccgccttctccaagcccgagtcattctctgatgctctcgttcgcgtccgcaagaactactcgtatttccgagtcaattacctgtctgtgatcggtctcatccttgccttttaccttctttcccatccgttttcccttctgcttctcctcggactcctc

SEQ ID NO: 203228 - DNA, 322 bp, Gossypium hirsutum
ttaaacgcttatgagagactactcgaggtcacagggggatccacctgctagtgttagtgaggctggccaagatgatagtctcatgctttggaacgctgttctgcttgcgcctgactatactccttgggatggatgctcgttacagtggtcgttgcaactcacagattagtattcatataagccgtcatcatgccgattcctgtcacgactgttcgatcctaatatctactgcttaaggatcatttgtctggatagactacaaagtcactggtgctctatgtatgaagttgcagctatactcgcatgtacccagtaaatactt

SEQ ID NO: 203229 - DNA, 390 bp, Gossypium hirsutum
cgagccacgatcctcaccatctcagttgattttaaagaatggtattgtagaaaaaggtaattaaaagatgagtgaagttttcgaaggatatgaacggcagtattgcgagctatccgcgaatctttccaagaagtgtacggcttctggtgctctgaatggagagaagaagaaacaaaaactttctgaaataaaagccagactagaagatgcagaagctctgattcggaaaatggaccttgaggcaagaagcttgcagccaaatgttaaggctgtacttcttgctaagttacgggaatataagtcagatcttaacaatctcaaaagtgaagttaaaagaattgcatctggcaatttaaatccatctgctcgagaatagttgttggagtctgg

SEQ ID NO: 203230 - DNA, 304 bp, Gossypium hirsutum
aaaagttgaaatcttttttgagcaatggaaggatcagttttgactccatcgttggaaggaatgaagcatatcaaatctccagaaggggaaatgcttaccaagccttttttggatgtctgcaagttgattttgccagtcctcgataagttcggatctgctatgagccttgtgaagagtgatgttggtggtaacatatcgaggttggaaaagaaatatgaaactgatcccgctaaatacaatcacttgtacagtatggtgaaagaagaggttgattgtaaaacagcaacagattcatctagttgta

SEQ ID NO: 203231 - DNA, 355 bp, Gossypium hirsutum
  unsure (1)..(355): unsure at all n locations
gaaaaactcatccaaattgttaagcttgttcaatggcgagtatgggtttttcgttgttcttcaagttccttctcttgctctctggctttggggtttcaatggcgttacaagaaaccccattcgtggctaaaaacttgggtcaaatcagttctaactcggtgcttgtggccttgttagattcgcattatacggagcttgctgaattagtggagaaagctttgttgttacaaagcttagaagaatctgtgggaaagcataatattaccatttttgctcctaaaaatgaagctcttgaacggaatctagaccctgaattcaagcggttttntgtggaaccctggtatcttaaatcctt

SEQ ID NO: 203232 - DNA, 252 bp, Gossypium hirsutum
cttatgctgaaagtgtgctaatagttactaggcatctacgtcagattatacatgacagacatccaaggtggccaatatgaccaatgtcttaactaccaacattaacagcaatggaagcatgtgtgctaatatcactgaaataacaacggatgcctggaataaccatttccaaggttctgatctcaatctggtcaatgctgaccaatccaaagcttgatgaccctgttgttccccagattgctcacatgtata

SEQ ID NO: 203233 - DNA, 357 bp, Gossypium hirsutum
aatggaagcaccatgagcttaaggtgaaggactcaaaaacgcgtctgtttggtgaaaagcctgtcactgttttcggcatcagaaaccctgaagaaatcccttggggtgagactggagctgattatgtcgttgagtctactggtgttttcactgacaaggacaaagctgctgcccatttgaagggtggtgcaaagaaggtaatcatctctgctcccagtaaggatgctcccatgtttgttgtgggtgtcaatgagaaggaatacaagcctgaccttcacattgtatccaatgctagctgcactaccaactgccttgctccattggctaaggtcatccatgacaaatttggcattggtg

SEQ ID NO: 203234 - DNA, 309 bp, Gossypium hirsutum
tcgaattaaaagttaaaacccagaaggaaagggagaagacgatcaaatctctggagaaggatttggagattgcgaagatgcagatggttgctgacaaggaagaacttttgagtcttaaggctgaagttgagaagatgaggactgcaaatgaagaaaaactacaaaagatacatgaggagacagataggctcagggtaactgaagaagagcgttccgagtatcttcgcttgcaattggaattgaaggaagaaatagagaaatgcaggcttcgagaagaactactgttgaaagaagctgacgatttgaaac

SEQ ID NO: 203235 - DNA, 279 bp, Gossypium hirsutum
gaacccactgttattgatgaagtgagaactggtgcttacggccagctctgccacccagaacaactcatcagcggcaaggaagacgcagctaacaactttgcccgtggtcactacactattggcaaggagattgttgacctctgtttggaccgcatcaggaaacttgctgataactgcactggtcttcaagggttccttgttttcaacgctgttggtggaggtaccgggtccggtcttggttctctccttttggagcgtttgtctgtcgattatggcaag

SEQ ID NO: 203236 - DNA, 299 bp, Gossypium hirsutum
ccagcttcactcacttcatcaaacaagaccaagcttcccaggcaaatcatcaaccatttcctttcttcaaatcccaacaatgctttctcaatggggttcggatcctcagcttgctttgcttatgctcccacagagaatcgtttccccaatcatcaaaggttgttctgtggagtggatgaaatatactgcatattcttgggggatttgaataatttgagcagcctgctaaagcagtatgggctgtcaaagggcaccaatgaagccatgtttatcattcgaagcatatcggacccttcgcg

SEQ ID NO: 203237 - DNA, 435 bp, Gossypium hirsutum
caagttctcgctttctcagataccaaatgtctcaaaggaaatcaaggttgacaaggttggagttcagagattcaatgatcaaccagaaagcttattcctttctgttaatgataaatcgaatgataagaattctgagagaatgttagctcatctggggatgagcaaattgagtgatcctgataatgcaagtcaatgcagctcaatttaccatcacgagagaggttttagttctcattcaggagaagaagggagctctggaacggttcgaaaacagtcttcattgtcatatggaggactagtgacggcctctcccttagttggtctgccagaaatttcacatcttgggtggggtcactggtttactcttagggatctcgatctcgccacaagtcacttcgccgcagagaatgtgcttgagagggtgatatgggtggt

SEQ ID NO: 203238 - DNA, 350 bp, Gossypium hirsutum
taacgaggtaaacaggacagcgaagttcaattggctcacgacacaagaagtactccattggctcattagaatcgctcagactaacagctacaatccaagctctgtctctttagttgatcggtccactggccgattactacctcactggcaaattactagcaagttacaagttcttctcagctgcatagtttctcatactactaccgtgctcgctagctactattggcaatataagtcattatctatgcatcggacgatactccgccacatctttccaagagctatgccacatgaaaacagtatgtgtatcgatattggcatggctactctctgatactgagctgacactg

SEQ ID NO: 203239 - DNA, 213 bp, Gossypium hirsutum
tcgaattaaaagttaaaacccagaatgaaagggagaagacgatcaaatctctggagaaggatttggagattgcgaagatgcatatggttgctgacaaggaagaacttttgagtcttaaggctgaagttgagaagatgaggactgcaaatgaagaaaaactacgtaagatacatgaggagacagataggctcagggtaactgaagaagagcgtt

SEQ ID NO: 203240 - DNA, 345 bp, Gossypium hirsutum
  unsure (1)..(345): unsure at all n locations
gaaaacccatctctcctctcaaataataacatctccatcagtgaagagaactcctcccctaagaaacagccntgaaacaccgctgcggctggtggcggagataggctgaaacgtgatgaatggagtgaaggagctgtttcaagcttgcttgaggcttacgaaaacaaatgggtgcttagaaatagagccaaactaaagggtcatgattgggaagatgtggctcgctatgtttcagctcgagctaattgtaccaagtcgccaaagactcanactcagtgcangaacaagattgagtcaatgaagaaaaggtatcgatcggagtccgccacggcggatggatcttct

SEQ ID NO: 203241 - DNA, 432 bp, Gossypium hirsutum
cggcacgagaaaaaattccttttttttcaatcttctctccctaaaaagcgtccatttttttcctctttaaaatccctctatttctctctttcttcacaacaacaacaaaaaagtttcaattcaatctcaattattcatgtcggaggacaagggtcgtccattaccgaaattcggtgaatgggatgtcaacgatcctgcatcggctgaagggtttaccgtgatttttaacaaggcaagggatgagaagaaaacaggtggcaaacccgagtcaccagcaaaagctgatgctcacggtaaacccggagcggatcctagcaaaccccagagtaagaaatggctttgctgcgttcaagcacccaccgctgaatcttgatgaaagtccgcacgtatacgagctttcacaagtacattcaagcccctcaccatggattc

SEQ ID NO: 203242 - DNA, 444 bp, Gossypium hirsutum
  unsure (1)..(444): unsure at all n locations
cagcagcgtctcatcttcgccggcaaacagctcgaagatggccgtagcttggccgattataatatccagaaggaatccaccctccacctcgtcctccgtcttcgcgggggcatgcagatcttcgtgaaaaccttgactggcaagaccatcaccttagaggtggagagttcggacaccatcgacaatgtaaaggcgaagattcaagacaaggaagggatcccaccagaccaacaacgtttgatctttgcagggaagcagcttgaggatgggaggaccttggctgattataacatccagaaggaaccgacccttcacctngtttgaggcttcgtggaggcatgcagattttcgttaagacattgactgggaaaacaatcacattggaggtggaaagttcggatacaatggataatgtgaaggcgaagattcaggacaaggaaggtt

SEQ ID NO: 203243 - DNA, 302 bp, Gossypium hirsutum
gcctgttgagcattcacaagttcccttaacaatttactttcaaatacacccaacaaaaatatcaagtttcaacccaaacacaaataaaacataaaacagcataacatacagtaaaccatttcaagtctttaacaagcttcaaagaatagaagcttgcataacacggaagcaacaggtaataaaagacatcgtaagcacactcaatcacacgtacttcttagtactcatcatcttcaccctcatcaccctcagctgactcagcaccaacttcttcataatccttctccaatgcagcaagatcc

SEQ ID NO: 203244 - DNA, 317 bp, Gossypium hirsutum
cagatcttcacagaagtgaacatcgatctaggtccagtgcctggatcttgaataaaggagtctatgaagtcatccacccgttctgcgtttcggcctggagtagttggggaccaaaatgtctaccgtgggttttgcgggatattgcaattgagcgatgaggtattgtctctcaagatactatcacgattgactccaagagatattgcatctgttggttctgtctgtagacggctatatgacctgacaaaaaacgaggacctttggctgatggtctgtcaaaatgcatggggttacgagactactcgtgttttagagac

SEQ ID NO: 203245 - DNA, 301 bp, Gossypium hirsutum
tttttgagtgtaagtgtaggcaactggatttataggtgggggaaccctaaatgcaagggcaaactccctcctggttccatgggattccctcttataggagagacccttaacttctttgtcactttcaactccattgacatgcatcctttcgttaatgaaagattgaaaagatacagtccgctgttcaagacaaacataacgggtcgacccgtggcggtgtcatcagaacccgaattcaactacttcgtgttgcaacaagaagggaaactcatcgaactctattacatggattccttttcac

SEQ ID NO: 203246 - DNA, 341 bp, Gossypium hirsutum
cataaatcaaaacgaagactccattttcaaagcattggagcaagatcttggaaagagtcctgttgaatcttacagagatgaggttggggttttgaagaaatcagtcacttatactttgagctgcttggagaaatgggtggcacctaaaaaggctgaagtgccattgctttttttccctgctaaagctgaagtgatgcctcaaccactcggtgttgttctcattttctcatcttggaatttccctttcacactggcattggacccattgatcggagcaatatctgccggcaacacggttcttttaaaaccatctgatctggcaccggcatgcatgttcgttc

SEQ ID NO: 203247 - DNA, 354 bp, Gossypium hirsutum
  unsure (1)..(354): unsure at all n locations
cgatcttacactggcagccatagctatctgggtgcattgtcatctgcgccagtagtgtccttggcagttgagaggggatggagtgagtctgctagccctaatgtgaggggtccaccctctctcgtattcaacttttctcagctggacgaaaagctgaaggctgggtacaaggccacaacagatggaaagtttactgaggctcttaggcttttccttagcattcttcatacaattccattgattgttgtggagtcaaggagggaagttgatgaagtcaaagagttaattatcatcgccaaggagtatgttcttggtctgcagatggagcttaagcgtanagaattgaaagacaat

SEQ ID NO: 203248 - DNA, 295 bp, Gossypium hirsutum
cgaagatggaaaaattacaaagcctttgtgatgcttttagaggttgccatgctgtttttcatacatcttcctttattgatccacatggtatctctggttattcagaacaaaaggtgtttttggagactgaagtggcaaggactgtcatggaagcttgtgctaaggcagcctatataaagagatgcgtcttcactacatctctattggcatccatttggaggaatgaaaatatagatggaattattgatgacagctgttggagcagtgaagaattttgcagagaaaaaaagctatg

SEQ ID NO: 203249 - DNA, 418 bp, Gossypium hirsutum
ctcaacacaacaatgccaaagactgttggcttatcattgagggcaaggtatatgatgtgactaaattcttggaggatcatcctggtggtgatgaggtcctgttgtctgcaacagggaaagatgcaagtgatgattttgaggatgttggtcatagtagcagtgctcgggcaatgatggatgagttttacgtgggtgacgtcgatacatcaactatcccaactaagaccaagtacaccccttccaagcagcctcactatgagcaggacaagacctcggactttgttataaagcttctccaattcctcgttcccctgctgatcttgggattggccttcggagtccgcttctataccaaatcacctgcttaagcatcaagaccacaacccagaatggaaaaaactcttcaatatattaatat

SEQ ID NO: 203250 - DNA, 271 bp, Gossypium hirsutum
aaagtatcgtcgttcgagacggcagagattttgaggagaagcggtgttgtgtatctgcacgtggtgtgcactcgcagtcctagtgaaccgaaggatctaggggttcatcaaaggaatgccgctttgggacatattgaacggcataaggtcgatgggatcgtgtttttcgccgacgatgacaatgtctacacggtggagttgtttgaaagctttagaactatttgacgatttggaacttggcctgtaggcatgcttgcaccaagcaaaaaca

SEQ ID NO: 203251 - DNA, 365 bp, Gossypium hirsutum
  unsure (1)..(365): unsure at all n locations
caaactcccaggacagcataagaaagatgaagaggacaccggccaaccaccagctgctgctgccccaattgagaacgaccaccatgaaggagagacaaaagagaagaagggatttttggtgaaaatcaaggagaaaattcctggttaccactccaaaacagaggacgagaaggaaaaagagaccactgctcccaattaatgaatcaatataatgcatttcaagtaaaagatgtgtagagattgtgtggtttatcaatttgttggaactgtctgttctctgtttttctttttggggttgcatacatcatataaatttctgcgtctgttttcctgcttgtaagttaaaaaaaaanaaannnnaaaaa

SEQ ID NO: 203252 - DNA, 324 bp, Gossypium hirsutum
  unsure (1)..(324): unsure at all n locations
gtaactgcttaccagtatcacgaatgtatgaagtcatgacgtctctgattaaaacaagcccattggatactcgacgaaacaagcaatacatccttcctaagtcctcatatttttcatcgacaatcatattaatcaaccccgagttctccatttgcacaagcctgtgcatatgactttcaatcatctccgtttctaccacatttgttatcttgacttcacttctggtgtccaagtaatgtgagactctctctatttcttcatttaggcgtctctcggctttctttagatactccccacaatcacaggactctatgaactctngag

SEQ ID NO: 203253 - DNA, 334 bp, Gossypium hirsutum
agaagaagcactttcttctgaggatctgctatacttggagttcttggagaaatttgagaggaagtttgttacccaaggagcatatgacacccgcaacatctttcagtcactcgatctggcgtggactctgcttcgcatatttcctcgtgaacttctccaccgtataccagcgaaaactcttgaccagtactacagtcgagatgcaggtaattgaaggaggcaaagtgatgcccttagattgcctcctccttggtagtgtttaaaagaagtttatttaccatccgcttcatctgctcgaataataatggttgaattccagttaggttttcccatg

SEQ ID NO: 203254 - DNA, 293 bp, Gossypium hirsutum
agggccatggcatattcatttactcatcagcaaacctggaagcatactgcaagatctatgaatccgttattcatggatccaaacaatccctcatggggatggagttggttggaacgatggatggcagcaccaccacaggagggtcgtggtacaacagaaaaggaacagaacgaccagtcatccataaggagtgcacgcagcaactttggaggagaaatcagcaaagcttatgctcgctaccaactcaatttggataagcaatccccaaagactggccaaaagccaaaccaaac

SEQ ID NO: 203255 - DNA, 233 bp, Gossypium hirsutum
gattctacatgttgacaagaatgcaaaagatgatgatttgaagaaagcttataggaagcttgccatgaagtggcaccctgataagaacccaaataacaaaaaggaagctgaagccaaattcaagcaaatctttgaagcttaataaggtttgagtgaaccacaaaagaaagctttctattaaccatattgggaaaaaaggcctaaaaggccaattccaacttaagaatcttgcc

SEQ ID NO: 203256 - DNA, 288 bp, Gossypium hirsutum
atgaagaagatgaaggatttaaacgtataagaaagcagttactgcattaagatgacatattataggtcattattactcccagcagtatatgtacaataagtagagccgaaatgtattatgtctttttcagacagtgtacgcttgctgaattgtgtctatgtcaagacccttcagtctaactactgattcgacgtgcccttttagtgtagtcagttccctcaaccttgcaatttcagctcgtctctttgcctcttcagccatttgattaagttcattgtaactagttcg

SEQ ID NO: 203257 - DNA, 380 bp, Gossypium hirsutum
tgaaaagccggaatacaaacagccaaagtatgacgaagagtacccaaaacatgagaagcctgaaattcacaaggaggaaaaacaaaaaccgtgcaagcaacatgaagagtaccacgagtcacacaaatcgaaggagcacgaagagtaccagaaagaaaaacccgagttccccaaattggaaaagcctaaagagcacgagaaacacaaagtcgaatatccgaaaatacccgagtacaaggaaaaccaagatgagggtaaggaacataaacatgaagagtaccacgaatcacgcgaatcgaaggagcacgaagagtacgagaaagaaaaacccgagttccccaaattggaaaagcctaaagagcacgagatacacgaagtcg

SEQ ID NO: 203258 - DNA, 367 bp, Gossypium hirsutum
cagattccaaatcggaaaaaagaaaatggtgaagggacgcgaatgggagcgagtcagactctatgtaagaggaaccatcttgggttacaagaggtcgaagtcaaaccagtatccgaacacttcattaatccaaattgagggagttaacaccaaagaggaagtagcttggtatgccggcaagcgtatggcttatatttacaaggctaaggtgaagaagaatggttctcattatcgctgcatttggggcaaggtaactagaccgcatggtaacagtggtgtcgttcgtgctaagttcaagtcgaaccttccccctaaatctatgggagatagggtcagagtcttcatgtaccccagcaacatttgagtt

SEQ ID NO: 203259 - DNA, 363 bp, Gossypium hirsutum
aggagcagtatgtacgtggggagggatttgcctagcatgggggaaagaggttcaggttaatcttagaactttctcaatgaaccatattgatgtgctaatcaaagaagaagatgttgatgaagaatggagatttacaggtttttatggatcaccttattcacagaataaaaaggcctcatgggatctattaagatttttggggtacgaacaagatctttctttgttagtgagtggagactttaatgaaataatttactcatttgagaaaaggggaggtcaaccgagggaggagaagataatggaagagtttcgcgatgtcctaaacgaatgccaacttattgatgtgggctactcgggaacatg

SEQ ID NO: 203260 - DNA, 439 bp, Gossypium hirsutum
  unsure (1)..(439): unsure at all n locations
cttcttcttcaccttatcttttgctacatacatatccactctaaccttaaaccaaaaccatccaccatcatcatcatcatcaagctggagaagcgataatgaagtgatgggattgtacaaatcttgggtcatccaacatggcaaagcttacaatggtatcagtgaagaagagaaaaggttcgaaatctttaaggataacttgatgttcattgatgaacataactctaacaacaacactacatataagcttgggttgaacaagtttgcggatttaaccaaccaagagtaccgagccaagttcttgggcaccaggactgacccttagcgtcgactcatgaagtccaagatccccagctcacgttacgctcaccgtgccggcgataacttgccggattcagtaaactggagaagatcatggagctngtagtcgagtcaagga

SEQ ID NO: 203261 - DNA, 415 bp, Gossypium hirsutum
attttgtgtaaaatcgagatctgaaatatgggtttcttagtaacaaccctaattttttctgtgattgcggtaattgcatcactttgtaccagaatctgttgtaacagaggtccctctgctaatctgttacatctaacattggtcattacagcaaccgtctgttgttggatgatgtgggcaattgtatacctagcacaaatgaaaccactcattgtccccattttaaagtgaaggagagtgaagagtgtgtgtgtgtgtatatatatattgcacaaaaatcatttggaagattatcagtaaatcagcaattatggattttggccattgagggaatacctgaattccattgcttaatggaatggatgattcaagtgtgtctcatatggtgatcctgtatgtgctttgaattggaaat

SEQ ID NO: 203262 - DNA, 353 bp, Gossypium hirsutum
gctattcgtaccagaagtcccatttgaagtacttgttcgagggcaaatagcacgtctgctagatccaagccttcaatgtgccaggttcatatatgatgagttaataaagataagccatcgctgtatggttaatgaactgcagcggtttcccgttctgagaaagcatatggaccaagttattggaaattttctccgagaaggtcttgaaccatctgagacaatgataggtcatattattgaaatggagatggattacataaatacttcacacccgaattttattggtgggagcaaggctgtggagcttgccaatcaacagctcaggaattccaaggttgctcttcccatatcta

SEQ ID NO: 203263 - DNA, 384 bp, Gossypium hirsutum
gaacccaaactagcattatgccatatagtgataaaagagctatttacagaagagctgaaatctctccggagaagaaaccaatctccatgtatatatatgatatgatatgatcctatatcaaaggcctcagtatacaggcttcaacttattacaaagacttttcactaagaaacaaaagaagaccaaaacccagtatacaatattaaaattttctgtgtgtataatgtgtaaaagcagctacctctataatttcctatcagttgaagcgatgatcttgataacaaggccggggaaaacatcgtcagggtcatggatatgcgggttccgctcgacgataaacggatcgccacacttgtcgctgatggagtgaagggttcaccttcg

SEQ ID NO: 203264 - DNA, 331 bp, Gossypium hirsutum
ggagccggaaagctgttgttatccatgtcccctaccgatggaggaaagcttttcgcaaggttcatgttaagcttgtgagggagcttgaaaagaagttcagtggaaaggatgtgattcttattgccacccggaggatattgaggcccccaaagaaaggttctgccgttcagaggcctcacaaccgcacattgacttctgtacacgaggcaatgctagaagatattgtcttgcccgccgagattgttgggaagcgcactagatatgcaattgatggatctaagttaatgaaggtgtttttggaccccaaagaacgaaacaacactgagtataa

SEQ ID NO: 203265 - DNA, 247 bp, Gossypium hirsutum
caacagaagtggaaaaacaaaccccaatgcaaaagtatacaatagcagctggagtgcagaagatgacagatgacaaagctgtagtgtgccacaagcagaattatgcatatgctgtcttctattgccataaatcagaaacaacaagggcttacatggttcctttagagggtgctgacggaacaaaagccaaagcagtagcagtctgccacacagatacatcagcatggaaccctaagcatttggcttt

SEQ ID NO: 203266 - DNA, 334 bp, Gossypium hirsutum
caaaagcgtcggaggaggatccacaacgttcaattcagccgccgttgcggttgttggagatgggttcattgctcgtggcattacgttcagaaacaccgctggtcctactaaccatcaggcagtggctctacgttcaggctccgatctctcggtgttctacaaatgcagcttcgaagggtaccaagacactctttacgtccattccgaaaggcaattttacagagaatgtgacatctacggggaccgttgattggatattcggcaacgcagccgttgtgtttcaaaactgcaacatatacgcacgcaattcccctgataagaccaacacggtgac

SEQ ID NO: 203267 - DNA, 241 bp, Gossypium hirsutum
ggaagtcgtatgtgccgaacatggcatcgattcaacgggtcgatatggtggtgactcggagcttcagcttgagcgaatcaatgtttactacaacgaagccagttgtggccgttttgttccccgcgcagttttaatggatctggaacccggaaccatggatagcgtaagatccggtccttacggacaaatttttcgacccgataacttcggtttcggacaggacggtgcggggaacaattgg

SEQ ID NO: 203268 - DNA, 423 bp, Gossypium hirsutum
agtactactactccaagcaagcattttccttacaagtttggttttcttgtgattaatcgatatggctagctcaatgtcccttaagcttgcatgtgtggcggtgttgtgcatggtggtgggtgcacccctggctcaaggggccgtaacctgtggtcaagtcacaagctccctcgcaccctgcattggttacttgacagggaatggtgctggtggcgttcccccatgttgctgcggcggcataaaatctctcaactccgccgcccaaacaacaccagaccggcaagcagcttgcaaatgcatcaaaagtgcggccgccggcatttctggcatcaactatggtattgcaagcggactcccaagcaagtgcggtgtcaacatcccttacaagatcagccctagcactgactgcaacagcgtcagtga

SEQ ID NO: 203269 - DNA, 269 bp, Gossypium hirsutum
cctcaaggagtatgtcatcaagcctgtcatccctgagaagggccttgttgagaagacaatgtggcagggtaacccatctggccgctttgtaattggtggtcctcacggtgatgcaggtctcaccggacgtaagatcattattgacacttatggtggctggggagcccacggttgtggtgctttctctggaaaggacccaaccatggttgacaggagtggtgcttacattggttggcaggctgtctagagcattgtatcttatggacttt

SEQ ID NO: 203270 - DNA, 226 bp, Gossypium hirsutum
gaactttggaagtattttcagcaagtatgctcgaactgtgcgccgacaaggtaacatttggagaactatggcatatgactgaagctaatcgaaatgcatatgacttcattggctggataatagcaaaaggagaatggatacttttgtatagacttgcaaaagatgaaaatgggtatctgtcaaaagaagctgtcaagggttgattcgatgggagtttgtttgaaca

SEQ ID NO: 203271 - DNA, 350 bp, Gossypium hirsutum
caacggtacccttgggatggaactgaccgtgattatatatgtgatgagctactcggtcgggtgttcaacattctccgggagaacaaccctgagcttgctggagacagacgtagaactgttatgaggcctccacaagttcttcgtgagggcaccaagaaaactgtttttgtaaatttcatggatctatgcaagacaatgcatcgacaaccagaccatgtcatggccttcttgcttgctgagctggggacaagtggatcacttgatgggcagcaaaggttggttgtgaagggcaggtttgcaccaaaaaattttgaagggatcctaaggcgttacatcaatgagtatgtcat

SEQ ID NO: 203272 - DNA, 352 bp, Gossypium hirsutum
caactagttcataccctttgcatgggaatgttagtactggggcttgttcacttccccgacaaagagggtcagattcagagggtcggttcccatcttcaccaagtgatatttgccactctgctgacttaaggagggcagcactcttgcagtctgtacagatgagaacacagccttccaatccatcaccatttgaattgccttttggaccaggccaagagaatgtgcctaatattgaagttgaggaacgaccatgctcatttatgaagtccttagttgatgatcaagaatatcagattgaggagtgttctttgtgagtaactcatatcctgagttcagtcaagagaaatcttgc

SEQ ID NO: 203273 - DNA, 395 bp, Gossypium hirsutum
  unsure (1)..(395): unsure at all n locations
aaacctgagaaaaaggcagagtactctgagtggccaaagtacatgtttactcaatctggctcgggcactaagccttgaaccatatgacactggtgcatgtgccatcatcatgcagtaatttcatggtatatcttaattatatggttaataaaaaaaagatggtgagtgaataatgtgcgtgcattcctccatgcaccaatggtgaatctctttgcatacatagagattctgaatgattatagtttatgttatattttatgttgtagtgaaattaattttgaatgttgtttttaaattttgatgtcacttggcttgatttatgttttaacgaagcttatgttatgtattttactttaatgatcatgcatgtattggtaatttaacaangcttgatt

SEQ ID NO: 203274 - DNA, 388 bp, Gossypium hirsutum
  unsure (1)..(388): unsure at all n locations
aatatgccggaagtcaagctgataggcgtgcaagggcagaagccgatgctgcaaagactgctgagcaactgaagaaaacaaaaatttcagatagcaagaaagagaaggctaagaaatcttcagccaactctaaagaaaagcccactgctgaaccggaaatttccatcacaagactcgatattcgggttggcaagattataaaagctcaaaagcatcccgatgctgattctctgtatgttgaagagatcgatgtgggtgaagcccagcctcgaacagttgttagtgggctcgtgaaatatattcctttggaagagatgcaggatcggatggtttgtgttctttgtaattngaagcctgcaaccatgcgcggtataaaatcacatgcaat

SEQ ID NO: 203275 - DNA, 279 bp, Gossypium hirsutum
cagttcttaatactttgtttcatttcatcaaaaaaagtgccatcatgagagaaatcctacacgttcaagccggtcagtgtggaaaccaaatcggaggcaaattctgggaagttgttagcgacgaacatggaattgatcccaaagggaactacgtcagtacttctcgtggtcaacttgagagggttaatgtttactacaacgaagctagtggtggtcgctacgtacccagagctgattgaattgaccttgaaccacgaaccatggatagcttgcgtactg

SEQ ID NO: 203276 - DNA, 358 bp, Gossypium hirsutum
ctggaccaaattctcgcgttgtatacatcgatggggcattcgagctctttcagtgcagggcatgtggagatccttaagaaggctaggcagcttggagactttttgcttgttggtatccatacagaccatattgcgagagagcacagggggatgccttacccagttatgcatgttcatgagcgcagtcttagtgtgttagcttgccgctatgttgatgaagttatcattggtgctccttgggaagttactaaggacatgattacgaccttcaacatttctattgttgagcatggaactgttgcagagagtaattatctgttgcctggtgaaactgatccatatgcatttccgaagagca

SEQ ID NO: 203277 - DNA, 309 bp, Gossypium hirsutum
ggtatgttggaattcacagttcgggattcagagactttctgctgaaaccggagctgcttcgatctattgtggattctggttttgaacatccttccgaagtgcaacacgagtgcatccctcaagctattctgggaatggatgtgctttgccaagcaaaatctggaatggggaaaacagctgtttttgttctatcaactcttcagcaaattgagcctgttgctgggcaagttgcttgcacttgttttatgtcacactagagaattagcataccagatttgccatgagtttgagaggttcagtacttatcta

SEQ ID NO: 203278 - DNA, 398 bp, Gossypium hirsutum
tggcaaccaagacgatgatgttgcaaatatttgcacttttcttcttattgttgagtatcggcaactccattttgcttggtgctaatggagatgacaatggtggttggcaaactgcccatgccaccttctacggtggtgctgatgctaccggcacaatggggggagctcgtggttatggaaacctgtacagtcaagggtatggaacgagcacagcagctttgagcactgcacttttcaacaatggcttgagctgcggcgcctgctacgagctccggtgcaacaatgatcctcaatggcgcattagtcgaaccatagccgtgacagccaccaactattgtccccgtaactatgctttatctagtgacaatggcggctggtgcaatccctcactagaacac

SEQ ID NO: 203279 - DNA, 399 bp, Gossypium hirsutum
gcttggaagttaatcctctggtatcacatattcgggtcatagatacgttgggattgcccttttcgtcctcgctactgtccagatctttgctttgtttttaaggcctaaaaaggaccacaagctccgattctactgggacatttaccaccacagttttggatacgcgatacttgtcctcggcatcatcaatgtgttcaagggcttcaatatcttgaagcctgagcataagtggaaatcggcatatatgattgtgatcattgctatgggcgggatttcgttgctattggaagctattacatggattgtagtgttgaagagaaagtgcaggaaatccacaaaaccctatgatggatacaacaatgctcaatctaatcaacaagcctcttgccatgtgatcaa

SEQ ID NO: 203280 - DNA, 359 bp, Gossypium hirsutum
tcctattgagcatggtattgtgagcaactgggatgatatggaaaagatctggcatcatacattctacaacgaactccgtgttgctcctgaggagcaccctgtgcttctcacggaagcacctctcaaccccaaggccaatagagaaaagatgactcagatcatgtttgagaccttcaatgtacctgctatgtatgttgccatccaggccgtcctctctttgtatgccagtggtcgtacaacaggtattgtgctggattccggtgatggtgtttctcacaccgtgccaatctatgaaggatatgcccttccacatgccatcctccgtcttgaccttgcaagtcgtgatctaaccgatgcct

SEQ ID NO: 203281 - DNA, 384 bp, Gossypium hirsutum
gtcactttggccaccatgtatctactggacaacccatcggctttgcaacgattaacagaggagcatgaggaaattctaaagaacagagaagatgccaattctggacttgtatgggaggaatacaaatccatgacgttcactcgttacgtgattaatgaaacacttaggttagaaaatgttcttcctgggatgttgaggaaagttatagctgacattcacgtcgatgaatatacaataccaaaaggttggatcctattggttatgcccacagctcttcatctgaaccctaatatatatgaagatcctcttaccttcaacccatcaagatggaagaacattgggagcaatggaatgggcaagaactttatgccttttgaaggaggg

SEQ ID NO: 203282 - DNA, 408 bp, Gossypium hirsutum
aaaacacaccctaaagagacaatgagaaagctgctagccggtgcctttcttttcttcttcttttgggataaaacattagctcaaatagctccggcgccgccgttaaaggtggacaacatcacttccatcctcgaaaaaggtggccaattcaccactttcatcaagctattgaaagccacacaggtggctgatcaactaaacaaccagctaagcacaccggaccctaacgacgggataacggtgtttgcaccgagtgacaacgcgttctccggactcaaacccgggacgttaaactcactttccgaccaagagaagcttcagttggttcagttccatatactcccgacgttaatgtcgacgtcgcaggttcaaaccgcgagtaaccctttgagaacccaagctggggat

SEQ ID NO: 203283 - DNA, 324 bp, Gossypium hirsutum
  unsure (1)..(324): unsure at all n locations
gttcagaccaatcatcaatgtctgagtcagagacagagttggaaacgaggaaacgagttggcacattgccaaggccagctagtttaaacgcgttcgaccttatatctttctccccagggttcaacctatccgggttgttcgaggaaggagaagaaggttcccggtttgtttcaggggcaccggtttcgacaatcatatccgaattggaagagatagccaaagttgttagctntactgtgaggaataaggattgtagagtgagctcggaaggttctagagaaggagcttaaggtccattatcgattgctgctgagatattcgaat

SEQ ID NO: 203284 - DNA, 442 bp, Gossypium hirsutum
  unsure (1)..(442): unsure at all n locations
tgagatcctcacgatgcccaaaatgttattcctggatgaacctactagcggccttgacagtgcctctgctttctttgtggttcaatctctccggaacatagctcgcgatgggaggaccgttgtctcttccattcaccagcccagtagtgaagtttttgcactgtttgatgaccttttcttgttatctggtggtgaaactgtttattttggggaggcaaaaatggctgtccagttctttgctgaagctggttttccatgcccaagtagaagaaacccttcggatcactttctccgatgtataaattcggactttgacgccataactgncacattgangggttctcaaagacttcgcgataaaccaacatnctcggatcctttcatggagatggcaacagcacagaaacaaaaaggtggagtcaagcaacatggtggaagcaac

SEQ ID NO: 203285 - DNA, 190 bp, Gossypium hirsutum
gtatagtgagaatggacctgattttggagcagcaagtgatggagacggcgacagaaacatgattctaggtaaaaagttttttgataccccttcggactccgtcgcaattattgctgcgaatgcacaagcagcaataccatatttccggagtggccctaagggtttagctcgatccatgccaactagtggt

SEQ ID NO: 203286 - DNA, 353 bp, Gossypium hirsutum
gattcttagcgttttctgcttcgttgtctctctgctctaagtcttcgtcattctcactctgtgtgcactgaactcttgctaaacggtatcgttttagtcagtctttcatcaatggcgaaagaaccggttcgcgtcctcgttactggagctgcatgacaaatcgggtatgctcttgtacccatgattgctaggggagtcatgttgggtgctgaccagcccgtgatccttcacatgcttgatatcccacctgctgcggaagctttgaatggtgtcaaaatggagttggtggatgctgcttttcctcttctaaagggtgttgttgctacaactgatgttgttgaggcatgcactgg

SEQ ID NO: 203287 - DNA, 313 bp, Gossypium hirsutum
aggctacgaggtttgataccgcacattgaatcccagtaagacagccgatctacaaacttgaatggtgctgcttggtcttaatggtggctactgcagcattgacgttcttgggaacaacatcaccacggttcatcaaacagcgagccatgtactttccatggcttggattgcatctagccatcatagatgagggctcaaaggcactattggtgatttcagcaactgatagctgctcctggtaagcctttttatcatagatgactggggcatactatgaaagctttatttggattcttgagtagggaaccaagtt

SEQ ID NO: 203288 - DNA, 304 bp, Gossypium hirsutum
cttcttttcctccaacaggagttatgattggggtgtttaaagtaaaggagaagcagagagaacttgctgaaaatgcaaatgggggagctcctaccaaaaagcaaagtccaggagagttgcgtttgcacaaagatatttctgagcttaacttacccaaatcttgtgctataacatttccaaatggaaaggataacctgatgaattttgaggtttcaatttgacccgatgaaggatattaattctgtggcacatttttattctcctttcaagtttctaccgtctatccgcatgaagcacccaaagt

SEQ ID NO: 203289 - DNA, 369 bp, Gossypium hirsutum
  unsure (1)..(369): unsure at all n locations
gattctacagctttcagtgattgtaacggggggagatcgggggagttcccatcggcatcgtctcagaaccggcgattactactcgcctgtgctaattccgagaattcggatgatttgatacggcagctcgtatcggatctcgattcctgttcgattgacgagcaaaagcaagcggctttggagcttaggcttctggcgaagaacaagccggagaatcgaatcaagatcgctaaagctggcgcgattaggcctctgatttcgttaatttcatcctctgatccctatcttcaagaaaacggcgtgacagcgattttgaatctctctttatgcgatgagaacaaagaacttatagccttctncggagcaatt

SEQ ID NO: 203290 - DNA, 350 bp, Gossypium hirsutum
tggtattgaaagctgaaaacattttctggccggtcagcatcgactaccgagaaggaaccccgatagagatgcagaaattgggtgattttaagcttccccactttttcaattaccctccatacttcactttgcagccagtgagggagactcgcgagaagcaaatacaactttggaaggaactgattctggattactgcagaactcagaagatattcatagttaggcttgaggaagaatttcctctgttctcaaattctgtgatagaacgcacgctcagtcatgaagctagggaagcattcctctcagcgttggttgcaaaaaggcgcgcaaaatggttggataaaagacgt

SEQ ID NO: 203291 - DNA, 364 bp, Gossypium hirsutum
aggctgtcatgtcattccatcagtgtgggggcagcgtcggtgactcttgcgttattcctttgcccaaatgggttacagaggagatcgagaaggacccagacctcgcatacactgatcaatggggaagaaggaactacgaatacctttcacttggttgcgataaccttcctgtcttgaaaggccgtacgcctgttcagtgttatgctgatttcatgcgtgcctttagggacaatttcaaacaccttcttggtgataccattgtggaaatccaagtcggaatgggtccggcaagtgagcttcggtacccttcgtacccggaggcgaatgggacatggaagttccctggaattggagcctttcaatg

SEQ ID NO: 203292 - DNA, 307 bp, Gossypium hirsutum
cccaattcaactcttcagtctgcaacaaagggcgcatcggtgcaaggtctgtcaataaaggtttgattgccaacaatcctagtatcaccatctcaatgaattctccacgggacactgcaggacatgggactcatacatcatcaactgcagctggaacatatgtgggagatgcttcatactttggatatgcccagggaaatgctagaggaatggctccaggggctcgagttgccatgtataaagctctttgggatgaaggctcatatacgaccgatgtaattgctgcaattgatcaagcgattaatga

SEQ ID NO: 203293 - DNA, 368 bp, Gossypium hirsutum
ccgttgcttcaggggccgtcggttatatcggagtagggggcaacactcacgtcgggtggaccaaaatctgcaatgtctacgacaagttctgtcgatacacagcgagctcgcttgcactctcattgtttgctgccatccttctggtgttgctctcaatgatatcaaccttcacactttacaaaaagatccgcgactagacatatccctccatgtcccaagtttacagcttaaagaacatttgaaaatgtcaatctgtgtgtagcttaaatgtttttcttttggtctgcaaatgatatgtttttaatttgcttttgttatctgttggtcttcattgcgtatttcatgtagtaattcaattgaatgatatt

SEQ ID NO: 203294 - DNA, 309 bp, Gossypium hirsutum
ctcttcctccgatgggatgcagatcttcggtaagaccctgaccggcaagaccatcaccctcgaagtcgagagttccgacacgatcgacaacgttaaggcgaaaatccaagacaaggaagggatcccaccagaccaacaacgtctcatcttctccggaaaacagctcgaagatggccggaccttggccgattacaacattcagaaggagtccacccttcatcttgtcctccgtctacgtggtggcatgcagatcttcctcaaaaccctgacccgtaagaccataactttggaagtcgaaagctctgacac

SEQ ID NO: 203295 - DNA, 364 bp, Gossypium hirsutum
ggtttatctgatcttcccaaacttgttggggcgctgaatcgaatggccaagtgtgatcctatggttgtttgtacaattgaagagtcgggagagcacattgttgctggtgctggagagctccaccttgagatctgtcttaaggatttgcaagaagattttatgggtggtgctgaaatcgtcaagtcagacccagttgtctcattccgtgaaactgtcctagagaggtcttgcaggactgtgatgagcaagtctcccaacaagcacaaccgattatacatggaagctcgacccttggagaaagtcttgctgaagccattgatgaaagtcgtattggtccaagagatgatcccaaggttcgttcaaa

SEQ ID NO: 203296 - DNA, 355 bp, Gossypium hirsutum
tactttcaaggtggtcaatgcggcaaccggatgcgagccaagttttgggaaggtatctgcaccgaacatggaatcgactcaacgggtcgatacaacggcgactcggagcttcagctggagcgtatcaacgtttactataacgaaacaagttccagccgctttgttccccgcgccatcttaatggatctggaacccggtactatggacggcgtaagatccggcccgtttggacaaattttccgacccgataacttcgttttcgggcaatcccgtgctggaaataattgggccaagggtcattacaccgaatgagccgaacttattgattctggtctaaacgtcgtcagaaaagaag

SEQ ID NO: 203297 - DNA, 351 bp, Gossypium hirsutum
actcattactgtctggctgattatttatagtggcagcggctcgtcagcggctcgacatttattccagacacaaacaacctcatcagagctgccacaattggcttcaaaatacgaaaagcacaaagagtctgaatacaaacaaccaaaatatcacgaaaagtacccaaaacatgagaagcctaaaatgcacatggaggaaaaacaaaaaccctgcaaacatcatgaagagtaccacgagtcacgcgaatcgaaggagcacgaatagtacgattaagaaaaacccgatttccccaaatgggaaaagcctaaagagcacaagaaacacgaagttgaatatccgaaaatacccga

SEQ ID NO: 203298 - DNA, 244 bp, Gossypium hirsutum
gtttaagctactttcccttacgtatttgctgagagggagttcttacagcctggaacttttgatcttgtgggttcgattatctatgatattgatcagcaaccataccaaattacattctatgatggtaccattgaagttgttgaggctggtggtttcctcagagatgagtgcgttttccttgatacccttgggattgcacttctagctctccttggattgtggctttatggccaatttcaacgta

SEQ ID NO: 203299 - DNA, 232 bp, Gossypium hirsutum
ctttgatgcaacagactatattggtcattgctgggcactacacaatgaaggtcggcacttggctcacccagcttttaactttgttaaaagaacgaagctctatgcagagtctacggcactatttccaggaggatctccttatatctatccactatatggacttggagaattgccatacgcatttgcacgtctaaatgctgattatggtggtacttacatgctcaacaagctc

SEQ ID NO: 203300 - DNA, 349 bp, Gossypium hirsutum
cggttcttggctcctgttcgattgatggggaagagaacgcggcttttgagcttagattgttggcgaagaacaaaccggagaatcgaatcaagatcgctaaagccggtgcgatcaaaccgttgatttcgttaatcacatcaaccgatcctaaccttcaagaaaacggcctgacggcgattttgaatctgtctttatgcgacgagaataaagaacttatagcttcatctggagcgattaagccactggttagagctttgagaacgggaacttcaacggcgaatgaaaacgcggcttgtgctctgcttcggttgtcacaagtggaagaaaagcaggttgcaatcggacggtc

SEQ ID NO: 203301 - DNA, 368 bp, Gossypium hirsutum
gtttatccaaatacccaaaagtcaagagtagaggaggctaatggccggaatcggacctttgactcaagattgggagcccgtcgttattcgtaaaaaagcccctaccgccgccgccaagaaggatgagaaagtcgttaacgccgtccgccgtgccggtgccgagatcgagtccatcaaaaaatcaaatgctgggacgaatagggcggcttcaagtagtacttctttgaacacaaggaagctcgatgaagacactgagaatcttgctcatgaccgagtgccaactgagctaaagaaagccatcatgcaagctcgaatggataagaaacttacccaagctcaacttgctcagatgatcaatgagaagcccc

SEQ ID NO: 203302 - DNA, 304 bp, Gossypium hirsutum
attaactggcaactattcttatgtgttgcggtgggtctctgagctggcctgattattggtttcggaactgagtactatactagcaatgcatacatacctgtacaagatgtcgctgattcctgcaagactggagctgcgactaacgttatttacgggcttgcgttgagttacaagtcttgcattattcctattcttgctattgcaatcagtatttccgttagttttagctttcctgagatgtatggcattgctgctaatgcccttggcatgctgagcaccatagctacccgggtggctattgatg

SEQ ID NO: 203303 - DNA, 308 bp, Gossypium hirsutum
ccagcttcattgctcaacaacttcagcccaggctggcggtcagtctcccgcaccacctggtccaccagacgtcaccaaaatcctgcaaaaagccggccaatactccgtcttcgttcgtcttctcaaatccacccaagtctccgaccgtctcattggcgagctcaaagacacagatgatgggaagaccatttttgcccccactgataaggctttctccgccctcaaatctggtgccttgaattcactcaacgatgaacaaagggttcagctggtgctatttcacgtcatcccaagttatatcccattat

SEQ ID NO: 203304 - DNA, 308 bp, Gossypium hirsutum
attggaacagagttagaagtgacgaaatcggggggggcaactggttttgcgcattaaacctggagttctcgtcggagaacacaaaagggctgccgttttgaaagaattcggcaccaacttgccagatttggggctaggagacagagaaaccgaccatgatttcatgtcattatgcaaggaaggatacatggtgccaagaaccaaatgcgaaccattgccaatgtacaagcttctaagccatgttatatttcatgagggccgtctaatgcaaaggccaacccctttggctgctctgctgacctttctat

SEQ ID NO: 203305 - DNA, 365 bp, Gossypium hirsutum
cagtaaggatgctgtttacaatgtgatgaaaagacgggtggttgagttggcaagacagactttccgcccggagttcatgaaccggattgatgagtatattgttttccagcctcttgactccaaagaaatcagtaaaatagttgagttacagatggtgcggttaaaagatagactgcgacagaagaaaatctatctgcactacacaaaggaagctgttgaacttctggggacactgggatttgaccctaactttggagcaaggccagttaagagggtgatacaacaattagtggagaacgaagttgcaatgggagtgatgagaggagatttcaaggaagaagactcgatcattgttgatgtggagt

SEQ ID NO: 203306 - DNA, 366 bp, Gossypium hirsutum
agaccataaccctagaggtcgaatccagggatgctatcgacaatgttaaggccaagatccaggacaaggaaggtattccaccggaccagcagagattgatcttcgctggaaagcagctcgaagatggccgtactcttgctgactacaatattcagaaagaatcaaccttgcatctggttctgagacttcgtggtggcattatcgagccttctttgatggcattggctaggaaatacaaccaggataagatgatctgccgcaagtgttatgctcgtctgcacccccgtgccgtgaactgcaagaaaaagaagtgtggacacagcaatcagttgaagccaaagaagaagatcaagtagattacatata

SEQ ID NO: 203307 - DNA, 342 bp, Gossypium hirsutum
gaatgaagcagatcatttcagtaacccgggattagatcctgttttctaacaaagaagacatctcaaacctggtttgtaacatcaaacagaataaaaaacatatcattagatggatccgccattaacaactgtctcagaagagcaaaagcttgtagaattcgattgatggacaggtattctaaaaacccagagtttccctctagcagagaccaagttttgttcgcagaagaattcccaagaaaaccatttttcaatcgtccgatgaacatcgtgaacgacaacgtcagtcgtcttcttcccaatcccatcagttcttgccaacatgccggcagtgtaaatagt

SEQ ID NO: 203308 - DNA, 364 bp, Gossypium hirsutum
  unsure (1)..(364): unsure at all n locations
gaatatcactcgtcctggtattaacggtacagcntttcgattttcatagagagacctcgaaacttctacgtagtgagaggaaagtttgagtacgtgcgatggctcgctcgtggagagcaagcggctctttggtggctctagctatagtcttgtccggatgcttctttgcaatctcaattgccaaggaggaagccgcgaaattgggaacagtcatcggaattgatcttggtacaacttattcttgtgttggtgtgtacaaaaacggtcatgttgaaattatagccaatgaccaaggtaaccgtattactccatcgtgggtggctttcactgacagcgagaggctcatcggtgaggctgcaaagaa

SEQ ID NO: 203309 - DNA, 373 bp, Gossypium hirsutum
tgtacattgaacgacccacttatacgaatggtggccgccttgactctcaggggatctcatctcttaccgcatctttgaagtttgatggagccctgaatgtggatgtgactgagttccagactaacctggtcccatatcccaggatccactttatgctgtcttattatgcccctgtcatttcagctgtaaaggcttaccatgagcacctatcggtggctgagataaccgacagtgcttttgaaccctttataatgatggctcaatgggacccacgccatgggaagtacatggctcgctgtcttatgtacctaggatatgtttttcccaaagatgtgaatgctgctgtggccaccattaagaccaaccgcacaat

SEQ ID NO: 203310 - DNA, 264 bp, Gossypium hirsutum
gcgaggttgtggtgcagctgcagagaacagagtaggggcgaaaaaaagcgccggcgttactgcttcttcttctacttcgctctctctccttctgcgaagttcctctttcgatctttcatttattcaggatcgtaaaagatggccgactgtgaggatattcaacccctcggctctgatcatggaaccggaacggtcaacgctgcttttgatggtgatgatgctccaacggcagattttcccagtattgatggtggtcgccggcac

SEQ ID NO: 203311 - DNA, 368 bp, Gossypium hirsutum
agattattcaattgactttattggtcatgcctgtgggctccacaatgaagatagttacttggctcagccagctttgaactttgttaagagaatgaagctctatgcagagtctttggcacgatttcaaggaggatctccttatatctatccactatatggacttggagaattgcctcaggcatttgcacgtttaagtgctgtttatggtggtacttacatgctcaacaagccagaatgtaaggtagaatttgacggtgatgggaaagtcattggagtaacttctgaaggcgaaactgctaagtgcaacaaagttgtttgcgatccatcttatttgtctgataaggttaagaaagttgggaaagttgctc

SEQ ID NO: 203312 - DNA, 362 bp, Gossypium hirsutum
tttgtaacagcgatagatcgggggagttcgcagcggcatcgtctcagaaccggcgattactactcgcctgtgctaattccgagaattcggatgatttgatacggcagctcgtatcggatctcgattcctgttcgattgacgagcaaaagcaagcggctttggagcttaggcttctggcgaagaacaagccggagaatcgaatcaagatcgctaaagctggcgcgattaggcctctgatttcgttaatttcatcctctgatccctatcttcaagaaaacggcgtgacagcgattttgaatctctctttatgcgatgagaacacagaacttatagcctcctccggagcaattaagccactggtt

SEQ ID NO: 203313 - DNA, 365 bp, Gossypium hirsutum
  unsure (1)..(365): unsure at all n locations
cggtacgagcttttatagatcgttaaaaggggggtcttgaaggaaaatatttgcaattaagctgctaaaaagacaaaactcaacaaggtatatgaagaaggagtgagagcctaggtgattcaatcagaatggattcttgcaactgtattgagccgcaatggccaccagatgatctgttaatgaaatatcaatatatttccgacttcttcattgcgcttgcttatttctcaattcctttagagcttatatactttgtgaagaaatctgccgtgtttccatatagatgggtacttgtgcaatttggtgcctttatagtactctgtggtgcaacgcatcttattaactngtgggactttacaatgcat

SEQ ID NO: 203314 - DNA, 367 bp, Gossypium hirsutum
gaattcctcataattgaacttcatgcagggtgggggaataggtggtcccaaattgcggcacaattgccaggaagaaccgacaatgaaattaaaaacctatggaactcttgcttaaagaagaagcttaggcagcgaggcattgaccctgtcactcacaagcccctctcagaggttgaacatggtgaagacaagagtcaaccacgcaccaacagcaaggatatggcttcaagtgaattgaacatcaacaccaacaatcctaaacctggaacatcaccagttactccacgaggttaccaactggaaatggaaggctctcccacctacaagacagtgaacagcagcgataacaatggcaataccaccacca

SEQ ID NO: 203315 - DNA, 376 bp, Gossypium hirsutum
tgcttgtatcggcgtacgttagctctcttccatcgcttaaactctccaagcgaggacatgatctgcttcccaggctagacccttgaaactcctctccggcacccctgccacaatccgttattccatcagatcctctgacatggacccactctttgaccgaatcaacgtacgcgatcttctctccggtcacgacctctcggacccttcgacgccactattcacaccggatctccgcctcatcatcagccgcctcgaataccactctcttcatatcaaatcaaaagtccgttcttacctgctttctcaccgcgaagactttgactcactcttcttccagtgcaactatgccgatctcaagactagcgaaatctctgac

SEQ ID NO: 203316 - DNA, 360 bp, Gossypium hirsutum
tcttgatctctccttcattcccgtttctggttgtttgttctttttgttgagttgttagtaggtagccatgaatgctcttgctgcaaccaaccgcaatttccgactagcgtctcgtttacttgggttagactctaagcttgaaaagagtcttctgatcccttttagagaaatcaaggtggagtgcacgattcccaaggacgatggaaccttggcgacttacgttggatttaggatccaacatgataatgctcgtggcccaatgaaaggtggaatcagatatcatcctgaggtcgagcccgatgaagtaaatgctctggctcaactaatgacatggaagacggctgtagcagccattcctta

SEQ ID NO: 203317 - DNA, 307 bp, Gossypium hirsutum
gtaatataagcctgaccttaacattgtctgcaaggctagctgcaccaccagctgtcttgctccattggctaaggtgatcaacgataaatatggcattgttgacggtcttatgaccactgctcattctattactgttacacaaaatactgttgatggatctttcatgactgactggaaaggtggtacagctgcttccttcaatatcattcctagcagcactggatctgtcaaagacttagtcaaagtattggcatcactgaatggcaagctgactggaatggctttgcaagttcccactgttgatgtc

SEQ ID NO: 203318 - DNA, 368 bp, Gossypium hirsutum
atctaggctactgttgtggcatgcaaggccggtggggaagctgtcaagatgatcattgatgccatagagcaagttggtggaatatatgttgtgaccgctgaccatggcaatgctgaggacatggtgaagaggaataagtccgggcaacctctttatgacaagagtggcaagctccaaatcctcacttcccacacttgtcagcctgtgcctattgcaatcggaggtccaggattggcagcaggcgttagattcaggaatgatgttccggatggcggacttgcgaatgtggctgcaactgtcatgaacctccatggttatgtagctccaaatgactatgagccaacactcattgaagtagtgagcaatta

SEQ ID NO: 203319 - DNA, 370 bp, Gossypium hirsutum
atctcgatagaaaagacctggtttcttgcatcggaggaaagcgggtgccatgaatgcccttgttcgtgtctctggggtgcttacaaatgctcctttcatgttgaacttggattgtgaccattatataaacaacagcaaggctgcaagagaagcaatgtgtttcttgatggatcctcaaattggaagaaaggtttgctatgttcaatttcctcaaagattcgatggtattgataggcacgatcgatatgccaatagaaacacagttttctttgatattaacatgaaaggtctagatggtattcaagggcctgtatatgtcggcacggggtgtgttttcagaaggcaagctctctatggctatgaacccccc

SEQ ID NO: 203320 - DNA, 363 bp, Gossypium hirsutum
caatttcctcaaagattcgatggtattgaggggcacgatcgatatgccaatagaaacacagttttctttgatattaacatgaaaggtctagatggtattcaagggcctgtatatgtcggcacggggtgtgttttcagaaggcaagctctctatggctatgaaccccccaaggggcctaagcgcccaaagatggtaagttgtggttgctgcccttgttttggacgccgcaagaaggacaagaagtatcccaagaatggtggaaatgaaaacgggccaagcctagaagtggaggatgataaggagttactgatgtcccagatgaactttgaaaagaaattcggacagtcagccatttttgtaact

SEQ ID NO: 203321 - DNA, 365 bp, Gossypium hirsutum
ctttaaccaacaaaaaaaaaattgaaggggggacactctaacaatggctaccgaaacagtagagtctttgcctcctacattggaagctaatgctgagcaacctgcattgtttgatggaactaccaggttgtatacttcttatccttgcccttttgcacaacgtgtgtggatcaccaggaattataagggattgcaagatgagattaaacttgttcctttgaaccttcaaaatagacctgcttggtacaaggaaaaagtttaccctgtaaacaaggtgccatccttggaacataatggcaaaatcattggggagagtcttgatctgattaaatatgttgatagcaactttgaaggaccttctcttg

SEQ ID NO: 203322 - DNA, 367 bp, Gossypium hirsutum
catttctgcctagaggacgtgacaagattgtggggaacattgagcagagaattgcagattttaccttcatacctgtagagcacggggaaggacttcaagttctccactatgaagtaggccaaaaatatgagcctcactttgactacttcatggacgagttcaatactaagaatgggggccaacgcatagctacagtccttatgtacctctcagatgttgaagaagggggagagacggtgtttccttctgcaaaggggaacattagtgccgtgccatggtggaatgaattatctgaatgcggaaaaggggggctttctgtcaaaccaaagatgggtgatgcattacttttctggagcatgaagcctga

SEQ ID NO: 203323 - DNA, 366 bp, Gossypium hirsutum
ggtttatcctgtaactgaaatgatttccggtggggacttgattgaagaacaagttcgtgtagctatgggggaaaaactgcgctacaaacaggaagatattgtgctcagagggcattccattgaatgtcgtatcaatgcagaagatgcatttaaagggttcagacccggaccatggagaataacatcgtacttgccatctggaggcccatttgttcgaatggatagccatgtttattctgattatgtagttcctgcaagctatgattcattacttggaaagcttattgcatgggctccaacaagggaaaaagcaattgagcgcatgaaaagggctcttgatgacactgtaattacaggggttcctac

SEQ ID NO: 203324 - DNA, 314 bp, Gossypium hirsutum
atttgtagctgaaccaactgttttacagctgagggctcctattaagatttttggtgatctacatggacagtttggagatcttatgcgcctttttgatgaatatgggtcaccttctacagctggagacatcgcatatatagattatctcttcttaggagattatgtggaccggggccagcacagcttggaaaccattagtcttctgcttgctttgaagattgagtatcccaataatggacatttaattagggggaatcatgaggctgcagatatcaatgcactttttggctttcggattgagtgtatcgagcgca

SEQ ID NO: 203325 - DNA, 368 bp, Gossypium hirsutum
caattaatctccacttagttcatcgagtatatgatcgaggcatggtattggatgacgatacttaatcgtgattttgttcacggcgcgacagattacgcacattcgccaagtcccatcctttttcggcaccaacaagactggaatagtgcacagactaaggctctcgcgaatgaatcccttttcaaggagttcgttcacttgtttttccagctccttgatctccttgggattgctacgataagccggtcggtttggtatagacgcgccagaaatgaagtcgatttgatgttctattccctgaataagtggtaagccactcggaacttcgtcgggaaatacatcttcgaattcctacaagagagagacaa

SEQ ID NO: 203326 - DNA, 359 bp, Gossypium hirsutum
gttttcgctagggcttctggtgattacgcgtgttgttattagtcacaaccctgataacgacaccaccaggatcaagcttccatctggttcgaagaagattgttccaagtggttgtcgtgccatgattgggcaggttgctggaggtggtaggactgagaaacctctgcttaaggctggtaatgctttccacaagtatagagtgaagaggaactgctggcctaaggttcgtggtgtggctatgaacccagttgagcatccccacggaggtggtaaccatcaacacattggtcatgctagtacagttagacgtgatgctccacctggacaaaaggttggtcttattgctgcaaggaggactg

SEQ ID NO: 203327 - DNA, 281 bp, Gossypium hirsutum
tctacacggccgattcctgacaacatcaggggtgttacgagggaagatgagcacgaaagaggttgatgagccgatgatcaatgtgcataacaagaactcatcttactttgttgaatggatcccgaacaatgtgaagtccactgtttgtgacatccctacaattgtgttaaagattgcatccacatttattgggaactctacttcaatccactagatgtccaagagggtgagtgaacaattcactgccatgttccgtacgaaagctttcttgcatcggtata

SEQ ID NO: 203328 - DNA, 369 bp, Gossypium hirsutum
gcttgttataaatgccattcagccacttgacggagggtggcggtgttaccggatgattggaggtgtccttgtcgagagaaccatcaaagaggttctccctgctgtgcaacgaatcaaagaagggctcgaggaagtaactgctcgtcttaacgagaccctggagaagaaaaagaaggaaattgctgatttcgagacaaaatacaaaattaggatcaaaaagtccgatgatgactcgaaagatgaaagcaacaagaaggaaggctccgctcaaggagtccttgtctgccctgcaagttcgagtcagtaatatgtatattccattctatttccttccttatatgcttgaacttgcttctgataaaccctaaa

SEQ ID NO: 203329 - DNA, 354 bp, Gossypium hirsutum
aaacaaaacagtgccatttataattaatagtggaagagtataatgatcaagcaatgttaaattaacaatacatgcaatatcattaaagtaaaatacataacataacataaatcaagccaagtgatgttaacattagatacaacatttaaaattaatttcactacaacatacactataacataaactataaccatttagaatttctatgtatgcaaagagattcaccattagtgcatggaggaatgcacacacacatttcccaatcaccatcttttttattaactatatattacgatataccatgaaattactgcatgatgatggcacatgcaccagtgtcatatgattcaaggc

SEQ ID NO: 203330 - DNA, 231 bp, Gossypium hirsutum
cctgtttctcttctctatcattctcattcggacgcactctatgatggtaagctcgactcccattcaaattcttgtctggatttgcgttgccatgtctgtatgcgcctctgcagcacccattaacatcatggtaagagtttttcgcacttatagcgattagttcatgcctcgcaccttatcatttgttctcacattgagtgcacaactctcgtttgcttatgcactatttat

SEQ ID NO: 203331 - DNA, 303 bp, Gossypium hirsutum
ctagtttacgtctactggtcctccaaacaggctgctgcaggttgctgttaaaaatagtcagcaaccagtctggtacttcaatgacaaaatcttgttgcacgtgttctttaccgaggatgggagaatggagcgaactagttttcttgagacatggaagtcactacccgattcaaatgaggtcttgaaagaattcccaggcatcatggtgactagtgctgaagcaacccttgatcgactagctgcatcaaacatgttctttatagcgaagcgcacacatgccaatcaagatgtattctacttctc

SEQ ID NO: 203332 - DNA, 341 bp, Gossypium hirsutum
tggcgataccccaacttttatttctattttgctgttcccttctctggctcatatctttttccgccgccgattcctccatcatagacgacttacgtctagccggttccagtttcccgtcggttcatgcaaagaagctgattagggagttgaatttgtttcctaaaggggaagtcaatgtcgttgacgaacatcgggtttcgttgccggagggtcccaaactggtggagaagcggttcaagttcccaactttggaagtgcccggtggagtttccgttgaggatttgggtcactatgctgggtattacaagcttcctaactcttatgatgcccgaatgttctac

SEQ ID NO: 203333 - DNA, 342 bp, Gossypium hirsutum
atcagttttttctattttaaatagggattggtggtgcgtgtgtggtttttgagaggatccatggctgcaccaccggcaagagctcgggctgattatgattacctcattaagcttcttttgattggcgatagtggcgtggggaagagttgtctgcttttacgtttatctgatggttcctttactactagtttcataacaactatcggcattgattttaagataagaaccattgagcttgatggtaagagggtcaaattgcaaatctgggatacagctggtcaagagcgatttcgaactattacaacagcttactaccgtggatcccatgggaatttgctggtt

SEQ ID NO: 203334 - DNA, 370 bp, Gossypium hirsutum
gaagaaacctgagaaaggcatagtaccctggggggggtaaaatgcctgaatggccgaagtccatgtttactcagtctggctcgagcactaagccttaagccatatgacactggtgcatgtgccatcatcatgcagtaatttcatgggatattgtaattatattgttaataaaaaagatggtgagtgggaaatgtgtgtgtgcattcatccatgtagcaatgctgaatctctttgcatgcatagagattctgaatggttatagtttatgttatatcgtttgttctagcgaaattaattttgaatgttgtatgtaatgttaacatcacttggctagatttatgtgttaatgaagtctatgtagtgtatttta

SEQ ID NO: 203335 - DNA, 385 bp, Gossypium hirsutum
  unsure (1)..(385): unsure at all n locations
cgagactcataatcagtggcgatcctcatggctcaagagggagagcantgatttcaatggtcttgaactcgttgacctgacaaggactatgagataaccaggcccaacanccgaaagaaagtcttataagagacaaccttatacattttctgtttgccagtgatggtacttacagtttaactcttacttggttcttctatctcatctccaaggcacccgtggttgaaaacaagatcagagaagaaataaagagacacttatcaatgaaacaagtggagggaagcttgcaaataccatccaactacgacgagttgagtaagctaacatatcttcatgcagcgttgtgcgaaaccctaaggctatatccaccgattccgttcgattt

SEQ ID NO: 203336 - DNA, 315 bp, Gossypium hirsutum
aaaacacagaaacaaaaccgaagaactaagagaaaaatggcgtctttggctcaacaattcacaggtctaagatgtccaccactctcctcatctcggttttctgtgaaaccaaagcaaacccagaaagtgggcgcttttgcttctcctatagtttcagccgtcgctgtctcaaatgcacagaccaaagataggcttgaactcaagaagatgttcgaggatgcttacgaacgctgtcgaactgctcctatggaaggcgtggcttttactgatgaggattttcaaaatgctcttgagaaatatgactttgattctgag

SEQ ID NO: 203337 - DNA, 369 bp, Gossypium hirsutum
cgaatttgcaattttaaagggggaactcctgagcaagtcgaggcgtacttttccatattggtatgtgttcttccgaatgaccaacgaagatcgtggtgcaaccaggaactagaaatagttaaggtggttgccgatcaggtggccgctgcaatctctcatgccgcagttctcgaagaatctcaactcatgagggataaactagccgagcaaaatcgggcgttgcagctttcaagacagaatgctatgagagcaagccatgctagaaatgcatttcaaaaggtaatgagtgatggaatgaggaggcctatgcattcaattttaggcttgcttttaaacgttgcaggatggaaacttgaatgacgatcaacg

SEQ ID NO: 203338 - DNA, 323 bp, Gossypium hirsutum
aggaggtgaagtttgcatgtggggcgagagagctgatacatcagatgttcagcaaacaatatggcctcgagctgctgctgcagcagagcgattatggagcaaaagggaggctgtatctgcacgaaacattaccttagccatattaccccggcttcattacttcagatgcctattgaataggcgcggggttcaagctgctcccgtcacaaacaaatacgctcgacaacctccatttgttgccggatcatgctacgagcaatagttcctcagttcattactagtcggattgctccagacctgcctgtatctgctccttggatatg

SEQ ID NO: 203339 - DNA, 375 bp, Gossypium hirsutum
  unsure (1)..(375): unsure at all n locations
ctgtttatgtgggaacaggttgtgttttcgataggcaagcactttatggctatggtccaccttcaatgccaagttttcccaagtcatcctcctcatcttgctcgtgttgctgccccggcaagaaggaacctaaagatccatcagagctttatagggatgcaaaacgggaagaacttgatgctgccatctttaaccttagggaaattgacaattatgatgagtatgaaagatcaatgttgatctctcaaacaagctttgagaaaacttttggcttatcttcagtcttcattgaatctacactaatggagaatggaggagtggctgaatctgccaacccttncacactaatcaaagaagcaattcatgtcatcggct

SEQ ID NO: 203340 - DNA, 317 bp, Gossypium hirsutum
gtggttccgattgtgcttctgttggttctgttcgcgttagcgaatgccaagaaatcagctgatgtgaccgagctgcagatcggcgtcaaatataagcctgcatcatgtgaattccaggctcataaaggtgatagagtaaaagtgcactatcgggggaaactcactgatggaaaggttttcgattccagttttgaaagaggtgatcccattgagtttgagcttggtagtggacaagtaatcaaaggatgggaccaaggattgctggggatgtgcgttggtgagaagcgcaaattgaaaatacctgctaagcttggata

SEQ ID NO: 203341 - DNA, 345 bp, Gossypium hirsutum
attgaaagagcctccattgattactgccagtactgtgctttccatcgttgccttggactacccggtggataaggtctcttgttatatatctgatgatggtgcggccatgctgacatttgaatctctagtagaaacagccgactttgcaagaaagtgggttccattctgcaaaaaattttccattgaaccccgggcacctgagttttacttctcacagaagattgattacttgaaagataaagtgcagccctcttttgtaaaagaacgtagagctatgaaaagagattatgaagagtacaaaattcgaatcaatgctttagttgcaaaggctcagaaaacacctga

SEQ ID NO: 203342 - DNA, 371 bp, Gossypium hirsutum
tccattctttcctgctccaactccaccaaggggtggtacatgcgatttctggaggagtcaccccacactgatatggggtctgcttggttggtggggcactgtaggcaacgcatttggcgtgaccaacgctcctggacttggaacaagcatgagcttgccccaagcactttcaaacacacgtactgatggacttggggcgctttaccgggaaggaacagcctcatttctcaactccatggtgaataataggttcccattctcgactaagcaagtcagggagacttttgttgcagcacttggttcaaacagcgcttgcacagctcaagctcgtctcttcaagcttgccaatgaaggccacctcaagccaagga

SEQ ID NO: 203343 - DNA, 333 bp, Gossypium hirsutum
aaaggagttagctgctcgaatgggattagggaaatcggactctgaagttgaccccacagagtttggtgctgctgctgatggtgatgctgatcgtaacatgatactgggaaaaaggttctttgtcactgcatcagattcagttgccatcattgctgccaatgctgctaatgcaattacttactctgattgtggtttgaagggagttgccaggagtatgcctacttcagctgcccttgatgttgatgccaagaacttgaacttaaaatttattgaggtacccaccggctggaaattttttggcaacttaatggatgctggattatgttcgaattg

SEQ ID NO: 203344 - DNA, 340 bp, Gossypium hirsutum
  unsure (1)..(340): unsure at all n locations
gtttaagcagagaggttgcgcaggataaaggctcttcaccattgtttcaacatgaaggtttgtaataaaaatttgtttctatcagcattgctttgcattgctattgcaggagttttgggtcaagctcctagtaatcctcctacgtctacgccggcgccacccacaccaccggcttctactcctcctccgacgactcaaccaccgcctacaccaaccgccactccgccaccggtttctactcctcctcccacttcatcaccgcccccagtgacagcttctccacccccagtttcaactcctncacccagttctccttctcccgcaactccaccacctgctt

SEQ ID NO: 203345 - DNA, 374 bp, Gossypium hirsutum
gggtcgccaatcgaagactcgcaacggatggacaaaatcgaagcacgtttaaggaatgttttgaaaggagataacgatattcgtagtgcaaaaaccacggtttctatggccgtaactcatactgaaagaaggttgcatcaaatgatgtttgcagatcgtgattacgaacggaaaccgattttggaacatacgtcggagttgccggctgtcactttgcaaaattgggtggaaaggggctattctgtggtgaatgttcaatgcaaggaccgaactaaactcctgtttgatgttgtttgcacattgacagatatgcaatatgttgtgtttcatgccactatcaaaacatcaaggcgataaacctatttggaaattta

SEQ ID NO: 203346 - DNA, 339 bp, Gossypium hirsutum
gaaggtttagttttacaaacatggctggtgccggtgtccttaagttggtttccatgattctcatcgtgtgcatggcggtgatgggtgcacccaaggctgccaaagccgccatcacgtgcagcgacgtggtgagccacttgatcccgtgcttgtcctacgtacaaaacggcggtacacccgctgctgcatgctgcagtggggtaaaaacactctacggccaggctcagacctccacggaccgccaagacgtgtgcaagtgcatcaaatcggcggtgaacggaatgccttacaccggctataacctcaatctcgcagccgggctacctgctaaatgtggtc

SEQ ID NO: 203347 - DNA, 353 bp, Gossypium hirsutum
acgccactggcctgcatataaagcatgtggaaattgtggtgtctgtagttatgccggaacatttaatgagaagaaatgtggaactaattgtggagaggcctctcaaagatggtaccatgttcctcgttcatggctcaacccaacagggaatttgttggttgtgtttgaggaatggggtggagatccgaatggaattactttggtacgccgagaaactgacagtgtctgtgctgatatctacgagtggcaacctaacctaatgaattacctgatgaaagcctctggtaaagtcaacaaacccctaaggccaaaagtgcatttagagtgcgatgctgggcaaaaatctcagcagt

SEQ ID NO: 203348 - DNA, 360 bp, Gossypium hirsutum
gttatttcccataccttgctcctcttgctagtccacctctcttcctcctccgccgctactcaccaccaccaccaccaccaccaccaccaccgttcactgtctccaaacccaaagctccaacaagcttacacagctctccaggctttcaaaaaagtcatctactccgacccaaacaatatcaccacaaactgggttggccccgacgtatgcaaatacacaggcgtgtactgtgcaccacaccctcacgacaaaaccatcaaagtcgtcgccggtattgacctaaacggagacgacatcgccggttaccttcccgatgaactcggtcttctcaccgatcttgctcttatccaccttaacagc

SEQ ID NO: 203349 - DNA, 319 bp, Gossypium hirsutum
gttgtggtgcagctgcagagaagagagtagaggggaaaaaaagcgtcggcgtttttgcttcttcttctacttcgctctctctccttctccgaagttcctctttcgttctttcatttattcagtattgtaaaagatggccgacggtgaggatattcaacccctcgtctgtgataatggaactggaatggtgaaggctggttttgctggtgatgatgctccaagggcagtttttcccagtattgttggtcgtccccggcacactggtgttatggttgggatgggtcagaaggatgcctatgtaggagatgaagcacactct

SEQ ID NO: 203350 - DNA, 371 bp, Gossypium hirsutum
tttgtcttgattcttattctcaggtgggagattcaaatggcggatattagcaatggttccaaagggtttgcagtgaaacaaggagaaccaactagggtccttcctgcagaagagacaaagaagggtctttattacctgggaaaccttgaccaaaacattgcagtcataattcgaaccatttacttctttcagtcagagtctaaagggaatgaagatgctgccgaacaagttaaaaatggtttgtcaaagattcttgttcatcattatccacttgctgggcgactaaccatcagctccgaagggaagctcatagtggactggcaccgggagggggctgtttttgtggatgctgaagctaattgtgggattga

SEQ ID NO: 203351 - DNA, 376 bp, Gossypium hirsutum
ggaagatttgatagaaaaagctggaggctgtgctgtgatggatgggggttttgctactcagcttgagagtcatggtgcttccattaatgacccactttggagcgctctttgcttgatcaaagaccctcaccttatcaagcaggttcatcttgagtatttggaggctggtgcagatatcttggttacttcatcttaccaggctaccattcctggattcctttcccggggactatcccttgaagaaggggagtcattactaaagaagagtgtcaaattggcagtggaagcccgtgataagttttgggatcgtgtcggatgtgttcctgggaatagctacaaccgagctttggtagcagcctcaattggaagttatgga

SEQ ID NO: 203352 - DNA, 335 bp, Gossypium hirsutum
  unsure (1)..(335): unsure at all n locations
cttcctgtatgtcactgtgttgaccgtgagtggttacaaggtccaaaccgaccctgctaagaacactgttgaccccgattgcggtggcgttggtattcttggtattgcttgggctttcggtggcatgatctttattcttgtttactgcaccgctggtatctctggagggcatatcaacccggctgtgacattcggtttgtttgtgggacgcaaggtgtcactcatccgagccctgatgtacatggtggctcagtgcttgggtgccatatgtgggtgtggattggtcaaggctttccagaagacctactacaacaactacngnggtggtgcgaacg

SEQ ID NO: 203353 - DNA, 372 bp, Gossypium hirsutum
  unsure (1)..(372): unsure at all n locations
tggagatcaatcataattttcactctgttggcctttcttttcttccctatttcagcgacgacgataacactctacaacaaatgctcacatccagtttggccagggattcaacccagcgccggcaagccaattttagcccgcggtggattcaaactcccaccaaacaaagcctactccatgaatctacctccgttatggtccggtcggttctggggtcgacacggttgttcctttgacgcctcgggtcacggccgttgcgcgacaggtgactgcggcggttccttattctgcaacgggctcggcggaaccncacccgctacgttagcggaaatcaccctcggccaacaacaagatttctacgacgtcagtttg

SEQ ID NO: 203354 - DNA, 364 bp, Gossypium hirsutum
cccaaattggaaaagcctaaagagcacgaggaacacgaagtcgaatatccggaaatacccgagtacaaggaaaagcaagatgagggtaaggaacataaacatgaggagtgccacgagtcacacgaatcgaaggagcacgaagagtacgagaaagaaaaacccaatttccccaaaggggaaaagcccaaagagcacgagaaacatgaagtcgaatatccgaaaatacccgagtacaaggaaaaacaagatgagggcaaggaacataaacatgatgagtgccacgagtcacacgaatcgaaggagcacgaagagtacgagaaagaaaaacccaatttccccaaaggggaaaagcctaaagagcatg

SEQ ID NO: 203355 - DNA, 373 bp, Gossypium hirsutum
cttagatagtgaacctgatgtagttgatggagtgggtgctgaaacagggcatgtgattagaacaaccattggtggccgaaatggtcattcaaagcagaatgtcagttatattgctgagcacgtggttggaactggttcttttggtgttgttttccaagcaaaatgtcgtgaaactggagaaattgttgccatcaagaaggttctacaagacaagcgttacaagaacagggagttacagattatgcaaatgctggaccatccaaatatagtttcccttaagcattattttttctcaaaaacagacaaggaggaactctacctcaatcttgttcttgagtatgttcctgagactgttaatcgcacagcaagaagc

SEQ ID NO: 203356 - DNA, 332 bp, Gossypium hirsutum
gtataaataaagggattggggaagagagcagtgagacggataagagtgaaggtgagatagagaatgcaggtagctcggatgatcgggttcgtgatggaattgatgggaataatgaagaagcgagagaagaacattacaagggggatgatgcttcaagtgaagtagtccatgatacccaaaatgagacgagtggttcagaaaatttcaacgacgctgagcagttggaaaacaaagataagaatgaccgggaggacgaaacaaatagcagtgaagcggtcaatgtcggtcatgaagagtcgaatgtgcaagaaaatggaacagctgaaaacaat

SEQ ID NO: 203357 - DNA, 366 bp, Gossypium hirsutum
cattcaaaccagatttattagacaaaaattagaacaattacaacaacttacacaacattgtaaaaagtatatattggattcaacttagagtatttaatacaatataacacttaagattatataagtataaatatggtaacacttcttaattaccactttaaccctgcaaattccttaactccatctcttcttaatcctaaccattaaccccttcttcatctgataaaccacactgtttttgggaccaatattctgcccttccaccacatgaacgttgtagttatgaatgatggctgttgcggtagccttcatcaagagaaacgacacctctttccctggacaaaatcctgggccccgcaaggaatg

SEQ ID NO: 203358 - DNA, 342 bp, Gossypium hirsutum
atttcctccaaaaacggactatctgaagaagctacactgaagattttgaatcaggttgagtactattttggcgatttgaacttggccaccacggatcatcttatgaggttcatcaacaaggatcctgatggatatgtgccaatatctgttgttgcatcttttaagaagattaaagcccttgtaactactcattcccagctagctactgttttgcggaactcagcaaagcttgtagttagtgaagatggaaaaaaagtaagacgccagcatccccttactgaatcagatatggaagagttgcaatctcgtataattgttgctgaaaatttggctgaagatcac

SEQ ID NO: 203359 - DNA, 327 bp, Gossypium hirsutum
tttggtttatccgcaatcctgaggatgatgttggcgggtgagttgtttttggtgggatggatccaaaacattacaagggggaacacacttatgttcctgtaaaacagaaaggatactggcagtttgatatgggtgatgttcttatttgtgaccaaacaactggactttgtgccagtggctgcagtgctattgttgattccagaacttccttgttgactggacctacggctgttattgctcaagtcaatcatgctatttttgcaacatggtttgtaagttaagaatgcaagactgtgttttcataataccgataaatgaatatttact

SEQ ID NO: 203360 - DNA, 302 bp, Gossypium hirsutum
caaagtcactattaaaacaggccttaatggatgcaaacagggaaagggaaaagaacatcttgaaaggaacagcttactcacttttatcaccgtcaccttcccgctctgattctgggttagacgacagtatttctgaggttagtgatgctgaactatgctgcatatgcctcgagcagatcctcacgatcgaaatccaagactgtggtcaccaaatgtgcgcacaatgcacaattgtccctttgcttccataacaagcccaaccctacaaactcaagcataacaccctccgtctgccccttttt

SEQ ID NO: 203361 - DNA, 373 bp, Gossypium hirsutum
  unsure (1)..(373): unsure at all n locations
aaataatctttcttttgcctatcctctgcaatccaatgccgtagggttgtcactggatggccatcactcntcatggcatcaaccggaatgatacgggacctatgatgaggtgctcatttgaagaaactgtagatatcctccttgatgctgctgtttatgctgagtcagattatttgaggggtgtgacagagaatataatgctgggtcagcttgcaccaattggtacaggagagtgtgccttgtatctcaatgatgagatgttgaagaatgccattgaacttcagctacctagttacatggaaggtctggaatttggcatgacacctgctcgatctccagtatcaggaactccatatcatgaaggcatgatgtc

SEQ ID NO: 203362 - DNA, 346 bp, Gossypium hirsutum
  unsure (1)..(346): unsure at all n locations
ccccggcttcantttttttttctangtttttatttaaactccataaaattaaatgcgtatgtttataagcatgttgtaacacacaataacattcttttataataacacacattaacatatatatgaaaaaaaatggcgtctaaaaatcacagaaaattaataaccctatatttccccccctttcaacataaaattataacctttcagaaaaaaataaccattcatccacctaataatgccaaaaccaactcaattcaaattccctattttatcattatcctaatatatcattaaccctaaaacgaaggctttttttatttaaccatttttttttaaatttgcttct

SEQ ID NO: 203363 - DNA, 380 bp, Gossypium hirsutum
  unsure (1)..(380): unsure at all n locations
cacgctgcttttcttctattctnggcaaccagaactattcgttggtttaaagcaggctactgagactacaatgtgtccactaagactccattgcttcagctgatgaatgatgctttaatcgttgctaagcagaaggattttgacgttttcaatgcgcttgatgtcatgcataatgagtctttcctcaaagaattgaaatttggaccaggtgatgggcaacttcactactacctctataattataggatacgaaatgctttgagaccatcagaacttggtcttgtactcttatagttcgacatgttccagctttgttcgtgcagttttgttttcatattaggtcttggttgcatcatattaattgtttcgcttccattcac

SEQ ID NO: 203364 - DNA, 301 bp, Gossypium hirsutum
ctgattttaaaggctgcataaacgatgtgaagagagggggcatattccttacagaacgctatcgattctctgaagaagacattacggtattgatagacaccgataattcttatgatcaacccacagggaagaacatcagaagggctttgaatgatcttgtgagatcggctgatcctgtggattttctgtttgtgcactacagtgtccatgggactaggcttcctgcttagactggggacaatgattatactggctaccataagtgcattctcccctgcgatatgaatctcatcacttatta

SEQ ID NO: 203365 - DNA, 307 bp, Gossypium hirsutum
tgggttttcctatgggtgttttcctgaaaccaaaggatttaccaggaaaaaaaaaggtttgtttggggggttttggacttaattaaagcatggtagagctcgaaaattcgtcggcgatgactgtttctacagcttctggagaagccactgcatcttctctaggtaatcagattcaagacaatcaactcacaggcggatgaccaccgaaaaagaaaagaaatcttccagggatgccagatccagatgctgaggtgattgctatatttcccaaaaccctactggcgaccaaccgattcgtttgtgagat

SEQ ID NO: 203366 - DNA, 353 bp, Gossypium hirsutum
cgcaatcaatgctcaaattcgtcgagctgttgaggcttaagggatccgttgacacttatgtgcctgctaactgctttgcaagctattttcttcctacattgtctcatccaggatccacctttcccccaagagacaagtgtgttattctaggtgattgaaatcctaaagctgttttcaaccatgaatctgacatcttaacgtacaccatcaaagctgtctattacctcataacagcgaacaatatcttattcatcaagccttccaagaacacctactcatttaacgagctcatcgccctgtgggagaaatttatttgtaaatctcctttaaaaaacattatttccttatgacca

SEQ ID NO: 203367 - DNA, 402 bp, Gossypium hirsutum
tttcttgtgatgcaagaaagctggtgccgggaactccctggttcgtttctcggtggtgctgagaaatgctccttttatgttgaacttggattgtgaccattatttaaataacagcaaggctttaagagaggctatgtgtttcttgatggaccctcaaattggaagaaaggtttgctatgtccaatttcctcaacgtttcgatggtattgatagacattatcgatattccaatcggaacacagttttctttgatattaacatgaatggtctagatggtatacaatgccctgtatatgtctgcactgggtgtgttttcagaaggcatgcttctttatggttatgaaccttcaaagggaccttagcgcctcaaaattgtaacctttttttgttgttccttgtttt

SEQ ID NO: 203368 - DNA, 369 bp, Gossypium hirsutum
gaacttttgggcgttcctattttaactcatgacaaatccgggaagttgccaggttcttttgatgctagaacagcttggccacaatgtacctcaattggaagaattctcgatcagggtcactgtggttcttgctgggcttttggagctgttgaatcactatctgatcggttctgtatccattttgacatgaacatatctctgtctgttaatgatcttcttgcatgctgtggctttctatgtggagatggttgtgatggagggtatccaatctctgcatggagatactttgtacgcagtggtgttgtcactgaagagtgtgatccatactttgatgatattggttgttctcaccctggttgctagcctgca

SEQ ID NO: 203369 - DNA, 284 bp, Gossypium hirsutum
gtttttcattttttataatcttttctgcagcaaatctacagcaacttataaggaagctctgcgattaaagcagaggttgagtaagaagaagatgggtgtagattattacaagattctacaattttacaagaatgcaaaagatgatcatttgaagaaagcttatatgaagcttgccatgaattggcaccctgataagaacccaaataactaaaatgaagcttatgccaaattcaatcaaatctctttagcttattatgttttgagtgacccacaaaatagagcta

SEQ ID NO: 203370 - DNA, 333 bp, Gossypium hirsutum
taaactagggatccccggctgaagaattcgcacgagctttctttgctttttcgaatttttcttaagcgagaatgatgcagtgcatttggattcacatgggtcaggccggtatccaagtcggaaacgcctgctgggagctttactggctcgagcatggaatccagcctgatggtcagatgccaagtgacaaaactgtctgatgaggtgatgatgcttttaacaccttttttagtgaaactggtgctaggaagcacgttcctcgagccgactttgttgatcttgaacccactgatatttattaaattagaactggtgcttactcgcagttctttt

SEQ ID NO: 203371 - DNA, 299 bp, Gossypium hirsutum
atgaattcgctgcgagcattctgtgcttgttcgaattttttttaagcgagaatgggggggtgcattaggattcacatcgttcaggccagtatccaattctgaaacgcctgctgggagctgtaactgtctagagcatggaatctagccttatggtcatatgccaaatgacaaaactgtctgaggaggtgctgatgcttcttacacctacttcattgatactggtgcctggaagcacgtgcctcgtgcctgttttgtggatcttgaacctcctgtaattgatgaagtgaggactggtgctt

SEQ ID NO: 203372 - DNA, 424 bp, Gossypium hirsutum
ctttctttgctttttcgaatttttcttaagcgagaatgagagagtgcatttcgattcacatcggtcaggccggtatccaggtcggaaacgcctgctgggagctttactgcctcgagcatggaatccagcctgatggtcagatgccaagtgacaaaactgtctgaggaggtgatgatgcttttaacacctttttcagtgaaactggtgctgggaagcacgtccctcgtgccgtctttgtggatcttgaacccactgttattgatgaagtgagaactggtgcttaccgtcagctctttcacccagaacaactcatcagcggcaaggaagacgcagctaacaactttgcccgtggtcactacactattggcaaggagattgttgacctctggttggaccgcattatgaaacttgctgtttactgcac

SEQ ID NO: 203373 - DNA, 296 bp, Gossypium hirsutum
  unsure (1)..(296): unsure at all n locations
gtcgatccttcaccggcaccgctcatcgacatggctgagagcgagctttggtctttatacagagctctcatcgtcgaattcatcgatactctggtcttcctatacgtcaccatagccaccgtcatcggccacatgatacaacacgatgcatgcgatggtgttggtctattgggcatcgcttgggcttttggtggcatgattctcattctcgtatactgcaccatcggtatctcacgtggtcacattaacccggcggtgacattngggttggtaccggctatgaaggcgtccttaat

SEQ ID NO: 203374 - DNA, 327 bp, Gossypium hirsutum
acaacaacaatggctggggacacagtttacaccctctcagaagtgtctcgacacaaatccaagaacgactgttggcttgtcatcgatggccgagttctgaacgtgacaaagttcatggaagaacatccaggaggagaagaggtgttgttggaatcagcagggaaggatgcgacgaaagaattcaacgatatcggacatagcaagtcagctcagaatttgctcctcaagtatcagattggtgttctccaaggtcacactttaaagaataatgaacaggttggttcaaccgaagagcccaaaaagaaagagatgagtgcattcgtgatc

SEQ ID NO: 203375 - DNA, 369 bp, Gossypium hirsutum
aaagaactcaaaatcaacagatcgaagtttaaatggagtgcgtgttcgggtgagtggtgaacgactttgccggagtgtcggcggacacttctttcttttcacagcatccttgttcacaaatctaactaagataagatcatgatcctcgattctcacaaactcatcgcctccagctgtgaatcctgtgacagattgcatttcacggagtatgtacagaaaaatgtgtccttgtatcatttcctaaacgtgtttcctttgaagactgccaccgtctttaatttcactctctgttagcttgccactgtcttatagaagaatccattcttttgtgaacatcctttcttgcctagctatgacaaatatacattc

SEQ ID NO: 203376 - DNA, 424 bp, Gossypium hirsutum
gttttggctttgggggatttgcatataccccatctggcgggtgatctccctcccaaattcaagtccatgctggttcctggaaagatccaacacatcatttgcactggtaatctttgcatcaaggaagttcaagattacttgaagacactttgtcctgacttgcatattaccagaggtgaatatgatgaagatacaagatatcccgagaccaaaacattaactatcggacaattcaagttgtgattgtgccatggccatcatgtcattccctggggtgacctagactccttagccatgctacagaggcaactggatgtagacatacttgtaacaagtcacacccactcagttcaccgcttacaaacatgaagccggagttgttataaacccggggtctgctactggtgcattatagcaacattac

SEQ ID NO: 203377 - DNA, 371 bp, Gossypium hirsutum
ccaccattctttacaagctgaagttgggagagattgtcagtactattcccaccatcggtttgaatgttgagaccgttgaatacaagaacatcagcttcactgtttgggatgttggcggtcaggacaagatccgaccattgtggagacactatttgcaaaacacgcaaggacttattttcgtggttgatagcaatgatcgtgaccgtgtggttgtagctcgagatgtgttgctcatgatgttgaatgaggattagttgagggatgctgtgctgctagtatttgcaaacaagcaagatcttcaaatgctattaatgcttctgatattaccgacaagctttgccttcatcctcttcgattgcgttactggtatt

SEQ ID NO: 203378 - DNA, 425 bp, Gossypium hirsutum
cgaaatgcaagaggtacttccacaaccgtttgaagccttcaaaacttacatggacagccatgtataggaagcagcataagaaggatattgcccaagaggccgtgaagaagagaagacgtgcagccaagaagccttactcccgatccattgttggtgccaccttagaggttatccagaagaagagaagtgagaaacccgaagtccgtgatgctgccagggaagctgctctccgagaaatcaaggaaagaatcaagaaaactaaggatgaaaagaaggcaaagaaagcagaagtagcggcaaagcaacaaaagactcagggcaagggtaatgttccaaagggtggagcaccgaaaggccccaagctcggtggctgttgctgaaaagcgtaaagttgtaaagttattaatctgttttccctaagccag

SEQ ID NO: 203379 - DNA, 258 bp, Gossypium hirsutum
ggctttaccatcagaaatggctttaagactcttgttacccgtacttatgggggcaagattgctgcataaggactcttacacagactgcttgatgttatactgggtgatcttcaatgatgtggtgaggatcatactgtcatctagattcagttgttagctgaacatgttctaggaaaaaatgttttgaccaaattctggataatgaattttacgactgatatgcttatgtctttgtttttcaaattgttaatttttatc

SEQ ID NO: 203380 - DNA, 274 bp, Gossypium hirsutum
tagcaattcctgttgctttttgttatcaccactaaatcatcgagacaaatagctcatctttcagctttcctactctcctatggctctcaatctatgtcagaaacaaacagaatgtataattcgaatgtttaatctgaaccagcctgtgaattcctctggaactgttaattaagatgtttacaagatcttgatatatgacaaattttgtcaaaatatactgtccctcttgatccatgttaatgatctacgtaaacatggtgtttccctgttactt

SEQ ID NO: 203381 - DNA, 402 bp, Gossypium hirsutum
gatgcgaacttgagactcaggaagattctccaagaagagacaggatggaagcttctcggtggtgattttttcaggcctccatctaattctgatctactctgtgtctatgttggcacctgtgttcaatttttgggcatggttcttgttaccatgatctttgccgtttttggatttctttcccctttaaacctatattgtctgattacaactattcttttactttgggtctacattgtcatttttgctggctatgcttttgtccttttgtacaaaatgtttatatgatctcaatttaataaattaacttttaagactgctttcattttccattcatagtttttccatcttctatgtcttaattcaattattttgttccataatttatttttggcctttcctttt

SEQ ID NO: 203382 - DNA, 444 bp, Gossypium hirsutum
caaacacagatagagagagagttagagagagagagagagagagatctttgatggattgatagctattatattatagatttagatttacagagatcaaaggatgagtgaatgggcatcaagagaacagctgaggagaacaagacgaaaggaattttgcaattaggaaattacgaattagggaggaatctcggcgaacgaaatttcggcaaagttaaattggctaagaatctccattccggcctcactatcgccgttaagatcctcgaaaagtccaagctcattcaactcagcatcgccgatcagataaagagagaaatcgctactttgaaactacttaaacatactaacgtggttcgcttacacgaggtgttggcaagcaaaaccaagatttacatggtcctagagtacgcaactggaagggaatttgttgtcataattgcattc

SEQ ID NO: 203383 - DNA, 254 bp, Gossypium hirsutum
gcttttaacacctttttcagtgaaactggtgctggaaagcgctttggtcgtgctgtctttgtggatcttgagcctactgttattgatgaagtgaggactggtacttaccgtcagcttttccaccctgagcaactcatcagctgcaaggaagacgctgccaacaacttcgctcgtggccactacactattggcaaagagatcgttgacttgtgcttggaccgtatcatgaagcttgctgataactgtaccggcct

SEQ ID NO: 203384 - DNA, 310 bp, Gossypium hirsutum
gtttatttgatatttcccccttatggccgccgctgatgtggagttccggtggttcgtctgagggctcgcatgggccaccgacgaccgggccctcgaagaagccttcagtgcgtttggtgaaatcgtcgaatcgaagatcattaatgatcgtgagactggaagatcccgaggctttggattcgttactttccgtgacgagaaagctatgagggacgcgatcgaaggaatgaacggtcaaaatcttgatggaaggaacatcaccgtcaacgaagcccaatctcgcataagtggaagcggtggctgatgattt

SEQ ID NO: 203385 - DNA, 220 bp, Gossypium hirsutum
gtcccgagtttccaatgccaaatttcgataagtaccctagcatggacttgatggtatctaagctaccatgcaggtaccccattaatggatggtctagggatgtttttaggctccaagttcatttaataacagcaaaaatggctgtcaaaaatgggaagaagaagaatgacaatgaggtgttcacgtgcaaatgcatgccaatttttgagctgtctatgtg

SEQ ID NO: 203386 - DNA, 472 bp, Gossypium hirsutum
ccgcctgctttccgtaaagcaaaaatctggcaaatcctagaatcaattagccgtagaaaccggcttaaccaacgtttacgtggctcagctcctcaaacgccaggctcagctcaagactgaaaccgctcctaagctaagggcagccttgcccgaattgcctgaggagcttctccatgagatgatgaaaccaccgttacggtcctatgatccgaaccttatccaagaacccactgtttacaggttgaatgaggcagtgatgcattttggtgagagcataaaggagattatcaatgaagagtttggtgatgggatcatgtcagctatagacttctactgctctgttgacaaagttaaaggcgtggactggaaagaccgtgttgtcgtcacatttgatggaaagtacttgccatacagtgaacagaaatctgagcatatggtttcaagattaaggctgcaattaaagctgattaac

SEQ ID NO: 203387 - DNA, 422 bp, Gossypium hirsutum
  unsure (1)..(422): unsure at all n locations
accaaaactacctccttcacccggatctcgtcctggacaggtctcaccaagcaattcaattgatgggaattctgctgcctttagtttggagctcggaaacggtgagttcagtgaagctgaactgaagaaaattatggcaaacgagaagctcgcagaaatcgcaatgactgatccaaagcgtgcaaagaggattttggctaatcgtcaatcagctgctcgttccaaagaaaggaagatgcggtacatttccgagttggagcacaaggttcagaccctgcaaactgaagctaccacattatcggctcaattaacacttctacagagagattccgntgggcttagcaatcagaacaacgagttgaagtttcgtattcaatccatggaacaacaggcacaactccgtgacgctctaaacgaaacat

SEQ ID NO: 203388 - DNA, 445 bp, Gossypium hirsutum
ttcttagccacctccgatcctgataatgtgcgttatatattgagttccaacagttctgtttatttgaaaggtcctgaatggctgaaacagtttgatatcttctgcgaatcacttttcaattccgactgtgaggcatggaaatgtcaccgcaaagtgttccatgctttcttgaatcaccctcagtaccggcaatcactttcaaaggttctccatcaacgtatagaggaagcgcttgttaaagttcttgaatatgtttctggacgagagatcgtcgtgaacttgcaagatttgctggtagggcatgcgtttgacattggatgcataacgggcgtgggcttaaaccctggcctactcttcattgaatttcctgagaatcggttccaaaaagccatgactgatactctggatgcagctttttacaaatattgtgtgcctgacagtcttt

SEQ ID NO: 203389 - DNA, 459 bp, Gossypium hirsutum
caactatggatctgctggcgatggtatgaaagttgattgggtgcaccaccctgagtatctcgagcagaacgcaactattgccttccaggctgccatctggaggtggatgaccccaatcaagaagaaccaaccttcagcacacgacattttcgtgggtaactggaaaccaaccaagaatgacacataggaaaaacggggtcctacttttggctccaccatgaacgttctctactgagattacacttgcgggcaaggctatatcgatcccatgaacatcatcatctcccattaccttcattaccttgacttactatgtgttgtgcgagaggaagcattggcctcactatgagctaagctgttcctagcagaaagcaattatactaaccttatattcacctgctgccaatgcattctgatcttttggttaattcaattttatttgttaaaattcatttgtct

SEQ ID NO: 203390 - DNA, 400 bp, Gossypium hirsutum
gaaactgcttttagtgttttctataggcacaaacagttgagtcttcgatcactttgtattggtggctgaagttcacagtttgctgatatatttcgaagagctttcgcctctcgtgtttttcctccacatgtgactaacaagttgttaattaattcatgtttaagggattctacttttataccttctgtatctggcaaaactctcattgctagtcaaattgttaagattttgaattgaatggtactacatatttgttaatggcttctaaatttcttatcttattttttggataaactgataataatgtcatagaccttttttgcttattctttaaattaccaatggacttttgattattatagttattttcattcttttatatttttgttgaaatttattc

SEQ ID NO: 203391 - DNA, 270 bp, Gossypium hirsutum
gttctggtatgtggaatctctagaattcccaatgttcaacatctccggaaggactactttgatggaaaggagcccaacaagggtgttaacccggatgaagcatttgcttatggtgcttcagtacaaggaggcatctttagttgagagggtggtgatgaaaccaaagatattctacttcttgatgtggctcctcttacccttggtatcgagactgttgttggtgtaatgaccaagtttatttccattaacacctttatctcatctaataaa

SEQ ID NO: 203392 - DNA, 388 bp, Gossypium hirsutum
tttccctccaattttctaaatataaaagttttaattttcgtgtctcgatcttcacactttcaaagctttagaaacgagtagatcggttctagaatttgagtgggaaaaaaatgggtgagcacgaagagaagcacgaggaatcgctgatggtgaagctagctgagaagatccacggccatgattcttcctctgattccgacatcgatgagccatcagaatcgtcgatcaatgccaaagtttttcgtctcttcgggagacaaaggtccgtacaccacgtttttggtggaggcaaatcggctgatacatttctttggaggaacaaaaagatttttgctggagtgctcggtgtgcgactgtgatatgggttttgtttgaattgctggagtac

SEQ ID NO: 203393 - DNA, 370 bp, Gossypium hirsutum
atttatcaagtgtgtcacggtcggtgatggagctgtggggaaaacttgtatgctcatttcatataccagcaatactttcccaacggattatgttccaacagtatttgataactttagtgccaatgtggtggtggatggcagcacagtgaaccttggcctatgggacactgccgggcaagaagattataataggctaaggccactgagttatagaggagctgatgtgtttttgatggccttttctcttataagcaaggccagttatgaaaacatctacaaaaagtggatcccagagctaaaacattatgctcataatgtaccaaatgtgcttgttggaaccaaactatgattgcgagaagacaagcagttc

SEQ ID NO: 203394 - DNA, 388 bp, Gossypium hirsutum
gtttatagaaccaaataccaggaatcacaaagaggtagcatcggaatcgtgtggcattgcatgtggtatgaaccgatcagcaactctgtagccgacaagctagcatccgaacgagctcaatccttctctatcaattggtttctagagccaatcatatactgacgatatcctcgcgaaatgcataacattctaggatccattttacccgaattcacaacatccgagaagcagaaactaaaccaaaggcttgatttcatcggagtcaaccactatacaagtttctatgtcaaggattgcatgttctacgtgtgtgaaccaagatcagggaacctaaaaaccgaatgattttgggcttcaagcttacagaaaaatggcattcctaatagag

SEQ ID NO: 203395 - DNA, 296 bp, Gossypium hirsutum
aaaaacacagagctccaacagaggtttaaatatcatcaaatcattaaatatagtgtcttgagtagtaaaaaaaaacatggtgtaatagatataaatcccaccagcaacattcaacactgttaagaagcttaaacaagcacaagcattggcaaataccatgcttcagggtaattattcttcagcagcactagcagcactcaaatccacactgaggtcaagaacctttccagttatcatggtatacatgttaagtacattactgacagttgatttaaaatgtgttgtagcatcataac

SEQ ID NO: 203396 - DNA, 258 bp, Gossypium hirsutum
tcgaggaattgcggctggaactagccatggggtattgttgtttaagagcaacggaatggacatagtctatggagcaaatcggataacttacaaggtcattggaggtattatagacttgtatgtttttggcggaccattgccccacaccgtcgtgcagcagtatactgaacttattggccgccctgctcccatgccttattggtccttcggattccatcagtgccgatatggttacaaaaacgtttctgacctcgaggg

SEQ ID NO: 203397 - DNA, 269 bp, Gossypium hirsutum
caagagcagagctgcggcatttcttcctcagaagacccatcagacagaaatgaagttcaacattgcaaatccgactactggttgccaaaaaaagctggaaattgatgatgaccagaaacttcgagccttttttgacaagaggatctcacaggaagtcagtggtgatgccctcggtgaggagtttaagggctatgtattcaagatcatgggaggctgtgattaacaaggttttccaatgaagcatggagttcttattcttgggcgtgttc

SEQ ID NO: 203398 - DNA, 286 bp, Gossypium hirsutum
gacaagagcttgatcgtcagcttcggtgagatgctgatcgattttgtccccactgtctccggtgtttctctagccgaagctcccggcttcctcaaagcccctggcggtgctccggctaacgtggccattgctgttgctagactcggaggcaaagcgtcatttgtcggaaaacttggagacgactagtttggtcacatgctggccgatattctcaagcaaaacggtgtctccggtgacgggatcttgtttgaccaaggcgctagaactgctcttgccttcgttactt

SEQ ID NO: 203399 - DNA, 147 bp, Gossypium hirsutum
gacaagagcttgatcgtcagcttcggtgagatgctgatcgattttttccccactgtctccggtgtttctctagcctaatctcccgtcttcctcaaagcccctggcggtgctccggctaacgtggccattgctgttgctagactcgta

SEQ ID NO: 203400 - DNA, 257 bp, Gossypium hirsutum
gtgatgttgatatcaggaaggatctctatggtggcattgtgcgcagtggtggttcaactatgttccctggtattgctgaccgaatgagcatggagatcactgcccttgcttctagcatcatgtatattaaggtagttgcaccaccattgagaaagttcagtttcttgattggatgttctatcatgtcatcacttatttctttctctttgattttgttttttatggtttttttttattattttctattatttttattt

SEQ ID NO: 203401 - DNA, 242 bp, Gossypium hirsutum
gagaaagatttacccgagttccccaaattggaaaagcctggggagctcgagaaacacgaagtcgaatatccggaaatacccgagtacaaggaaaagcaagatgagggtaaggaacataaacatgaggagtgccacgagtcacacgaatcgaaggagcacgaatagtacgagaaagataaacccaattttcccaaaggggaaaagcctaaatagcacgtgaaacatgtagtcgaatatcctaa

SEQ ID NO: 203402 - DNA, 418 bp, Gossypium hirsutum
caacaccacatttaattaccaagctggaggatttgaagtctggtaagaatgctccccaaactcccacaactcctcaagttcaatctacaggatcaaagacactgttcgttggaaacttacctttccaagtagaacaagctgatataaagaatttctttaaagatgctggtgaggtcgtggatattcgtttatccactgattttgaagggaactttaaggggtatggacattgttaatttgctactgcatatgctgcacatattgctttatagttgaatggttaatttttgatgtaattttcccttagacttgattagtctctttaaatggtgtccttttcatctattcatttcttttttttattttttttttttattgttttttttttattttttttatctttttttttatatttttt

SEQ ID NO: 203403 - DNA, 399 bp, Gossypium hirsutum
aggaagcttgctatgaagtggcaccctgataagaacccaaatgacaaaatggaagctgaggccaaattcaagcaaatctctgaagcttatgaggttctgagtgacccacagaagagagctatctacgaccagtatggtgaagaagggctaaaatgccaagttctactttaagatgctgtctgaccttttggagcatctttttttcaaacttgatattttctaatttgttttataattatttctttatttttttatttttttatttttatatttttttattatttttatttttatttttatatttttgttttatttttattttttttttttttttttttttttatttttttatttttatatttttttttttattatattttttatatttttttttttttt

SEQ ID NO: 203404 - DNA, 417 bp, Gossypium hirsutum
cccaacttgtagtatgtcggtattgaattgtggcaggtagaatctgtaacaatgtttgataacatcttagttgccgatgatgtagagtatgccaagaaactagctgaagaaacatggggcaagcagaaggatgctgaaaaggcatcgtttgaggaggcagataaaaagagagaggaggattcaaaggatgtcccatttgatttctattcttttgattaattattttcctttttttctgtatgtcttttgttttttttttatccttatttttttattttttcttttttgattctttttttttttttttattttttttatttttctttttttttttttttttttttattttttattatcataatttattattttttttatttttttttattattttttttttttattttttttatttta

SEQ ID NO: 203405 - DNA, 433 bp, Gossypium hirsutum
cactaccgatttgagccattttggttactttcaaaggtcagtcctctatggaattcatcgtcttcgtttctcgaactgttgctaaacgtactccttctggtcagcgccagtcctttcagctcgaatagttcaaggttcatgcttactacagatattgacctttttccttggtatttaatgatgtttcatttttcattttttatttttaatttttctttttttttgttttttattctttttttatttttttttttttttttttttttcttttttttttttatttttttttttttttttgttctattttttttttttattttttttttttttttttttttttattttttttatttttttttttctttttttattatttttttttatcttttttttctttttttttttttttttttatttttattttttttttttt

SEQ ID NO: 203406 - DNA, 427 bp, Gossypium hirsutum
tggaggaggtagacgaggacaaagaaaagaagtcgaagaggaagaatgttaaggaggtgagccatgagtggcaacttattaacaagcagaaaccaatttggttgagaaagccggaggagattacaaaggaggaatattcctcgttctataaaagtattacaaacgattgggaggaccaccttgccgtgaagcacttttctgtcgagggacatctagagtttaaggctttcctttttgtacctatgagagccccgtttgatctttttgtctcatggattaagttgatcaatattaatcttaactttatgatggtttttttttttttcttctgttttatacttattttttgtatatattttctttttttaaatcttttttttattttttttttttttttttttttatttttttttttttttttcttttt

SEQ ID NO: 203407 - DNA, 441 bp, Gossypium hirsutum
cagtcagcacgtgagataattttatggattgaggaaaatgtatatcctattgacggccaggaaattaccctcagtgtggttatacaaactcttcttgacattggatctaaaagtttcactcatttgatcactgtcttggagaggtatggacaggtcatggcaaaactttgctctgatcaagataagcaggtcatgctcatatctgaagttggttcatattggaagaacaatgcacatatgtcagcgatagcaattgatatggtgatgggttattgtcttatatctaatttggcctttttgagatgggttttcttttctgtaaactttgtgtttttttttattttttttcgtcctttttttgatattttggttttttattttttttgtttttttatttttttatttttatcttttcttttttttttttatttttttaatttt

SEQ ID NO: 203408 - DNA, 306 bp, Gossypium hirsutum
acagtggcaagcttgctactttcttatcacaggacaaggagtatgcatttgttgccaactcgaacaacttgggtgctattgttgacttgaaaatattgaaccatttggtcaaaaacaagaatgaatactgtatggaggttacacccaaaaccttagctgatgtgaagggtggtactcttatttcttatgaaggaaaagttcagctccttgaaattgcacaagtccctgatgcacatgtcaatgaattcaagtctatagagaaatttaaaattttcaatacaaacaatttgtggctgaacctaaatg

SEQ ID NO: 203409 - DNA, 292 bp, Gossypium hirsutum
caaccattttccttacaagtttgttattctcgcggagaatccatatggctagctcaatgacccttaagcttgcatgtctgttggtgttgtgcatggagatggctgcacccctggctcaaggggccataacccgtgctgatggctcagtcgatctcccacgctgacttccttttttgtcatggaatggtgatggtgctgatgccacaggttgctgtgccatcgtcatgaatgccttgtgatcgctctgtggagatacataggaaccgatctagcttgaaatcgggttcggatt

SEQ ID NO: 203410 - DNA, 361 bp, Gossypium hirsutum
gctcaatctaatctccttgttttaaaacctctcgggtgtcctaaaacaatgacaaccagcatccacgtcactgctttagacagcgtcgtgaacgtaaactcccttttcacactcgccgttttcatcggtttagcttggaacccatacgatcccagcaacacactcgtagacccaaacagccgatgtgccccaacatcaaaaatcgccgaggatttgattaaattccatgtctactccttcagttctttccttttctccagccttgtagctttagctatcaagcaagcaatcaagctttccaaatcccatacttttaacatccatgttactttccgtggatccgagtttttggacatgttga

SEQ ID NO: 203411 - DNA, 387 bp, Gossypium hirsutum
  unsure (1)..(387): unsure at all n locations
aaaattcgaatcaatgctttagttgcaaaggctcanaaaacacctgatgaaggatggacaatgcaagatggaacttcttggccaggaaataacccgcgtgatcaccctggcatgattcaggttttccttggatatagtggtgctcgtgacatcgaaagaaatgaacttcctcgactggtttacgtctctagagagaagagacctggctaccaacaccacaaaaaggctggtgctgaaaatgctttggttagggtgtctgcagttcttacaaatgctcccttcatcctcaatcttgattgtgaccactatgttaacaatagcaaggcagttagggaggcaatgtgcttcttgatggacccacaagttggtcgagatgtatgctatgtg

SEQ ID NO: 203412 - DNA, 219 bp, Gossypium hirsutum
gtcaagcgttagagctagctagctattactcagctggcggcgattacgatgatggagcatacatctccactcaagagctttacgaacaacggctgcgagtacattttccttgatgcttatggagatgacgatggtggttggcaaactgctcatgccaccttctacggaggtgctgatgctaccgtctcaatgcggggagcatgcggatatggaaacatg

SEQ ID NO: 203413 - DNA, 301 bp, Gossypium hirsutum
  unsure (1)..(301): unsure at all n locations
tacacctcttaagaatgaggagcctaaacctaaaccacggggatatgaacctccaaagaaggagaaacctganccaaaaccaccgatttatacacctacaaagaaagagaaacctgatacccaaaccacccgtatatgaacctccaaagaatgagaagcccgagccaaagccaccgttttatacaccttcaaagaaagagaaacctgaactcaaaccaccagtgtatgaacctccaaaaaaacctccaatgtacgaacctaagccaccataaccaccggtttatacacctgcaaagaaaga

SEQ ID NO: 203414 - DNA, 292 bp, Gossypium hirsutum
gaaaaaaagagcatgactggctcaaacctttagcatttcaaagcaaaggaaactatatataattagaaaataaaaaaaaagatcatcacaagaaattaaccgcaaggctcaataaataaaattttagcttcattgttgtttttgccaattaattaattaccataatacttatcatatattaaagccagcgcttgttttgtttgatgttcttcacaaatcacacatcaaatgtagaaatactgtacgacaggtgatcagggttcgaactcttcctcgctttcctcgaactcct

SEQ ID NO: 203415 - DNA, 305 bp, Gossypium hirsutum
aaatcctatttccccaaatgggaaaagcctaatggccacgagaaacataaagccgaatatccgaaaatacctgagtgcaatgaaaaactagatgacgataacgaacataaacatcagttcccaaagcatgacaaagaagaggagaagaaacctgagaaaggcatagtacctctgagtgggttaaaatgcctgaatggccaaactccatgttaactcaacctggctcgagcactaatccttacgccatatgacactgatgcatgtgccatcatcatgcagtaatttcatgggatattgcaattata

SEQ ID NO: 203416 - DNA, 365 bp, Gossypium hirsutum
  unsure (1)..(365): unsure at all n locations
cgcaaactccgcctcagttcttcttccaaattgagacctcgaccgtcgatctgggaccgtcgttgccgtctccgatgttgttaagcaaaagaaatccaagtccacccacagtctcctaattacgaaagaggaaggattggaattatacgaagatatgatactaggaagagcatttgaagatatgtgtgctcagatgtattacagaggcaaaatgtttggttttgttcatctttacaacggccaagaagctgtttcaactggttttattaagctcttaaagcagcaagattctgtcgtaagcacataccgtgatcacgtgcacgccttgagcanaggagtccccgcacgcgccgtcatgagtgagc

SEQ ID NO: 203417 - DNA, 199 bp, Gossypium hirsutum
cgtagctgctaataaaccaatcaatcattttctgcaattggggtaatcgggtggaactggtggccaagaaaattacagaacttgggtactcttgcttttatattcatgcaaagatgcttcaagaccatcgtaacagagtatttcatgatttccgtaacggcgcatgcagaaatcttgcttgtactgatctttttacaag

SEQ ID NO: 203418 - DNA, 227 bp, Gossypium hirsutum
aatggctgctattgacttccatcgggtcattacaagggtcaactaggggactactacatactcgtcatggatatgcttggtccaaatttatgggatgtttggaactcaaacaaccagatgcttacaaaaaaaattgttgcttgtatagcaattgaggccatatcaattttagagcagcttcattacaaaagctttgttcatggagatgttaagcctgggaacttttt

SEQ ID NO: 203419 - DNA, 324 bp, Gossypium hirsutum
gaaagaaaaacccgatttccccaaatgggaaaagcctaaagggcacgagaaacataaagccgaatatccgaaaatacctgagtgcaaggaaaaactagatgaggataaggaacataaacatgagttcccaaagcatgaaaaagaagaggagaagaaacctgagaaaggcatagtaccctgagtgggttaaaatgcctgaatggccgaagtccatgtttactcagtctggctcgagcactaagccttaagccatatgacactggtgcatgtgccatcatcatgcagtaatttcatgggatattgtaattatattgttaataaaaa

SEQ ID NO: 203420 - DNA, 335 bp, Gossypium hirsutum
gaaaaatggccaccattgatgttcctgagcaggtttcggttgttgcagatgcagaagctcttagaaaggcttgtaaaggatgggggacagatgagaaggcaataatttcagtgttgggtcacagaaatgcagttcaaaggaagcaaatcaggcttgcttatgaagacctttaccaggaagatctcatcaagcgtcttgaatcagagctttctggtgatttcgagaaagcagtgtatcgttggatattggatccagcagaccgagatgccgtgttagctaatgttgccataaagagaataagccctgatcaccatgtgatcgttgaaattcatgca

SEQ ID NO: 203421 - DNA, 290 bp, Gossypium hirsutum
gaaggtgtcacaagggagggggtattggacaactttacaccaaaaaatttaccaaataaatcacaaggtggagaagccgatgactactcaactgatttaatggacattgcgattaatcaaaccctcaaatattgcataaagatctctgttatccgggccaaaaatctcctctgctttcctcaaagtctcttctctcgtttgtttgtgggagtttagttctttaacatttgccaggaatgcaccaaactgctcatacgacaagcggctcctgacttgactgaagaattctt

SEQ ID NO: 203422 - DNA, 386 bp, Gossypium hirsutum
  unsure (1)..(386): unsure at all n locations
ggagcccatggtggcggtgctttctctggaaaggaccctggcaaggtggacaggagtggtgcttacattgttaggcaggctgccaagagcattgtggctaatgggcttgcccgaaggtgcatcgtgcaggtctcttatgctattggtgtgcctgagcccttgtctgtctttgtagacagctatggaactggaaagattcctgacaaagaaatcctccaaattgtgaaggagaacttcgacttcaggcccggtatgatcaccatcaacctggatctcaagaggagtggcaatggccggtttttgaagacagctgcctacggacactttggaagggacgacccggacttcacctgngaaggtgtgaagcccctcaagtgggaaaaagc

SEQ ID NO: 203423 - DNA, 273 bp, Gossypium hirsutum
ggattccattttcgcggtgctttctctaaaaagggccctgtcaaattttacagtagtggtgcttacattcttagacaagcttccaaaatcataatatctaatttgcttgccctaatgttcatcgtacaagtctcttattctattgatttacctgagcccttgtctttctttgtatacagttatgtaactttaaatatttctgacaaataaatcctccaaattgttaagtataacttttattttatgccctgtataatcaccatcaacctttat

SEQ ID NO: 203424 - DNA, 372 bp, Gossypium hirsutum
  unsure (1)..(372): unsure at all n locations
gcaagatggcaccccatggcccggaaataacactcgtgaggatccgggaatgattcangtctatctaggaagtgccggtgcactcgatgtggatggcaaagagctgcctcgacttgtctatgtttctcgtgagaaacgacctggttatcagcaccataagaaagccggtgctgagaatgctctggttcgagtttctgcagtgcttactaatgcacccttcatattgaatctggattgtgatcattacatcaacaatagcaaggccatgagggaagcgatgtgctttttaatggatcctcagtttggaaagaagctttgttatgttcaatntccacagagatttgatggtattgatcgtcatgatcgatatgc

SEQ ID NO: 203425 - DNA, 167 bp, Gossypium hirsutum
ccgccgcagcaatgtctttgatcctttctctcttgatgtatgggatcctttcaaggacttccccctttcttcttcactcacctcacaaaccccggaaacctcagcgtttgtgaatacccgaattgactggaaagaaaccccagaagcgcacgtgttcaaggctgatg

SEQ ID NO: 203426 - DNA, 344 bp, Gossypium hirsutum
tcttcacattgtttacttgcattgcctacatcggtatctgatatggagaagactttatatgcattttcagacagctagaaccgttttccaaacgagctatctctagaccagcgaagaaaagggagaagttggtattcgccatagggaagactgaagagaaatgtgatgctttcaaaggcaggtggctgaggcacgagtagacccgtccgctgtatcaagaatcggagtgtccgtacatacaaccacagttgacgtgtcacgaacatggaacacctgatactgagtatcacagatggagatggccaccttcatgctgtgatcttcctatttacaatgctacattt

SEQ ID NO: 203427 - DNA, 277 bp, Gossypium hirsutum
agggggatcgcacattttgctcttgcattaccaacaaaatcgtaagagattttttacaaacaagataaatcccttttagaatcacagcaaatcaacaattgtggcaaaaaggaaaaataaaataataacaaaggtttgtaaaacaccatttagcactccacgccacattgtttaagaactggacctttttgtttgggcaagaagggatcgatccgtacccaaacaagtgagaaaatctattccaaaagtattgaccaaagcactacaatggtgggcg

SEQ ID NO: 203428 - DNA, 326 bp, Gossypium hirsutum
aaaacctgtcattattgagcttattgatgccaagaccaaggagcccaaggacaccttggaggtagatgcagccttaattgcaaccggaagggcaccattcaccaatggtctcggcttggagaatgttaatgtagtaacacaaaggggtttcgtgcctgttgatgagaggatgcgagtaattgacacaaatggcaatctggttcctcatttgtactgcattggtgatgcaaacggtaaaatgatgcttgctcatgcagcaagtgcacaaggaatttcagtggtggaacaagtgacaggacgagatcatgtgcttaatcaccttagca

SEQ ID NO: 203429 - DNA, 258 bp, Gossypium hirsutum
ggcctgctctaaagggccgggaggtatgggtcaaatcgtgcaagaaaatcagaagggcatagagatgatgcagtcgaccacccttggaccataaatctatacttgctggactgaaaaaaaaggtgcatggaattgctccactcgctcagctaggaggcacacagaaagaactcaacattgcattgagcaagtatccaaaagctcttgagaaaacccttaatcctgatatattcaaagcttatcgaaatatcgagtttg

SEQ ID NO: 203430 - DNA, 384 bp, Gossypium hirsutum
gtgtcctcccatcctcgagctgctttccagcaaaaatcaggctctgctggtcaggtgggataccctccttatcttggatcttggccttcacattatcaattgtgtctgagctctccacctccaatgtgatagttattccagtcaaaattttcacaaaaatctgcattccaccacgcagtcggagcaccaagtgaagggtagactctctctggatattataatctgcaagtgtcctaccatcttctagctgcttgccagcaaaaatcaacctctgctgatctggtggaatcccttccttgtcctggatcttagcttttacattgtcaatggtgtcagaactctcaacttccaaaagtatagtctttccggtgagagtcttcacaa

SEQ ID NO: 203431 - DNA, 331 bp, Gossypium hirsutum
  unsure (1)..(331): unsure at all n locations
aactacgattaaaagctatgcggtacggatggttntcgtgaatgaagatgttagaaagaaatcagcgaacattccgcccaaaaaaaagtgcaccctcaggaagtaagggtgcacagcttaaaaagcacattgatgctaccttgggcagtggaaacctaagggaagcagtaaggctacccccaggggaggatttacatgaatggctcgcagtcaatactgtggatttcttcaatcaagtgaatctgctctatggcacccttacagagttttgtactcctgagaactgtcctacaatgactgcangccctaagtatgaatatagatgggcaga

SEQ ID NO: 203432 - DNA, 348 bp, Gossypium hirsutum
  unsure (1)..(348): unsure at all n locations
ggccagcccatgagcatggtcttgccaggtgttgttgggtgtaactattangaaagttgagggatggtgtgacagctaccgatttagtgttgacagttactcaaatgctgaggaagcatggggttgttggcaagtttgtcgaattctatggggaaggcatgagtgaattgtcattagcagaccgtgcaactattgccaacatgtctcctgagtatggtgcaaccatggggtttttccctgtggatcatgtcaccctgcaatatctgcaattgactggcaggagtgaagagactattgcaatgatagaatcttatttacgggccaataagatgtttgtagactacaatg

SEQ ID NO: 203433 - DNA, 342 bp, Gossypium hirsutum
ggtcattcttcatctttacccagaatgcgaagaacagtgggccgaacaatggaccccatgaaccatagccgttgttgattgcgtctgaaactccggccacgactccgaccatgttcagtattatcagagttgtgggagggattaagagagttgtccatttgaagagataaagttcaccgaattctgtatcgtctgctgcttttgctgttacggtgaagttggtgtctactccagctaggactttgaggaggccctggaagacagcaaaaagatgggcggagacacctccgatcacccagaattgttcattgcattctgggtcattcttcatctttacccatt

SEQ ID NO: 203434 - DNA, 387 bp, Gossypium hirsutum
ccatattcaatctactaggaaagccatgggagaggggggggcagattcaccagggacatgcaaaggtgaaacaccaaggctaatgatactcgaccaagctttgaggcaacaaaggtcttatcatcaaatgaacatgatggaatcacatccatggagaccccaaagaggcttgcccgaaagatcagtctcggttcttcgagcttggttatttgagcattttctacacccgtatccaagcgatgttgataaacatatcttagcccagcaaaccggtctctcaagaagccaggtatacaattggttcattaatgcaagagtgagactatggaaaccaatggtagaagacatgtattttgaagaaacaaaggaacatgaaaacaaccacat

SEQ ID NO: 203435 - DNA, 299 bp, Gossypium hirsutum
cccataagctaaccacaaaggaaagcctggagagagagcgataaacaacgcttacagatggtagccaaaaacgacacgaccgctaggactatatctaccctccaccgacccctttaaatgacatggctgaactcaacgtcatggtctcttaacagaaccctaatacatagtacacagccactctattcattacctatgtcactaatgctactgttattatctacatgaaacaacaagacgcatgtaatatgcttcatctcttgggtatgccatgcgctttgggtggcatcatctatata

SEQ ID NO: 203436 - DNA, 310 bp, Gossypium hirsutum
gggttgttaaaaagcttcaggattcggggatgcttgattgtctgcaattgctacacttccatattggatcccaaatcccttcaacagctttgcttcaagctggtgtcgtcgaagctgctcaaatctattccgaattagcccgtcttggtgctgacatgaaagttattgacattggaggcggccttggaatcgattacgacgggtcaaaatccggtaattctgatctctctgtttcttatggccttcaggaatatgcttcagctgttgttaatgctgttcggtttgtctgtgaccgtaaatctatcaagca

SEQ ID NO: 203437 - DNA, 293 bp, Gossypium hirsutum
gcttgatcttgaattcttattggaagacctcgagaccgtgaaagttatcggcaatggccgtggaggtccggtacaacttgctcgccatatatgggatggaaaattatatgccttgaaggttataaaaatgaacttacaaaaagaggaggttcttaaacaattcgtgcagtatcttaaaataaacaaggcatcaaaatgttcgaatgtcgtgtcttgcaaccattcattctatcacagaggagacgtatttcttgtattagactacatggaccggggatctttgatcgaagtgc

SEQ ID NO: 203438 - DNA, 326 bp, Gossypium hirsutum
accagagagaaagtacagtgtctggattggaggatctatcttggcatcactcagcaccttccagcagatgtggatttccaagggtgagtatgatgagtccggtccatccattgtccacaggaagtgcttctaagttttgtaattgcttttgatggtgatctacattttgcatttagttggctttttttggtgtgccgtgtcaagtgaactcaaaagtctggtttatgtgggggaagttagcgatcattgtaggacggtgtacttgatattgacgtattattattttagcctttcaccgtatcaccaccattaagatgatgggccct

SEQ ID NO: 203439 - DNA, 301 bp, Gossypium hirsutum
gctcaacatgccataagcgcgtaggtcagacaggattgggctgcaggtgtggaaacctcttctgcgcggctcatcgatactcagacaaacacgagtgcactttcgattaccaggctgctgctcgtagcgctatttctaaagccaaccctgttgacagagctgcgaaactggatgaaatttaatagtgctggatgaaggtgaagatgcgcgtactcaaatatgatgattctccctctattccttgggtatggggcccattgtagtgaaggtttataagttgtgtgctagtctccccatgata

SEQ ID NO: 203440 - DNA, 234 bp, Gossypium hirsutum
cgcaaactccgcctcagttcttcttccaaattgaacctggaccgtcgatctgggaccgtcgttgccgtctccgatgttgttaagcaaaagaaatccaagtccacccacagtctcctaattacgaaagaggaaggattggaattatacgaagatatgatactaggaagagcatttgaagatatgtgtgctcagatgtattacagaggcaaaatgtttggttttgttcatctttac

SEQ ID NO: 203441 - DNA, 348 bp, Gossypium hirsutum
  unsure (1)..(348): unsure at all n locations
aacccctggacatcccgagaactttgaaacacctggagttgaagggacaactgggcctcttggtcagggtattgcaaatgctgttggattggctcttgctgagaaacacttggctgctagattcaacaagccagacaatgagattgttgatcactacacatatgttatcttgggagatggttgtcaaatggagggtatttcaaatgaagcttgttcacttgctggacactggggacttggaaagcttatagctttctatgatgacaaccacatttcgattgatggtgacactgaaatngcgtttactgagaatgttgatacacgttttgaggggctagggtggcatgt

SEQ ID NO: 203442 - DNA, 264 bp, Gossypium hirsutum
ctccaaggatggtcatactcgtgagcacgcattgcttgcttttacccttggtgtcaagcaaatgatttgctgttgcaacaagatggatgccactacccctaaatactcgaaggctaggtatgatgaaattgtgaaggaagtctcttcctacttgaagaaagtgggatacaaccctgacaagattccatttgttcccatttctggttttgagggggacaacatgattgagaggtctaccaacttggactggtacaagggccctac

SEQ ID NO: 203443 - DNA, 342 bp, Gossypium hirsutum
ccacgttcctcgttcatggctcaacccaaacaggaatttgttggttgtgtttgaagaatggggtggagatccgaatggaattactttggtacgccgagaaactgacagtgtctgtgctgatatctacgagtggcaaccgaacctaatgaattacctgatgaaagcctctggtaaagtcaacaaacccctaaagccaaaagtgcatttagagtgcgatgctgggcaaaaaatctcagcagttaagtttgccagttttggaacaccaggaggagtctgtggaagctaccgcgaaggaagctgtcacgctcaccactcttatgatgcttttactaggctttgtgt

SEQ ID NO: 203444 - DNA, 203 bp, Gossypium hirsutum
ctgccttgaacatggaatccagcctgatggccagatgccgagtgacaagactgtcggaggaggtgatgatgcttttaacacctttttcagtgaaactggtgctggaaagcacgtccctcgtgctgtctttgtggatcttgagcctactgttattgatgaagtgaggactggtacttaccgtcagctttttcaccctgagcaac

SEQ ID NO: 203445 - DNA, 336 bp, Gossypium hirsutum
ccttactcctattattcgcttcctttttgtacaccagaagagatagtggacagtgcggagaatcttggggaagtgcttcgtggtgaccgtattgaaaactctccttatgcatttacaatgcaagagccacaattgtgtactgttctttgccggattatgattgatgccaaaactgcaaagcagtttaaagtgaagattgacgatgaatatcgagtcaatatgatcctggataaccttccccttgttgtccctattaaaagattagatcaggcttctaatactgtttatcagcttggctaccatattgggcttaaaggccaatatgccgggaacaag

SEQ ID NO: 203446 - DNA, 312 bp, Gossypium hirsutum
cagtcttctaatacacaccaatgctggtggcaccggggaactgcatgcactgaatgtgcaaatattcattaacatgcatcggtcggactatgcagagagacagctgaaggtcatgcagcagattgatcaggatcatacactgacacaactagcaaatgcatgggtgaacctggcagtgggtggttccaagatacaggaagcctactctgatcttccaagatttctctgagaaatattctatgactggactaattctcaatgggaaggctgactgctgtatgcatatagggaactttgattaaacttaaacac

SEQ ID NO: 203447 - DNA, 170 bp, Gossypium hirsutum
gttcaagatatggactctctgttggtgcaaattgtgtgtggctcgtgcgtattctgatgataatttgttatcccatcgcttaccctattggaaaggttctggatgctgtgcttggccatagtgatgctttgtttagacgggctcagttaaaagccctagtcttcattcac

SEQ ID NO: 203448 - DNA, 271 bp, Gossypium hirsutum
tcgaggacctatttaactataaagacttggatgaagaatttttggagcgggttactgagaacactcgaagatacattgaaattttcgcaggtgccattgacgagcttttaccggagcctactgaggcatttcatgatgatgatcatgatatattgatgacacagagagccgaggacgctaccaataatacagatgggtctgatccgcgtcagaagatgcctccagagattaaacgttactatgaagtttatatcagagcaccttcaaaggg

SEQ ID NO: 203449 - DNA, 290 bp, Gossypium hirsutum
  unsure (1)..(290): unsure at all n locations
anaaaattacaaatcaatttcttgggtttctcgcagtttgtgaatctatagtttgtataaccttactctgtgctgtcacgaagatgaaaggttacattcatacttgggatcactcctgatggagactacattgcttcatctcaccattgcaatatgcttcaagcactntctaaacacagctctgtggaaaattacttaatccgaacttacaaaaggagcttcaatggatttgcagctaagctaactaatgaagaggcaaagaaactttcaagctttaaaagagtggtttc

SEQ ID NO: 203450 - DNA, 412 bp, Gossypium hirsutum
  unsure (1)..(412): unsure at all n locations
acggccatatacataaaatcacgtactatatgaggtaacgaaaccaatacccctggaccgggagctcattcaactctcacggctattgctacctctagaatgaaaattgggcgtatcgaggatggtccacccatatcgacagatagcacccggaaaaagggtggtcgaagagggagaaggctataaactagcacattatgttctagcaaatctatccttcagtgttttttcggtggtattggaatttggttatttggtaataactggtctttatgagccctttttcatagttttatattggtgtattttatattgcaataatgttttatatgaatctcatgtcataagtagaaatgnttaaatgaaaatagtctggtgatatttttattaaaaaattggtgggttttatcac

SEQ ID NO: 203451 - DNA, 262 bp, Gossypium hirsutum
tcgaatgttactaataagaaatggcaactgaacaggcaaggccttaaaatgaagacataaatatggatcaattcgaagatgacaataaattttaagaatatgaaatcgatggagagtgggatgacaaggaacaaagcaaggaagtgacacagcagtaggaagatgaatgggatgactatgatgtcagtgacgacttctcactgcaacttatgaaggaactctagaatcacaccaagaactgaaccagagttgtgcttctata

SEQ ID NO: 203452 - DNA, 284 bp, Gossypium hirsutum
  unsure (1)..(284): unsure at all n locations
tagatgcgtaccctaagataaacgaggatttgtgcagccgcacgctttccggtggcgttatcactgtcntctcctccgttgctatgttcttgctcttcttctccgagctccgattatatcttcatgctgcaaccgaaacaaaactcgtggttgacacttcaaggggggaaactctacgcatcaattttgatgttacatttcctgctcttgcatgctcaatcgttagcgttgatgcaatggatataagtggagagcaacaccttgatgtgaaacatgacataatc

SEQ ID NO: 203453 - DNA, 311 bp, Gossypium hirsutum
gagaaatcctccatgttcaagccggtcagtgtggtgatcgaattggtggcaagttttgggaagtagtatgtgatgaacatggcattgatgccagtggtaactatgtcggcacttcgcctgttcagcttgaaaggcttaatgtttactataatgaagccagtggtggcagatatgtgcctagagctgtgttaatggatcttgagccaggaactatggacagtttacgaacaggtccttatggaaaattgtttagaccagataactttgtgttcggccaaaatggagctggcaataactgggctaagggacat

SEQ ID NO: 203454 - DNA, 300 bp, Gossypium hirsutum
gcaattttagctgaggagaaacaccttcccatgtgtcaagaaatggcatccaagcccaatgtagagtatattgctggaggtgctactcaaaattcaatcaaagttgcacagtggatgcttcaaattcctggtgcaactggttacattggctgcattgggaaggacaagtttggggaggaaatgaagaagaactcaaaagctgctggtgttaatgttcaatatctcgaggatgaaactgcaccaacaggaacttgtgctgtttgtgttgttggtggtgaaaggtcactcattgcaaatcta

SEQ ID NO: 203455 - DNA, 407 bp, Gossypium hirsutum
cacatcaccacaccaattttaattactttaacacctcctgtccctccttccttcgttcttcattagaatatttcagatttaaacggactcgatccctaagctagttttgtactaatgggagcagttaatgttgcaaacaaggatatcaatgttagcttagctgaaaaaaagcctagagttgtttttgttttgggtggccctggcagtgggaaaggtacccaatgcgcaaatatagtcgaacactttcattacacccatctcagtgctggagatcttctccgagcagaaattaagtctggttcggaaaatggaaccatgattcagaacatgatcaaagaaggaaaagatgttccttccgaggtcacaattaagcttctcgagaaagcaaatgctgaaagtggtaatga

SEQ ID NO: 203456 - DNA, 385 bp, Gossypium hirsutum
gtcacatgtttggtctttggtgaacaaacagaagcccatctggatttggaagcctgaggagattaccaaggaagaatatgctgctttctacaagagccttacaaatgactgggaagagcatttggccttcaagcacttctcattttttggtttatttttattattatgttttttttattattttttttatttattttttttttttatttttatttttttttttattttttatattattttatatttattttttttttttttttttttttatattttatgttttatttattatggtattttttttttttattttttttttttattttttcttttttatttttttatttttatattttgttttcttttttttattattttcttttta

SEQ ID NO: 203457 - DNA, 332 bp, Gossypium hirsutum
ctgcacgagtctggattcaagtgcggtatcaactacgcaacgacccactgttgtccctggtggtgatctcgccaaggtccagagagctgtttgcatgatttctaactccaccagtgttgctgaagtcttctctcgcattgaccataagtttgatcttatgtattccaaacgtgccttcattcactggtatgttttgtatgttttttaattatgttaattttcatattctcttttttttttttcttaattttatttttatttttttatttattttcttttttttattttttataatttttctttttattatttttttattttttaatattttt

SEQ ID NO: 203458 - DNA, 274 bp, Gossypium hirsutum
gttggttgctgcacacttaaagtaggaaatgtggagtagattccaccaaataaattgaagtttgacttccttggtaaagattcgattcaatatgtgaacacagtggaggttgagcttcctgtctacaatgcaattggacagtttcacacttggaaaagcaaaagtgatgatctttttgacaagcttgatacaagtaaactaaatgcacattttaaggagctcatgccagggcttacatcaaaagtctttcgtacctacaatgcttccattacat

SEQ ID NO: 203459 - DNA, 203 bp, Gossypium hirsutum
catccaattttttgagctagctagctcttactcgaatggggaccattactatgatgttgggaatattttcacttttcttctttttgctcagtgtctgcatcttcattttccttgtatcttattgatatgacttttgttttttatttacttttctgctatcttttttttttgtttatattctttctctcttatttttttttttt

SEQ ID NO: 203460 - DNA, 179 bp, Gossypium hirsutum
ctgagtgggttagttcatttcgctggacttaccggtgtggacgatcttgatgggtgaaggaacttagacaaattgaggtgtttggcacttggccaatggccctgctatcagcaaacgagagactggttgtgattgaaggacctttttgtgattcatcacaagttataggatggcaccta

SEQ ID NO: 203461 - DNA, 363 bp, Gossypium hirsutum
aagcaaccattttccttacaagtttgtttttcttgtgatgaatccgtatggctagctcaatgtcccttaagcttgcatgtctgttggtgttgtgcatggtgatgggtgcaccccttgctcaaggggccataacccgtgctgatggcttattctgccttccacgctgcctttcttttttgtcagggaattgtgattgttctgataccatactttgctatttctttttatgatatcttttttattgttcttatcttttcatttttttcttttctttttttatatgtgttttgtatttttttatttttttttttttcttttttttttttttttttttttattattttttattttattttttatttt

SEQ ID NO: 203462 - DNA, 234 bp, Gossypium hirsutum
gtcaattctttgattattgttctcttcctttctggaatggtagcatttatcattctgaggacactataccgtgacatttctaggtataactaacttgagactcatgaagaatcccaagaagagacattgattgaagcttcttcatgtttatttttacatatctttattaaatttttatctattttttttttttttttacacttttattttaatttttattcatattttatttta

SEQ ID NO: 203463 - DNA, 247 bp, Gossypium hirsutum
cgggatgggttttttttgttgggtacttgtctttgttgcccaagaattgtttggtcaaagttctgcatatttgttgattcatggtgagcctaccaactacgtttctgccgttggggaccctggaatgacgaacccaaacgtcagagttgctttggaagcttggaatttctgcaacgaagttggctttgaagttcctaacgtgggcagcccccgctgggctgattgaactgatctttactgctctttt

SEQ ID NO: 203464 - DNA, 310 bp, Gossypium hirsutum
gagaaggttatcccttcttgttgtttgaaggccagggctgcagcccctgagcttgaggcaaaatgccattctactgttgtttctgggtggttctcggaatctcagtcttccactgatgatgctggtaaaatggtctacttcaacaatcctatgtggccgggagaagcgcattctctgaaagttgaaagcattttattcaaggaaaaatcagactatcaagaggtccttgtttttgagtcatcgacatatgggaaagtgcttgttcttgatggtatagttcaactgactgagaaagatgaatgtgcatatc

SEQ ID NO: 203465 - DNA, 277 bp, Gossypium hirsutum
  unsure (1)..(277): unsure at all n locations
gtctcgagtttttnttttttttttttttnnttttagtaagagccttgataaacttgtttattgaaaataccatgaactggaaatatcacccaaagttgccaaaacccaaaaaaaaaaaaaaaacattgaaatctaaagcaacatcatagtcgtaaaggtgtagtcgtccctgaccttcgctcagaactcatctccctcatcctcctcatctccttcagcagagtcagctccaacttcctcataatctttttccagggcagcaaggtcctcacgagcc

SEQ ID NO: 203466 - DNA, 304 bp, Gossypium hirsutum
ctattcactatttttttttttttttttttaacataataagtgccagataatatatatgaatcgaataaacccaaccaaacatattccaaacaaaataaacaatacattccttcaaatacaaaaaaagagtgtcctcaaaaggtaaaaaaataataatgtctcaaagaatacaatataatggtaaagctactctccctcttcctcctaaattccttcatcagattaagctacaacttttttatattattttcccaacgcagcacggcccttacgagcctattagaatttttcttactttatgcct

SEQ ID NO: 203467 - DNA, 290 bp, Gossypium hirsutum
  unsure (1)..(290): unsure at all n locations
ggttattggtggtgtgtcggcacatcttttngcggttgccaagggcttctcaaagttcttgctggcattgacactaacttcacggtttcttcaaaagcatcagatgaagatggggatttcgctgaactttacatgttcaaatggacaacccttcttattccaccaaccactctcctcattataaacttggtgggggttgttgcaggaatatcgtatgccatcaatagtggctaccaatcatggggtcccctctttggtaagctattttttggcttctgggtgatcattca

SEQ ID NO: 203468 - DNA, 364 bp, Gossypium hirsutum
atttaacgcaattacagggtttttgaaaattaaaatggaggtagagaatgcagaaaaagtaaatctggaacagaaaaagaagcataaagggaaacacgataagccaaagccatgggacgaagacccaaacatagaccgttggaagattgaaaagtttgacccttcttggaaccccgatgggttactggaagtcagctctttttccaccatcttccctcgttaccgagaaaaatacttgcaagaagcttggccaaaggttaaatctgctttgaaagaatatggtattgctgctgagctcaacttggttgaaaggtctatgacagtttcaacaacaagaaaaactagggatccatatgttatcatt

SEQ ID NO: 203469 - DNA, 358 bp, Gossypium hirsutum
  unsure (1)..(358): unsure at all n locations
gagtttcattttataatacgatgaccaanttaccttcttggtttctttttttgactgtggtgtctntttttgtttgtgggtttggaaaaaggataccaattctttcattttatgaagggtatagtcagttgtttggagattattatctagttctccacaganatngtaaagctgttcacttgtctttgaatgagaaaacacggtctggatttttgtctcaagacctttacttgcattgtttcttcagtgcttcaataaaattaccttctgattatactgcttgagttgtggttgctttctatatgttaaattgttattttttctaaaataaccaccattaaataaatttttaattctt

SEQ ID NO: 203470 - DNA, 327 bp, Gossypium hirsutum
agaaggtagtcatttctaatttcacgttaattttaatttgctttgatttattggttggttggtttctggtgctttctttctctatcctgaaaccacagccgtaaccatgtcttccttgctagccaacggtatttccagcttctcaccacagcctactttcgattcaaccaagttccttaaagggttcttcccaaagctcgattccgtcaaacccataaccccaaaactccaaagttcaaggcttttgaaggtcagagcagatgttggtttcgatcctcaaaccctcacgtcagatcccagctcttcatcaggtaaatcctacgatga

SEQ ID NO: 203471 - DNA, 320 bp, Gossypium hirsutum
gtaccgtggtgatgttgttcccaaggacgtcaatgctgcagtcgccaccattaagaccaagcgcaccattcagtttgtcgattggtgtcctactggattcaagtgcggtatcaactaccaaccacccactgttgtccctggtggtgatctcgccaaggtccagagagctgtttgcatgatttctaactccaccagtgttgctgaagtcttctctcgcattgaccataagtttgatcttatgtacgccaaacgtgccttcgttcactggtatgttggtgagggtatggaagaaggagaattcttaaaggctcgtgaggatc

SEQ ID NO: 203472 - DNA, 272 bp, Gossypium hirsutum
  unsure (1)..(272): unsure at all n locations
caggtanaaggtttagttttacaaacatggctagttcccctgtccttagtttggtttccatgaggctcatggtntncattaccatnatnagtgcacccaaggcagccaaagccgccatcacgtgcagcgacgtggtgaaccacttgatcccgtgcttgtcctacgtacaaaacggcggtacacccgctgcttcatgctgcagtggggtaaaagcactctacggcgaggttcatacctccccggaccgccaaaacgtgtgcaagtgcatcaaa

SEQ ID NO: 203473 - DNA, 392 bp, Gossypium hirsutum
  unsure (1)..(392): unsure at all n locations
ggcgcgtctagactagggatccccggctgcanngaatcgcacgaggtcacccctgttagattccaccctgatgagccctataagagcatccccgaatcctccaacaataaagacacttactactacaacaagaatgcctacgagtccactaagcagcaaaacttgggcgaggccattttcaccgagaaaggatggagcaccaaggaaaaccagaacaacaactactacaacggcaacaatggttacaacaatggcgagaagcaaggcatgagcgatactaggtacttggagaatggaaagtactactatgacgtcaagagtgagaacaactattatccaaaccggttcgacaactcaagaggagttgcttcgaggaacgagttcaatgagaa

SEQ ID NO: 203474 - DNA, 292 bp, Gossypium hirsutum
  unsure (1)..(292): unsure at all n locations
ctggtgagggtgcaccttacggagtggacatcaacactggcgggagagcatattcatttgcaaactttctnttggagccatcacttgtaaagatcaatgcaatcaatgctgcaactgaggctgcatgtcttattctaagtgtcgatgagactgttaagaatcccaagtcggagagtgcacacggagaagctgctgcaagtgccatgggtggcaaaggtcgtggaggtggttttcctggccctggacgaggaatgaggaagcgtttagataactgtttcatttttttgttatc

SEQ ID NO: 203475 - DNA, 272 bp, Gossypium hirsutum
  unsure (1)..(272): unsure at all n locations
gcctgctanctccttcttcgttttcatggacganttccgggagcggtacaataaggagcaccctaaaaacaagtccgttgctgctgttggcaaagccggtggagataaatggaagagcctttctgaagctgaaaagcgaccttatgttgataaggccgagaaacgaaaggtcgagtatgaaaagaacatgaaagcctacaataagagacaggctgagggtccccaagaagatgaggaggaatctgagaagtctgtatctgaagtgaatgatg

SEQ ID NO: 203476 - DNA, 324 bp, Gossypium hirsutum
  unsure (1)..(324): unsure at all n locations
tttaagctacatgatanggaacatagggaaattcaagagagatgtttgggtttttaactcaagggctgatttgcaaaccccgactgagatttcaatgaaagaacatagggagctttgtttgagacagcttttggggttagttagagaaggaaagatcaagccttttagatatgttgttgaagatcctgctaagtattttgctatttctgaggcggttgggagtattgatatatcacttggtatcaaatttggtgtccagtatagtctttggggaggttctgtgttgaacttatgcactaaaaaagcaccggataagtattttga

SEQ ID NO: 203477 - DNA, 351 bp, Gossypium hirsutum
gagaaaatcaattggccttggaggccatattatttgctaacaaatatttcatcaagaaaacaaagtaattgaaacaattgagagatttttcttaatcattcatggacatttccaatctttcataaagccctctttcacttggcactagcaagttgggttcggagcaacttagcggcagcaaccatgttgttgagtgccggtttcacctctgcatacttgcgagtcttgagtccacagtcagggttaacccacaagatgttggtctcgagcaccgcaagcatctttgtgatcctatcggcgatctcttcggtcgatggtattctttggagaagtgatataataaacaccagg

SEQ ID NO: 203478 - DNA, 305 bp, Gossypium hirsutum
tttccttacaagtttgtttttggtgtgggttatctatatggctagctcaatgtcccttaagcttgcatgtgtggcggtgttgtgcatggtggtgggtgcacccctggctcaaggggccgtaacctgtggtcaagtcacaagctccctcgcaccctgcattggttacttgacagggaatggtgctggtggcgttcccccaggttgctgcggcggcataaaatattttaacttcgccgcccaaacaacaccagaccggcaagcagcttgcaaatgcatcaaaagtgcggccgccggcatttcttgca

SEQ ID NO: 203479 - DNA, 326 bp, Gossypium hirsutum
gtgagttgacatctgctgctgatagccttcagttaaaacgtctagttgatcttactagtcgtgcccttgcacgaattattgagggaaaaagtcctgaggagatccgggagatatttcatttgcctgatgatcttactgaggaagaaaagttggagcctctgaagaacacaactgatgacccgcgcattcgactgttgaatagattgtatgcaaaaaagaggaaggaactaaaggagaggcagaaactaaagaacattgaggttgaagaagagcgtgttgatgatcgttcagttgatgatctcttgtcatttattaatggagacaat

SEQ ID NO: 203480 - DNA, 310 bp, Gossypium hirsutum
ttgttctgctagagaaactttgggatgatgtaggggccggacctcaaccggaacgtggccttggccggctgaagaagatcacaaccaccccacccttgtccaccaaagatggggcttcatcaatggcgatgccgacgagtcctactacacctgggacaccgtcgacgccggtgtcggctcgtagggacaacgtgtggaggagcgtgttcaatccaggtagcaaccttgcaaccaaaggtattggcgctgaagttttcgacaagcctcaacctaactcttctactgtttatgactggctttacagcgggga

SEQ ID NO: 203481 - DNA, 336 bp, Gossypium hirsutum
cttttaacaatgaccatttagccttcaacggtaaactctatctcatcttcgttatcggaaagattgttaatctcttcttcattcttgtctatttcctcctccgattctatttcaccattagggagtatcaccattgtgttgcgatttgggcgttggctcgctatgtgccctctcccttgacacttaaaacacttaatatcacgtgttcgggattgagtattttcaatggcccttcctttgctagattcggccacagacttgttggacttcatgggcaccacagtttcttttgattgattcgttgaaacattcttacttgcccccttgttccactta

SEQ ID NO: 203482 - DNA, 211 bp, Gossypium hirsutum
  unsure (1)..(211): unsure at all n locations
tgttctagaaatcttctttattctcatncttttttcactttagcgcggcgaaacagnatcgggggaggcagnctttcatcaatggcgaaagaaccagttcgcgtcctcgttactggagctgcaagacaaatcgggtatgctcttgtacccatgattgctaggggagtcatgttgggtgctgaccaacccgtgatccttcacatgcttgata

SEQ ID NO: 203483 - DNA, 282 bp, Gossypium hirsutum
gttgttttttcaatcttgattttccttttccttggctcggtagagcgtttcagttcaaagagccagccttgcacgtacggcaaatctaagatttgcaagcctgctctagccacagctgcattcagcaccatatctttcttgcttggtgccatcacttcagttgtttctggatttctcgggatgaaaatcgctacctatgcaaacgctagaaccaccctcgaggcaaggaagggagttggaaaggcatttataaccgcgtttagatctggtgctgtcatgggc

SEQ ID NO: 203484 - DNA, 250 bp, Gossypium hirsutum
  unsure (1)..(250): unsure at all n locations
ctgcggcggttgcaatatgtcccctgagatgaactttgcggancagaccacaaccgggacacttgttcttggcgtggcaccccggaaagtgcactttgatggagctgaaatggaaactggggctgaaaatggctgcaaatgtggagataactgcacttgcaacccttgcaattgtaaatgagaaaaaaaagctaagcatattattgaagctgatctaaataatatatgatgtatttgggtttttactatt

SEQ ID NO: 203485 - DNA, 333 bp, Gossypium hirsutum
cagcagtccaaattgatgtgtctgggagccggaaagctggtgttatccatgtcccgtaccgattgaggaaagcttttcgcaaggttcatgttaagcttgtgagggagcttgaaaagaagttcagtggaaaggatgtgattcttattgctacccggaggatattgaggcccccaaagaaaggttctgctgttcagaggcctcgcagccgcacattgactgctgtacatgaagcaatgctggaagatattgtcttacccgctgagattgttgggaagcgcactagatatgcaattgatggatcaaagttaatgaaggtgtttttggaccccaagg

SEQ ID NO: 203486 - DNA, 150 bp, Gossypium hirsutum
  unsure (1)..(150): unsure at all n locations
ttataacacaaccatattcttaacacacaataacattctttttataataacacacagtnacatatatattaaagaaaattgggtctaaaaatcacacaaaatttagaaccccatattttcccccctttcaacataaaattataacttctc

SEQ ID NO: 203487 - DNA, 272 bp, Gossypium hirsutum
  unsure (1)..(272): unsure at all n locations
ttggtgtgcaacaacaacagcgggtgaacaaattatctagcctcantcagccatctatgagttctaattctatgaatcganctggncgattgaaaaccctgaccccatcaaatctcgaagatctattttccactgagagctcttcaccccagtactctgatcaagcattggcagcagttgnnttctctccttcccataaatctgctgnnctcaatcaatttcagcagcagtcaagcatgctatcacccattaatacaagtttttctcctaaa

SEQ ID NO: 203488 - DNA, 330 bp, Gossypium hirsutum
  unsure (1)..(330): unsure at all n locations
gcacctcgttaaatcacgattaggttttcttgagtttctgcgaaattttgttcaaaatgcatttgacccttgaattcggtggaggcttagagcttttatgtaaatctgttaaatttcataatgtgaacgttgatctgccaaaaggagcagataagttaagcatgagggatttactagcctgggttcgtaccaatttgatcaaggagagacctgaaatgttcatgaaaggggagtctgtgagacctggtgttcttgtccttgtaaatgactgcgattgggagttgagtggccagcttgatactaccttagaagagaangatgtggtagttt

SEQ ID NO: 203489 - DNA, 259 bp, Gossypium hirsutum
aacaaaaccatacttcaaacaaaagggaattttcttgtcgggattgggtgaggaattcatcgatggcaaccaaaatgtatattgtatactattccatgtatggacatgtggaaaaactagcagaggagataaagaaaggggcggcatctgttgaaagtgttgaagcgaaactatggcaggtccctgagactctgtcagatgagattcttggaaagatgagtgcaccaccaaaaagtgatgtaccgatcattacaccaca

SEQ ID NO: 203490 - DNA, 639 bp, Gossypium hirsutum
attcaacaaagtcctgactatgcggaagagccagattttgaagctggattacaagactttacaacccggttagctaattacgaaaaggtttatgaaccagttgatgaagggtcttacatcaaaatgattgatatggctagtgggcatggtggacaaatacaagttaacaacatgagtggctatcttccaggacgaatcgtcttcttcttggttaatacacatttgacacctcgcccaatactacttaccaggcatggagagagtcgtgataatgttagaggcagaattggtggtgacagtgtattgagtgataccggagaaatttatatgaagaaactcgcaaactttgttgagaagcgactgaaatctgaaaggactgcttctatatggaccagcacccttcagagaacgattctgacagcaagtccaattgttggatttccaaagatacaatggcgtgcactagatgagataaatgctggagtatgtgatggaatgacttatgaagaaataaagaagaatatgccagaggaatatgaatcttgcaggaaagacaagcttagatatcggtttcctcgtggagaatcttacctggatgttatttcaaagcttgaacctgtaattatgagcttgaacgac

SEQ ID NO: 203491 - DNA, 313 bp, Gossypium hirsutum
ctgcttctaagcgttccggaagtggaaggtatgtgataggacggattgcattcacatacgaggaaaacgttgagataggaagcaagctgaaaaacatcatgatggtgggcgatggtatagggaaaactataatcacagggagcaaaatcttctgatgaggatccacaacgttcaattcagccaccgttgccgctgttggagatgggttcattgctcgtggcattacattcagaaacaccgatggacctactaaccatcatgcattggctctacattcaagcttcgatctctaggtgttctacaaattcaattt

SEQ ID NO: 203492 - DNA, 529 bp, Gossypium hirsutum
ttggattctattagcttcctcttagacatatataccggtagtcttttaatcttatttcatttcgttgatataaccgagagaaatcctccgattacgccattgtcacgcttttcttcactttctgtttcaactacgagcttctttgttggtgacttaatggcgatccgaagagctatgtctggtcgcatcatggatcggacggccgtcgttggtgcgcgatacatgtcatcgtggtggcgtagcgttcaacccgctcccaaggatcctattcttggtgttacggaggcttttttggccgatcaaagtcccgataaagttaatgttggagtcggtgcttaccgtgatgataatggaaagccagttgttttggaatgtgttagagaagccgagcgaaggattgctgggaatttgaacatggaatatcttcctatgggaggaagcgtgaagatggtggaagaaacactgaaattggcctatggtgagaattctgagttgataaaagaaaaaaggatagcagcaggtcaagctc

SEQ ID NO: 203493 - DNA, 431 bp, Gossypium hirsutum
aacaggaacccttcctattccaatctaccgcttgatgtgaggtggtggcttcagttgcagcctagctatggaccccaaaagggtttaacaaatgagcagttatatgccttggaggatgaagtggaaagtttgaaagctgaaataaagtctccctccaatgtaagtagagttcacccgcatgatgcacaagatgcttctggtgttgacagaaaaaagaacaatggaggttctcttgattcaactgagacggtgcgaaactatgaacttttggagatggaatctgttgaatgccatgtttccaaaaaaatcaatgactgctgttacgatccagagtctccttgggctggggatgggaaggcttgaccatggtggcgcacaacagataaagatgagcttgcctctttggttgcacagaagtcgttggatttcat

SEQ ID NO: 203494 - DNA, 596 bp, Gossypium hirsutum
gagaaatcggctttgacaacggacaccaaaggtctgaaatcagaaacatccaccattgacagcaaaacttcgaaaccagaagcttcccaaccagctcaggctggagcctccccttccaatatgggacctgggtttgtcccccccaatccgtttgatttctcagccatgagtggccttcttgaggatccaagcattaagacactagctgagcagatagcaaaagatccttcatataaccaaatggcagagcagctcactatgatgtttcaaggggcatcagccgaagagagtttgcctgagtttgaaccacagcagtactattcgaccatgcaacaggttatgcagaatccccagtttatgaccatggctgaacgccttggtaatgcattaatgcaggatcctgctacgtctagcatgcttgaaagtttgtccaatcctcagcaaaaagaccagattgaggaaagaatggcacgtatcaaagaggatccatcattgaaacatattctagaagaaatagagacaggtggtcccgcaaccatgatgaggtactggaatcataaagaagttctccagaagttgggtgaagcaatgggtct

SEQ ID NO: 203495 - DNA, 487 bp, Gossypium hirsutum
aaacagcggagcaggaaattgattcattaaatactgttcgaatcacaaaaagacagaatggaaacatgtcatttcttacataccgaaagcaaactttttttttcttatgatttgtactaaaaatgctgggaaaagaagaaacttaatatgaaatatacaacaaatacaacctcaaaacaaaaacagatatttttttaacaattgaagaaacacacaatcccatcagtatttttatgtgaacttgaatctcaagccttttctttttcttcatctgatttggagtgtttaccatgaagcttctccttgatcttctccagaattcccttcttttcctttgactccccttcgtgatggggctcagctgctgtggctggagctgtgctactggcctcttcagctttcttgtgaagtccagggagtttctccttgatcttctccaggggggaccccggtcccaattacccctatagtgagtcgcattacaatt

SEQ ID NO: 203496 - DNA, 369 bp, Gossypium hirsutum
ctctagtttatttctctgctgctttgatctcttcgtctaggtgtttcataaagggcaccaacaatggctcatcctcgttcacctttttgtgaagggaaatgcaaagggaggtgcaataaagcggcggtttgggatcggtgcttcaaatattgcggcatatgttgcgaggagtgtcaatgcgttccgtccggtacttacgggaacaaacactagtgtccttgctacagagataatgtgaacaacaagggcaaacccaaatgcccttgaaaatgaaatatattcgagttcgggatttaatcaagcttaaagatcgatgactaataggccatatatatatatatatgcatgtttatgatgatgttattataa

SEQ ID NO: 203497 - DNA, 413 bp, Gossypium hirsutum
tttataacatcaaggttcttgtagagtacagaaacaaagatcagatccatgttgaatgggccaaagctttgaaggaactgtatttaccgggtctgagggattatgtcaaaagccattatcctcttggcccggtatggagtgcttccggtaaaaaggcatctagtgctccgccaaaagctcctccaccaggggcccctgcacctcctacctctccacctgcttctcttttcagctcagaaccttctcagccttcttcatcaaatccaaaacaagggatgtcagctgttttccaagagattagtagtgggaatgtctctgcacgcctgaagaaggttactgctgatatgaagacaaagaaccgtacagatagaacaggtgttgttagtgccagtggaaaggaaacacgttcaagc

SEQ ID NO: 203498 - DNA, 472 bp, Gossypium hirsutum
gttttgttttgatggggcatttgaggtttctaagatgtagtattagctttttcaaattccaaattcattttcagaattcatcattttttaggtgatagaatcaagaggatacagggctcagtgactcagtcctgcagaaatgatgactgaagaagatgatctatatccatctagtgttaagatgagataccccattttcattttcttcaaggatgtcaaacatgttttcaaactggacgaactgggatcagagatagcacaaattgctttgcctgcggcactggctttgacagccgaccctattgcttctcttgttgacacagcattcattggccaaataggtgctgtggaactggctgctgtaggagtctctattgccttattcaatcaagtctcaagaattgcaatattcccccttgttagcgtcacgacctccttcgtggcccaggaagatacaattggaagagtgagc

SEQ ID NO: 203499 - DNA, 428 bp, Gossypium hirsutum
gttaatgataaatccaatgataagaattctgagagaatgttagctcatctggggatgagcaaatcgagtgatcctgataatgcaagtcaatgcagctcaatttaccatcacgagagaggttttagttctcattcaggagaagaagggagctccggaacggttcgaaagcagtcttcattgtcatatggaggactagtgacggcctctcccttagttggtctgccagaaatttcacatcttgggtggggtcactggtttactcttagggatctcgatcttgccacaaatcacttcggcagcaaagaatgtccttgaaaagggtggatatggggtggttaacaaggttagactgacaatggaacctgagtagccgttaagaaaattcttaataatctgggacaagctgaaaaagaatttagggtggaagt

SEQ ID NO: 203500 - DNA, 528 bp, Gossypium hirsutum
  unsure (1)..(528): unsure at all n locations
ctcttgtttctaactttgctgctttgttctcttcttctatgttcttcagtttttgcaccaacaatggctcagcctcgttcacctttttgtgaagggaaatgcaaagggaggtgcaataaagcggcggtttgggatcggtgcttcaaatattgcggcatatgttgcgaggagtgtcaatgcgttccgtccggtacttacgggaacaaacacgagtgtccttgctacagagataaggtgaacaacaagggcaaacccaaatgcccttgaaaatgaaatatattcgagttcgggatttaatcaagcttaaagatcgaggacgaagaggccatatatatatatatatgcatgttgatgatgatgttattataaaaataaacttgttttgttgctgttattttcctttgggtttttgtgttggtagtgttgaataatatttcccttatattttccctctcaccgccgtgtccaccgncatgcacacatngttttgtgtcttttgatcatgggtggtggtgatgatggtgaaaa

SEQ ID NO: 203501 - DNA, 309 bp, Gossypium hirsutum
  unsure (1)..(309): unsure at all n locations
tttttgttttttttttttttttttttttttttttttttgtnttgtttttattgtttgtttgtttttttgaaattgaatttttttaaaaaaatccccttaattttccattgcctcattttcataatcttcatcattggcatttgcaacagcattttgatattgctgatactccgaaaccagatcattcatgttactttccgcttctgtaaactccattttatccattccttcccctgtttaccagtgcaaaaacccctttttacggaacataacggggaatttttccgaaacaccccggaacatcttttg

SEQ ID NO: 203502 - DNA, 433 bp, Gossypium hirsutum
  unsure (1)..(433): unsure at all n locations
atctcagttatggatggacattccaaaatccaacctaggcggcacgatttccccgaaccgttgctcattgaggttgatcagatctaccatcttgcttgcccggcttcgccaatcttttacaaatacaatcctgttaagacaatatagacgaatgtgatcggtacattgaacatgttgggtctggcaaagcgtgtcggatcaaggattttacttacctcaacttcagaggtntatggagatccctntgaacatccccagaccgagagctattggngaaaatgtaaccctatcggagttcgaagctgctacgatgagggaaaaacgagtggctgaaactttgatgttcgattaccataggcagcatggcatatagattcgaaattgctcgatcttcaacacttatggaccacgcatgaacattgatgatggtcgt

SEQ ID NO: 203503 - DNA, 525 bp, Gossypium hirsutum
gtgggtttagtaacaaataaagctctgaagcccatcaacaataaaatttctggttttatgcttttgtatcttgccagaggaaattaatggtggatttagctgaccagcagcacagttgatgtttttatagtttctaatacaagcaatcttcttctgaagatatatctcatatgactatcgttgtttcttatacatctcttgaataaagaaagggctactttttgttctgcaagaatggagaggtacaagttactcagggaagttggtgacgggacatttggttgtgtgtggagagctattaataagctgtctggtgaagttgttgcaattaaaaaaatgaagaagaaatattgctcgtgggaagagtgtgtgaatctgagagaagttaagtctctgacgagaatgaatcatcccaatattgtgaagcttaaggaagtcatcaaggaaaataatgttctgtactttgggtttgaatatatggaatgcaatctttaccagcttatgaaagacagaaaaaagcatttt

SEQ ID NO: 203504 - DNA, 533 bp, Gossypium hirsutum
  unsure (1)..(533): unsure at all n locations
aatccccaggttaaggaaatccgatgcattgccatgccaccgcaatggggtactcatcagcaagtcaatcttccatcagctcttcctgaacatgatttcttgaatgatctggagcctttgggatggctccacacacagccaaatgagcttcctcaattatcgccacaggatgtgacatcccattctcggatattagagaataacaaacagtgggatggagagaagtgcataatcttgacatgcagtttcactcccggttcttgctcattaacagcctacaagcttaccccaagtggttatgagtggggacgggttaacaaagattcaagaagcaaccctcatggttaccctccaacgcattatgagaaagtgcaaatgctcctaaatgatcgggtccttgggatttatatgatacctgacaatggtccgtggaattacaanttcatgggagtgaggcatacagtgagcatgaaatacggggtgaaactggggacaccgaaagagtactacaatgaggagcataggccgacaca

SEQ ID NO: 203505 - DNA, 312 bp, Gossypium hirsutum
ggcttgcttatgagcatggtcttgccaggtgtggtggggtttaaactattaggaaagttgagggatggtgtgacagctaccgatttagtgttgacagttactcaaatgctgaggaagcatggggttgttggcaagtttgtcgaattctatggggaaggcatgagtgaattgtcattagcagaccgtgcaactattgccaacatgtctcctgagtatggtgcaaccatggggtttttccctgtggatcatgtcaccctgcaatatctgcaattgactggcaggagtgaggagactattgcaatgatagaatct

SEQ ID NO: 203506 - DNA, 604 bp, Gossypium hirsutum
catggctttttcaccaaaactcttctctatgtgtatgctcttcctttttgccctcttctccatgcaaatccatgctagagagtacttcagcaaattcccaagagttaacatcaatgagaaagagacaacaaccagagagcaaaagcacgagaccttcgttccccagaccacccaaaagccagaagaacaagagccaaggttcattcctgaaacccaaaatggttatggcctttacggccacgagtcaggctcaggctcaggctcaggctcaggctcaagccggcccagtttcaccaccaaagaaacctatgaaccctatgtcacccctgttagattccaccctgatgagccctataacagcatccccgaatccttcaacaataaagacacttactactacaacaagaatgcctacgagtccactaagcagcaaaacttgggcgaggccattttcaccgagaaaggatggagcaccaaggaaaaccagaacaacaactactacaacggcaacaatggttacaacaatggcgagaagcaaggcatgagcgatactaagtacttggagaatggaaagtactactatgacgtcaagagtgagaacaac

SEQ ID NO: 203507 - DNA, 573 bp, Gossypium hirsutum
  unsure (1)..(573): unsure at all n locations
ccttcactggtttagaaccagtgggaagttcctgcagaagcaaatcagcaaatgggatccttctctttttcttcatcactttcaaatggattttcctgacgggttatttagtgccggaggaaagtcagacatagaaggcatattccctcctccatactttgaatggttccaattcaacaaggaattcacagagtacacaaaccttgaggaatgcatctctcacttgtgtcaatatatcacccacaatggcccttttcatggattgctcggcttttcccagggtgcaactcttggtgctcttctattgngctacaaggcacaggggaaggtgttaaaggagcatccacctttcaaaatgtttgtatcaatatcaggatcaaaattcagagagccaagcatatgcgaggtggcttacaaagacaaaatcgatgtgaaatcagttcacttcatcggagctaaggattggttaaagttgccttcngaggatttggctactgctttccatgatcctcttatcataaagcacccccaaggtcatactgtcccacgtttggatgaggtatccatagagca

SEQ ID NO: 203508 - DNA, 386 bp, Gossypium hirsutum
gcagatttttgtgaagacacttactgggaagaccatcggcctggtagttgagagctctgacccaatcaataatgttaaggccaaaattcaagataaggaaggtatccctccagaccagcaaaggctgatatttgctggaaagcagctagaggatgggaggacccttgcagattacaacatccagaaggagtccaccctccacttggttctccgtctccgtggcgggatgcatattttcgtgaagaccctgactggaaagaccatcaccctggaaagtgagagctcagacacgattgataatgttaaggccaagatccaggataaggaatgaattccttcagaccagcataggctgatttttgctgggaagcaacttgaagatggga

SEQ ID NO: 203509 - DNA, 344 bp, Gossypium hirsutum
aacaaatacactttaagcaaaggcatttgctcttttatctgaggagggaattgctaaaggagttcgaaggataactgctgtcaccactgagagtgctttgaaggcaatggaattgggtggcctgcttttgaaggaagtagatgatgcttccaatatggaagtaagcttgctggaaaagaaagtggcttctctaaaaactactgtggattctgcatcaattcctgctgcccagaaagctgatattagggccaaaattgcacaacttcagaatcaactgaaaaaagcacaaaagaagattgctgaacaaaatatgcagagagctgtcgcgacagcaaccgaattgg

SEQ ID NO: 203510 - DNA, 392 bp, Gossypium hirsutum
  unsure (1)..(392): unsure at all n locations
ctgaagctttctgactggcaagattttgttggcattatgggctctttttattaggaatgcagcaataagtttcatacaagagaacaatgctggcaatgcagctgctgctttaatggctcgtcttgctcctaaagctaaggtttttcgagatgggaagtggtctgaagaagaggcctctattcttgttccaggtgatatcatcagcattaaactcggtgacattattccagcagatgctcgactcctcgatggtgatccactcanaatcgatcagtcttcattaactggtgagtctttttcggtaacgaaaggccctggtgacagtatttactcgggttctacatgcaaacaaggagagattgaagctgtcgtgatcgccaccggtgttcata

SEQ ID NO: 203511 - DNA, 413 bp, Gossypium hirsutum
cgcggactataacttcatcaaaaaccacacggaacctgggcatgctttcaatggcgaacgctggacccggaacaaacggatctcaattcttcatctgcacgaccaagacggagtggctggacggaaagcacgtggtgttcggacaggtagttgaaggcatggatgtggttaaagcgattgagaaggtggggtctagcggtgggaggacttccaagcctgttgttattgctgactgtggacagctttgaaaaagggcttattgaattgtgtttccttcataatatctggtctttttaggctccttttttttatgctatgctgcttctatggctactgggttttggtgttttttaagaagttgcttgatgtagctttttcattaactgccataaataagataggctttaattttc

SEQ ID NO: 203512 - DNA, 296 bp, Gossypium hirsutum
tctttgcataatatatcttataaccgacctactattttgctggcttaaagtgtaaagggagaggaagaaattccgcatggtacagttgctgagttgacccctgacatgccagatgttttgccacatgtttctgtccgagcaacaaattgcaaggtgcgctttgctacttgatgcgatcctaatagtctggctgacctacaagcggacttagggaaactgttgcacctatgaccttcatctgcagatgtagatgatagagaggagaatgaaggcgagctagttgatggaagttcaag

SEQ ID NO: 203513 - DNA, 467 bp, Gossypium hirsutum
aagaaattaaagttccaatcatgaagcttgacaccagcggactagaatcggctgctcctgtctggggtgctcccagtgaacttgttgacgggttttcggctgctccgtcgttcgatctcccaaacactactgattttgatgggtttcaaaaagaagctatccagatggtaaaacctgctaagggtaccaccacgctagctttcatctttaaggaaggggtcatggttgccgctgattctagagctagcatgggaggctatatctcttcacaatcagtgaagaaaattattgaaatcaatccttacatgcttggaacaatggctggaggagctgctgactgccagttttggcaacataaattaggcatcaagtgccggctgcatgaattagcaaacaagcgtagaatttcagttacaggggcatcaaaactgttggcaaacattctctattcttaccgaggaatggga

SEQ ID NO: 203514 - DNA, 459 bp, Gossypium hirsutum
  unsure (1)..(459): unsure at all n locations
ctcgtgccgcgttattccaaaaagcagagaaaagaacgttaaggaggaaagatgttgggaatagtaaggcaaaaaatgttagggcagtcattgctgaagattcgtcctgcaatatcggtgttacgaagttactcatcagcagcaaaacagatgacagtgagagaggcattgaactctgctcttgatgaggaaatgtcagctgatccgaaagtctttttaatgggtgaagaggttggagaatatcagggtgcatacaagatatccaaggggcttttggagaagtatggacctgagagggttcttgatactccaattactgaggctggttttgctgggattggggttggtgcggcttactatggtctgaagcccgtagttgaatttatgacatttaacttctccatgcangcgattgaccacattattaactctgctgcaaagtccaactacttgtctgct

SEQ ID NO: 203515 - DNA, 305 bp, Gossypium hirsutum
cttcagtgtacggaagcaaatatcatataaagcttcatggtggattccatacattgatgggcattctcaacaagctggtgaacagagagagtagcattgtaaggttcgacaacagtgtcagacaccttatgggaagggaacacagagaaagtgagcatcattcggtctgggtattcttctcggatcttggaaatcaaaagtgtttccatgcccgatccagatacttctaccaatgaatggcatacttgtaatccttgcaagcagtcacagttttcggcttctttcgtaccacatctagcactgat

SEQ ID NO: 203516 - DNA, 422 bp, Gossypium hirsutum
agatattttaagggccaaagaatacccctgaaaaggccgatgttttggaacagcagtgtgggcaggaagttatgatgcttgctacactgaagcatccaaatattgttcgatttattggggcttgtcgcaaaccaatggtttggtgcattgtgacagagtatgcaaagggtggctcagttcgacagtttctaacaaggaggcagaatcgtgctgtgcctttgaaattggcagttaagcaggcattggatgttgcaagagggatggcctatgtgcatggacttgggtttattcacagggatttgaaatcggataatcttctaatagctgctgatagatcaataaagaatgcagaatttggagttgcacgtattgaggtgcagactgagggcatgactccagagactgtgacataccgttggatg

SEQ ID NO: 203517 - DNA, 411 bp, Gossypium hirsutum
ggcttgccgatctagaagcgtagccggatgccctcgggctagttcgacacgaggctagaagttctagctcgtattgacactaatttcactgggacagacaacgcaactgatgacgacgagtccggtgaattgcatactttcaaatggacaacccttctaattcctgcaactactgtcttaatcatcaatttagtcggtgtcgttgccggcatctcagatgccataaacaatggataccaatcatggcgacctctttttgggaagctcttcttctctatctgggtgattgtccatctctatccattccttaaaggtttaatggggagacataacaggacaccaaccattgttgttatatggtcagtgctattggcttgaatcttctccttgctttgggtccgaattgatcca

SEQ ID NO: 203518 - DNA, 370 bp, Gossypium hirsutum
cttctgattcctttattgctttgtagaatatttcttaagcgaggatgagagagtgcattgcgatccacatcggtcatgccggtatccaggtcggaaacgcttgctgggagctttactgtctcgagcatggaatccagcctgatggtcagatgccaagtgacaaaactgtcggacgaggtgatgatgcttttaacacctttttcagtgaaactggtgctgggaagcacgtgcctcgtgccgtcttcgtggatcttgaacccactgttattgatgaagtgagaactggtgcttaccgtcagctctttcacccataacatcggatcagcggcaaggatgactcagctaacaactttgtccgtgggcactacac

SEQ ID NO: 203519 - DNA, 238 bp, Gossypium hirsutum
ataaaatggatgggcttgatcccaaattcaacattgtttcccctggtgctgatatggatatatactttccttacaccgaatagaagcggaggttgaaacatttccatactgagatcgaataccttctttacagcaaagttgagaatgaagaacacttatgtgtgctcaatgaccggaacaagccaattctgatcacaatggcaaggctttaatcgtgtcaagaacttaacccggactt

SEQ ID NO: 203520 - DNA, 508 bp, Gossypium hirsutum
acgagagccacactgctttcactcttcctggtctctaccgtgttgtacatggtatcgatgtgtttgatcccaaattcaacattgtttcccctggtgctgatatggagatatacttcccttacaccgaagagaagcggaggttgaagcatttccatactgagatcgaagaccttctttacagcaaagttgagaatgaagaacacttatgtgtgctcaatgaccgcaacaagccaattctgttcacaatggcaaggcttgatcgtgtcaagaacttaaccggactcgtcgagtggtacggcaagaacgcaaagttgcgtgagttggctaacctcgtagttgtaggtggtgataggcgaaaggaatctaaagatttggaagagaaggccgaaatgaagaaaatgtttgagctgatcgagaagtacaacttgaacggccaattcaaatggatatcatctcaaatgaacagaatccgaaatggtgaactttaccgatacatttgcgacacgaa

SEQ ID NO: 203521 - DNA, 430 bp, Gossypium hirsutum
ggtgccgttgctgattagttcatcagcttgattgaatctgacgcctattatgttcgcctgcaccgatctgttgctgtaaaaagaaatggataatttaatttctcttgtgaacaagattcaaagagcttgcaccgctcttggtgaccatggagaagcaagtgcattgccgactctttgggactcattacctgcgattgccgttgtcggcggtcagagttcagggaagtcttcggtgctcgaaagcattgtcggaaaagattttttaccccgtggatcaggaattgttacccggagacctctggtgttgcagcttcataagagtgatgaaggaagcagagaatacgctgaatttcttcaccttccaagaaaaagatttaccgatttcgctgccgtcaggaaagagattcaagatgagacggatagagaaact

SEQ ID NO: 203522 - DNA, 244 bp, Gossypium hirsutum
cagaatcacttttctttcactcttcctactctgggccgggttttacatactatcgatccctttaatcccaaattcaacattcttaaccctgcctctaatacccacatatacttaccttacacctaacataatcccatatttaaccatttccatacttatatccaacaccttctatacatcaaatttgataatgaacaacacttatgtccactcaatgaccgcaacatgccaattttctcacaat

SEQ ID NO: 203523 - DNA, 265 bp, Gossypium hirsutum
tgatcttgttgtcattcatggccatgaagagggtagggctctgaagaacttggatggtcaagtttgtgagatttgtggtgatgaaattgggttgacggtcgatggagatcttttcgtggcctgcaacgagtgtggttttccagtttgtaggccttgtattagtatgaaaggagagaatggagtcaacaatgtcctcaatgcaaaactagatacaagcgtctcaaagggagtcctatggtggagggagatgaagatgaagaggatg

SEQ ID NO: 203524 - DNA, 378 bp, Gossypium hirsutum
tatgcaggctatgttgggttcttggagcaaaaatgctgggggggtaaagcacaatgggttgtgagcttgcacaaagagttggcattaatgaaattgcagaaagcatgatggctttcaacaccaactataaagatactggtctttttggtgtctatgctgttgccaagcctgattgtttggatgatttggcctatgctattatgtatgagacaacccagctagcttatcgtgtttcagaagctgatgtcattcgtgctcgtaatcagtttaagtcatccttgatgcttcatatggatggaactagtcctgttgctgaggatattggccgtcagctacttacgtaccgtcggagaattccatttgctgaattatttgcta

SEQ ID NO: 203525 - DNA, 470 bp, Gossypium hirsutum
agcagtttggttgggtttttttgttttggttttgcttagtgtgaacagtgaagggtcgaggcacggcggtgaactgagccatagtgatgttttacggcagcaagaagcggacagggtggtggagcttccaggacaaccggcggtggagttcaagcaatatgcagggtacgtgacggtgaacgagagtcatggtcgagccctgttttattggttctttgaagccaccagcaaacctgagaaaaagcccctcttactatggctcaatggaggtcctggatgttcatccattggatatggagaagcagaggagttgggacctttcttcactcagaaagatgaacaaaccctaaagcttaatccacataggtgggataaagctgccaacttattggttcttgaatctccggttggtgttgggttttcttataccaacacaagcagtgatatccatcaactgggtgataaaatca

SEQ ID NO: 203526 - DNA, 446 bp, Gossypium hirsutum
atcagggaggcttctcagaccaccatgaagggaattctgggttacgtagatgaagatttggtctcaaccgactttgtcggagacagcaggtcaagcatttttgatgctaaggccggaatcgcattgaatgacaactttactaagcttgttgcgtggtatgataatgagtggggttatagttctcgagtgatcgacttggttcgacacatggcttcttgctaagtgagtgaagttttagcttctaacttcagctttggcaagcaatttagaaactagaagagatattcctgtcttttgggtgttggtcatgcagataatagaaattgtatgcaacatttttttttcgtgtgaacactcttcttttgagtggattggaagggtttctattttgactcccttcatccattttatgacaataataattgcaagatcaactgaaaaaatat

SEQ ID NO: 203527 - DNA, 276 bp, Gossypium hirsutum
ttgcaagctttcagaggaaggtgggtgatgtcttatacaaggttgctgacattcctttcttaagcaaatacaagcatcaaattctcgatcttattgagcatgctgaaacacagccgaacctcaccattggtgtcttggtctctattgtggtgattattctcacgattttcttcaagctcatttttggtgggaagaaacagccaagagtatagaagaaaccagaagttgctaaaacatcaaatggtgaaagaagcagtggataaaaagcttaagaag

SEQ ID NO: 203528 - DNA, 333 bp, Gossypium hirsutum
gccaggattcagatattatccatctgggataaggccgagattatcaaggtcagcgatgttgagctagagttcctcaccggtagcaacaaaatcgacgatgaaactgctatgaaactttggcgccccaacttgacactactcttgatcaccctcggtgaaaagggtagcatgtattataccaagtacttccatgggtcagtggatgcattccatgtgaatacagtggatacaactggcgccggggactcttttgttggtgctttactatgcaagatcgtggaagacccaaccatacttgagaatgaatcgaaattgacggaggtactgaaattc

SEQ ID NO: 203529 - DNA, 572 bp, Gossypium hirsutum
  unsure (1)..(572): unsure at all n locations
cttgattcttattctcaggtttgatattcaaatggcggatattagcaatggttccaaagggtttgcagtgaaacaaggagaaccaactagggtccttcctgcagaagagacaaagaagggtctttattacctgggaaaccttgaccaaaacattgcagtcataattcgaaccatttacttctttcagtcagagtctaaagggaatgaagatgctgccgaacaagttaaaaatggtttgtcaaagattcttgttcatcattatccacttgctgggcgactaaccatcagctccgaagggaagctcatagtggactgcaccggggagggggctgtttttgtggaggctgaagctaattgtgggattgaagagatgggggacataacaaagcctgaccctaacattcttggaaagttggtttatgaaatctctggtgctcagaacttgctaaagatacctcttttggtgattcaagtgactaaatttaagtgtggaggattttctattgggatgagcatgaaccactgtatgctngatgggattgctgctatggaatttgtgaatggatggggtg

SEQ ID NO: 203530 - DNA, 350 bp, Gossypium hirsutum
gctcctcttagtttccctttttgtcccttgtttatttggtactcccccctcatggctgccgctgatgtcgagttccggtgcttcgtcggagggctcgcatgggccaccgacgaccgggcccttgaagaagccttcagtgcgtttggtgaaatcgtcgaatcgaagatcattaatgatcgtgagactggaagatcccgaggctttggattcgttactttccgtgacgagaaagctatgagggacgcgatcgaaggaatgaacggtcaaaatcttgatggaaggaacataactgtcaacgaagcccaatcgcgcagaagtggaggcggtggcggaggatttggaggaggaaa

SEQ ID NO: 203531 - DNA, 309 bp, Gossypium hirsutum
gccgattctgccatgcttgcaggctttcagaggaaggtttgtgatgtcttatacaaggttgctgacattcctttcttaagcaaatacaagcatcaaattctcgatcttattgagcatgctgagacacagccgaacctcaccattggtgtcttggtctctattgtggtgattattctcacgattttcttcaagctcatttttggtgggaagaaacagccaagagtagagaagaaaccagaggttgctaaaacatcaaatggtgaaggaagcagtggagaaaaagctgaagaggcggagacagaagaagct

SEQ ID NO: 203532 - DNA, 525 bp, Gossypium hirsutum
atctgttgaaattttcctaagcaggcattgccctctatggtatggctttggaggtggtcgtcttaaatggcttcaaagactagcatatataaacaccattgtctatcctttcacatcccttccactcattgcctattgttcactaccagcaatctgtcttctcacaggaaaatttatcataccaacgctctcaaacctggcaagtgttctctttcttggccttttcctttccattatcgtgactgctgttctcgagctccgatggagtggtgtcagcattgaggacttatggcgtaacgagcagttttgggtcatcggtggcgtttcagcccatctctttgccgtcttccaaggtttccttaagatgcttgcgggcattgacaccaactttactgtcactgccaaagcagctgatgatgcagattttggtgagctctacattgtgaaatggactacacttctaatccctccaacaacactcctcatcgtcaacatggttggtgtcgttgccggattctccgatgc

SEQ ID NO: 203533 - DNA, 488 bp, Gossypium hirsutum
gtatattgaaattttctttctcgattttctctttagcgagggaagatgcagatcttcgtcaagactctaaccggcaagacgatcactctcgaggtcgagagctccgacacgatcgacaacgtgaagaccaaaatccaagataaggaaggcatccctccagaccagcagcgtctgatcttcgccggaaaacagcttgaggacggccggaccttggccgattacaacatccaaaaggagtcaactctgcacctcgtcctccgtttgcgcggtgggatgcaaatcttcgtgaaaaccttgaccggcaagacaatcactctcgaggtcgagagctccgacacgatcgacaacgttaaggcgaagatccaagacaaggaaggcattcccccagaccagcaacgtctcatcttcgccggaaaacaacttgaagacggccgtaccttggccgactacaacatccagaaggagtcaacgctccatcttgtccttcg

SEQ ID NO: 203534 - DNA, 538 bp, Gossypium hirsutum
caagcattttccttacaagtttgtttttcttgtgattaatcgatatggctagctcaatgtcccttaagcttgcatgtgtggcggtgttgtgcatggtggtgggtgcacccctggctcaaggggccgtaacctgtggtcaagtcacaagctccctcgcaccctgcattggttacttgacagggaatggtgctggtggcgttcccccaggttgctgcggcggcataaaatctctcaactgcggcgcccaaacaacaccagaccggcaagcagcttgcaaatgcatcaaaagtgcggacgccggcatttctggcatcaactatggtattgcaagcggactcccaggcaagtgcggtgtcaacatcccttacaagatcagccctagcactgactgcaacagcgtcaagtgaagttttggcatggaaagttcaccagctagtggaagccaaaataacgatagctacagaataaatatggatgttaaaattccaaagttgtgggttgtgtactatgcctgtttatgcgactacgtaatattaac

SEQ ID NO: 203535 - DNA, 394 bp, Gossypium hirsutum
atcagggttgcttctcagaccaccatgaagggaattctgcgttacgtagatgaagatttggtctcaaccgactttgtcggagacagcaggtcaagcatttttgatgctaaggccggaatcgcattgaatgacaactttactaagcttgttgcgtggtatgataatgagtggggttatagttctcgagtgatcgacttggttcgacacatggcttcttgctaagtgagtgaagttttagcttctaacttcagctttggcaagcaatttagaaactagaagagatattcctgtcttttgggtgttggtcatgcagattatagaaattgtatgcaacatttttttttcgtgtgaacactacttctttgagtggattgtaagggtttctattttgact

SEQ ID NO: 203536 - DNA, 509 bp, Gossypium hirsutum
attcaacaaagtcctgactatgcggaagagccagattttgaagctggattacaagactttacaacccggttagctaattacgaaaaggtttatgaaccagttgatgaagggtcttacatcaaaatgattgatatggctagtgggcatggtggacaaatacaagttaacaacatgagtggctatcttccaggacgaatcgtcttcttcttggttaatacacatttgacacctcgcccaatactacttaccaggcatggagagagtcgtgataatgttagaggcagaattggtggtgacagtgtattgagtgataccggagaaatttatatgaagaaactcgcaaactttgttgagaagcgactgaaatctgaaaggactgcttctatatggaccagcacccttcagagaacgattctgacagcaagtccaattgttggatttccaaagatacaatggcgtgcactagatgagataaatgctggagtatgtgatggaatgacttatgaaga

SEQ ID NO: 203537 - DNA, 409 bp, Gossypium hirsutum
ctgcttcgaagcggtccggaagtggaaggtatgtgatagacgttaaggcaggcacatacaaggaaaacgttgagataggaagcaagctgaaaaacatcatgatggtgggcgatggtatagggaaaactataatcacagggagcaaaagcgtcggaggaggatccacaacgttcaattcagccaccgttgccgttgttggagatgggttcattgctcgtggcattacgttcagaaacaccgctggtcctactaaccatcaggcagtggctctacgttcaggctccgatctctcggtgttctacaaatgcagcttcgaaaggtaccaagacactctttacgtccattccgaaaggcaattttacagagaatgtgacatctacgggaccgttgaatggatattcggcaacgc

SEQ ID NO: 203538 - DNA, 426 bp, Gossypium hirsutum
ggttcctctacggcggcgtatttagctcgaagggcggggcaaaaggagagggttcggatcctctaccgccgtgccctgaaagacacactcaactgggccgtccatcgccacctcttctatcaagatgcttctgaccttcgcgagaaattcgaagccaacaagcatgtggaagatcttgatacaatcgacaaaatgatagatgcaggtgaagcaacttataataagtggcggcatcccgatccttatatcgttccttgggctcctggtggttccaagtttactcgaaaccctgtcccaccttctgggatcgagatcgtgtatgattatggtcgagaagaaaatgactaagacatccatcttttcaacttcctcagaaataaagttgatgcatgtctaaaggatcgttgagtgtgtaacgagtggtct

SEQ ID NO: 203539 - DNA, 547 bp, Gossypium hirsutum
ttggattcgatttgcttcctcttagacatatatacccttactcttttaatcttatttcatttcgttgatataaccgagagaaatcctccgattacgccattgtcacgcttttcttcactttctgtttcaactacgagcttctttgttggtgacttaatggcgatccgaagagctatgtctggtcgcatcatggatcggacggccgtcgttggtgcgcgatacatgtcatcgtggtggcgtagcgttcaacccgctcccaaggatcctattcttggtgttacggaggcttttttggccgatcaaagtcccgataaagttaatgttggagtcggtgcttaccgtgatgataatggaaagccagttgttttggaatgtgttagagaagccgagcgaaggattgctgggaatttgaacatggaatatcttcctatgggaggaagcgtgaagatggtggaagaaacactgaagttggcctatggtgagaattctgagttgataaaagaaaaaaggatagcagcagttcaagctctgtctgggactggtgcat

SEQ ID NO: 203540 - DNA, 531 bp, Gossypium hirsutum
aacaggaacccttcctattccaatctaccgcttgatatgaggtggtggcttcagttgcagcctagctatggaccccaaaagggtttaacaaatgagcagttatatgccttggaggatgaagtggaaagtttgaaagctgaaataaagtctccctccaatgtaagtagagttcacccgcatgatgcacaagatgcttctggtgttgacagaaaaaagaacaatggaggttctcttgattcaactgagacggtgcgaaactatgaacttttggagatggaatctgttgaatgccatgtttccaaaaaaatcaatgactgctgttacgatccagagtctccttgggctggggatgggaaggctgagccatggtggcgcacaacagataaagatgagcttgcctctttggttgcacagaagtcgttggatttcattgagaattgtgatcttcccccacctcagaagatgcatgtaagaaggtactcgtgtgcatcttccggttcttatggcggtaatgaaagtgtctctttgggt

SEQ ID NO: 203541 - DNA, 599 bp, Gossypium hirsutum; identical to SEQ ID NO: 190329

SEQ ID NO: 203542 - DNA, 569 bp, Gossypium hirsutum
aaaccatttatttttcttcagctctaagcgacaagaacaatggctgacttcaagaaagccactgctttgattctcacagtggctttgcttgtgaatctcgctttaatggttgatgctgatggtgatgatgataagaagattcgagtcaggaaacataagggtgagaaggagtgtatacaagggtgggaatgttcctactggtcgaaatattgttgcaaccaaacgatttcagatgtcttccaggtttatcaatttgaggacctgtttgctaaaaggaattcgccggtggctcatgctgttggattttgggattaccattcttttattttggctgcttccatttatgagcctttgggttttgggactactggtggtaagcatatgcaaatgaaggaagtcgcggcttttcttgctcatgtcggcgccaagacatcttgtggagatggtgtcatagacggaagaccgttggcttgtggtctttgcttcaagagagaaatgagtcctaaccaggattactgtgatgattactacaaatacatgtatccatgtgcccctggagctcaatacta

SEQ ID NO: 203543 - DNA, 658 bp, Gossypium hirsutum
gtcatctgagtgtggcccctggagcaaaactggtggacttggtgatgtcctcggtggacttcctcccgcaatggctgccaaaggacaccgtgttatgacagtgtgtcctcgctatgatcagtacaaggatgcatgggatacaagtgtgttagttgatctaaaagtcggagacaaagttgtaactgttcggttcttccactgctacaaacgtggagttgatcgtgtctttgtcgatcaccccatgttccttgagaaggtatggggcaaaacagcatccaaaatctatggccccagagcaggtttggactacgaagacaatcaactgcggttcagcttgttatgccaggctgctttggaggcacctagagttctaaatttaaatagcagtaaaaatttctcaggaccatatggggaagatgttgtctttattgcaaatgattggcacagtgctcttcttccatgctatttaaaaagcatgtaccagtcaaggggtatctacatgaatgcaaaggttgtattttgcatccacaacatagcctatcaaggaagatttgcctttgcagatttcaaacgtctcaatttgcctgaacggttcaagagttcattcgatttcattgatgggtataacaagcccgtcaagggaaggaaaataattgga

SEQ ID NO: 203544 - DNA, 425 bp, Gossypium hirsutum
tctagaaccacgtggatccgcaggaattcaggactagtttacgaggatatatgagattggcccccggagcaaaacagggggacagggggaaattctaagaggactccctcccgcaatggctgccaaaggacaccgcgatatgacagtgtgtcctcactatgatcagtacaaggatacatgggatacaagtgtgttaattgatctaaaaatcggagacaaagttgtaactgttcagctcttccactgctacaaacgtgcaatacatcgtatctttgtcgaacaccccatgttccttgagaaaggatggggcaaaacagcattcaaaatctatggccccagagcaagtttggactacgaagacaatcaactgcagttcaaattgttaatccaaactgaatttgaagcacctagaaatctaaatttaa

SEQ ID NO: 203545 - DNA, 434 bp, Gossypium hirsutum
tttataacaacaaggttcttgtagagtacagaggcaaagatcagatccatgttgaatgggccaaagctttgaaggaactgtatttaccgggtctgagggattatgtcaaaagccattatcctcttggcccggtatggagtgcttccggtaaaaaggcatctagtgctccgccaaaagctcctccaccaggggcccctgcacctcctacctctccacctgcttctcttttcagctcagaaccttctcagccttcttcatcaaatccaaaacaagggatgtcagctgttttccaagaaattagtagtgggaatgtctctgcaggcctgaagaaggttactgctgatatgaagacaaagaaccgtacagatagaacaggtgttgttagtgccagtggaaaggaaacacgttcaagctccccttctttctcaaaagcc

SEQ ID NO: 203546 - DNA, 556 bp, Gossypium hirsutum
gttttgttttgatggggcatttgaggtttctaagatgtagtattagctttttcaaattccaaattcattttcagaattcatcattttttaggtgatagaatcaagaggatacagggctcagtgactcagtcctgcagaaatgatgactgaagaagatgatctatatccatctagtgttaagatgagataccccattttcattttcttcaaggatgtcagacatgttttcaaactggacgaactgggatcagagatagcacaaattgctttgcctgcggcactggctttgacagccgaccctattgcttctcttgttgacacagcattcattggccaaataggtgctgtggaactggctgctgtaggagtctctattgccttattcaatcaagtctcaagaattgcaatattcccccttgttagcgtcacgacctccttcgtggccgaagaagatacaattggaagagtgagctctgaagcacaaggaagtgattacgtggaaacaagttcctgtgtagatactgaaagcaatgaagttataccacaaaaagaatgt

SEQ ID NO: 203547 - DNA, 520 bp, Gossypium hirsutum
  unsure (1)..(520): unsure at all n locations
ctcttgtttctaactttgctgctttgttctcttcttctatgttcttcagtttttgcaccaacaatggctcagcctcgttcacctttttgtgaagggaaatgcaaagggaggtgcaataaagcggcggtttgggatcggtgcttcaaatattgcggcatatgttgcgaggagtgtcaatgcgttccgtccggtacttacgggaacaaacacgagtgtccttgctacagagataaggtgaacaacaagggcaaacccaaatgcccttgaaaatgaaatatattcgagttcgggatttaatcaagcttaaagatcgaggacgaagaggccatatatatatatatatgcatgttgatgatgatgttattataaaaataaacttgttttgttgctgttattttcctttgggtttttgtgttggtagtgttgaataatatttcccttatattttccctctcaccgncgtgtccaccgncatgcacacatgtttntgtgtcttttgatcatgggtggtggtgatgat

SEQ ID NO: 203548 - DNA, 616 bp, Gossypium hirsutum
  unsure (1)..(616): unsure at all n locations
cggcacgagattcgccgcacggcatcagtctcatcaggcggggaagaatgtctcacaggaagtttgaacacccaaggcatggctcccttggatttcttccgaggaagcgagcttctcgtcacagagggaaagtgaaggcatttcctaaggatgacccaagcaaaccttgcaagctcactgcctttttgggctacaaggcaggcatgacacacattgtccgagaggtcgaaaaacctggatctaagcttcacaagaaagagacatgtgaagctgttacgatcgttgaaacccctcctatggtgattgttggggttgttggttatgtcaagacaccacgtggtcttcgcagcttgaacaccgtttgggctcagcatctgagcgaggaagtcaaacgtaggttctacaagcattggtgcaagtccaagaagaaggctttcaccaagtactcaaagcggtacgagagtgaagaagggaagaagagtatcgaggctcagctggaaaagatcaagaaatatgccactgttgttagggttttggcccacacacagattangaaaatgaaaggattgaagcagaagaaagcacacctaatggagatccaaggttatggtggaac

SEQ ID NO: 203549 - DNA, 624 bp, Gossypium hirsutum
  unsure (1)..(624): unsure at all n locations
ccgttccatcctgctctttgtgtattatggtcggtgatggagttcagatccttggtatgggagttgtgactatattgtttgccgctcttggattcatgtctccagcatcccgtggaactctcattacaggtatgctattcttctacatgattcttggaattgcagctggctatgttgcagttcggctttggaggactatcggctgcggtgatcacaagggatgggcttcggttgcatggaaagctgcttgctttttccctggtatcgcatttttaattctcaccattttgaatttcctgttgtggggaagtcacagcactggagctatcccattttcgctctttgtcattctactcctactatggttctgcatctcggttccactcaccttagtcggaggatacttcggagccaaagcacctcacattgaataccctgtccgaaccaaccagatccctcgagaaatcccagctcaaaaatacccatcatggctgttagttcttggtgctgggactctacctttcggtaccctttttatcgagcttttcttcatcatgtcaagcatatggatgggacgcgtgtactacgtcttcngctttcttctcatcggtatgggcctcctcg

SEQ ID NO: 203550 - DNA, 555 bp, Gossypium hirsutum
ccagaattcaggaacttctttaaaaccttttgatctaacggtggagaaaaacagcttcttttgcaaagtttggtggataaaaagtaggtctaggtgttgggagggcaaatgcggttgattttctctatctagtctgctttttttcttgtttggctaccgagaaaaattttgttcttgtttctgtttctgggtcttttggttttagtgaaggagaagtagagggaataaaaaaaaacaaaaacagagaagagatctttttggtggtttcttaatttgggttgaagaaaagatgcaacaaaatcagttgaagaaagagctaaaagagatggactttttcaccgaatatggggatgcaaacaggtacaagattcttgaagtcattggtaagggaagctatggagtagtttgtgcagcgcttgacacacatacgggtgagaaagttgcaataaagaaaatacaagatgtatttgagcatatgtccgatgcaattaggattttacgtgaagtcaagctacttaggcttcttagacatcccgacatagttgaaattaaacg

SEQ ID NO: 203551 - DNA, 262 bp, Gossypium hirsutum
caaatcaaatttttttaaaaaaatccccttaattttccatcgccccatcttcataatcttcatcattgccatctgcaacatcattttgattttgctgatcctcctaaaccagatcattcatgttactttccccttatttaaactccatttcatccattccttcccctgaataccatttcaaaaaccccttcctaccgaacataacggtgaattgttccgaaacaccccggaacatttttcgaatctacttcgaatcgtcacc

SEQ ID NO: 203552 - DNA, 439 bp, Gossypium hirsutum
ttattctcctctctctcgtcgccatcgcctctggggaaggtttcttcgaagaacgcttcgaagatggatgggaaagtcgttgggtaaaatctgactggaagaaagatgagaacatggctggggaatggaattacacttctggaaaatggaatggagatcctaatgacaaaggtattcaaactagtgaagactacaggttttatgctatttcagctgagttcccagaagttaacaacaagggcaagactctagtcttccaattttctgtgaagcacgagcagaagcttgactgtggtggtggctacatgaagttgctcagtgataacattgaccagaagaaatttggtggcgacaccccgtacagcatcatgtttggacctgatatttgcggctacagcaccaagaaagtacatgccattcttacatacaatgggacaaa

SEQ ID NO: 203553 - DNA, 417 bp, Gossypium hirsutum
tgatttgaaagccactgctggtgacactcatctgggaggtgaagattttgataacagaatggtgaaccactttgttcaagagtttaaaagaaagaacaagaaggacattagtggtaaccccagagctcttaggaggttgaggactgcttgtgaaagggcaaagagaactttatcgtccactgctcaaacaaccatcgaaattgactccttgtatgagggtatcgatttttactctaccattacccgagccaggtttgaagaacttaacatggatctattcagaaagtgtatggaaccagttgagaaatgtttgagggatgctaagatggacaagagcactgtccatgatgttgttcttgttggtggttccactagaattccaaaggtccaacaacttttacaagatttcttcaatgg

SEQ ID NO: 203554 - DNA, 422 bp, Gossypium hirsutum
atctcaagtaaatggattggacatccgatattcgggctggttcgtcacgatgtcaccgagccgttgctcattgaggttgatcagatctaccatcttgcttgcccggcttcgccaatcttttacaaatacaatcctgttaagacaatgaagacgaatgtgatcggtacattgaacatgtagggtctggcaaagcgtgtcggagcaaggattttacttacctcaacttcagaggtttatggagatcccttggaacattcccagaccgagagctattgcggaaatgttgaccctatcggagttcgaagctgctacgatgagggaaaacgagtggctgaaactttgatgttcgattaccataggcagcatggcatatagattcgaattgctcggatcttcaacacttatggaccacgcatgaacat

SEQ ID NO: 203555 - DNA, 528 bp, Gossypium hirsutum
gtgggtttagtaacaaataaagctctgaagcccatcaacaataaaatttctggttttatgcttttgtatcttgccagaggaaattaatggtggatttagctgaccagcagcacagttgatgtttttatagtttctaatacaagcaatcttcttctgaagatatatctcatatgactatcgttgtttcttatacatctcttgaataaagaaagggctactttttgttctgcaagaatggagaggtacaagttactcagggaagttggtgacgggacatttggttgtgtgtggagagctattaataagctgtctggtgaagttgttgcaattaagaaaatgaagaagaaatattgctcgtgggaagagtgtgtgaatctgagagaagttaagtctctgaggagaatgaatcatcccaatattgtgaagcttaaggaagtcatcagggaaaataatgttctgtactttgtgtttgaatatatggaatgcaatctttaccagcttatgaaagacagagaaaagcatttttca

SEQ ID NO: 203556 - DNA, 495 bp, Gossypium hirsutum
  unsure (1)..(495): unsure at all n locations
aatccccaggttaaggaaatccgatgcattgccatgccaccgcaatggggtactcatcagcaagtcaatcttccatcagctcttcctgaacatgatttcttgaatgatctggagcctttgggatggctccacacacagccaaatgagcttcctcaattatcgccacaggatgtgacatcccattctcggatattagagaataacaaacagtgggatggagagaagtgcataatcttgacatgcagtttcactcccggttcttgctcattaacagcctacaagcttaccccaagtggttatgagtggggacgggttaacaaagatacaggaagcaaccctcatggttacctnccaacgcattatgagaaggtgcagatgctcctaagtgatcggttccttggattttatatgatacctgacaatggtccgtggaattacaatttcatgggagtgaagcatacagtgagcatgaaatacggggtgaaactggggaca

SEQ ID NO: 203557 - DNA, 566 bp, Gossypium hirsutum
  unsure (1)..(566): unsure at all n locations
ggccttcccattatcatggtcttgccaggtgttgttgggtttaaactattaggaaagttgagggatggtgtgacagctaccgatttagtgttgacagttactcaaatgctgaggaagcatggggttgttggcaagtttgtcgaattctatggggaaggcatgagtgaattgtcattagcagaccgtgcaactattgccaacatgtctcctgagtatggtgcaaccatggggtttttccctgtggatcatgtcaccctgcaatatctgcaattgactggcaggagtgaggagactattgcaatgatagaatcttatttacgggccaataagatgtttgtagactacaatgagcctcaaattgagaaagtgtactcttcctacctgcaattgaaacttgaggaagttgaaccctgtatatcaaggcccaagaagcctcatgatcgagttcctctgaaagaaatgaaagcggattgtcaggcatgcttatacaacaaggttggatttaagggatttgctataccanaggaatcttaggataaggcttcaaagtttttatttcatgggac

SEQ ID NO: 203558 - DNA, 643 bp, Gossypium hirsutum
catggtttccttaccaaaactcttctctatgtctagcctcttcctttttgccctcttctccatgcaaatccatgctagagagtacttcagcaaattcccaagagttaacatcaatgagaaagagacaacaaccagagagcaaaagcacgagaccttcgttccccagaccacccaaaagccagaagaacaagagccaaggttcattcctgaaacccaaaatggttatggcctttacggccacgagtcaggctcaggctcaggctcaagctcaggctcaagccggcccagtttcaccaccaaagaaacctatgaaccctatgtcacccctgttagattccaccctgatgagccctataacagcatccccgaatcctccaacaataaagacacttactactacaacaagaatgcctacgagtccactaagcagcaaaacttgggcgaggccattttcaccgagaaaggatggagcaccaaggaaaaccagaacaacaactactacaacggcaacaatggttacaacaatggcgagaagcaaggcatgagcgatactaggtacttggagaatggaaagtactactatgacgtcaagagtgagaacaactattatccaaaccggttcgacaactcaaggagagttgct

SEQ ID NO: 203559 - DNA, 525 bp, Gossypium hirsutum
ccttcacgggtttagaaccagtgggaagttcctgcagaagcaaatcagcaaatgggatccttctctttttcttcatcactttcaaatggattttcctgacgggttatttagtgccggaggaaagtcagacatagaaggcatattccctcctacatactttgaatggttccaattcaacaaggaattcacagagtacacaaaccttgaggaatgcatctctcacttgtgtcaatatatcacccacaatggcccttttcatggattgctcggcttttcccagggtgcaactcttggtgctcttctattgggctacaaagcacaggggaaggtgttaaaggagcatccacctttcaaaatgtttgtatcaatatcaggatcaaaattcagagagccaagcatatgcgaagtggcttacaaagacaaaatcgatgtgaaatcagttcacttcatcggagctaaggattgggtaaagttgccttcggaggatttggctactgctttccatgatcctcttatcataaggca

SEQ ID NO: 203560 - DNA, 396 bp, Gossypium hirsutum
gcatatttttgtgaagacacttactgggaatacgagcggttttaaagttgagagcgctgacacaatcgataatgttcaggccataatacaagataaggaaggtatcccttcacaccagcaaaggctgatatttgctggaaagcatctagaggatggtaggacccttgcagattacaacatccataatgagtccacccttcactcggctctccatctacgtgtcgagattcatattttcgttaacacccttactggaaagtccattaccctagaagttgacagctcagacactaatgatcatgttcatgccatgatccaggattaggaaggaatttctccagaccagcagaggctgattcttgctggtaagcaacttgaagatgggaggacccttgc

SEQ ID NO: 203561 - DNA, 531 bp, Gossypium hirsutum
aacaaatacactttaagcaaaggcatttgctcttttatctgaggagggaattgctaaaggagttcgaaggataactgctgtcaccactgagagtgctttgaaggcaatggaattgggtggcctgcttttgaaggaagtagatgatgcttccaatatggaagtaagcttgctggaaaagaaagtggcttctctaaaaactactgtggattctgcatcaattcctgctgcccagaaagctgatattagggccaaaattgcacaacttcagaatcaactgaaaaaagcacaaaagaagattgctgaacaaaatatgcagagagctgtcgcgacagcaaccgaattggctgaagttgctgccaaagagggaaagactttctgtgtcactcgtattgatgttggtttagatgcagctgctctccgcgaagcggtttcaaaagttattcaacaaaagggtatgccggttatggttttcagtattgacgaaaccacaaacaaggctgtcgtttatgctggtgtacccgagaaatctga

SEQ ID NO: 203562 - DNA, 409 bp, Gossypium hirsutum
cgcttactttaacttatcaaaagcacactgtgcttgcttcctttgcatggcgagcgctggacccggaacaaacggatctcaattcttcatctgcacgaccaagacggagtggctggacggaaagcacgtggtgttcggacaggtagttgaaggcatggatgtggttaaagcgattgataaggtgtagtctagcggtgggaggacttccaagcctgttgttattgctgactgtggacagctttgaaaaatggcttattgaattgtgtttccttcataatatgtggtcttactaggctccttttttttatgctatgctgcttctatggctactgagtattggtgtttaataagaagttgcttgatgtaactatttaattaactgccataaataagataggctttatttttc

SEQ ID NO: 203563 - DNA, 435 bp, Gossypium hirsutum
tctttgcttaataaatcttataaccgacctactggttgagtggcaaaaagtgtaaagggagaggaagaaattccggatggtacagttgctgtgttgacccctgacatgccagatgttttgtcacatgtttctgtccgagcaagaaattgcaaggtttgctttgctacttgttttgatcctaatattctggctgacctacaagcaaaaaaagggaaactgttgcgcctaaaaccttcatctgcagatgtagtttatagtgaggtgaaggaaggtgagctagttgattcaagttcaagcaacttgaagggagatggtccatctgtcactttggtcagaaagcagtttgttggtaaatacgccatatcagcagaggagtttacacctgaaatggttggtgctaaatcacgcaacatctcatatctaaaaggaaaagtg

SEQ ID NO: 203564 - DNA, 520 bp, Gossypium hirsutum
aagaaattaatgtaccaatcatgaagcttgacaccagcggactagaatcggctgctcctgtctggggtgctcccagtgaacttgttgacgggttttcggctgctccgtcgttcgatctcccaaacactactgattttgatgggtttcaaaaagaagctatccagatggtaaaacctgctaagggtaccaccacgctagctttcatctttaaggaaggggtcatggttgccgctgattctagagctagcatgggaggctatatctcttcacaatcagtgaagaaaattattgaaatcaatccttacatgcttggaacaatggctggaggagctgctgactgccagttttggcacagaaatttaggcatcaagtgccggctgcatgaattagcaaacaagcgtagaatttcagttacaggggcatcaaaactgttggcaaacaattcttaatcttaccgaggaatgggactttcgggtggaaccatgattgctggatgggatgaaacgggccctggactata

SEQ ID NO: 203565 - DNA, 459 bp, Gossypium hirsutum
ctcgtgccgcgttattccaaaaagcagagaaaagaacgttaaggaggaaagatgttgggaatagtaaggcaaaaaatgttagggcagtcattgctgaagattcgtcctgcaatatcggtgttacgaagttactcatcagcagcaaaacagatgacagtgagagaggcattgaactctgctcttgatgaggaaatgtcagctgatccgaaagtctttttaatgggtgaagaggttggagaatatcagggtgcatacaagatatccaaagggcttttggagaagtatggacctgagagggttcttgatactccaattactgaagctggttttgctgggattggggttggtgcggcttactatggtctgaagcccgtagttgagtttatgacatttaacttctccatgcaagcgattgaccacattattaactctgctgcaaagtccaactacatgtctgct

SEQ ID NO: 203566 - DNA, 335 bp, Gossypium hirsutum
ctgtaccgcatatccctttagcagatggacaacgtggggaagagggatgtttgcagtagtaggtgcgcacatgttacggcagtaatcgctgaagattcgtcctgcaatataggtgttacaaagttactcatcagcagcggaacagatgacagcgagagaggcattgaaatctgctcttgatgacgaaatgtcagctgatccgaaagactttttaatgagtgaagaacttgtagaatatcacggggcatacaagatatccacggggctcttggagaaaaatagacctgagagggttctcgatactccaagtacaaaggctggatttgctgggataa

SEQ ID NO: 203567 - DNA, 580 bp, Gossypium hirsutum
tccatgttagggctaaggcaagagggagtgaaaatggttgagaaaacaagaggaagaaaggaagaggtggtgaccagggagtacaccatcaaccttcacaagcgcctccatggctgcacattcaagaagaaggctcccaaggctataaaggagattaggaagtttgcagaaaaagcaatggggacaaaggatgtgagagttgatgtcaagctgaacaaacatatctggagccgagggatccgaagtgttcctagaaggattagggtccgcattgcccgcaagagaaatgatgatgaagatgcgaaggaagagctctactctctagtaactgttcctgaaatcccagctgaaggactgaagggtttgggcactaagcccatcgatgatgatgatgagtaatttattgatgtttagttttatgaaaacttgcatttgttcaccaagaaatttacccgagttttggctagtgttacatttgtgacctgtgaaacatcattctactcatatatttggtttattgttgtcaagactatttaagcttgttccttgtgcaattgaagtttccagcagattttagaat

SEQ ID NO: 203568 - DNA, 398 bp, Gossypium hirsutum
cttcagtgtacggaagcaaatatcatataaagcggcatggtccaaaaccatacattcatctgcattctcaacaagctggtgaacagagagagtagcattgtaaggttcgacaacagtgtcagacaccttagggtaagggaacacagagaaagtgagcatcattcggtctgggtattcttctcggatcttgtaaatcaaaagtgttcccatgcccgatccagttcctcctcccaatgaatggcatacttgaaatccttgcaagcagtcacagttttcggcttcttgcctcaccacatctagcactgagtcgatcaactcatccccttccgtgtaatgacccttggcctagttattccctgcaccggactggccgaatactaagttgtcaagcctgaaaa

SEQ ID NO: 203569 - DNA, 437 bp, Gossypium hirsutum
gttgaaagttctagctggtattgacactaatttgactggcacatccaaggcaactgatgacgaggagttcggggaattgtatactttcaaatggacaacccttctaattcctccaactactgtcttaatcatcaatttagtcggtgtcgttgccggcatctcagatgccataaacaatggataccaatcatggggacctctttttgggaagctcttcttctctttctgggtgattgtccatctctatccattccttaaaggtttaatggggagacaaaacaggacaccaaccattgttgttatatggtcagtgctattggcttcaatcttctccttgctttgggtccgaattgatccatttgtgatgaaaaccaaaggaccagacactacaatgtgtggcattaactgttgaaaaaaatcatcttgcgtggttcttt

SEQ ID NO: 203570 - DNA, 434 bp, Gossypium hirsutum
ctttttattcctttattgctttttagaatttttgttaggctaaaatgagagagtgcatttcgatccacatcggtcaggccggtatccaggtcggaaacgcttgctgggagctttactgtctcgagcatggaatccagcctgatggtcagatgccaagtgacaaaactgtcggaggaggtgatgatgcttttaacacctttttcagtgaaactggtgctgggaagcacgttcctcgtgccgtcttcgtggatcttgaacccactgttattgatgaagtgagaactggtgcttaccgtcagctcttgcacccataacaactcatcagcggcaaggaagactcagctaacaactttgcccgtggtcactacaccattggcaaggagattgtcgacctctgtttggaccgcatcaggaaacttgctgataactgcact

SEQ ID NO: 203571 - DNA, 654 bp, Gossypium hirsutum
  unsure (1)..(654): unsure at all n locations
cgaaatggtgaactttaccgatacatttgcgacacgaaaggtgcctttgtacagcctgcattgtatgaagcctttggattgacagttgtggaggcaatgacttgcggtttgccaacattcgcaacctgcaacggtggaccagccgagattattgtccatgggaaatctggtttcaacattgatccttaccatggtgatcaagctgctgacatactggtcgatttctttgaaaagtgtaagaaagatccatctcactgggataagatctcccaaggaggcttgaaacgtatcgaggagaagtatacatggaagatttactcggagagactattgaccctgaccggagtgtatggattctggaagcatgtttccaaccttgaacgccgtgagagtcgtcgttaccttgagatgttttatgctcttaagtaccgcaagctggctgaatcagttccattggcagaggagtaaatttaagctgttaaataacattgggccggtttttcttggagaataatattctgttttgtaatttcaattggagaagctcttttggatttcatcttgtcttttccttttcctttnttcgccggcattgtttgaacatggggttgtgcgcccgtcaattccagttaaatatggtgacttttgtttttc

SEQ ID NO: 203572 - DNA, 527 bp, Gossypium hirsutum
ggcgggtggtgcaatcccccacgagaacactttgatttggccgaaccggcattcttgcggatagcagaatatcgagctggaatcgtccctgttatgttcagaagggtgtcatgtgtgaagaaaggaggcatcaggtacaccatgaatggacattcgtacttcaacatggtgttgataacgaacgtgggaggggcaggggatataacgtcagtgtccatcaagggttccagaacaggatggctacctatgtccagaaattggggccaaaactggcagagcaatgcttaccttaacggacaaagcctctcttttaaagtgactgccagcgatggcaggactatcacagcctacaatgtagtgcctgctggttggcaattcggacaaacttttgaaggaggccagttttaagacaatattatagtgtctgtctaatataaaactggaattgacatattacttatataaggcacatgagcgttttatgccgaggtagcaaaatggcgcccgctggctttatgtgtgaaata

SEQ ID NO: 203573 - DNA, 572 bp, Gossypium hirsutum
acgagagccacactgctttcactcttcctggtctctaccgtgttgtacatggtatcgatgtgtttgatcccaaattcaacattgtttcccctggtgctgatatggagatatacttcccttacaccgaagagaagcggaggttgaagcatttccatactgagatcgaagaccttctttacagcaaagttgagaatgaagaacacttatgtgtgctcaatgaccgcaacaagccaattctgttcacaatggcaaggcttgatcgtgtcaagaacttaaccggactcgtcgagtggtacggcaagaacgcaaagttgcgtgagttggctaacctcgtagttgtaggtggtgataggcgaaaggaatctaaagatttggaagagaaggccgaaatgaagaaaatgtttgagctgatcgagaagtacaacttgaacggccaattcagatggatatcatctcaaatgaacagaatccgaaatggtgaaacttaccgatacatttgcgacacgaaaggtgcctttgtacagcctgcattgtatgaagcctttggattgacagttgtggaggcaatgact

SEQ ID NO: 203574 - DNA, 429 bp, Gossypium hirsutum
cggttgtggtttcttccggctttcgattcaaatgggttggggaactgtccttcaattgaaaacaagcagccaacatggggaagacacgaggtatgggagctggacgtaagctgaggacccaccgaaggaggcaaaggtgggccgataagtcatacaaaaaatccaaccttggtaatgaatggaagaagccatttgctggttcttcccatgccaaaggcattgtccttgaaaagataggtattgaagctaagcaacctaactctgctatccgaaagtgtgctcgagttcaattgatcaagaatggaaaaaagattgccgcgttcgttccaaacgacggttgtttaaactacatcgaagaaaatgatgaagtgttgattgctggatttggacgaaagggtcatgccgtctgtgatattcccgggtgtagat

SEQ ID NO: 203575 - DNA, 300 bp, Gossypium hirsutum
ggtgccgctgctgattatgttatcagctcgatcgaatctgacacctgttatgttcaactgcaccgatggggtgctcaaaaaagaaatgtataatttaatctatcttttgaacaagattcaaagatcttgcccctctcttggagaccatggagaaccaagtgcatatacaactatttgaggactcattacctactgaatgacgccatcttgctgtcagagttcatgcaagtctcatgtgctctaaagcattatctgtaaaaattttttaccctaagtatcatgaattgttacccggagacc

SEQ ID NO: 203576 - DNA, 565 bp, Gossypium hirsutum
gtcgaatatccgaaaatacccgagtacaaggacaaacaagatgaggataaggaacataaaaatgaagagtaccacgaatcacgtgaatcgaaggagcacgaagaatacgagaaagaaaaacccgagttccccaaacgggaaaagcctaaagagcacgagaaacacgaagtcgaatattcggaaatacccgagtacaaggaaaaggaagataagagtaagaaacataaagatgaagagtgccaggagtcacacgaatcgaaagagcacgaagagtacgagaaagaaaaacccgatttccccaaatgggaaaagcctaaagggcacgagaaacataaagccgaatatccgaaaatacctgagtgcaaggaaaaactagatgaggataaggaacataaacatgagttcccaaagcatgaaaaagaagaggagaagaaacctgagaaaggcatagtaccctgagtgggttaaaatgcctgaatggccgaaatccatgtttactcagtctggctcgagcactaaaccttaagccatatgacactggtgcatgtgccatcatcatgcagta

SEQ ID NO: 203577 - DNA, 569 bp, Gossypium hirsutum
accgatttatacacctccaaagaaagagaaacctgaacccaggccacccgtatatgaacctccaaagaaggagaagcccgagccaaagccaccggtttatacacctccaaagaaagagaaacctgaacccaaaccaccagtgtatgaacctccaaaaaaacctccaatgtacgaacctaagccaccaaaaccaccggtttatacacctccaaagaaagagaaacctgaacccaaaccaccaatgtatgaacctccaaaaaaacctccaatgtatgaacctaagccaccgaagccaccggtttatacaccttcaaagaaagaaaaaccagaacccaagccaccaatgtatcaacctcccaacaacccaccaatatatgagccaaaaccacctaagccaccagtttatgcaccaccaaaggaagaaaagccaaaacctaaaccaccagtttatgagccttcggcacatgagccaccatacggtcactatccaggacatccacctttggggaaaccctaatagaatgctcccatcgactagccattcccaacaattgagctactagaaaaat

SEQ ID NO: 203578 - DNA, 575 bp, Gossypium hirsutum
tgaacttgttgtcattcatggccatgaagagcctagacctctgaagaacttggatggtcaagtttgtgagatttgtggtgatgaaattgggttgacggtcgatggagatcttttcgtggcctgcaacgagtgtggttttccagtttgtaggccttgttatgagtatgaaaggagagaagggagtcaacaatgtcctcaatgcaaaactagatacaagcgtctcaaagggagtcctagggtggagggagatgaagatgaagaggatgtggatgatatcgaacatgaattcaacattgatgatgaacaaaacaggtatagaaatatcgctgaatcgatgcttcatggaaagatgagctacgggagaggccctgaagacgatgaaggtttgcaaatcccacccggtttagctggtgttcgatctcggccggtgagcggagagttcccaataggaagctctcttgcttatggggaacacatgtcaaataaacgagttcatccatatcctatgtctgaacctggaagtgccagatgggatgaaaagaaagagggaggatggagagaaaggtttgatgatt

SEQ ID NO: 203579 - DNA, 296 bp, Gossypium hirsutum
aaatggcgagtgccccaaattacaggaaatgaaagagcaccaacaataccaggaaaaaaaaccccaggttcccaaacagggaaaacctcaagagcacgagaaacaccaagacgaatattcggaaataccccagtaccaaggaaaagaagataagagtaagaaacatatagatgaaaagtgccacgaagtacacgaatcgaaagagcaccaagagtaccagaaagaaaaacccgattttcccaaaaggggaaaacctaaagggcgccagaaaaataaagccgcatattccaaaatac

SEQ ID NO: 203580 - DNA, 381 bp, Gossypium hirsutum
tcggaattcccgggtcgacccactcgtccgttcatgcgttcgtcaactagcggtttatctcgcgcgggagacgtatatggctgggtggggggtcgcagcggcggtggctacaccggtgacgcctactgaggggacggttatcgcgatccacagcctggaggagtggagcatccagatcgaggaggccatcagcgccaataagctggtggtgattgacttcactgcatcatggtgtcctccgtgccgcgccatggctccaatctttgctgatatggccaataactccccaaatgttgttttcctgaaagttgatgtcgatcaaatgaagaccattgctgaacaattcagcgtagaggccatgccaacattcctgttcatgat

SEQ ID NO: 203581 - DNA, 441 bp, Gossypium hirsutum
atcagggaggcttctcagaccaccatgaagggaattcttggttacgtagatgaagatttggtctcaaccgactttgtcggagacagcaggtcaagcatttttgatgctaaggccggaatcgcattgaatgacaactttactaagcttgttgcgtggtatgataatgagtggggttatagttctcgagtgatcgacttggttcgacacatggcttcttgctaagtgagtgaagttttagcttctaacttcagctttggcaagcaatttagaaactagaagagatattcctgtcttttgggtgttggtcatgcagataatagaaattgtatgcaacatttttttttcgtgtgaacactcttcttttgagtggattggaagggtttctattttgactcccttcatccattttatgacaataataattgcaggatcaactgaaaa

SEQ ID NO: 203582 - DNA, 330 bp, Gossypium hirsutum
cataaaacactttcacataaaaaccgaaagtctaaacataaacaaccgtcatccaaactccaaaacagtaccatatctgaaatttcaaacaaaatttctagcttaaatgtgctttaacagtcattgatgtcaatataaacgccaaaacaactagtagtatcctattaagccttatcggccttggcagcagtggcagcagcttgtcctctgagcctaccagtcctccttgcagcaataagaccaaccttttgtccaggtggagcatcacgtctaactgtactagcatgaccaatgtgttgatggttaccacctacgtggctatgaacccag

SEQ ID NO: 203583 - DNA, 393 bp, Gossypium hirsutum
ctgtttgagggataggtcagccattggcacttctgatcgggatgtctccgctagtttcggcactgaacctctacgatatagcgaatgtgaagggagttgctgctgatctcagtcactgcaatactccttctcaagttctggatttcaccggtgcttcggaattaggagattgtttgaaaggtgcaaatgtagtggttattcctgccggagttccccgaaagcctggtatgactcgtgatgatctcttcaacatcaacgccaacattgtgatgagcttggttgaggctgttgctgataactgtcccgatgccttcattcatattattagcaatccagttaactccacggtaccaatcgctgctgaagttctgaaacagaaaggtgtttacaatc

SEQ ID NO: 203584 - DNA, 474 bp, Gossypium hirsutum
atagtaaagaatcccttgtattctactttttacctttcaaatcaaaaccaaaaaaaaaaaaacctttaccaataaccctatgactggtgaatgtgcctcaacaaccaaaagaatgcaaaaacaatggtttctttgccctccttacaaactaaaaacgacaactcccaaacttcgaatacatatttccaaaacccaacagtaaatatgaacattttcaggtaggaggtaagtcaaggggattacaaaaaatagtcgggggttctgcgtgtggtctcaggctcaatctgacgtggagctgggtcaaactgaagaaaactttggtccatattctctccaatctcaagtattgcagccatatttccacagcgatagcagtagtttggggcactgaacacggttaccacattcttttcctgggaccaattatatccttccataacaagctggtgagctctagaaatcgggtcagcccat

SEQ ID NO: 203585 - DNA, 393 bp, Gossypium hirsutum
agctttagtacggcttagcaatggtgacatgagaaaggctttgaacattttgcagtcaacacacatggcttctcagaagattacagaagaagccgtgtatctctgtactggaaatccgttgcctaaagacatcgagcaaatatcttactggcttctgaatgaatcatttgcagagagtttcaaacgagtatctgaaacaaagaccaggaaaggattagccctgatcgatattgtatgggaagtgacaatgtttgattttaagattaaaatgccctcagatgttcaagttcagttaatcaatgacttggcagacatagagtatcgattgagtttcaagtgcgacgatgagtcgcgactggaatctttcactgctataatcacaggagctagatc

SEQ ID NO: 203586 - DNA, 572 bp, Gossypium hirsutum
  unsure (1)..(572): unsure at all n locations
cttgattcttattctcaggtttgatattcaaatggcggatattagcaatggttccaaagggtttgcagtgaaacaaggagaaccaactagggtccttcctgcagaagagacaaagaagggtctttattacctgngaaaccttgaccaaaacattgcagtcataattcgaaccatttacttctttcagtcagagtctaaagggaatgaagatgctgccgaacaagttaaaaatggtttgtcaaagattcttgttcatcattatccacttgctgggcgactaaccatcagctccgaagggaagctcatagtggactgcaccggggagggggctgtttttgtggaggctgaagctaattgtgggattgaagagatgggggacataacaaagcctgaccctaacattcttggaaagttggtttatgaaatctctggtgctcagaacttgctagagatacctcttttggtgattcaggtgactaaatttaagtgtggaggattttctattgggatgagcatgaaccactgtatgcttgatgggattgctgctatggaaattgtgaatggatggggtg

SEQ ID NO: 203587 - DNA, 423 bp, Gossypium hirsutum
gctcctcttagtttccctttttgtcccttgtgtgtttgatactcccccctcatggctgccgctgatgtcgagttccggtgcttcgtcggagggctcgcatgggccaccgacgaccgggcccttgaagaagccttcagtgcgtttggtgaaatcgtcgaatcgaagatcattaatgatcgtgagactggaagatcccgaggctttggattcgttactttccgtgacgagaaagctatgagggacgcgatcgaaggaatgaacggtcaaaatcttgatggaaggaacataactgtcaacgaagcccaatcgcgcagaagtggaggcggtggcggaggatttggaggaggaaacggtggttacagccgcggtggaggctgcggcggatatggtggtcgccaaggaggatatggtggcggacgccgt

SEQ ID NO: 203588 - DNA, 391 bp, Gossypium hirsutum
gttttaatgaggaaaaagagtgcgacgcttaaggttgggaagaaagatatagctgatctgcttgctaatggccttgatatcaatgcttatggcagagttgaaggatatatagctgaattagtgctttcgtcttgctatgattttatagacaagtgttgcgatttcgtgacgaatcatgtttcagtcatgcaaaaactgagtgattgcccagaagattgcagggaagctgtctcatctctaatgtttgcagctgctagattttctgatttgccggagttgcgtgagcttatgcatatattacatgaaagatatgaaaattcactggacgtattcgccaataaacagcttgttgagaattcagcttcaaatcctatcacaatggagcgtaaag

SEQ ID NO: 203589 - DNA, 565 bp, Gossypium hirsutum
gccgattctgctcggcttgcaggctttcagaggaaggtttttgatgtcttatacaaggttgctgacattcctttcttaagcaaatacaagcatcaaattctcgatcttattgagcatgctgagacacagccgaacctcaccattggtgtcttggtctctattgtggtgattattctcacgattttcttcaagctcatttttggtgggaagaaacagccaagagtagagaagaaaccagaggttgctaaaacatcaaatggtgaaggaagcagtggagaaaaagctgaagaggcggagaaggaagaagctgctgccgctcctcgccgaaggcgccgtgacaattgagcaaatcttaaaacaaaggtagctggtggcgactaacagtttgagtttgggctaatttttgcactgtagggggttttcgtagctgaaatattatttgcctttggcattttttagttttactttttaatatgattagattgtatggtttgaaggatgtaaacgagacaaatttctgcatcaaagcaaaaaccaagtagaaaggaatttgaagcttgcttgt

SEQ ID NO: 203590 - DNA, 527 bp, Gossypium hirsutum
atctgttgaaattttcctaagcaggcattgccctctatggtatggctttggaggtggtcgtcttaaatggcttcaaagactagcatatataaacaccattgtctatcctttcacatcccttccactcattgcctattgttcactaccagcaatctgtcttctcacaggaaaatttatcataccaacgctctcaaacctggcaagtgttctctttcttggccttttcctttccattatcgtgactgctgttctcgagctccgatggagtggtgtcagcattgaggacttatggcgtaacgagcagttttgggtcatcggtggcgtttcagcccatctctttgccgtcttccaaggtttccttaagatgcttgcgggcattgacaccaactttactgtcactgccaaagcagctgatgatgcagattttggtgagctctacattgtgaaatggactacacttctaatccctccaacaacactcctcatcgtcaacatggttggtgtcgttgccggattctccgatgccc

SEQ ID NO: 203591 - DNA, 596 bp, Gossypium hirsutum
  unsure (1)..(596): unsure at all n locations
gtatattgaaattttctttctcgattttctctttagccaaaaaagatgcagatcttcgtcaagactctaaccggcaagacgatcactctcgaggtcgagagctccgacacgatcgacaacgtgaagaccaaaatccaagataaggaaggcatccctccagaccagcagcgtctgatcttcgccggaaaacagcttgaggacggccggaccttggccgattacaacatccaaaaggagtcaactctccacctcgtcctccgtttgcgcggtgggatgcaaatcttcgtgaaaaccttgaccggcaagacaatcactctcgaggtcgagagctccgacacgatcgacaacgttaaggcgaagatccaagacaaggaaggcatccncccagaccagcaacgtctcatcttcgccggaaaacaacttgaagacggccgtaccttggccgactacaacatccagaaggagtcaacgctccatcttgtccttcgtttgcgtggcgggatgcaaatcttcgntaagacgcttacgggaaagacgatcactcttgaggtcgaaagctctgacacgatcgacaacgtgaaagcccaaatccagac

SEQ ID NO: 203592 - DNA, 568 bp, Gossypium hirsutum
caagctttttccttacaagtttgtttttcttgtgattaatcgatatggctagctcaatgtcccttaagcttgcatgtgtggcggtgttgtgcatggtggtgggtgcacccctggctcaaggggccgtaacctgtggtcaagtcacaagctccctcgcaccctgcattggttacttgacagggaatggtgctggtggcgttcccccaggttgctgcggcggcataaaatctctcaactccgccgcccaaacaacaccagaccggcaagcagcttgcaaatgcatcaaaagtgcggccgccggcatttctggcatcaactatggtattgcaagcggactcccaggcaagtgcggtgtcaacatcccttacaagatcagccctagcactgactgcaacagcgtcaagtgaagttttggcatggaaagttcaccagctagtggaagccaaaataacgatagctacagaataaatatggatgttaaaattccagagttgtgggttgtgtactatgccgctttatgcgactacgtaatattaactttatctacaaattaatatcactcgtcttc

SEQ ID NO: 203593 - DNA, 578 bp, Gossypium hirsutum
ctgaattcccttcaacatgtattgaggaaggcagaagaatatcttggtacaccgccagctgagacaccgtacgctgaactcgaacacaagttccaggaaatcggtttagagagaggttggggtgataccgcggggcgtgtgctggagatgatccaactccttttggatcttctcgaggcccctgatccttgcacccttgagaagttcctcgggagagtccccatggtgttcaatgttgtcatccttactcctcacggatactttgctcaagacaacgttttggggtaccccgacaccggtggccaggttgtatacatcttggatcaagtccgtgccttggagaacgagatgctcctccgtatcaagcagcaaggactcaacattacccctcgaatcttaattattaccagacttctgcctgatgccgatggaacaacttgtggtcaacgagtcgagaaggtatacggaacggaatactcagacatcctccgagtaccctttagaacagagaagggaattgtacgtagatggatctcgagattcgaagtctggccctacttggaaacttacactgagga

SEQ ID NO: 203594 - DNA, 326 bp, Gossypium hirsutum
atcatggttgcttctcagaccaccatgaagggaggtcggggttacttagatgaagatttggtctcaaccgactttgtctgagacagtaggtcaagcattcttgatgctaaggcctgaatcgcattgaatgacaactttactaagcttgttgcgtggtatgataattgagttatgttatagctctcgagtgatcgacttggtacgacacatgtcttcttgctaagtgagtgcagtcatatcttctatcttctgctttggcatgctattatgaaactagaatagatattgctgtcttttgggagtgggtcatactcataataaaaatt

SEQ ID NO: 203595 - DNA, 327 bp, Gossypium hirsutum
  unsure (1)..(327): unsure at all n locations
accatcttgtggaaaatgcttattgatgcattggccttgacaatgaagctctntattatatctgcttcagaactcttaagctcacanatcccatctttggtgacttgaaccatttgatttcaacaaccatgagtggagtcacatgctgccttcgcttccctggccaactcaattccgatcttcgaaaactagcagtaaactttatcccattcccacgcctccattttttcatggttggttttgcacctttaacatcccggtgttcacaacaataccgatctttaacgatccccgagctaactcaacaaatgtgggattccaaaaaca

SEQ ID NO: 203596 - DNA, 314 bp, Gossypium hirsutum
  unsure (1)..(314): unsure at all n locations
tcttatttcatttcccataatccancctccagggccatttggagtgatatagagagtntttggatntttccccttgcatccaaatggcgaaccttttctcaagaaagctttgcatggtcgattttcatcattcttcttgcctgtctaatcatgacccttgtctactgggcttaccccggtggcccatcctgtggcaaatacatgttcgtgaaccgttcctctcttactgctgctaacaagaggagaattccagggcctataggtttgcctctaataagcagcatgaaactgatggccaactcctttgctcacca

SEQ ID NO: 203597 - DNA, 323 bp, Gossypium hirsutum
  unsure (1)..(323): unsure at all n locations
ctgagatcttttgcttcggatcttccnatcgatcccctgtgtacgctcaatcgcctttcagtactacnattcctgtggaaaactgaaacggaacgaatggatttagcggtggaaacgacgatgttttcagttctgatttttctgtgcttcctcctcctactgagatggcgccagaggaaggcttccttcttcgcgagtggcggcgtcaaaatgccattcagcttgaagagaaggagaagaaggaaaaggaattgaggaaccaaattatagaaaaagctgaggagtacaagctagcattctattataagccgggaaaaaaacta

SEQ ID NO: 203598 - DNA, 349 bp, Gossypium hirsutum
  unsure (1)..(349): unsure at all n locations
aacatttttaagaaacaaagaatcaaacaggtcnaatgaggtgagtgaagaaagggtgagcccaaaggactatgtggatcctccaccggcaccgctcatcgacgtggctgagatcaagctttggtctttttacagagctctcatcgccgaattcatcgctactctcctcttcctatacgtcaccatagccaccgtcatcggccacaagaaacaacacgatgcatgcgatggtgttggtcttttgggcattgcttgggcttttggtggcatgattttcattcttgtttactgcaccgccggtatctcaagtggtcacattaacccggcggtgacatttgggttgtttttg

SEQ ID NO: 203599 - DNA, 366 bp, Gossypium hirsutum
ctgcaagtacctacaagtatttgatcatatcgctctgcgggagaaaaggtgggaaggtagatgaagccgttaaaatcttccaagaaatgatccgttctggatacacccccgacaaagagttacttgaaatgtatcttggttgtttatgtgaagttggcaagctattggaagctagaaactgcacagaatctctcagcaagattggattctcagctccactaagttattcgctgtatattagggcactttgtcgagctgagagactcaaagaagcattggaagtattagatgatgtcaggacagaacaatcctcattggatcaacatgtttatggaagccttgtccatgcactactacgaaagggac

SEQ ID NO: 203600 - DNA, 249 bp, Gossypium hirsutum
gcaacctggttcagcacaaaatggtgaccaattaacccggttggcaccggaaggttttcggccttttaaggttgtgaaccatttgcattggcttattatcccaatttcttaagggacttccgtttcaattggtctggttaggaagtccaagaatgcactggtgtcaaacttcttatttctcgaaccaaatgtgtgggtttgccaaaccaggctttattataaccaaaaaactgcctaggttaattggcc

SEQ ID NO: 203601 - DNA, 413 bp, Gossypium hirsutum
gcatcctgtcacagctcacaatgttgacacatcaaccagcttggcgcggaaagttgtccgcctttttaagtttgtgaacgatttgcatggtcttattagcccagttcctcaaggaactccggttccacttgttctgctcggaaagtcacagaatgcactgttgtcaactatcttattactcgatcaaattgggtggcttgtcataacatgcatctatcacatcaaagcacgtgctgagttgattggactaatatccctattctggtggatgggatcatcaatatgtaccacattggttgagcttggggagctaggaaagctatctgcatgaatgaaaaacttggagaagagacttaaggatagtgacaagtacacgaatgaggagtatcgtgcgaagctccaaaattcaaatg

SEQ ID NO: 203602 - DNA, 314 bp, Gossypium hirsutum
ctagtctcgagttttttttttttttttttcctgcaattgggatgcagatcttcgttaagaccctgaccggcaagaccatcaccctcgaagtcgagagttccgacacgatcgacaacgttaaggcgaaaatccaagacaaggaagggatcccaccagaccaacaacgtctcatcttcgccggaaaacagctcgaagatggccggaccttggccgattacaacatccagaaggagtccaccctccatctcgtcctccgtctacgtggtggcatgcagatcttcgtcaaaaccctgaccggcaagaccataactttg

SEQ ID NO: 203603 - DNA, 441 bp, Gossypium hirsutum
aattgaagctcgaataggggtgatgttttacattcttgggaggtatgatgagtcaaggaactcttttgagagtgcagtaacaaagcttagagcaagtggggagaggaagtcagccttctttggggttgtcttgaaccagatgggcttggcttgtgtccaattattcaagattgacgaggctgccgagttgtttgaagaagcacgagcaatactcgaacaagaatgcggcccatgtcatcaagataccctgggagtatacagcaatcttgcagcaacttatgatgctatgggaagggtcgaagatgcaatcgagatattggagtatgtactaaaattacgagaagaaaaacttggaatagcaaatcctgattttgaagacgaaaagaataggctggctgagctcctgaaagaagcgggcaagccacgcaacagaaaagcaaa

SEQ ID NO: 203604 - DNA, 223 bp, Gossypium hirsutum
ggatgttggtggtcaggacaagattcgacctttgtggaggcactatttccaaaacactcaggggctaatctttgttgttgatagcaatgaccgtgaccgtgtggttgaggccagggatgagcttcatcgtatgctaaatgaggacgagcttgaggatgctgtgcttcttgtgtttgcaaacaagcaagatctgccgaatgctatgaatgctgctgagattact

SEQ ID NO: 203605 - DNA, 349 bp, Gossypium hirsutum
gaaactttggtttctactgcacaacagatattgcctgcggaagtgcttaaaagagttttacaagatgtactttctcacatatcagagaagaccgtcggggctttatttggagactcggtgaagaggtttaatgtaaatgctattatggggattgatgtggatattcggttgttagaatctcttgcggataacctatcacctgtgttttctgaaggggatacacatcaattgaaaaatgcacttgcagagtcaaggcagttggtcaatttgcttttgagcaatcatccagagaattttctgaacccagtaattagagagaagagttacaatgccctggactacaggaaag

SEQ ID NO: 203606 - DNA, 323 bp, Gossypium hirsutum
  unsure (1)..(323): unsure at all n locations
ggttgcgtcttcggggtggtttgcaagttttggtgaaaacgctaccgggaaagactattacctgggaagttgagagttctgatacgattgacaatgtgaaagctaagatccaggacagggaaggtattccaccggatcaacagaggctgatttttgctggcaagcagctggaggatgggaggaccctngctgattataatattcagaaagagtcaacccttcacttggtgcttcgcctgcgtggtggaatgcagatatttgtgaaaactttgaccggtaaaaccatttacgttgaggtggagagctncgacacggttgataat

SEQ ID NO: 203607 - DNA, 314 bp, Gossypium hirsutum
gttttcttttcctccaatctccatcaccactccttagaggctccatttcgaagtgaatcatggcgaggaagatgttagttgatgaggaaatgaaccaaacgaatcaagaggaggctcattatgatttcgacttgtttgttatcggcgccgggagcggtggcgttcgtgctgccagattctccgctaactacggagctaaggttgggatttgtgagctcccatttcatccaatcagttcagaagtcattggaggaagttggtgggacatgtgttattcgtggctgtgttcccaaaaagatttggtctatggagcg

SEQ ID NO: 203608 - DNA, 331 bp, Gossypium hirsutum
aaagatctttctcctgatcttcaaaagcttcgctgcaaggtggcatttcaagcattaagatttgctccgccgatcctggaactcggtaacaagctcgctcggagaatgcagagcaagggaccatattttgctcttcatcttcgaatcgagaaggatgtatgggtgagaactggttgtcttccaggcttgagtaaggaatatgatgagatagtccacaatgaaaggagaaggcaccctgaatttcttactgcaaaatcaaacctgagttaccatgaaagaaaacttgcaaggctatgccccttgaatgcttttgaaatgactaggctgctta

SEQ ID NO: 203609 - DNA, 269 bp, Gossypium hirsutum
gtggattcttaacatttttaaatcaagtgtctgcgacagcccacggtaccttttgacggtgtcatcgacgtttatggggaactcgacgtctatacaagagatgtttctacatgtttctgaacagttcacagtgatgtttatgaggaaagcatttttgcattggtatacacgggaagggatggatgaaatggagtttactgatgctgaatgtaatatgaatgatttgatttctgaatattatcattattaagatgctgtagttgattaat

SEQ ID NO: 203610 - DNA, 339 bp, Gossypium hirsutum
ctacaacttttcgagacatcagcctagactgacctagaggacaatgtgccattagcagcaccctcttatgagcctggacaactcatataatggtcttattacaaagctgctatagccgaacttggagccacctcattgtatctttacatcaccgagtatactgtcatgactacttatcactctaaaaccacatgtacaaccgttagcattcaatgtattacttgctcttctggcttcatgatctatgctctcgtttactctactgaccgcattgcacgaggtcttactaaccatgctgttaccttatcatttttaatagcaaataaactttcacttaca

SEQ ID NO: 203611 - DNA, 231 bp, Gossypium hirsutum
  unsure (1)..(231): unsure at all n locations
aaaaagagcttgaatctgtcagaaaacatcgaaagcaaggtagaaaccgccggttttctgttcccgttcctgtagtatctttggttgggtacacaaatgctggcaagagtacacttttaaatcaattgactggagctaatgttctttcagaggaccgactgtttgctacccttgatccaacaacaagaagggtcagatgaaaantggaagtgaattctttttactgacact

SEQ ID NO: 203612 - DNA, 295 bp, Gossypium hirsutum
ggttatacttttccactggtaattcatcctatgttcaggtagctactcatccgaaacttgccaagcatgctggtgctttctgtgaccacccacatcatggtgttcttagctttgctaatcagcttgccggggctcacgtgcttctgacccgattgagattgattttgagtcctgactatccatataatgaaatattgagttcgtttcataactaatccagcatacttatattctcattccgtccagttctcactagctctaatatgtccatcaggagtgctgattcatctaaacc

SEQ ID NO: 203613 - DNA, 270 bp, Gossypium hirsutum
attccacatttttctaactctgtcaagcttagctatgtgaagcttgtctaccaatatctcgccaatcatattcttacacttactctcatacctgtcatggctggcgctcttatagagattcttcggttacgccctgctttcatagaacctctttggaattcccttcattccgatctcagaaacatctcatgctcttgattcaacattatatcttgatcctctcactacttcatgtatacacctataatcacataccttgttgattattca

SEQ ID NO: 203614 - DNA, 408 bp, Gossypium hirsutum
aactggatgctacaaccttctatgtgcaggctttgtgcgaacaaatagtagaattgccattggggctgccatttctcctgtctcacaatatgatgctaatcaatatgatattaccatcctcatttggaaggatcctaagctaggaaattggtggatggggtttggtgataataacctggtaggttattggccagcagagctatttactcacctagcagaccatgccaccatggtggaatggggtggtgaagtagtgaactcaagggccaacggcaagcacacgtctacggaaatgggctccggtcactttgctgaagatgggtttggaaaatcgagctatttccggaacttggagcttgttgatgccgataatagcttgagttcggtccatgacatatcaaccctagc

SEQ ID NO: 203615 - DNA, 428 bp, Gossypium hirsutum
tgcagggatggattccctaagcgatagagcgtcaatgatgagggaagctctccagaagagccaaaccattacggacaacgtcgtctccatcctcggctccttcgacagccgcctctccgccctcgaaaccgccatgcgacctactcagattagaactcatgctataaggaaagctcatgagaatatagacaagtctttgaagtctgcggaagttattttggcacaatttgatctatctcgtcaggcggaggctaaaatacttaagggtccccatgaggatctagaaggttatctgggagcaattgatcagctaagaagcaacattcgcttttttagcagcaacaagaactttaagaatagcgagggggtgattaaccattctaacactttacttgctaaagctatttcaaagctagaggatgagttta

SEQ ID NO: 203616 - DNA, 347 bp, Gossypium hirsutum
gtcaaagccatttttttcatcaaatttaggaagaaacgctgtcaatcatccttgctagacctattgtacttcatatggctttcaactagttgcccttcaacaagtgcttacatcacctacaaactcgcctgcaacctcattaccttctacactattctcattgagaatctcatttagctatcttgacatagtttgtctagtctgcttaaactattttggcacaatctgatctatcttgttacgcggatgcttaaactcttaacggttcccatctggatctataacgttatctctgagccatttatcatcttataatcatcatttgcttttttagcatcaactttaac

SEQ ID NO: 203617 - DNA, 357 bp, Gossypium hirsutum
gagctgttgtaggagaaggcaacaggcatgtacgagagggaggtgtacgttttgcctaagcacctcgatgagaaggtggctgctcttcaccttggaaagcttggggctaacctcaccaagctcaccaaggatcaagctgactacattagcgtccccattgagggtccttacaagccctcttactacaagtactgatgagagaatacgacagagggacagcgagttagatacagacagggagagagtttgacttgtaaaaggcaccattcaacgggatcgtttggttttactaaaatttattgatgatttgaggttagatggttagattttgattttggtaggagtttgtttgtggag

SEQ ID NO: 203618 - DNA, 413 bp, Gossypium hirsutum
tccaaagctttagcgttatcggaaaactcaccggaaatgcatcatgtgtacattggagaaacgcggcaacgtctttattttaacatttaccggcgaagaccagcaccggtttaatcccaatctcatcggctcccttctcagccttctctctcaggtcaaggctgaagccactcgtggctcagctcttattacccaagcccaaggtaagttcttctccaacggcttcgatctcgactgggctcaagccgccggatctgaacaaggagccgcggaacggttacaccacatggtggctttgtttaagcccgtcaccgctgctcttctgtccctcccgatgcccaccgtcgccgtcatcaccggtcacgccgcttccgctggatttctcctcgcgttgtctcaacgatacctgatca

SEQ ID NO: 203619 - DNA, 237 bp, Gossypium hirsutum
gtcgtccgataatctgaccgacaagaataccggtttcagaaagctgaaagcaaaattagaaaacaagatgtgtttcgattgtaatgcgaagaatccaacatgggcgtcagtgacttacgggatctttctttgcatcgattgctcagcccttcatcggagtcatggtgtacacatcatctttgtcaggtctacatatatagattcttggtctactgaacaattgataatgatgatcta

SEQ ID NO: 203620 - DNA, 405 bp, Gossypium hirsutum
  unsure (1)..(405): unsure at all n locations
aagaagactacgttagtccgtcttgatgtaaaaccaactgaactggctgatgcacctaatgacgctaaatattttgcgatttatttggaaaatccattaaagtctggtgaaagcacaaccctagaagtattgtacctgttgacacactcccaagaaccctttccagctgagatagcccaatcagaatctcaattagtatattatcgtgatagtgcgttgatattgtcaccatatcatattaagcaacaaacgacttttattaagacaccaagtactaaagtggaatcgttcacaagggtggaacccagtaatcgtgcaggcactgaaataaagtatgggccatatgaagatcatcctccatactctntttctccaattcttatacattttgagaacaatagcccg

SEQ ID NO: 203621 - DNA, 432 bp, Gossypium hirsutum
ctcaactattggagtataggggtaagattgaagctgagggcagcatgatctgtgatgggattttgagccttcttgaatctcacctcattcctttggcctcatctgctgagtcgaaggtgttctaccttaagatgaagggtgattatcacaggtatcttgctgagtttaagactggtgctgacaggaaggaagctgccgagagcactttgttggcttacaagtctgctcatgatattgctcttgctgagcttgctcctactcacccaattaggctgggacttgctcttaacttctctgttttctactatgaaatcctcaactcacctgatcgtgcctgcaatcttgcaaaacatgcttttgatgatgctatttctgaatttgatactatgggtgacgaatcttacatagatagtacattgatcatgcaacttc

SEQ ID NO: 203622 - DNA, 419 bp, Gossypium hirsutum
ccggtattcaggtcggaaatgcttgctgggaactttactgtctcgagcatggcattcagcctgatggccaaatgccaagtgataagactgttggtggaggagacgatgctttcaacacctttttcagcgaaactggtgccgggaagcacgtccctcgcgccatctttgttgatctggagcctactgttatcgatgaagtgaggactggtacgtaccgccagttgttccaccctgagcaactcatcagtggcaaagaagatgctgccaacaatttcgctcgtggccattatacaattggcaaagagattggtgatctctgcttggatcgtatccgaaaacttgctgataactgtactgggctccaaggcttcttggtttttaatgctggtggtggtggtaccggttctggtcctggatct

SEQ ID NO: 203623 - DNA, 336 bp, Gossypium hirsutum
ccagcctttttctgcacaaaatgtcgacaaatcaaccatgtcgcctcggaaagttttccgggtttttaagtatgtgaacgatttgcatggtcttattagcccagttcctcaaggaactcccgtaccacttgttctgctaggaaagtcaaacaatgcactgttgtcaactttcttatttctcgatcaaattgtgtggcttgtcaaaacaggcatctataagaacaaagaacttgcttagttgattggacgaatattccttttctgttgtatgggatcatcaatatgtaccacattgtttgagcttgttgagcttgtaacgctttctgcatcaattaa

SEQ ID NO: 203624 - DNA, 256 bp, Gossypium hirsutum
tttgcatggtcttattagcctagtttctcaaggaactcctattccacttgttctgctaataaagtctaaaaatgcactgttgtcaactttcttatttctcgatcaaattgtgtgtctttgcataacatgcatctatcataacaaagaacttgcttatttgattggacgaatatcccttttctgttgtattggatcatcaatatgtaccacattgtttgatcttgttgagcttgtaaagctatctgcatcaattaaa

SEQ ID NO: 203625 - DNA, 342 bp, Gossypium hirsutum
atttgaagttttaataggggtgatgttttacatgcttgggaggtatgatgagtgaaggaagtcttttgagagtgcagttacaaatcttagagcaagtgttgagaggaagtcagacttcttaggggttgtcttgatccatatgggctttgcttgtgtccaattattcaatattgactaggctgtctaattgttagaagaagcacgatttatactataacaataatgcagtcgatgttatcaagattctctgtgagtatacattaatcttgtaccaacttatgatgatatgttaacggtctaatattcaatttagatattgtagattgttctaaaattactaat

SEQ ID NO: 203626 - DNA, 387 bp, Gossypium hirsutum
aaagatctttctcctgtatcttcaaaagcttcgctgcaaggtggcagttcaagcattaagatttgctccgccaatcctggaactcggtaacaagctcgctcggagaatgcatagcaagggaccatattttgctctacatctactaatcgagaaggatgtatgggtgagaactggttgacttccaggcttgagtaacgaatatgatgagatagtccacaatgaaaggagaaggcaccctgaatttcttactgcaaaatcaaacctgagctaccatgaaagaaaacttgcagggctatgccccttgaatgctttcgaagtgactaggctgcttaaagctctgggggcgcccaggagtgctagaatatactgggctggagggcaaccact

SEQ ID NO: 203627 - DNA, 299 bp, Gossypium hirsutum
gtctcacgagatagatatttttccatttcttcaaaagcttcactacaaggtgtcatgttaagcataaagatttgctgcgcctatcctggaactcggtaacaaacttgctcgtagaaatcaaagcaagggaccatattttgctctacatcttctaatcgataaggatgtatgggttagaactggttgtcttccaggctttactaactaatataattatatagtccacaatgaaacgagaaggcacccttaatattttactgcaaaatcaaaccttatttaccattatagaaaacttttat

SEQ ID NO: 203628 - DNA, 420 bp, Gossypium hirsutum
tttctttgatttcgaattttaaaaaaaataataatcaccgtaatggtccattgcctcatcttcataatcttcatcattgtcatctgcaacagcatcttgatattgctgatactccgaaaccagatcattcatgttactttccgcttccgtaaactccatttcatccattccttcccctgtataccagtgcaaaaatgccttcctacggaacataacggtgaattgttcacaaacacgccggaacatctcttgaatcgacgtcgaattccccatgaatgttgatgacattgttaacccggtgggtgggatgtcacaaacacttgatttaacattgttgggaatccactctacgaaatacgatgagttcttgctctgcacatttatcatttgttcatcaacttctttagtgctcatcttgcc

SEQ ID NO: 203629 - DNA, 407 bp, Gossypium hirsutum
tctcaggttttcacacgatatacttgatttgttttttaaaaaaaatcataatcaccgtaattggtccattgtctcatcttcataatctctatcaatgtcatctgcaacaccatcttcatattgctgatactcctaaaccagatcattcatgttacttttccccttccgtaaactccatttcatccattccttcccctgtataccaattcaaaaattcctttctacttaacataactcttaattcttcacaaacactccttaacatctcttgaatctactttcaattccccattaattgtgataacttttttaacccttattattggatttcacaaacactttattttacattctatgaaatccactctactaatctcaataacttctttttcttaacatttatcatt

SEQ ID NO: 203630 - DNA, 278 bp, Gossypium hirsutum
tttaaaaaaaataataatcaccgtaattgtccaattcctaatgttcataaccttcatcattatcatctacaacaccatcttcatattactaatacttctaaaccaaatcattcatatcactatccacttccataaactccaattcatccattcattcacctatataccaattcaaaaattccttcctacttaacataacttataatttatcacaaacactccttaacatatctttaatccacttctaattccccattaatcttaatcacattaataac

SEQ ID NO: 203631 - DNA, 333 bp, Gossypium hirsutum
gcagtcttttgatctctgccccaaagcaaaaagttgtcgtcttttacaatcacaactactggttatttattttcatggctcaaggagattctaacttccagcaagacatggctaaagaggaagaagaacagaggctgaaatacttggagttcgtgcaagtagccgccgttcacgccgctttgtgcttcaccaacctttacctttacgctaaggaaagatcggtgccgttgaaacctagcgtcgagaccgttgagggaacggttaatagtgtggttggaccggtttatgataaataccatgatgtcccttgtgaattccttaaattcgttgatt

SEQ ID NO: 203632 - DNA, 384 bp, Gossypium hirsutum
  unsure (1)..(384): unsure at all n locations
gcctcgttcacctttttgtgaagggaaatgcaaagggaggtgcaataaagcggcgggttgggatcggtgcttcaaatattgcggcatatgttgcgaggagtgtcaatgcgttccgtccggtacttacgggaacaaacacgagtgtccttgctacagagataaggtgaacaacaagggcaaacccaaatgcccttgaaaatgaaatatattcgagttcgggatttaatcaagcttaaagatcgaggacgaagaggccatatatatatatatatgcatgttgatgatgatgttattataaaaataaacttnngtttgtgctgttattttcctttggngtttttgggtggtaggggtgaataatattttccttatattttccctctc

SEQ ID NO: 203633 - DNA, 371 bp, Gossypium hirsutum
gatcagctcaccgatgatcagatctctgagttcaaggaggcctttagcctattcgacaaggacggcgatggctgcattactaccaaggagctcgggactgtgatgcgatcacttgggcagaaccctactgaggcagaacttcaagatatgattaatgaagttgatgctgatggaaatgggaccatcgattttcctgaattccttaacctgatggcgaggaagatgaaggatactgattctgaggaggaacttaaagaggctttcagggtttttgacaaggaccagaatggtttcatatcagctgctgagctgcgccatgtcatgacaaatctcggtgagaagcttacagatgaggaggttgatgaaatgat

SEQ ID NO: 203634 - DNA, 409 bp, Gossypium hirsutum
  unsure (1)..(409): unsure at all n locations
ctcgtgcgcgttttttttttttttttggtcccatttgaacggtggtgggccctctgcttatggatgtcgtgatcctgcttgcagagatgcttctacagcangcttagtaaaagtatgtgccacttatccttttggtgtggatcctaagtggcatggtactcggagtgagctaccatttctcaactcactgaagatgaagatgtcaattttgcttggagtagctcagatgaatcttggaatcattttgagttacttcaatgcaaagttttcgggaaatgaactcaacattcggtaccaattccttccccaaatgatctttctgaacagtctgttcggatacttgtcactcctcatagttgtgaaatggtgcattggttctcaagctgatctttatcacgtgatgatatac

SEQ ID NO: 203635 - DNA, 439 bp, Gossypium hirsutum
aatttccaaaggatatagattttttgttttgaaggtttggtgagaatggacaagaatttgatggacaaagtttctgcctttggtgagctcctgaagacggaaggagccgaggtgggaagaaagatgagtgctggcatgagctcagttagctttaaagtgaaagagctcttccaaggcccgaaccctgctgataagcttgtcgacgatgccacctcagaggcccttgatgagcctgactgggccttgaatctcgatatctgtgacatgatcaaccatgaaaaaattagcagtgttgaactgattcgtggcataaaacgaaagataatgttgaagaaccctagggttcaatacttgtcattggtgttgcttgaaacttgtgtcaagaattgcgagaaggcattttccgaggtagcagctgagagagttcttgatgagatgg

SEQ ID NO: 203636 - DNA, 432 bp, Gossypium hirsutum
cagctggatgagattcttggaccagctgagtgcactatagtttcttgactatcaaactatcatttggactcctatgtcctttctgagtctagcctctttgtttatccatacaagatcatcatcaaaacctgcgggacaacaaagctacttctttcgatcccacccatcttgaagttggcgggtagcctttctcttaccgtaaaatctgttcggtacactcgtgggagttttatcttccctgctgctcagccatatcctcatcgttacttcactgaagaagttgttattcttgatagccattttggcaagcttggcgctggtagcaaagcttatgaaatgggtgggctggataaacagaaatggcatgtttactctgcttctgctgaatctgttaacaccaaagcccctacttacactttagagatgtgcatg

SEQ ID NO: 203637 - DNA, 416 bp, Gossypium hirsutum
gttgatctctgcttggatcgtatccgaaagcttggtgagaactgtactgggctccaaggcttcttggttttcaatgctgttggtggtggtactggttctggtcttggatctcttctcttggagcgtctctctgttgactatggaaagaagtcgaagcttggtttcaccgtctatccttcacctcaggtttctacatcagttgtagagccttacaacagtgtgctgtccactcattcactccttgagcacactgatgtcgctgttcttctggataacgaagcaatatatgacatctgcaggcgttctttggacattgaacgacccacttatacgaatcttaaccgccttgtctctcaggttatctcatctcttaccgcatctttgaggtttgatggagccctgaatgtggatgtgac

SEQ ID NO: 203638 - DNA, 386 bp, Gossypium hirsutum
ccaacaatgttaaatcaagtgtttgtgacatcccacccagcgggttaacaatgtcatcaacattcatggggaattcgacgtcgattcaagagatgttccggcgtgtttcggaacaattcaccgttatgttccgtaggaaggcgtttttgcactggtatacaggggaaggaatggatgaaatggagtttacagaagcgtaaagtaacatgaatgatctggtttcggagtatcagcaatatcaagatgctgttgcagatgacaatgatgaagattatgaagatgaggcaatggaaaattaaggtgatttttttaaaaaaattcaacttcaaaaaaaaaaaaaagccaatggtgtttttggggactacttggtgatttgtcaattgatg

SEQ ID NO: 203639 - DNA, 354 bp, Gossypium hirsutum
gcagaagcggctagccgctagcgtcctgaagtgcggtcgcggcaaggtctggctcgatcctaatgaaatcaacgaaatctccatggccaactccaggcagaacgttaggaaacttgtgaaggatgggttcatcatcaggaagcctactaagattcactcccgctctcgcgcacgtaggatgaaggaggccaagagaaagggaagacactctggatatggtaagaggaagggtaccagggaggcaaggttgccaacaaagattctttggatgaagagaatgcgggtactgaggcgattgcttcgtaagtacagggaatccaagaagattgacaagcacatttaccatgacatgta

SEQ ID NO: 203640 - DNA, 375 bp, Gossypium hirsutum
ctttgggattggattgttggtatttggcaagatgtgtgtagcaattaaggatgatgaggttgacattgtaataggagctcttcgttcggatctgacaacatttatgaatgaatggagaccaatgttctctcgatttcatctcataattgtcaaagaccctgatttgaaagaggaactcaaaatacctgaaggctttaaccttgatgtctacggaaagcctgacatagatcaagtggtgggttcttctacttctattctcttctctggctattcatgcaggtattttggatatcttgtttctcggaaaaagtacattatctctgtagacgatgactgtctcccagcccgagaccctaagggctttttggtggatgc

SEQ ID NO: 203641 - DNA, 419 bp, Gossypium hirsutum
  unsure (1)..(419): unsure at all n locations
gttcaaggaccacttcttcccttccattgtactttgttttagttgccataacgtcaccttccaatacaacccacaatgaggcaacaatatgtcttcactactctcacgttgctcatcctgttttccctcagttgttcaacaacattagcccaagctccggcactggctccagcaccttctggtccgacaaacgtcaccaagatcctcgaaaaagccggtcaattcaccctcttcattcgtcttctaaagtccactcaagtggccaaccagctgctcggtcagctcaacaattccaacaatggtatgaccgtttttgcaccaacggacaatgctttctccagccttaaatcgggcacattgaattcactcaccgatgaacaaaaagtggagctggtgcaattccacatcgtnccaacata

SEQ ID NO: 203642 - DNA, 375 bp, Gossypium hirsutum
  unsure (1)..(375): unsure at all n locations
gctgacattgttgtggttggtgttggtggaaggggttgtacagcactatttaaagggcaggttgaagaggagacgggcggaataaagactgatgcttttttcaaaacaagtgttcccacagtatatgctgtgggtgatgtggccactttccctctgaagttatacaatgagttgagaagggttgaacatgttgaccatgcccggaaatctgccgaacaggctgtaaaggccatcaaggggcttgagaaggggcaatcagtcgacgaatatgactacttaccgtacttctattcccgttcctttgacctagcatggcaattctatggcgacanatgtgggatactgtgctttttgagacaaacaccacatcaccga

SEQ ID NO: 203643 - DNA, 453 bp, Gossypium hirsutum
  unsure (1)..(453): unsure at all n locations
cctccaccaaccagaatcaaaacctctgccttgggtttgtttgggttgttgggtattccacttgcggtaacatttagcattccattcgcattggcatccatctattgctctgaagaaggtggcggtcaaggtctgtctttgggagtactaaacttgtctatagttatcccacagatgattatatcagtgattagtggaccgatagatgcagcatttggtggcggaaacttaccagcctttgtattggggtctattttggctgccattagtgctttattggcaatatttgcacttcccaatcccaaaacacaactctctctcaactcaaccggaatggctggagcccattgaccactgtcatggaagaaagtgagatactatatngnttcctttnttctttaattntctgggatctactctcttgtcagaatttcttaattactgactgatgta

SEQ ID NO: 203644 - DNA, 410 bp, Gossypium hirsutum
gtggttggacttgtagacccttgataattgaaacctggggatgtggtttgtgtcaacaaagacagctacttgatattggatactttgccatctgagtacgactccagagtaaaggctatggaggttgatgagaagccaactgaggactacaatgatattggtggcttggagaagcagatccaagaactagttgaggccattgtgttgcccatgactcataaagaaaggtttcaaaagttaggcattcgtccacctaagggggtgctcttatatggacctcctggcactggaaaaaccttgatggcccgtgcttgtgcagcacaaacaaatgccacgtttctgaagctagcaggcccacagctggttcagatgtttattggagatggagcaaaacttgtccgtgatgcttt

SEQ ID NO: 203645 - DNA, 384 bp, Gossypium hirsutum
  unsure (1)..(384): unsure at all n locations
atatgatgattgttccataaaaaatatancangaaacagcacctcttgtcctagaaacagtgctaaaatgctgccaagagatttcaattatcctacactcactgctttagtaccagcaggcaagccattcactgttaatttccatagaacagtaacaaatgttggtatagcaagatctacttacaatgcaacaatctctatcctgtcggaacccgaaatccaagtgggtcctcaagtcttgtcttctaaagctctaacaaaacagaagtcttaccatgttattgattctggcaaagctttgggtgagacatcaatggtatctgcaacattgatatggtcagatggtactcataatgttagaagttcgatcgttattcacacata

SEQ ID NO: 203646 - DNA, 441 bp, Gossypium hirsutum
gcaggattttgaagagataaaatccttgtcccatgtgcggcaattagtttagggacttcacggaaaagaagaatcccattaggagaagatgagtcaaatgtcaagcgttgtgctttgttcaagacaaactcagccatgaattttaacaacggagtggtaacctctggtgtgtcagtccagtgagtaatgcctttcaagataagtggcatgtgcacagggtatagccaatcgaatagaagaccatatgttctacgactgtttgtggccattgcaattcctctaagatccctcattaatccaattaaagcatacttaaccgcatcagtacgaaataccgcatcgggtgttgactccaggctgacaaagacttgcagaagtggttccattgaagacttgaatttgatagggcttgccttcataaaaatcaaccacccaatggtg

SEQ ID NO: 203647 - DNA, 398 bp, Gossypium hirsutum
gatcattgctgctattaattaagctgggaatgtcaagagatttttggcgtgggaatttggaatggacgtggacaagaacaatgcggttgagccagcaaaatcgacattcgcaatcaaggctcaaatccgtcatgctgttgaggctgaagggatcccttacacttatgtgcctgctaactgctttgcaggctattttcttcctacattgtcgcagccaggagccacctctcccccaagagacaaggtggttattctaggtgatggaaatcctgaagctgttttcaaccatgaagctgacatcggaacctacaccatcaaagctgttgatgaccccagaacagcgaacaagactctattcatcaggcctcccaagaacacctactcatttaacgagctca

SEQ ID NO: 203648 - DNA, 324 bp, Gossypium hirsutum
gggatgtgaagattgcttgtaagtgttttattgtggcagccaatgcaggtcgaccaaaggcgttttatcagttggctaagatgtttcgtactggtgttgggcttaaaaagaatcttcctatggctactgcattatacaagctagttgccgaacggggaccatggagttccctctctagatgggcacttgaatcatacctaaaaggtgacatgggcaaagcattcctcttgtattctaggatggctgagctaggttacgagatagcacagagtaatgctgcatggatccttgacaagtatggtgagcgcaacatgtgcatgggtg

SEQ ID NO: 203649 - DNA, 388 bp, Gossypium hirsutum
atacccgatgctcctgcggcctcttcctcgccaggggtgaaggcgagaactgtgatgatcccctcccccaatgagcccgggaagaagatcgagatgtattcgcctcagttctacgctgcttgtacctttggcggtatccttagctgtggtctcactcacatggccgttactcctcttgacctcgtcaagtgtaatatgcagattgaccctgcaaagtacaagagtatttcatctggttttggagttctactaaaggagcaaggagtgagaagcttcttccgtggttgggttcctacccttcttggttacagcgcacagggtgcttgcaagtttggattctatgagttcttcaagaagtactattctgaccttgctggacctgaatact

SEQ ID NO: 203650 - DNA, 355 bp, Gossypium hirsutum
gtcagccaagacaaatacttatattgccactgctgtttgcttgtgggatgcaggagagtatgtccaaaatttatcatgatattcatgtgaatctagcaacacttggggtgactgtagctaggcatagtaagaaaccccgagtctatatcggctgcgtgaggtcggatcctgtgctcgctcgaaagggagcgaaataccaagaacctgagtactggaaaatgggtgaggttgggaacaaatatttgcgacatgctactggacaactgtatgctatatccaaagattcggctacttacatatccatagatcagcatgtactgcatcaatatgctaaagaagaggtttatttgcgagc

SEQ ID NO: 203651 - DNA, 371 bp, Gossypium hirsutum
  unsure (1)..(371): unsure at all n locations
gtgactcttaccactcccacatttggtacctatantcgccggattatgggaaaccgcctcgtgctgtattcaagcctcccaaggtgaaaccaccaccatatgaacctaagccaccagtgtatgaaccaccaaaaaaggagaagcctgaacctaagccaccggtttatgcacctccaaagaaagagaagcatggacccaaaccaccaatgtatgaacctncaaagaaggagaagcctgagccaaagccaccagtttatacacctccaaagaaagaggagcctaaacctaaaccaccagtatatgaacctccaaagaaggagaaacctgagccaaaaccaccgatttatacacctncaaagaaagagaaacct

SEQ ID NO: 203652 - DNA, 331 bp, Gossypium hirsutum
cggttgcatcgtattatatatagttttcaatggagtactccagctggtcatatacactaaggaaaagaatgcaattctctttacttatcctcctgctggatccgtcaccagcactggtttggtggtctcgtcaaagttaccaagattctctgatctttatacacttacgatagcaagtgcagatcccaagtcgatatctgcaaggaaaccggttgagttgaccaaaagtgttactcaatggttcactaaggacggagtattggttgagggcctattctggaaaagatgttgaacactaataaatgattatgcgacagaaccaaagaaaaag

SEQ ID NO: 203653 - DNA, 382 bp, Gossypium hirsutum
  unsure (1)..(382): unsure at all n locations
cgaggcaccgtctccgtaagcanaaccacaaanggaaagctgtggagagagactccaaaaacagatgtctaaggggaagttagtgaagaaggaccagggtcgtaagggactatttgtggaccctccaaaccggcacctctgattgacatnggctgaactcaagtcatggtctttttacagagccctcatagctgagttcatagccactctcctcttcctctatgtcactgttgctactgtaattggtcacaagaaacaacaagatgcatgtgatggtgttggtctttttggtattgcatgggctttcggtggcatgatctttatcctttgttactgcactgccggtatctcaagtggacacattaaccctgcggtgactttt

SEQ ID NO: 203654 - DNA, 335 bp, Gossypium hirsutum
ctatttttctctgcgagaagagaaatacgatggagggtggcatatcccatataacctggaactgaagcgatggaagggattgagcagtggaaggatcaattagagcagttgaagattcaattggagccatggaagattcaactggagcagtggttgcatcaagcaattgaatatttggatcaaatacccccaattcaactctatgctgctattgctgacttgttcatatctaccctcttgcttttctccatccgctcgttcaagcgcactaaatcaaataccatagtactcacaggccttattgggagcggtaaaacagttcttttctatgtgct

SEQ ID NO: 203655 - DNA, 427 bp, Gossypium hirsutum
  unsure (1)..(427): unsure at all n locations
tccaagcaagcattttccttaccaggttggttttcttggggatgatcnatatgggctggctaatggcccttaagcttgcatgtgtggcggtgttgtgcatggtggtgggtgcacccctggctcaaggggccgtaacctgtggtcaagtcacaagctccctcgcaccctgcattggttacttgacagggaatggtgctggtggcgttcccccaggttgctgcggcggcataaaatctctcaactccgccgcccaaacaacaccagaccggcaagcagcttgcaaatgcatcaaaagtgcggccgccggcatttctggcatcaactatggtattgcaagcggactcccaagcaagtgcggtgtcaacatcccttacaagatcagccctagcactgactgcaacagcgtcaaagtgagttttggcatgga

SEQ ID NO: 203656 - DNA, 370 bp, Gossypium hirsutum
atcatatttaacgaaacacccttcgagttgcaacacgccacgcgtagagtcaaggcaaagagtgccgagttgactgacggctttcgccacacagcggccacaatcaccgctgttgaggttaccacggcactggaataggccgtagacagtgtcctgattgctggctcctggaagggtaaagttactgtaagaggtgtacatggctgagttgaccagggaagtgagtatggagttgacgttggactcataaggtgagccagacgtgtatttaagctgcgaacagccaccgaaaacgaaggaatcggtggctgaatctgatggtgttatgaagaaacaccatacagcgagaagaagaagaaacagcgcggca

SEQ ID NO: 203657 - DNA, 347 bp, Gossypium hirsutum
  unsure (1)..(347): unsure at all n locations
ggtttatttattcctacttatttccaacagtaccgacccgagtcaattgggatgctgccaagttattttgttccgtatgcagctgcatcagatggaccagtccacaccattaatgaacaacttgatttttctataaatgcactcttgtctatgagcatggtggttacactcttggtagcatttgtactcgacaacacagttccaggcagccgggacgaacgaggggtgtacatttggtcatgtgctgaagatgtcgcaactgatccatccttgcaattggattactctctgccaggaaaattttcctcactttgttgtcgntctagctgtttgcgggcataatactc

SEQ ID NO: 203658 - DNA, 379 bp, Gossypium hirsutum
ttcttcttcaacctgagttttctttttcctccatggactcaaagaaagcccctgagccagcaccaaagaaaagttcgagtggatcacatgatagagatgttgctcttgcggatcttgaaaaggaaaaaaaattgtcattcattaaggcatgggaagatagtgaaaaaaccaaagctgagaacaaggcccagaaaaagctctctgctattgtagcatgggagaacagcaagaaagcagctcttgaagcaaaactcaaaaaaattgaggaacaattggaaaagaagaaagccgagtacgccgagacaatgaagaacaaggtagcttcaattcacaaggaagcagaagaaaagagagcaatggtcgaagccaaacgtggaga

SEQ ID NO: 203659 - DNA, 365 bp, Gossypium hirsutum
agaaaaaaagaagattatatttggtaaaattgcagggataggtcttaaggccacctgaatttaatttaagtataagcgttgaatatgagtttgaattaaccgaaaacatttcagtaaaccgagattagatcctgttttctaacaaagaagacatctcaaaaacagacaataaaaaaacatatcattagatggatccgccattaacaactgtctcagaagagcaaaagcttgtagaattcgattgatggacaggtattctaaaaacccagagtttccctttagcagagacaaagttttgttcgcagaagaattcccaagaaaaccatttttcaatcgtccgatgaacatcgtgaactacaacgtca

SEQ ID NO: 203660 - DNA, 354 bp, Gossypium hirsutum
ccccgggtcctcctcggggctgctataactatgtgcctgcctcattacgcgggacgaccgccaccaaaaaaagcagtgcaggtcctggagtcacccccaccgatgatgacgatgacgccatctcagctaccggcgctttataagcagcgctcgttgtcgccagacattttccgcgacgaggcatggcttagaaggaaagggaacagcaagaacagagggagcaagagcgtgacggacgaagaccttgatgaactcaaggcttgtattgagttggggttcgggttcgagtttgactcacccgaggtggatcaacgtttgtccgacactttgcctgctcttggcctctactatgct

SEQ ID NO: 203661 - DNA, 390 bp, Gossypium hirsutum
  unsure (1)..(390): unsure at all n locations
tgggggagtacatgaaggctattaaggatttatcagtgggatggagcatagaggagtcggatattgagtgcttgtacttacgagcttcatgctatcatgctattggagaatatgcagatgcggtcaaggactatgatgctgccctagatgttgaacttgactcgatggaaaagtttgtgcttcaatgtttggccttctatcagaaagagattgctttatatacagcttccaaagtcaacagtgagttttcttggtttgatattgatggagatatagatccactgttcaaggagtactggtgcaaaagatcgcaccccaagaatgtatgtgagaaggttttcagacagcctccattgcgtgattctctgaagaagggaaaagctanaaaac

SEQ ID NO: 203662 - DNA, 335 bp, Gossypium hirsutum
  unsure (1)..(335): unsure at all n locations
cagcaccatgcttttacaagtctgcaccaccaccaaaacacggtgataatccaccggcatcggcaaatctactccaccaccatcnccatctcctccaccaccatactattacaagtccccaccaccaccagttcattccccaccaccaccatactactacaagtctccaccaccaccttcttcctcaccaccttcaccatactattacaagtccccaccaccaccaaaacacttatagcagccctcatacatctacaaatctcctccaccaccatcttcatctactccaccaccatactattacaagtccccaccaccatactactacaaatctc

SEQ ID NO: 203663 - DNA, 373 bp, Gossypium hirsutum
gcttaacggaaccaatggcgaaactttcacccagggtcgagatggccttgcacagcgatgccagaagtactatgaagctggtgcccgctttgctaaatggcgtgctgtccttaagattagtgctaatgagccaaccgagcttgcaatccaagaaaatgccaacgggctagctatgtatgctgccatctgccagcaatgtggccttgtccccattgttgagcctgaaattcttgttgacggatcacatgacattaaaaagtgtgctgcggtgacagagcgtgttcttgctgcttgctacaaggctttgaatgatcaccatgtcatgctagaaggtactcttttgaagcctaacatggtgacccctggttccgac

SEQ ID NO: 203664 - DNA, 322 bp, Gossypium hirsutum
tgcagttcaactagtagatgaaaaacactgggaagatcgcttcatcattattgctgtggtaagttcacggcagaaggaaacaagtagcacctctggaatgcgtgagagtgttgaaacaagttcgcttttacagcatagggcaaaggaagttgttccgaaacgcacaatacagatggaagaagccatacaaaaccgtgattttgcatcttttgcaaaattagcctgtgctgatagtaaccaattccatgcagtctgcttggatacgttgccacccatattctacatgaatgatacatctcacaggataatcagctatgttgag

SEQ ID NO: 203665 - DNA, 365 bp, Gossypium hirsutum
ttttagagaaaccataatcacaacatatgcattaaagtagagaaacaactgcaatgaaacttgaaacattcaagtacttgggtaataaaactgaaacaacccttcttcacacaaaaatatgctccgtacaattcgtttattctctcataacatctcttctaaattaaaattgctaaagcttggatacacaaagcacaatcactcactcacttaagccttagacatgtgtcggatcaagtcgataacacgggaactgtaaccccattcgttgtcataccaagtcacaagcttaacaaagttgtcattcaaagcaattccagccttggcatcaaaaatgcttgacctgttgtctccgatgaagtcag

SEQ ID NO: 203666 - DNA, 437 bp, Gossypium hirsutum
  unsure (1)..(437): unsure at all n locations
tttcacgaganaacnncnaaaaacatgaaactcacctcatgttcaatcgttatcatcaaccttttggcattacaatacttgcctgttctttgtctctcacaagattttgatttcttctactttgttctacagtggcctggatcatactgcgacacgaaacaaagatgttgttacccgaagacgggaaagccttccgcggattttgggatccatggactttggcctaattacaacgatggtggctacccttccaactgtgaccccaacagtcgtttcgacaaatctgagatttcaagcctgattgggagtctggaaaaggaatggcccactctttcatgtcctagcaacgatggagttaagttctggactcatgaatggctaaaacatgggacttgctcagaatctgaaacttgccaacgtgaatactttgaagctgc

SEQ ID NO: 203667 - DNA, 329 bp, Gossypium hirsutum
agaaaaagcttgagccaaaagaaaatggccgatcagcggaccggcgatcatatctctgaattcaaggaggcctttagcctgttcgacaaggacggagatggttgcattactaccaaggagttgggaactgtgatgcgatcacttgggcagaaccccactgaggcagaactgcaagatatgattaatgaagtcgatgctgatggaaatgggaccattgattttcctgaattccttaacctgatggcaagaaaaatgaacgatacagactctgaggaggagcttaaagaggcattcatggtgtttgacaaggatcagaatgggttcatatc

SEQ ID NO: 203668 - DNA, 388 bp, Gossypium hirsutum
cagcagtcctacaaagtaagtgaatcttttcccttgagggggataaacaagaagtggaaagaggggtttcatgtaacatcaatgacaactgctgcgagtcgctggggtgtagtgatgtcgaggaacgccggattctctgaccaggttgtggagcttgattttttgtatccaagcgaaggaatacatcggcgatgggaaagtggttaccggataacatctatggctgcgaccgtagatcaagctgccttcatactgagcattccaaaacgaaaaacgatggatgaaactcaggaaactcttcgcacatctgcctttccaagcacccatgtaaaggaaaaatgggcaaaaaatctctacattgcatcgatttgttacgggcggacggtct

SEQ ID NO: 203669 - DNA, 377 bp, Gossypium hirsutum
aatgaaattctatgtcataatccatataggttagagttttagaacatcaaaaagttagaacattgtaatgacataccatcccaaatattacaaacaaaaaaagttacgaaaataccatcaacaaaaccatgatttttaatggtcagcaagaaatcttctgacccattccaaccgcacatcagaaggtaaactaaagaaaacaagcatttgagttagatgatctggaattttactcaatgctcgaaaccgctcatccactgttaaaccttctatttcacataaggttggatataagtttgtagctttttcttggatgatctggaattcttctgacttttgttgaactaccacatcggaggcaatattcctactgattt

SEQ ID NO: 203670 - DNA, 399 bp, Gossypium hirsutum
ctacaatgaaactgatgtgattttgaatgtttatgatcgcactgctctcaataattactcttattgggttggtttcgggattttccactccggtattgaagttcatgggaaagagtatgggtttggggcccatgattttcctgttagtggagtttttgaagtggaaccaaagagctgccctggttttatctatcgatcttccatcttgttggggcgcataaacatgccttattctgaattcagagaatttatcgagaatgtagcttccgagtatcatggagatacctaccacctaatctccaagaactgtaaccattttacagatgacatggcacagagattgataggcagacatatccctgggtgggtgaaccggatggctcgactaggctctttatg

SEQ ID NO: 203671 - DNA, 365 bp, Gossypium hirsutum
gaaacaggagctgatggttcaatttttcatcttcaatggagaataaaatctagggttagggttagcgaaagagggtaaacccgaaaaatggaaggctgggacccgaatacgaagtcgacgctgacccagatcccgctattgacgacgaaggcgggccccagagacggaacggcatggactcagaggcttaaagaggaatacagagctctaatagcctacacccagatgaacaagtccaacgataacgattggttccgtatatcggcagccaatcccgagggtacccgttggacaggcaagtgttggtacgtccataatctccttaagtacgagtttgatctccagtttgatatccccgttactta

SEQ ID NO: 203672 - DNA, 423 bp, Gossypium hirsutum
gaaatgtttgagggatgctaagatggacaagagcactggccatgatgttgttcttgttggtggttccactagaattccaaaggtccaacaacttttacaagatttcttcaatgggaaggagctttgcaagagcatcaaccctgatgaggccgttgcatacggtgctgcagtccaagctgctatattgagtggtgaaggtaatgagaaagtgcaagatctcttgctcttggatgtcaccccattgtctctcggtttggaaaccgctggtggtgttatgaccgttttgattccaaggaacaccaccattccaaccaaaaaagaacaagtcttctcaacctactccaaccaaaaaagaacaagtcttctcaacctactccgacaaccaacctggagtgttgatccaagtctacgaatgtgaaagaa

SEQ ID NO: 203673 - DNA, 419 bp, Gossypium hirsutum
cgggaatggggttggaactaggattgcagttagtcagggcgcatctgatacaggagctctacaaagactagtgcaaaagatatacaaggatgttgatttgaaacccttgatcatagcacccggtgggttctacgagtcaaaatggttcaaagaattcatcgataaaacaaccacatccttagatgtggtcactcaccacatatacaatcttggaccaggagtcgatacccaccttattgaaaagattcttaacccttctgttcttgatggcatctctggaacattcagcggccttcataacgtcatcaagagttctgcaactaaagcaattgcctgggtgggaaaggcaggaggagcttacaatagcggccgtaatcttgttacaaatgcatttgtgttcagtttctggtatttagatc

SEQ ID NO: 203674 - DNA, 382 bp, Gossypium hirsutum
  unsure (1)..(382): unsure at all n locations
caaggatccaaatcatggatctgatgatgatggggaaagcttanttcaaaggcttcggctttataaaccaacaccagtttctgatgaaacagagttttacgttaaaagagcagctgttcttgtctgtatttttcaaggcaacaatggtgatcttcgtgtcatcctcaccaaacgttcctcttctctgtcctctcactcaggtgaagttgcattgcctggtgggaaacaagaggaaactgatattgatgatatacagactgcattgagagaagccaaagaagagattggcttagaaccttcacttgtcaatgttgtcactgtccttgaaccggttttcaccaagcatcgtatgatcgtcgtccctgtagtgggtatattatca

SEQ ID NO: 203675 - DNA, 394 bp, Gossypium hirsutum
ctgtttcctcttttatactcttatctttgtcttgggtagtctcaaggtgctagagcaacaaaaatacgaccatatatcaaagggaaaaaaaaagagattcaagggataatacgatgaccaagttaccttctttgtttctggttttgactttggtttctgtttttgtttgtgggtttggaaaaaggataccaattctgtcatttgatgaagggtatagtcagttgtttggagatgataatctagttctccatagagatggtaaagctgttcacttgtctttgaatgagagaacagggtctggatttgtgtctcaagacctttacttgcatggttacttcagtgcctcaataaagttacctgctgattatactgctggagttgtggttgctttttt

SEQ ID NO: 203676 - DNA, 394 bp, Gossypium hirsutum
tctcgagttttcattgtttttgatttttatcaaacgctgtgtgaaaattaaatggcgagcttaacttcgtaattaataatatcaagccattccgagtaatatatgccccttttccctagtctttaagaaacaaagccatgatacaaagcataaataaagatagatatggattcactgaagtagacggatatcgaacaaaaatcctagatgttcctcttcaaaatgtttttgtttttggagcctttttcttgtgttgtctcctaggcatcgagttcttcatgccaatatagaagaataaggcccctaacagagccaagttctgtgtgaattttgtgaaaagtataccgaattccttcttttccgtgtcatagttgtagaagtcgtacaatatggg

SEQ ID NO: 203677 - DNA, 387 bp, Gossypium hirsutum
caattgtttgagctagctagctcttactcaaatggcaagcaaaacgatgatgttgcaaatattttcacttttcttctttttgttcagtatctgcaactccattttccttggtgctaatggagatgacaatggtggttggcaaactgcccatgccaccttctacggtggtgctgatgctaccggcacaatggggggagcttgtggttatggaaacctgtacagtcaagggtatggaacgagcacagcagctttgagcactgcacttttcaacaatggcttgagctgcggtgcctgctacgagctccggtgcaacaatgatcctcaatggtgcattagtcgaaccataaccgtgacagccaccaacttttgtccccctaactatgcttt

SEQ ID NO: 203678 - DNA, 439 bp, Gossypium hirsutum
gttttgttttttttttttgtttttttatgaagaagattgaggatttaaacgtataagaaagcagttactgcattaagatgacatattataggtcattattactcccagcagtatatgtacaataagtagagccgaaatgtattatgtctttttcagacagtgtacgcttgctgaattgtgtctatgtcaagacccttcagtctaactactgattcgacgtgcccttttagtgtagtcagttccctcaaccttgcaatttcagctcgtctctttgcctcttcagccatttgattaagttcattgtaactagttcggtcgccaaacatcttggtgtccggtggctgcaatccatggagtgtcctctgagcatgcgcccatttcagttcacgttcttctttcccgaaatcttttcttccttgtgaaaagcgatccctttttt

SEQ ID NO: 203679 - DNA, 392 bp, Gossypium hirsutum
aaacaaggaaccagatttaagcgacttataaaagatcggaatgtgcactccgaccttgaggagggtatcagacggttggtactttgttccggaaaggtgtactatgagcttgatgattagcgaaagaagaacaatgctacctacattgctatctgtcgtgtggaacagctttgcccattcccttatgacctaatccaacgagagcttaagcgatatccaaacgcagagattgtttggtgccaggaagaaccgatgaacatgggtgcatacaactacatcgtccctcgtcttgccactgcaatgactgctttgggtagaggaacctttgatgatgtcagatatgttggccgtgctccatctgctttcactgctaccggcttctatttcatgca

SEQ ID NO: 203680 - DNA, 433 bp, Gossypium hirsutum
gaaaaacccgagttccccaaacgggaaaagcctgaagggcacgataaacacgaagtcgaatattcggaaatacccgagtacaaggaaaaggaagataagagtaagaaacataaagatgaagagtgccaggagtcacacgaatcgaaagagcacgaatagtacgagaaagaaaaacccgatttccccaaatgggaaaagcctaaagggcacgagaaacataaagccgaatatccgaaaatacctgagtgcaaggaaaaactagatgaggataaggaacataaacatgagttcccaaagcatgaaaaagaagaggagaagaaacctgagaaaggcatagtaccctgagtgggttaaaatgcctgaatggccgaagtccatgtttactcagtctggctcgagcactaagccttaagccatatgacactggtgcatg

SEQ ID NO: 203681 - DNA, 433 bp, Gossypium hirsutum
cacactttgagtgggcacacaaaaggtgtttcagctagtcggttcttccccgaatatgggcacttaattctctctgcagggatggatactaaagtgaagatatgggatgtgtttaattcaggaaagtgtatgaggacatacatgggtcattctaaggcagtaagagatatttcattttgtaatgatggcactaaatttttgactgctggatatgacaagaacatcaagtactgggatactgaaaccgggcaggttatttctactttctcaactgggaaggttccgtatgtagttaagcttaaccctgatgaagataagcagaatattcttttagcgggtatgagtgataagaagattgttcagtgggatattaataccggacatattacacaagagtatgatcagcatttgtgggcagtgaataccattacat

SEQ ID NO: 203682 - DNA, 387 bp, Gossypium hirsutum
aagaaagcggccatggagaaggaaagagagcatcgagtgtacttggcaaggggtgctgagcaagctgaaagatacgatgagatggttgaggccatgaagagtgttgctaagttggatgttgagctgactgtggaggagaggaatctgttatctgtgggatataagaatgtgattggagcaagaagggcatcctggcggatactgtcttcaattgaacagaaggaggaggccaaaggtaacgaacaaaatgtgaagaggataaaggattataggcaaagggtcgaagatgaactctcaaagatatgcaatgacatactctcagtcattgataagcacctcattccatcttccttcaccggggaatcaactgttttctactataagatg

SEQ ID NO: 203683 - DNA, 381 bp, Gossypium hirsutum
ataggcattatcattacaatgagaaatatccaaaattatggtcatcatcattgcataattatcataacttcaaacctttttctttcttccatccagaaaatgaaaatgtattttaggggataagcacacaatacttcgtaggtgaatgcagtatgcatgacagtacttcagtatatagcagaaacatattcataactatgtaatatactataaagacggaatgctatgaacaactaccgccttaagctctccacaatgtagtccgcgtataaattcatggaatgctggattgcctcataagcagttgaggcgggcaggaagtcattgacagcaacttccttgttctcattcttcttatagtcctcaaagaagcggcgaatc

SEQ ID NO: 203684 - DNA, 432 bp, Gossypium hirsutum
gtaattatctgacgatcatcgcacagttttctccgtcgcaatggaaccaccgccaccgcaatcccctcgagactagcaccctcatactcactctcattcatccacctccatccccaccactggtacttgctgcaagtgcggtggtgccacgacccacgccccaccgtcccaatccccaacttcctggcctgacctttcctctcccccggcataccgaccgattcgagcccccgctttaaacctccctccaaacaacacccaagccataatcctaactcctgtccctcaatcccaagaagtccccaccattactcctcctttccatttccaaatcccatccaaaaaaatcacttcccctgatgatatccgcaagttccacgactcccctacttctaaaaacttcctgggtttcatcgtcgccttgtccgaatc

SEQ ID NO: 203685 - DNA, 404 bp, Gossypium hirsutum
tttcggtttccatttacttctttatttctacgtttttggattggtagtaagcgaaaatgagagagtgcatttcagttcacatcggtcaggctggtatccaagtcggaaatgcctgctgggagctttactgccttgaacatggaatccagcctgatggccagatgccaagtgacaagactgtcggaggaggtgatgatgcttttaacacctttttcagtgaaactggtgctggaaagcacgtccctcgtgctgtctttgtggatcttgagcctactgttattgatgaagtgaggactggtacttaccgtcagcttttccaccctgagcaactcatcagcggcaaggaagacgctgccaacaacttcgtccgtggccactacacttttggcaagagatcgttgact

SEQ ID NO: 203686 - DNA, 416 bp, Gossypium hirsutum
ctcttgcagaaagcaatgaagttgttggaagacaaacgcggtcagcaaagcacaattgcaggaattgaagctcgaataggggtgatgttttacattcttgggaggtatgatgagtcaaggaactctttcgagagtgcagtaacaaagcttagagcaagtggggagaggaaatcggccttctttggggttctcttgaaccagatgggcttggcttgtgtccaattattcaagattgacgaggctgccgagttgtttgaagaagcacgagcaatactcgagcaagaatgcggcccatgtcatcaggataccctgggaatatacagcaatcttgcagcaacttatgatgctatgggaagggttgaagatgcaatcgagatattggagtatgtactaaaattacgagaagaaaaacttgg

SEQ ID NO: 203687 - DNA, 390 bp, Gossypium hirsutum
tagcgaactgcttctaaggctgtctatcaacataaatgtaaagctcccacttcctgcaccaacgaccaccaccaccaccaccacaaaaagaagatcaagatgtcttcttcatcgcccgccaatcaagtgagggcctctcacatcctcatcaagcaccaaggctccctccgtaaggcctcttggaaggatcctgaaggtcgcgtaatctccaacactacccgagatgccgccgtctcacagctcaaagccctccgtgacgacatcgcttctggcaacgctaagttcggtgaggttgcctctcgccactccgattgcagttccgctaaactctgctgggatctcggtccttttggtcgaagccagattcaaaaaccattttaagattcaaca

SEQ ID NO: 203688 - DNA, 389 bp, Gossypium hirsutum
tggtcattctgagaggagacttattttgaaggagtcaagtgagttcgttgcggataaggttgcttatgcacttgctcaaggcttgaaggtgatagcttgtattggggaaacacttgagcaacgtgaagcaggatctactgtggcggttgttgctgaacaaactaaagcaattgcagcaaaaatatcaaactggactgatgtcgttttggcatatgagcctgtgtgggctattggaaccgggaaggttgctactccagctcaagctcaggaagtacattgtgagttgaggaaatggcttcaggctaatgttagtcccgaagttgctgcatcaacccggattatttatggagggtccgtcactgctgcaaactgcaaggaactagcagctc

SEQ ID NO: 203689 - DNA, 359 bp, Gossypium hirsutum
aataaacataaaatgttattctcatatgccatttcaaggttcgggcatcgaaatgacaccggctgatatgaaaaataaaaacaaaattcaattagcaagagggttcttaacaatcagaaacttgaaaacaacattggagaggagatcaggaaagtggaatagctttatttaaattcaagcttttctgggtatgtgcatccagacctttggatgataacgttggatgcatatcaaccagcccttacgcaatactcaatggactttccttgaaccaattgtgaaagaaagcctgcaacaaacgcatcacctgcaccatttgtatcaacaagcttttccttgggtaacaaaataacagggaa

SEQ ID NO: 203690 - DNA, 348 bp, Gossypium hirsutum
  unsure (1)..(348): unsure at all n locations
ctagaactgtggagtccgcctnctgcatgaattctgctcgagctttggctttgtttcaaccaaatctccagccaatcctggtacgccacctttgtctaggaggttgtgaaccttctcaaaagctgtttcagaatctcccatctgactttgtactgcactcagcatcgccggaccaattctttctcggacaatcctaccacttataacgctttcaatgacatcaatcaaatacaacaagcatccgatcccggattcatctgattgccaaagaacatgataagattctaaaacttccattgataaaacatcttcagatatagccccaactgctgcgcctcgaaccaaccc

SEQ ID NO: 203691 - DNA, 402 bp, Gossypium hirsutum
ggaatgtcatatatgattgatgatactgtgaacacaatgtgtcacatacatgcttgagtggccacatagaattgttgttccaattggtggtataccagttgatacaagtgaattagagctgaaaccggagggaaagctgtcagttacagtagtcaaagctaatgatttgaagaacatggaaatgattggaaagtctgatccttatgtggttgtatacattcgacctttgttcaaggttaaaacaaaagtcatcgactacaacctgaatcctgtttggaatcaaacttttgagttgattgcagaagatatagagacacagtcactcactgtataggtttttgaccatgacattgttcaagacatgagattacgaattgcataattacgtttgattgaattgga

SEQ ID NO: 203692 - DNA, 397 bp, Gossypium hirsutum
ggaatttcagatatgattgatgatactgtgaagacaggtgtcacagacatgcttgagtggccacatagaattgttgttccaattggtggtataccagttgatacaagtgaattagagctgaaaccggagggaaagctgacagttacagtagtcaaagctaatgatttgaagaacatggaaatgattggaaagtctgatccttatgtggttgtatacattcgacctttgttcaaggttaaaacataagtcatcgactacaacctgaatcctgtttggaatcaaacttttgagttgattgcagaagatagagagacacatgcactcactgtagaggtttctgaccaggacattgtgcaagacatgagattaggaattgcataattacgtttgattgaat

SEQ ID NO: 203693 - DNA, 432 bp, Gossypium hirsutum
ctcaagtggagctttatctgaagaacaagcaggtgcggaacatggttgatcttttgaaggaagccaaaggagacgctgcaaaagaatccatggagctgaatattgaagaatttaaatcagctctttctgaagtcgattctcagatgaagaatcttccagcaacagcacaggttgcaaatcagcaaggcgcctatcttgctaagtgcttcaaccgtatggaggagtgcgaaaagaaccctgaaggtccccctaggttcaggggaacaggtcgtcatcgattccatcccttcaggtacaggcacttgggacaatttgctcctttgggaggggaacaaacagctgcacaacttccaggtgattgggtgtctatcggacacagtgagcaatggctctggtattctgtctacgcaagcaagcaagtcaattggcgca

SEQ ID NO: 203694 - DNA, 351 bp, Gossypium hirsutum
ccaggtctcatggttggtactgctaaacctgactatgcgtccggtgttaagagctctactgatgcttcaatcaaagaaatgatcccacctggtgcccttgttatgctcacaccccttgttgttgggatcttttttggcgtggaaactctctctggtgtcctcgctggatctcttgtctctggtgtccagattgctatctctgcatccaacacatgaggtgcttgggataatgccaagaagtatattgaggctggtgcttctgaacatgcaaaaactcttggtcccaaaggttcatatccacataaagcttccgttattggtgacaccattggtgaccctttaaaggataca

SEQ ID NO: 203695 - DNA, 352 bp, Gossypium hirsutum
ttagttgtctcttcctccaattaagatgcagatcgtcggtagaccctgaccggcaagaccatcaccctcgaagtcgagagttccgacacgatcgacaacgttaaggcgaaaatccaagacaaggaagggatcccaccagaccaacaacgtctcatcttcgccggaaaacagctcgaagatggccggaccttggccgattacaacatccagaaggagtccaccctccatctcgtcctccgtctacgtggtggcatgcagatcttcgtcaaaaccctgaccggcaagaccataactttggaagtcgaaagctctgacaccattgacaacgtcaaggccaagatccaagacaagg

SEQ ID NO: 203696 - DNA, 434 bp, Gossypium hirsutum
acaacctttccaaaagaatggcatatgaagggattctggtggggattggtaatcctgtgcttgacatttcgttagtcgtggacgaagagttcttgaaaaaatatgatatcaagttgaacaatgcaattttagctgaggagaaacaccttcccatgtatcaagaaatggcatccaatcccaatgtatagtatattgctggacgtgctactcaaaattcaatcaaagttgcacagtggatgcttcaaattcctggtgcaactggttacattggctgcattgggaaggacaagtttggggaggaaatgaagaagaactcaaaagctgctggtgttaatgttcaatatcttgaggatgaaactgcaccaacaggaacctgtgctgtttgtgttgatggtggtgaaaggtcactcattgcaaatctatcaactgctaac

SEQ ID NO: 203697 - DNA, 392 bp, Gossypium hirsutum
ctcagattttcgatatgctcttagtattataccacaatgacctgttcttttttcaggagctgttggattaaaccttgatccattcaatgagcacaatgatgctgacctttgggaggctttataaagggcgcatttgaaggatgtaatcaggaggaactcttttggtctggatgctgaggtcttagagagtggggagaatttcagtgttgggcagaggcaattattgtgtcttgctcgagcattttttcgaaggtcaaagattattgttcttgatgaagcatcagcagcagttgatgttaatactgatgctttaatccagaaaaccattctcgaagaatttaaatcttgcactatgctagttattgctcacagactaaataccatcattgact

SEQ ID NO: 203698 - DNA, 309 bp, Gossypium hirsutum
  unsure (1)..(309): unsure at all n locations
ccgggtttcaaaaccctttctctttaaaatatatagagaagagggtccaaagtgaaaagcgaaatatagatttgattttcaatctgcattttcagggtgtggaacaatgggtgcaggtggcagaatgtcggttcctccaagtcaaaggaaacaagaatcgggctcaatgaaaagagtccctatatctaaaccaccatntactctcagtgaaataaaaaaagccattctaccacactgtttccaacgctcacttatccgttcattttcctatctcgtttacgacttcattttagtctctatcttttacta

SEQ ID NO: 203699 - DNA, 425 bp, Gossypium hirsutum
cttccccgcttcccctttcacatcaaccctaaccctgcctgaccaatcaggatacaacatgaagggaggtaaatccaagtcagatactaagagctccaggctcgccgtgaacaagaaatctagcgccaaagctggaaagaaatcggggaaggcggctaaggatccaaacaagccaaagaggcctgctagtgccttcttcgttttcatggaggagttccgtgagcaatacaagaaggaacacccaaaaaacaaatctgtcgctgctgtgggcaaagctggtggagaaaaatggaagagcttgtctgatgctgaaaaagcaccttatatagcaaaggcagagaagcgaaaggtcgagtatgaaaagaacatgaaggcctacactaagagacaggctgaggctcccaaagaagaagagtcggagtctg

SEQ ID NO: 203700 - DNA, 329 bp, Gossypium hirsutum
  unsure (1)..(329): unsure at all n locations
tgagaaatggaaagtcaggcatgaaaaaagaggtttggtaagcaacgataagtgcggaaatgatcctcctgaagaagatgattatctcttggctgaagctcgccagcctctatggcgaaaagtgccaatttcgtnaagtctgataagcccttaccggataggcagacttggctaaattggcgcttttcctgcctgttcgtgtcttaacaccggcctacgacgcttacccgatctggctaatatgtgtcatctgctaagcatgtttcgccttcttctggacactggatcagttgaccaattggttacctatgactatgctaacttacctc

SEQ ID NO: 203701 - DNA, 430 bp, Gossypium hirsutum
tcttaaccggcttcaaaatgcactgccgaggagggaggtcgatttactgcatgcccttaaggccagcattcaaaggatctgcacccatcaatctgtctgatcggttgcaccaggttcttcgatgggctcttggatctgttgaaattttcctaagcaggcattgccctctatggtatggctttggaggtggtcgtcttaaatggcttcaaagactagcatatataaacaccattgtctatcctttcacatcccttccactcattgcctattgttcactaccagcaatctgtcttctcacaggaaaatttatcataccaacgctctcaaacctggcaagtgttctctttcttggccttttcctttccattatcgtgaccgctgttctcgagctccgatggagtggtgtcagcatcgaggacttatggcgtaa

SEQ ID NO: 203702 - DNA, 384 bp, Gossypium hirsutum
tgttggccttgatggtggtttccgccgctactgtgtttgcttcttctgacgggagtgggttagcgaatgagtgcagcaaagatttccagagcgtgatgacttgcttaagctttgctcaaggaaaagcagcgtctccgtctaaggagtgctgtaattcagtggcggggattaaagagaataaacccaaatgtttgtgttatattttgcaacaaacacaaacctctggtgctcaaaatctcaaaagcttaagtgttcaagaagataagctgtttcaattaccatcggcttgtcaattgaagaacgctagcgtcagtgattgcccaaagcttcttgggttatctccgagctcaccatacgccttcatctttaacaactcctcctcta

SEQ ID NO: 203703 - DNA, 380 bp, Gossypium hirsutum
atccgaacttctgcatgaattcttcactagcaatcacttccggttttggattcagatatatctatctggacacgttatactaggaatccagctaggacacctgaaagagattccactccgaaaaagataccaacaactaggggtgtgagcattacaagatcacccggtgggatcatttctttgatggaatcatcagtagagatcttaacacaggtagcgtaatctgacttagtggtgccctccatgagaccaatgattgtgttgaactgtctgctcactttctcgaccatcttcaaagctgcactttccacactcttcattgtcatttcatataaccaataatgaatcattgccccaacaagcaaacctattaaaacttt

SEQ ID NO: 203704 - DNA, 391 bp, Gossypium hirsutum
gttttactttgacaccaatccttatttcaagaatggtgggctgactaagacggatctcatgattgatgaagatgaacctattcttgagaaagcaattgggactgaaattgaatggtatcctggaaaatgcttaacgcaaaagcttcttaaaaagaatcctaagaagggttcaaagaatgccaagccaatcactaaaacagaggagtgtgaaagtttcttcaacttcttcaatcctcctcaagttcctgaggatgatgaagacattgatgaagatactgctgaggagctacaaaatcaaatggaacaagattatgacatctgatcaacatttcgagacaagattattccacatgctgtgtcatggtttacaggagaagctatccagggagat

SEQ ID NO: 203705 - DNA, 391 bp, Gossypium hirsutum
gaaaaccataaggcaattgtggagttctgtaaacgggaaggtcttgttctgctggcagatgaggtttatcaggaaaatgtctatgtacctgaaaagaaattccattcttttaagaaggtttcccggtccatgggttatggtgagaaggatatagccttagtatcttttcagtcagtctccaaaggttactacggatagtgtggaaaaaggggaggttatatggaagtaactgggtttggagctgatgtcagggagcaaatatacaaagtggcatctgtgaatctgtgttccaacatctcgggtcaaattcttgccagtcttgtcatgagtccaccaaaggttggagatgaatcctatgaatcatacagtgctgaaagagatggaatcctct

SEQ ID NO: 203706 - DNA, 300 bp, Gossypium hirsutum
tactattttgctaaccatggctcataactaccgtcatggttgggtccttttccaactgtgactcattactggctaactaatgatcggtggccacaccatggtagtcagctgctcgacatacattccacacacaaacaacctgatcagagctgtcacaattcgcttcaaaattctattcgcgcggagagtctgaatacatacagtcaacatatcatgaatagtacccaatacatgacaagcctgctatgtgcaacgtggacaatctcataccctgctatcatcatgaacagtaccactagt

SEQ ID NO: 203707 - DNA, 279 bp, Gossypium hirsutum
gtctgaattagaattatgaggggaagcttaatattcatgatgagctctattcgaagggtgggaaactggatctgaatttaaaggattgtggacttttgatcaagactggtgtacttggttaagctactttgcctgtatctttagttggtttgtcatctgaatcagatactgctacacactgccatctaaaggaattgctttcacgtcttcatattgttcacttgtaagcaaatcacaaagctgttgacagcctttttgagattaataatgaagattaaa

SEQ ID NO: 203708 - DNA, 389 bp, Gossypium hirsutum
caccagctcagggtctgcctccaactccggctcgtccgctcttgctccctcggctcacggctccttctcttccaaaaccacccgttccggctccctctccctagccgacctccgcttctccatccgcctcggctccggcgatataggctccgtctacttagccgaactcaagtctcaacccccgccttccgacaccaatgccgccaatgctaacaacaacaacaacaaaagcagtaaaagcggtgtcgtttttgcagccaaagtgatggacaagaaagagctagcgtcgaggagtaaagaagggagagctaggaccgaaatggaaatactcgaattgttagacccatccattttaccttcgctttacgccgttatcgattcccctaaat

SEQ ID NO: 203709 - DNA, 435 bp, Gossypium hirsutum
  unsure (1)..(435): unsure at all n locations
ctccaatctagcattttccttacaagtttgtttgtcgggtgattaatcgatgtggctagctcaatgtcccttaagcttgcatgtgtggcggtgttgtgcatggtggtgggtgcacccctggctcaaggggccgtaacctgtggtcaagtcacaagctccctcgcaccctgcattggttacttgacagggaatggtgctggtggcgttcccccaggttgctgcggcggcataaaatctctcaactccgccgtccaaacaacaccagaccggcaagcagcttgcaaatgcatcaaaagtgcggccgccggcatttctggcatcaactatggtattgcaagcggactcccangcaagtgcggtgtcaacatcccttacaagatcagccctagcactgactgcaacagcgtcaagtgaagttttggcatggaaagttca

SEQ ID NO: 203710 - DNA, 411 bp, Gossypium hirsutum
gtccattctattactgctactcaaaagactgttgatgggccatcaatgaaggactggagaggtggtagagctgcttcgttcaatatcattcctagcagcactggagctgccaaggctgttggcaaagtgttgccatcattgaatggcaagctgactggaatggcattccgtgttcccacagttgatgtctctgtggttgacctcacggttaggcttgagaagaaggcttcttatgaagatatcaagggcgctatcaaggctgaatctgaaactaatttgaaaggaattcttggctacgtagatgaagacttggtatcgactgactttgttggggacagcatgtcaagcatctttgatgccaaagctggcattgcattaaatgacaattttgttaagcttgtcacgtggtac

SEQ ID NO: 203711 - DNA, 358 bp, Gossypium hirsutum
ctagcatccattttccttacaagtttgtttttcggggggttaatccatatggctggctgaatgtcccttaatcttgcatgtctgttggtgttgtgcatggtgatgggtgcaccccttgctcaaggggccataacccgttctgatggcttagtcagcctaccacgctgccttccttttttgtcaggtaatggtgatggtgctgatgccacaggttgctgtgccatcgtcatgaatgccttgagatcgctctgtggtgatacataataaccgatctatcttgaaatcttcttcggattttggtggaattccaaattggtgtgttatggaatcccaacttaatctgtttaacgttggtatc

SEQ ID NO: 203712 - DNA, 418 bp, Gossypium hirsutum
caaaaatctaagccatagctgtcggtaacgaagtgttgggcgagccggccaacacgaccaaatacctcgtaccggcgatgaagaacatccacgcttcgttagttaaatccaagcttgattccgccattaaaatctcttctccgatagctttcagtgctttaaaaacctcgtatccttcatcggccggttcgtttaagccggaattgattgaaccggtgattaaacccatgttggattttttgaaacaaaccgggtcttacttaatggttaatgcgtacccgttttttgcttattcggctaattcggatcagatctcacttgattatgctttgtttaaggataacccgggtgtagtagattcgggtaacgggttgaaatattctagccttttggaagctcaaatcgacgccgtttttgc

SEQ ID NO: 203713 - DNA, 391 bp, Gossypium hirsutum
cgagtgtctttgatttgtttctaaggatttaatggctagaccttcttcccatttcttcattacattgttcaagaacaaacaaaaaaaaaaagaagcaaaaaaacatggccaaagttctgttgttcattgctctatgtgtgcttccagctttggttagtgctacacgcattctgaataaccaattggtggttgaaggctatgtgtactgtgatacttgccgtgctggttttgaaacccctaagactagaaggctagctgatgccatggttaagctggtatgctccgacaggaagaccggcggagttgttttcgagaaggagggatataccgacaaaaccggaaaataccagattcgtgtatccgaggatcacttggatcagatctgtgatgc

SEQ ID NO: 203714 - DNA, 385 bp, Gossypium hirsutum
  unsure (1)..(385): unsure at all n locations
gaaagccattgagatatatgaagagatagcgcgggaatgacttaccaataacttgctgaagtatggagttaaaggtcatcttcttaatgctggcatttgtcaactctgcaaaggtgatgttgtagcaatcaccaatgcgttagagcgatatcaggatctggatccaactttttctggaacgcgagagtataaattattggctgacattgcttctgctattgacgaggaagatgtctcaaagtttacggaagttgtcaaggaatttgatagcatgaccccattggattcttggaagacaacccttttacttcgagtgaaagaaaagctgaaagctaaagagctggaagaagatgatcttacctaanagagctttgcgtcgtgagag

SEQ ID NO: 203715 - DNA, 409 bp, Gossypium hirsutum
aaaatgtacggtaaagctgcaatctgtttatcattcgtgattcgcttcctgatttcatgttcaatctatgtcggtaccgttgatctcagatcatacttcttccccttacttcagtcaccccaggttccacgctcactctgtgcttccggcccccctctccgcgtttacatgtacgatctccctaggaaattccacgtcggcatgatggatcgtcggagcttctagggaccggctcccgttacggcggataatttccctccctggcccttcaactccgggataaagaagcagcacagtgtggagtattggctgatggcatcgcttctttttggcggcaacggcaatgaagacagggaagcggttagggttcggatcccgaatccgcggaggcccttttttgtgccctttt

SEQ ID NO: 203716 - DNA, 207 bp, Gossypium hirsutum
aaattttgggtgatctgtgttgaaaaagaaatagaatagggcgacattccaaggaactcaacaaaaatgcaatgcatgcaacaagactgtttatctggtggataatttgacggctgataatagggtttttcataaggcttgcttccgttgccaccattgcaagggtaccctcaagcttaacaactacaactcatttgaaagggtgct

SEQ ID NO: 203717 - DNA, 410 bp, Gossypium hirsutum
cggaagtcagtcagtcggtcaaacaatcaaatgcctcgtcagctttagcttccacttccacctaacatttccatcttcccaatctttcctcctccatcggcccgtggtctttgacttctccggctacgccgtttacaaagagctacattcagcaatatttgtaacagatggcttcttccttccgagcattcctaaacagtccagttggcccaaaaacaactcacttttgggggcctgttgcaaattggggttttgttctcgctggattggtggacatgaataagcccccagaaatgatttctggcaacatgacatcagcgatgtgtgtctattctgcattattcatgaggtttgcatggatggtacaaccacgaaactatctactgttggcgtgccatgcttcaaatgag

SEQ ID NO: 203718 - DNA, 338 bp, Gossypium hirsutum
gaaaagagctaggttttgatcatcggatgaactggataggtgggaaagttcattgtggaagccagtgcaaaagagggtcatcccactttcgtttttgtaagggagtccaccgtctccgaccctgttaagggaaaacttgtcgactacttcaagaacttatgggtccatttgttgttaggggatatgtactaccatgagagtttggtcaaggcaataaagcaagttgatgtggtgatttctgttgtgggtcaaatgcagttagcagatcaagttaagatcattgctgctattaaagaagctgggaatgtcaagagatttttcccatctgaatatggaat

SEQ ID NO: 203719 - DNA, 383 bp, Gossypium hirsutum
ctttctttttttttgaacaataatacaatccctttcgcggcatgttgaaactggccattaccatgaaactccatacacatcaaaataactaatttctttcgcaataattaattaaaaaaaacagaaactggaaattatatttaataagttcaaatattaattatctcattcatattcaacttcttcttcttcaatcttctcttcttcaataaactttgcattttgattctggtgatacttttataccaaatcattcatattactctcttgttcggtaaattccatttcattcattccttcccctttataccaattcaagaaagccttccttccaaacataactgtaaattggtcccttacgcccctaaacatctcttggattg

SEQ ID NO: 203720 - DNA, 381 bp, Gossypium hirsutum
atagtccacgtttttttttttttgcttaagtgaatcacacagggtgctggtgcattgccaacagaatcattagatattttctacaaacaacataaatcccttttacaatcacagcaaattaacatatactggcaaaaaggaaatataaaattataacaaaggtttgttaaacaccatttaacactccacgccacattgtttaagaactgtacctgtctgtttgggcaacaatggatcgatccgtacccaaacaagtcagaaaatcgattccaaaagtatggaccaaagcactacaatagttgacgttctgttttgtcttcccatcaaacctttgaggaatggggaaagatgaagaatgacccataatgctaataacaattt

SEQ ID NO: 203721 - DNA, 413 bp, Gossypium hirsutum
tgatcttgtttgcaaggtggaaaggaacattcctgagggtgaccggagaaacccagctgggattgctgataatgtctgagataatgttggtgatatatctggaatgggatctgatctttttgggtcctatgctgaatcatcttgtgctgcacttgttgttgcttccatctcttcttttggcatcaatcatgaattgactccaatgttatatcctctcatcatcagttccgttggtatcattgcttgtttaatcacaaccttatttgcaactgatttctttgagatcaatgctgttaatgaaatcgatccatcattgaagcggcaactcataattttaactgttctcatgactattggaaatctgattgttagttggatagcttcttcatcttcctttaccatttttaattttt

SEQ ID NO: 203722 - DNA, 422 bp, Gossypium hirsutum
gctgcttgagaactttagtgccgcatccatgtcaacaggtgaagtgccaaaaatgccttgcgcacaagaccttcatgatcaagaagaagctggccaagaagatgaggcaaaacaggcccattccttactggatccgaatgctcaccgacaacaccattaggtacaatgctaagcgtaggcactggcgccgtaccaagctagggttctaagttcgatgggcttatttgtttccagtattttctttaagttttctaagtttattttcggacttattttatttgggatttaatattgggaaccatcgagaatctttgtattagggatattgatgagattgttagtggcttcggtatagtttgatcttatattatctcatcttaatgtgagtgcatggtattgaacttttctttggtaattgcttt

SEQ ID NO: 203723 - DNA, 420 bp, Gossypium hirsutum
ctaaaatcttgctctcttcactcctcctattttaaccagttctgccttgtcctcgccccttccctagcaagctacatttccatggccccccctgaattggttcaacccagtgataaaacaaacgttttcgctaaacaagtcagtttgcgtaatcgtgcatatgttacgttcttggccggaaatggggactacgtgaaaggcgttgtaaggttagccaaagggttaaggaaagtgaaatcggcgtaccctttagtggttgccgttttacccgacgtgcctgaggagcataggcggatcctggagaaccagggttgtatcgtccgagagatcgaaccagtttacccgcctgaaaaccagacccagttcgccatggcctattacgtcatcaattactccaagcttcgtatttgggagttcgtg

SEQ ID NO: 203724 - DNA, 385 bp, Gossypium hirsutum
ctcgcgcatatcattttgcttccctgaagttaagcgcggtctggcttcatctgtcagatctgagaggcctagacgctgcttcctgtttcaaagcgcgagatggcgacatcatgctcagctacattctcgatcggatcgactgtctcctttggaaaaagggggaatgccactgcttctacaaaaccttctgcttcaaagggcccctaacataattcacttgccagtttcaatggccttaaagcaacaacatccctgaaccgggattctgagtcctccttccttggcaaataaagcatggcaactattaagggctctttcgcacgggaagcacatgatgccaaccagagttcttaccatggcttacaagttcaagcatcttacaaag

SEQ ID NO: 203725 - DNA, 414 bp, Gossypium hirsutum
  unsure (1)..(414): unsure at all n locations
gttgctggtgctgataaagaaataaccgcagggtttttgctgaagaaaagtgctgaaactaatggatggagtcggcgatggtttgttttgaatgagaagactggaaagcttggctacaccaaaaagcaagaggaaaagcattttcgaggtgtcatcgtgttagaggaatgcagcattgaagagataccagatgaggaagaacctgccccaaaaaattcgaaggataaaaaggctaatggctcagataagcaaccgagtcttgtgttcaagataactagcaaggttccttataaaactgtcttgaaagctcacagtgctgntgtgttgaaggctgaaagtatggctgataagactgaatggttaaacaaattgtcaaaagttattcaaccttctacagggccagtgaaaggtgga

SEQ ID NO: 203726 - DNA, 419 bp, Gossypium hirsutum
gttttgtctttccagaaaattcacgccaaaaaagaaggtcatgagtatattgttggagctgaagatttgagttgatggcgaggatcataccacaagctttgctacaacaaagcaaaaagaagaaagggccagctcgaatcagtgttataacaattatactctatagtttgattgttgctgtgactgagttttttctctatgctacgtacagacattggtctcaaaggtcaagaactcaaattgagtacaggcaatcagtttttaagggtgacactgacaactctttcgtggatttgaagaaatctgatctccctgaatatgctattttagatactgcaaaatgctctataactgtggagctcttcaaggacaattttcctgatgttgttgatcaattcctagattatgtcacaaaggca

SEQ ID NO: 203727 - DNA, 411 bp, Gossypium hirsutum
tcgagttttttttttttttttttttgtagaaaatatttgactcagattcactgagaaaatcaaaggggatgacaaagggtaatttccagacaaattatacaacccacagaaacccaactgtccataacatagcgagtttgcgctttcagctacctcgtaaaagctacatgcaccgtgggaaataggtttgccccacatacccaccatacatagcccttttcacatttgattcaaacatcttcggattatccctcaacactgcagcagcatcatgattgaggggatcctcataatttggctccgtgaaaagatggtataatccgtagattacagtgtttatatttagcactggtttccagtcttcacgcatgatgtttaagcaaacatttccttccaagtcaatatttggat

SEQ ID NO: 203728 - DNA, 391 bp, Gossypium hirsutum
atactgcatagcaacgtggatgggagttctgtgccaaggactaccatgatccaccacctgctccattgattgatgctgaagagttaaccaaatggtcgttttacagggcagtgattgccgagttcattgctacacttatattcctgtatgtcactgtgttgaccgtgattggttacaaggtccaaaccgaccctgctaagaacactgtttaccccgattgcagtggcattcgtattcttggtattgcttgggctttcagtggcatgatctttattcttgtttactgcaccgctggtatctctggagggcatatcaacccagctgtgacattcagtttgtttgtgcgacgcaaggtgtcactcatccgatccctgatgtacatagtggctca

SEQ ID NO: 203729 - DNA, 419 bp, Gossypium hirsutum
ctcaaggctagcagctcctgtttgatgcacgtgaaatggttgataatgtccgttcgacagatcatgatccatctgccaatctaaatgcattacttatgctatttaactgtgcacacgatcgatccattaattaccttttgacccatgttgacagggtttccaaatggggtgaattgcttcagatggttgtgttggatctgatccgtaaggtttgcacaacaaatcgtgttgagaaagggaagtatattaagattattatatctttattaaatgccccctcaactgcagttatttatgaatgtgctggcacccttgtttctctgtcatctgctcctactgctattacagctgctgcaaacacttattgtcagcttcttttttctcaaagctattacaatgttaagcttattgtgctatat

SEQ ID NO: 203730 - DNA, 393 bp, Gossypium hirsutum
atcacaatggtgtcgggttcgttggaatgcgctgttaggtggcaaatgctgtcatcggtggttcccgccaaagcaaccggcggaaacaaggatttggagctaacaaacatggatttagcaatgaaactccattatatcaaaggcgtgtatttcttccaacctgaagcggctcaaggtttgtcgattcatgatttgaaagagcccatgtttcagtgtctggaactttactacgctgcctcatggaggattcggagatcggaaagtggccggccgtttatcaaatgcaacgactgtggcgtccgaatcgttgaagctcagtgtgataatagtgttgatgaatggctggctatggccagaaacaatgatcatatgctccggcatgatcaaagtctt

SEQ ID NO: 203731 - DNA, 412 bp, Gossypium hirsutum
cagccgcggctagaaaagggttattgaagtaagaaattgagcaatgtctcctgctaaagttgacagcaagaaaaaggccgatccgaaggctcaagcagtgaaggctgctaaggctgtaaaattgggcgtggcatttaagaagaagtccaagaagatcaggacaaaggttacctttcatcggccaaggactttgaagaaggaccgtaaccctaagtatcctcgcatcagtgcaccaccaagaaataagttggatcaatatcaaattctcaagtatcctttaactactgagtctgcaatgaagaaaatcgaggacaacaacaccttggttttcattgttgacatccgtgctgacaagaggaagattaaagatgctgtgaagaagatgtatgacattcagacaaagaaagtgaat

SEQ ID NO: 203732 - DNA, 385 bp, Gossypium hirsutum
gttgtgtcaaatcttttgaattttgaattcttcgcgtgggttaatgggatctaaatctcggaagcgtcacgtgaagaatggggctgtctttcacaaagctgttcagccggctttttgccaagaaggagatgcgtatattgatggttggacttgatgctgctggtaaaaccaccattctttacaagctcaagttgggagagattgtcaccacaattccaaccattggtttcaatgtggaaactgtggaatacaagaacatcagctttactgtctgggatgttggtggccaggacaagattcgtccattgtggaggcattacttccaaaacacacaaggactcatttttgtggttgatagcaatgatcgtgatcgtgtggtcgaagc

SEQ ID NO: 203733 - DNA, 416 bp, Gossypium hirsutum
cttgcaggtatgtcatcatgcgataagccagaattaggtgaaagggatgttgaggacaaggtggatgacacagaagacaacagtggatttatagacaaggtcaagggtttcattcatgacattggtgagaagatcgatgaaacaatcggctttggcaagcctactgcagatgtaactgggattcaccttccttgtatcaatctagataaagcataaattgtcgctgatgatctcattaagaacccaaaccctttttcaatacccctaatagacattgactacctgattgaaagttattgtcgaaaactcctttcaggcttgattccagattcttgaaccattcatgctcattgtgaagaaacttgtaaaattccaggtactttgatatatgatgatatcaaaagtacatattatga

SEQ ID NO: 203734 - DNA, 394 bp, Gossypium hirsutum
acgacacaagaagaaaatgatgtttggcattatgttgaaggatagtaaccagaaatttatgacacacacacatacgtacacacagaatcctcaagtcctctgcacaaatctctcagtgacagtttttacattattactggtatcagtttaataacaatgatctgatttgatttctagctttctcaaacaaaatgactgaagccttcttccacagtggtgtatttcacttcacggtagagctcataagcttcgtatcctaatgatggatcgatctcgaagttggtgcagtcaccattgacaaagattgagtgactgatggccaacacaatattgattgggattggaaactcttggatctgtttgaaaagttggtccttaagaacatatgttttct

SEQ ID NO: 203735 - DNA, 406 bp, Gossypium hirsutum
gggaactgatgacgaataagaagaaaaacaaactactggtgaagaagggaaaaaggaagagataaaggagaaaatgaacagtgggggaagtgggataatgagcactgagtcatttgagtccttaggattgtctgagccaacttttaaagctattaaagagatgggttttcagtatatgactcagattcaagcaagagctattccaccacttatgattggcaaagatgttcttggggctgcaagaacgggttctgggaaaacccttgctttcttggtacctgctgttgagttgctatataatgttcgattcacttctcgtaatggaacaggtgttatcgttatctgtcccacatgagagcttgccattcagactcatgcggtagcaaaggatcttcttaaataccac

SEQ ID NO: 203736 - DNA, 392 bp, Gossypium hirsutum
cagagttctaccgccatggggagaagacctgcaaggtggtatcgtcagataaaaaacaaaccttacccaaagtcacgttattgtcgtggtgttcctgatcccaagattaggatttatgatgtgggaatgaaaaagaagggtgtggatgagttccctttctgtgttcacttggtctcttgggagaaggaaaatgtctctagtgaagctctggaagctgctcgtattgcttgcaacaagtatatggccaagtatgctgggaaggatgccttccacctgcgagtccgtgttcacccattccatgtcttgcgtatcaacaaaatgctttcatgtgctggagctgataggctccaaactggtatgcgaggtgcttttggcaagcctcaaggaacatg

SEQ ID NO: 203737 - DNA, 427 bp, Gossypium hirsutum
gataagaatgttgacatatatgaagtttgtgatgaaagggaaaatccttggtacttgaaacaggattcatcggaagtggaccaacagcctttttctccattatcatctccatcagactcatcagtcatgaaaaaggttgaatgtttggagagtgttactgatataccagagcgatcaagccccgtatctgttcttgagccaatatttgcagatgatcttatcagccctgcaagcatcagatcttattccggtgaaacatccattcaaccgctaagaattcgattcgaagaacatgactctttggccacaaatcagagcaatcgaattaaaacttgtatgaatgataaggaatcaatatttgagcacataaaggcagtgctgcaagcctcgagtttcagctgggacgaagtctacatccggtcacttt

SEQ ID NO: 203738 - DNA, 422 bp, Gossypium hirsutum
  unsure (1)..(422): unsure at all n locations
gtggcggtaaaattttattgtttgtggaaagaacaaaggttcgaagatgagtgagcttcagagtgatgcgcttagagaagctatttcaaccattgtagctcagtcaaaggagaaacagcgcanatttactgagaccattgaactccagattggtctgaaaaactatgatcctcaaaaagacaagcgattcagtggatctgtgaagctgcctcatattcctcgccccaagatgaagatttgcatgcttggagatgctcaacacgttgaagaggcagagaagataggtttggattatatggacgtggaagcattgaagaaactgaacaagaataagaagttggtgaagaagcttgcgaagaagtatcatgcctttttggcttctgaatctgtcatcaagcaaatnccacgtcttctgggtcctg

SEQ ID NO: 203739 - DNA, 407 bp, Gossypium hirsutum
cttctaacgactgctacgagcaacggtcaaaacaagaggctccaggctgtcctgagtctgatgatccaaatgcggcatggaatgtgcccctgcaaacttgcatgcacaaagtgccagtagatgcttcagaacgtgggtctcagtggcctgatcgatggccagaaaggttggaaaaagcaccttattggttgagttcccaagttggagtttatggcaaagcagcactagaggattttgctgcagacaatgagcactggaaacgggtggtaactaagtcatacctaaatgggatgggaataagctggtcatctgtcagaaatgtcatggacatgaatgctgtttatggaagatttgctgctgcactaaaagatttgagtttatgggtcatgaatgtggtcccaattgac

SEQ ID NO: 203740 - DNA, 410 bp, Gossypium hirsutum
cacacacccatataattgtctaagttatggcggaggaagtggggaagcgggcttaatctgaaacgactgcggctccaccgccggcagtggaggttccaaaagctgaatctgaggaaaaaactgtatctccaccgccagcagaggataaaccttaatagtccaaagctcttgttgtagttgagaaggctccagatcctgaaccaaataaaatctcaggaggatcacatgatagagatattgcccttgcaaaggttgaaaaggcaaaaaggttgtcattcatcaatgcatgggaagaaagtgaaaagaccaaagcagagaataagtcccagaaaaagctctctgctattgtagcatgggagaacagcatgaaagcatctctggaagcaaaactgaagaaaattgatgaacaa

SEQ ID NO: 203741 - DNA, 424 bp, Gossypium hirsutum
ggaaccaatcggcgagtgattttagaggagggagttatgataatgggggtagaacgggaggtgctccggtgaggtcgaagtccacggaggatatgtacacgagatctcaattggaagcctcggcggccaataaggagagcttttttgcgaggaaaatggcggagaacgaatccaggcctgaaggtttaccaccttctcaaggagggaaatatgttgggtttggatcgactcccatgcctacccaaaggattaataataattctcagggtgacgtgttctctgttgtttctcaggggattgggaggttatctctggtagctgcatccgctgcaaatgttgtccaagcagggacgaaggagttcacctccaaggttaaggagggtggctatgatgccaaggttaatgaaacggttggtgttgtcac

SEQ ID NO: 203742 - DNA, 424 bp, Gossypium hirsutum
  unsure (1)..(424): unsure at all n locations
tgataatgaggctttacgctcttcttctccgattatcggtcgcttcgctgcggctcctgtgcttcgccgctgatgttgactaggtgttctatgattcatttgaagagtcatttgatggacgatggatcgtttctgataaagatgattataaaggcgtgtggaagcattccaagagcgaggggcatgatgactatggtcttctcgtgagtgagatggcaaagaagtatgcaatagtgaaagagcttgatgaggctgtgaatctcaaagaaggtaccactgtgcttcagtttgagactcgcctacagagtggactggaatgtggtggtgcatatttgaaatatcttcgtcctcaagatgctggatggaagcctaatgagtttgacaatgaatccncttactctatcatgtttggacccgacatatg

SEQ ID NO: 203743 - DNA, 364 bp, Gossypium hirsutum
cacccatggcatgatcttgagattggacctggagctcgaatggttttcaactgtgtgattgaaatcccaaaaggtagcaaggtgaaatatgaacttgacaagaaaactggtctgatcatggttgatcgagtgctttactcatcagttgtgtatcctcacaactacggattcatccctcgtactctttgtgaagacaatgatcccatggatgtcttgatcattatgcaggaaccagttattccaggatgctttcttcgcgctaaagctataggtctgatgcctatgattgatcagggtgagaaagatgacaagattattgctgtctgtgctgatgatcctgagtatcgtcactacaatgatatca

SEQ ID NO: 203744 - DNA, 412 bp, Gossypium hirsutum
tttatgtctaattaaatgtgtctccaataaataaacatgacatttatattgagctactggtcgcccctaaaaccttccaacttcaggaaattcgacgatcaaatcaaacagtcatggctggagttgcacctgatggatcacaatatgatgctcgtcaatacgacagtaaaatgaatgaattgattgctggataatggaatgacttctttactacctaccattagggtctccaaaactttgataaaaagggtttgcaaggaaaccttttaagaagcatttattcttatgggtttgagaagccgttagccattcaaccaaagggaatcgtgcccttttggaaaagtttagatgtaatccaacaagcacaatcaggttccggtaaaaccgcgactttcttgtctgggatcttaca

SEQ ID NO: 203745 - DNA, 198 bp, Gossypium hirsutum
cagtctaggggtcatatactggctagagagtaagcttcatttctctgtttgaaacgtgacagacgccaacgaatgtataacagctgcctggacagcgacaaatgcaatttatgtgccagcagcgcatcaaggcaatctcgatatgcaaagcggtatcctgaatgcagatgatactgattacaaaactgcttatagcta

SEQ ID NO: 203746 - DNA, 345 bp, Gossypium hirsutum
caaccacaaaaatgttgttaatcttcttggatattgtggggaagaggatcctttcactaggatgttggtttttgaatatgctccaaatggcactctctttgagcatttacacattaaagaatctgagcatttggactgggctatgaggttgagaattataatgggcatggcttactgcctcgagcacatgcaccagctaaacccacccgtaccccataacaacctgtcgtcctcagctgtcagtctaacagaagattatgctgccaaaatctcagattcatgtttctggaatgagttgactgcatcagacagggaagcagacggaataaacctttcggataccac

SEQ ID NO: 203747 - DNA, 414 bp, Gossypium hirsutum
  unsure (1)..(414): unsure at all n locations
gttgtaccccatgattttggagcatgctttcattatcaggaagagagagcaattgagaggggaatccttccaatcctgcagcgtgctaccttggttcagacatttggacaacggaaccatgtgtgcttgaacgagggttcaatcacaattcctccttatgctccccctcaaaagatgcaggcccgccagattccactagatactccacggtctatttttgtctacttccgtggattgttttatgatgtgaataatgaccctgaaggtggctactacgcaagaggtgcaagggcagctgtttgggagaacttcaagaacaatccacttttcgacatctncactgaacatccaactacttactacgaggacatgcaacgagctatattctgcttgtgcccactatggtgggcaccc

SEQ ID NO: 203748 - DNA, 435 bp, Gossypium hirsutum
  unsure (1)..(435): unsure at all n locations
ctgtatatcacattagaaaatcggataaactaagggtgggtataagattattccaataaaaacttgtagggtttaaattgatccgaccggaaataggattaggttctgtattctgatgtgcagagagagaaagagagagtcaaaatcgagaaataagaagaaattagatgtttactttattacaagaaaaatgatgagtgagggaagatcacaatgatgataggaggaagatcatcgtcgtcttcatcaacagcgacagcagcaggtggaacttgggtttcaacaacctcggtgtcggcttcagggaggaggatacaaagggagatgtctgagctcaacgccgacccttctnctcattgctctgctgcccccaagggtgacaatctcttccattgggtcgccaccatcattggtccttctggaacaccataccaa

SEQ ID NO: 203749 - DNA, 419 bp, Gossypium hirsutum
gaaaaaaacaattatggcaagcaatgaacgggaacacgggcacagataagaggaagaagctcctgccgccgaggatgaagacactggagctcaagtcgcccctattgtcaagttagaggaagtcactgtcagtacaggcgaggaaaatgaagatccgatcctcgatctgaagtcgtagctgcatcgatttgataaagaagggaatcaatggaaagagagaggttctggtactgtgaagctgttgaagcacacagagacatgaaaagttcgccttgctatgaggcaatctaagactcataagatctgctccaatcatctagtgttgccgacaatgacggtgcaggagcacgctgggaatgataaatcgtgcttatggcacgcctttgactatgcaaatggtgaattgaaagatgaacttt

SEQ ID NO: 203750 - DNA, 414 bp, Gossypium hirsutum
caatagtttggctctgtctccatggagagtgataatcgtgatcgcaagtccggaatggactatgaacttatagaacagattgcaagaggagctttcggagctgcttatcttgttcttcataaacttgagaaaaagaagtatgtgttgaagaatattctcctggccaaacaaacatagaagttcaaacgaacagctcaccaatatatggaattgattgcaaaactaaataatccgtatattgttgagtacaaagatgcttgagttgataagggaaacatcatttgcattgtaaccagctactgctaatgatgtgacatggcttagcttattaagacggcccgaggtatgcacttccctgacgagaaaatctgctaatggatgactcaattactgttagccgtggactacctacac

SEQ ID NO: 203751 - DNA, 397 bp, Gossypium hirsutum
tcagtatcagcctcatggttttggtaccaccggcggtgggctgcagagcatgaaggaagtggcagcttttcttggacatgtcggcagcaaaacttcatgtggttatggagtggcaactgggggaccattggcttggggtctatgctacaacaaggaaatgagtcctagcaaattgtattgtgatgattactacaaatacacctacccttgcactcctggagtttcttaccatggccgtggtgccttgcctatctattggaactacaactatggagaaacaggcgacgcattgaaggtggacttattgaaccaccctgaatacatagaaaacaatgcaaccttagctttccaggcagcactctggagatggatgacaccggtgaagaaacaccaaccg

SEQ ID NO: 203752 - DNA, 427 bp, Gossypium hirsutum
gtttgagctagctagctcttactcaaatggggaccaagacgatgatgttgcggatattgtcacttttcttctttttgttcagtatctgcaactccattttccttggtgctaatggagatgacaatggtggttggcaaactgcccatgccaccttctacggtggtgctgatgctaccggcacaatggggggagcttgtggttatggaaacctgtacagtcaagggtatggaacgagcacagcagctttgagcactgcacttttcaacaatggcttgagctgcggtgcctgctacgagctccggtgcaacaatgatcctcaatggtgcattagtcgaaccataaccgtgacagccaccaacttttgtccccctaactatgctttatctagtgacaatggcgggtggtgcaatccctcacgagaacactt

SEQ ID NO: 203753 - DNA, 403 bp, Gossypium hirsutum
ttcttgtctttctatttggttaaccatggctcataactggcgtcagcctttgttcctttgccaacttttactcattactgtctcactaatgatcggtagccacaccgtctcgtcagcggctcgacatttattccacacacaaacaacctcatcagagctgccacaattggcttcaaaatacgaaaagcacgaagagtctgaatacaaacagccaaaatatcatgaagagtacccaaaacatgagaagcctgaaatgtacaaggaggaaaaacaaaaaccctgcaaacatcatgaagagtaccacgagtcacgcgaatcgaaggagcacgaagagtacgataaagaaaaacccgatttccccaaatgggaaaagcctaaagagcacgagaaacacgaagtcgaa

SEQ ID NO: 203754 - DNA, 281 bp, Gossypium hirsutum
agacagtgttaaagctgctagcctttgcctttcttttcgtcttcttttgggagaaaacattagctcaaatagctccggcgccgccgataaaggtggacaacatcacttccatcctcgaaaaaggtggccaattcaccactttcatcaagctattgaaagccacacaggtggctgatcaactaaacaaccagctaagcacaccggaccctaacgacgggttaacggtgtttgcgccgagtgacagcgcgttctccggactcaaacccgggacgttaaactca

SEQ ID NO: 203755 - DNA, 356 bp, Gossypium hirsutum
  unsure (1)..(356): unsure at all n locations
gtctctgaggctgttagctgttatggctgccatccgggtggacgagaaaccagataaaatcgaaaacatactactttcttccctaatggaaggaaccgtgacttctccagaccctcttgcctctagcacatgggaggaggttcctcctgagaataccctgattacaccagtacaatgtaagtcactatggagacagttcaaatcagagactgaatatacagttactcaactatttcagcacaggaggcatacaagcgaagtaacaactggttacctnctccatgggcaattgtggcaatggttgtccttggatttaatgaatttatgcttcttctaaggaatcctctctatctcat

SEQ ID NO: 203756 - DNA, 290 bp, Gossypium hirsutum
aaacaatggatttcagagtcatgggtttcgagtcaccagtgttccatacccggcaccacatgatggacctcaacgaagactgcgatcacatgaacaaccccaacgccgcgtcaaggacctacgtacgatacgccaaagccatggcggttacaccgtcagacatcaaagaggactcgaagtcgtacatgttcgttgtcgacatgccatggctaaaaccgggggacataaaggtgcaagttgacgtagaaaatgtgctgttgataagcacagaactgaatcgagaggaagag

SEQ ID NO: 203757 - DNA, 370 bp, Gossypium hirsutum
cttcagccagatttgtctgcacttgtacgtggtgctcagactttcatgtgtcggaaccttgggattactagctgggttaggctaccaatccatgatgcagatttcgggtggggcaggcccatatttatgggccctggtggaattccttatgaagggttatctttcgtaataccaagtccaaacaatgatgggagcttatcagttgccatctgcttgcaaaccgaacacatgaaagtgtttgagaagctcttttatgacatttaaaggaagaagaaaccttgtatacagtccatgtagtctttaaacgttcctttttcccaatttttgtaatacttggttatgttataaagtctcacatttcacttgaaat

SEQ ID NO: 203758 - DNA, 392 bp, Gossypium hirsutum
ctatgaacttcttttcttctattgataagccttagaaaagtggataccatcatccacgattatattacattcatatataaaatttagagcttgttcaaacaaagaccacacggattacataaataatttttttttaattgtagtaaagttcgagacccataccgtcgtggatttcgtaatctttgagggtaatatgatccttgtaaaccgtgtaccacttttggataccgatcttggctgctcgaattccaatttgggcccctaccaacttcttaaagtctccgatcgtgtcgtcgtccttgcacttcaagcgcactttctttcctaaccgatcgttcaacaccacctcgatcatcttcgattttttttcaaaaagactatttgcagggggg

SEQ ID NO: 203759 - DNA, 345 bp, Gossypium hirsutum
taatggccttctgcaagccgtattctaggttggtcctagcactggccatggcattggtggcagctacggtgcctgtttatgggcagagaactatcaacactccatgcaccccatcggcacttaacatcttcactccttgtatgaacttgcttaccaatagcagtgccaatggtacttcgcccactgcagattgttgcaactcgcttaaaacgctcacatcgagcggcatggactgtttgtgcctcattgtcaccgggagtgtcccgttccgtttacctatcaatagaactctagctatttctcttccccgagcttgtagcatgcctggtgtcccccttcaatgca

SEQ ID NO: 203760 - DNA, 424 bp, Gossypium hirsutum
  unsure (1)..(424): unsure at all n locations
ctccatctattctctctgctaatttcgcaaagttgggggagcaggtgaaagcagtagaagttgcaggctgtgattggatccatgttgatgtaatggatggccgatttgttccaaacattacaattgggcctcttgtggttgatgctttacgacctgtgacggatcttccgctggatgtgcatttgatgattgtggaacctgagcaacgagttccagatttcatcaaggctggagcagatatagtcagtgttcactgtgaacaatcttcaaccatccatttgcatcggacgcttaatcaaataaaaggtctgggtgctaaagctggagtagtcctaaatccggcaaccccacttactacaatagaatatgtactagatgtggttgatctagtctngattatgtcggtcaaccctggctttggtgg

SEQ ID NO: 203761 - DNA, 412 bp, Gossypium hirsutum
gagttgcggcttatacactttccaatttcttgtctgcggttccggggctagttacgatggcacttatcacaggaaccataacattttacctggtgaaatttcgatccggattttcgcattatgccttcttttgtctcaatatcttcttcagcatcgctgcgattgagagcctcatgatggtggtagcttcaatggttcctaattaccttatgggaatcgtaaccggtgccggaattatcgggattctaatgatgacatcaggcttcttcaggttgctgtctgatcttcctaagatattctggcgttaccccatttcgtatatcaattttagctcatgggcacttcagggggcgtacaagaacgatttcataggcctggaattcgacccattactaccaagggatcggaaact

SEQ ID NO: 203762 - DNA, 414 bp, Gossypium hirsutum
aagatatccatggcagagacagcaatcaactctaaacggaaaaaggcaagatggtttctgaatggaatgactgcccttgtcaccggtggcactcgaggaattgggcatgctatagtggaagaacttgcagggcttggggcttctgtttacacatgttcaaggaatggagatgagttgaataagtgtttgaaagaatgggaaagcaaagggtttttggttaatgggtcagtttgtgatgcctcgtctaaagaccaaaggctgaaactgatagacaacgttgcctctgttttcaatgggaagcttaacattcttgtcaataatgtgggaacaaacatcaggaagccaacagttgagtacaccgcggaagaatattcaaagctgatgtcaacaaacttcgaatcttcataccatttc

SEQ ID NO: 203763 - DNA, 413 bp, Gossypium hirsutum
  unsure (1)..(413): unsure at all n locations
gcattatcccatggctggtgcagcacaactggtgcccggtttgccgtcaagagttgccaccacaaggatcaggtagcagccagagttataaccccaggggtcaaagtaggagcagcaattttggaagtagttccagtggaagggagagccaaagcagcagacgtaatccattttcatatttctggccattccgttcatcaaattcaagctctagccataatggagccgcgggaagtagttccccacggcatgtgcatgagaacaatcagtcgatggggtataatggatggccttttgactgangtctgtagttgtgtgtacctgtagtgtttgggcaaaaattaattgcactgaatgtggatngagggatctaaaaagagtctgtctctgtaaaagtgaatgangtcaatttc

SEQ ID NO: 203764 - DNA, 248 bp, Gossypium hirsutum
  unsure (1)..(248): unsure at all n locations
cttgacgaatgaagctctttatgatatctgcttcagaacgcttaagctcacaaatcccagctttggtgacttgaaccatttgatttcaacaaccatgagtggagtcacatgctgccttcgcttccctggccaactcaattccgatcttcgaaaactagcagtaaacttgatcccattcccacgcctccattttttcatggttggttttgcacctttaacatcccggngttcacaacaataccgagctt

SEQ ID NO: 203765 - DNA, 330 bp, Gossypium hirsutum
atgttcaacttgttggtccatgaatcgaatcgaattaccatcaaaagcttcaaatctcaaatccgtaaatcaatggcaagtgaaaattttaaaccaccagatccaggttcttcaataaagaagacacaaagaaagcaaagcaaaattgttcaactaaagtgaagactataagtaatagctaaggaattattatcttcatctgagataaccagggatcttgatgcgaacaaagagcgtagtcatgacataggcaataacaacggaggagattcctgcaatggcgtatgaaaccttgacactccttgccctgtttttatcaagggcaagatc

SEQ ID NO: 203766 - DNA, 409 bp, Gossypium hirsutum
agttcgcggaaatgtttgcaactggaatcattcttggtggttactgagccatggtgactgttatttggtttagggcagcatacaagacagacttcttgcctagaacatttggggttaaaagccttcataaaaccgaccgcaatgacataaaaatgcttgcttgggcagtatacctgcaagtgagcattatcagtcaagctctcatatttgttacacgagcaaggagttgatctttactcgagcgtaccggtcttttactggttttggctttcgtcgaatctcacctgattgctacattaatagcattatatgcaaactgaagttttgctgcaattgaacgaattttatggcgttgtgcacgtgtgatatggctctacaaccttatcttttacatttcactcgattttat

SEQ ID NO: 203767 - DNA, 348 bp, Gossypium hirsutum
gcaaatcggttctctaatccttctttcgggtgtaacgtggtttatacgttagggtgttgttgaagaactgctactaccatggctacaaagaacagcgttggggacttgaaggaagctgattcgaagggaaagaaagtgtttgttagagtcgatctgaacgttccattggatgataacttcaacataactgatgacacaaggatccgtgccgctgttcccaccatcaagtatttgatgggtcatggctctaaagtcatcctctctagtcatttgggacgcccaaagggtgtcactgccaagtacaatttgaagccctttgtgccaatggtatctgaacttcttggaatt

SEQ ID NO: 203768 - DNA, 363 bp, Gossypium hirsutum
gaacccaaactagcattagggcatatactgatgaaagagctatttacagaagagctgaaatctctccggagaagaaaccaatctccatgtatatatatgatatgatatgatcctatatcaaaggcctcagtatacaggcttcaacttattacaaagacttttcactaagaaacaaaagaagaccaaaacccagtatacaatattaaaattttctgtgtgtataatgtgtaaaagcagctacctctataatttcctatcagttgaagcgatgatcttgataacaaggccggggaaaacatcgtcagggtcatggatatgcgggttccgctcgacgataaacggatcgccacacttgtcgctgat

SEQ ID NO: 203769 - DNA, 420 bp, Gossypium hirsutum
ttttcatctaaatctctgatccgaaacaaaagactcgggtcgttgggaatagcaatgggttttgagaagatcaaggtcgtcaatcccatcgttgagatggacggagatgaaatgaccagagttatttggaaatcaattaaggataagctcattcttccctttgtggagttggacataaagtactttgaccttggtcttccacatcgtgatgctaccgatgataaagttacaattgaaagtgcataagctactcttaagtacaatgtcgccatcaagtgtgctactattactccagatgaagctcgtgttaaggagtttgacttgaagcagatgtggaagagtcctaatgggactattacgaatattttgaacggcactgtctttagagaaccaattatttgcaaaaatgtccctcaactt

SEQ ID NO: 203770 - DNA, 367 bp, Gossypium hirsutum
catccgttgaaggaatggcttcagatcctaaagtgcacgctttctaggaggttgccaaccacaacaaaaccaaagattgttggctgattatttctgggaaggtttatgatgtaactccgttcatggatgatcatcccggaggtgatgaagttttgctgtcagctactgggaaggatgccaccaatgattttgaagatgtgggtcacagtgattcagcaagagaaatgatggaaaaatactacattggtgagattgatccaaaaactgtccagcaaacccactaccttccaacaacaccaaacccttaacatccccattagaacccttaatttggcaataaaaatctaccatttcttggtcccctttt

SEQ ID NO: 203771 - DNA, 357 bp, Gossypium hirsutum
acgaatcacaagtatgacgaagctgctgtggacaataggattcgggaggctgatatagaagcattaagagcaaaggtaaaaatggctgaagaaacagttaagcgggtgactgggattaactttaactctggacatctatctaggcacaatgtagctagtgttagcatgccttttgttagcagcccattggaaacatcttcaactgctcctgttccattgcagccaaacactaatcagttttttcaccaaccagttcccttgcatcatcagagaatggagaacgttttcatggggaacaccatggttcctcctatcgtgaattcacgaaccgaaggagtgaaacatgaaaatgaaaca

SEQ ID NO: 203772 - DNA, 393 bp, Gossypium hirsutum
tgaatctgttgacaagttggcagagaaaacggaggcaggatcaggttctgaagggcttgactttagcaatctgaaaaagaagaagaagaaaccagtagaggccaatacattcactgacgaaagtggggatgcaggagatgattttgatggtcatattgatggggatgaagaaggtgaaggcattgtcttgcaacaacggtacccttgggatggaactgaccgtgattatatatatgatgagctactcggtcgggtgttcaacattctccgggagaacaaccctgagcttgctggagacagacgtagaactgttatgaggcctccacaagttcttcgtgagggcaccaagaaaactgtttttgtaaatttcatggatctatgcaagacaatgca

SEQ ID NO: 203773 - DNA, 358 bp, Gossypium hirsutum
  unsure (1)..(358): unsure at all n locations
atcagttatcgaaaggagaagaattcgtgaagaaagcggggaaaaagctaaatggttggggcttgtttagttctaaatacgaagactccgccgatttatttgataaagctgctaattgcttcaagcttgccaaatcatgggacaaagctggatcaacttatgtaaagttggcgaattgccatttgaaatcagacagcaagcatgaaacagctcaagcttatgttgatgctgctcattgttataagaaaacagctacaaatgaggctatatcttgcnttcagcaagcagtgaacttgttttgtgatattttatggctaagcatggcttcaaggtattataattaaattgctgaattata

SEQ ID NO: 203774 - DNA, 392 bp, Gossypium hirsutum
ccaaatcatttgacacagcttgttcaacttacgtaaagggagcagattgaaactaggaacgttgaaagcacacattaagctgctcaagcttatgttgatgctgttcatcgctattagactacaaatgtaaaggacgctctatactgcctgaaagacgcactgtacatcttttgcgatatcataatggctcatcacctctgacaagtattataacgaaatagctcaattataatgagtcaaacagaacactgaacagaccattgatcattatgaacaggcaactgattgcttacaaaatcaagatctatcaacctctgccaaccaatgtaagcagaaagttccacaattagctgctaatatactacaataccataaagcttttgtcatctatt

SEQ ID NO: 203775 - DNA, 395 bp, Gossypium hirsutum
gtttatcttttgactttgctgatactaatttgtagatggagaggatattacgtaggcgcgtaaagcggcatagtacacaacgcataactctggaattttaacatccatatttattctgtagctatcgttattttggcttccactagctggtgaactttccatgccaaaacttcacttgacgctgttgcagtcagtgctagggctgatcttgtaagggatgttgacacctgacttgcctgggagtacgcttgcaaggccaaagttgatgccagtaatgccggcggccgcacttttgatgcatctgcaagctgcttgccggtctggtgttcgttgggcggccgagttgatagatttgatgccgcttgcacaacctcggggaacggcaccaacaccac

SEQ ID NO: 203776 - DNA, 272 bp, Gossypium hirsutum
  unsure (1)..(272): unsure at all n locations
cgctctagaactagtggagcttgtattctgcantaattttgcacgagtttcaatgcatggatcatgatttggctggtcttgtagcaatccgcgtagttaagattacggagccacattttaaatgttatatacatcaactactctttggacttgagcactgtcacatctctattagtgctatactgagatattaattggtctaatctttttattgatgatgaaggtctacttaatattgcctatttctgactggctacattctttgatcctaa

SEQ ID NO: 203777 - DNA, 366 bp, Gossypium hirsutum
ggagaaggtgcttcttacagtgaagccacagtatggtgggggtgagaaggggaagccagccactggtgctgaaggtgcagtgcctccaaatgccacactcttgattactttagagttggtttcatggaaaactgtgactgaagtaactgatgacaagaaggatataaagaagatcttgaaggaaggagagggatatgagcgcccaaatgagggggctgttgtccaagtgaaattgattgtgcaactgcaagatggtaccacattcttgaagaagggccacaatgaaggagaagaattgtttgagttcaagacagatgaagaacaagtcattgaaggtcttgatagatctgtgttgaaattgaaaaa

SEQ ID NO: 203778 - DNA, 362 bp, Gossypium hirsutum
tgaagtctctggatgaaaatcagcggttcataattgaggattcagttcttattgcactgcttgggcaactgaaactagaggcagaaactcttgctgctgagaagaactcagtacggcaggagttgaaggttcagtctgtgcagttttcggagctgctgatcagagctgaaaaacttgcggatatgaatgaagtactgagatcaaaagtggtagaggtaaaccaaagagaagacgctttgcagactgaattgataagtgttcgtggacaactgttagccttgcaaaggcaatatcagacttcactggaagacaactgcaaggtgctagatgagaaaagatcttagatgaaggaagttttggac

SEQ ID NO: 203779 - DNA, 361 bp, Gossypium hirsutum
ctgaaggacgtctgatgaacttgggatgtgccggtgggcacccaagttttgtcatgtcgtgctcgttcactaaccaggtgattgcccagctcgagctatggaaggagaaggcaactggaaaatatgagaagaaggtttacgtattgccaaagcacctagacgagaaagttgctgcacttcacctcggcaagctcggagctaagctcactaagctcactaaagatcaatctgattacattagtgtgcctgttgaaggtccttacaagcctcctcattacaggtactgagggggacagttaatgagtttttatcgagaaagaaaaagcatccggatggtttgattgtttcttgtattactgaa

SEQ ID NO: 203780 - DNA, 255 bp, Gossypium hirsutum
tcatatcttttgattttgctctgtattcttaggctatggttaaaaattaagagcaggtgttttgaggtagtcatttacataaacaaaatgatgatctggcgcattggagctatttatattcatatgcctacaatggctgtgatcgcccttaaatgtcccgatacttaagtggctatcgctgatatctcattacctatgatcagtatctggaacaatgaccatattcttatctattagcctggtctctatggagtt

SEQ ID NO: 203781 - DNA, 299 bp, Gossypium hirsutum
  unsure (1)..(299): unsure at all n locations
gaagcanttagtgaggtattgaatggagatcgactcgtgagtgcggcttataaactgaagtttagagaggaaaatgattcttccgttgtttgttagaagaaactttctaaggatgaagttgtcttattcctgaaggcggttgaaaaagattattatttccacatgtactatgatgatttgcctatctggtgttttattggttaaggttgataaggaaggaaaagctgatcccaatgagttcaagtattacctttacaagcgtatgcatgttgatgtactctataacatggaccgtgtta

SEQ ID NO: 203782 - DNA, 407 bp, Gossypium hirsutum
gtaaacaacctggatcaagtccgagctttggagaatgagatgctcctccgtataaagcaacaaggactcaacatcacccctcgaatcctcattattactagacttcttcctgatgctgtcggaacaacatgcggtcaacgacttgagaaagtatacggaacagagcactcggatattcttcgagtacccttcagaacagaaaagggaattgttcgtaaatggatctcaagatttgaagtctggccatacttggaaacctacacagaggatgttgctcatgaaatctccaaagagttgcaaggcaagccagatctgatcatcggaaactacagcgacggcaatatcgtcgccttcttgctcgcacaataaataggtgtcacacagtgcaccatctgccatgctttgga

SEQ ID NO: 203783 - DNA, 414 bp, Gossypium hirsutum
tgatcttggggatgctatgtggtgttgtaagtgtagtggtcgcgcgcttagtttcttggtgtcacagcagcatttgagtatatcaaggagaaattaggactacctactgtaatctgtcctgctttaggtggtttaagagctggaataatagctcttaggtatcctggaattctatactggggctttacaaatgtcaatgaaatcctacatactgggaagtccgcatctgctcccggaatctggttgctaacccaactggcagcagccaaagttgttgccactgctttgtgtaaggggtctgggcttgtaagtggcctttatgcacctagtttgatgattggtgctgccgtcagtgctgtatttggatggctcagctgctgaacttattaattcagctatttcaggcaatgcttc

SEQ ID NO: 203784 - DNA, 425 bp, Gossypium hirsutum
gcaaaacctgaagaaaattctaaagtagaagaagagccgcatgaaccatccccaacaacaaaagatgatgcaccacaaccaaaacttgatgatgatgatgatcatcatcatcaacaatcatctgcaaacgaaccgcgatcatcttcatcatcggaggaagatactaagcaatggggtacccacgtcatgggaccgccggcgatccctattgtccacccggataaccagaaggccgctttatgggtcgccggcgaccaccagcaaattcacgagctgccttacctcgtttacactcctgctgaaaaaccgacccaaaattcatttgaacttgtgattaacgttttcaatacttggagtaggaaggccgagatcgtcgcacgcagcgtctggcacaacctgagaagtggatcgtcggtatcggatgc

SEQ ID NO: 203785 - DNA, 361 bp, Gossypium hirsutum
ttgaaacattaaggaagcgatttaaggtgtttctagaggctagtcttactgtaattgagtactataaaggaaagggcaaggttcgagagattgatgctgcaaagccggttgaagaggtatttaatgatgttaaagatattttcaacccaaaagtcccaaaagttccaaaagacgaaaatgtttaggggagatgcatgtgtagtgctattctgtaagtgcccctttaacttgaaatcaaaactagtattgagatttcagtgcatttatagaaataataatgtagactatgaggtgtatgtataattatcttgagtaactgtattgaccgatttgtgctattcaatgaatcgccattgtattt

SEQ ID NO: 203786 - DNA, 426 bp, Gossypium hirsutum
ggtcaattcaccctcttcattcgtcttctaaagtccacgcaaggggccaaccagctgctcggtcagctcaacaattccaacaatggtatgaccgtttttgcaccaacggacaatgctttctccagccttaaatcgggcacattgaattcactcaccgatgaacaaaaagtgcagctggtgcaattccacatcgtcccaacatacctcacctcgtctcagttccaaaccattagcaaccctttgagaacccaagctggtgatagtggcgatggcaagttccctctcaatgtcaccacttcggggaactctgtgaatataacaacagggttgacaaacaccagtgtttccggcactatttacactgatggtcagcttgcttgttatcaaatcgatcaagttcttcaaccattgcaaatatttgcacct

SEQ ID NO: 203787 - DNA, 420 bp, Gossypium hirsutum
caagcaaccattttccttacaagtttgtttttcttgtgagtaatccatatggctagctcaatgtcccttaagcttgcatgtctgttggtgttgtgcatggtgatgggtgcacccctggctcaaggggccataacccgtgctgatggcttagtcggcctcccacgctgccttccttttttgtcagggaatggtgatggtgctgatgccacaggttgctgtgccatcgtcatgaatgccttgggatcgctctgtggtgatacataggaaccgatctagcttgaaatcgggttcggatttgggtggaatttcaaattggtgtgttatggaatcccaacttaatcgtgtttaagggtgggatccaattgtgtgatacattacagagcattggtgtggattgttttctcatatgttttgattgac

SEQ ID NO: 203788 - DNA, 254 bp, Gossypium hirsutum
ctcgtgccttgcaatcacctcagccttgcttccagcagggtgatcttattggggatccaggtaacttggagtggatgatggaagctaattgtcctgatgttgctgatatcacacattcactgcaacagccagcttgaagaaagttggatagtggtggtgttaccagtggtggtttccgtgaactcataccatgcattgcatgaactgcaatcgctgttggagaggactgtgtattcatcgaggtccattattat

SEQ ID NO: 203789 - DNA, 423 bp, Gossypium hirsutum
ttgtatatcttggatttatggtttttggaatagttgtgcttcgttttctctatcggttcatagacaacaatggccttcctcgaaactggccatttgttgggatgattcccacgttacttctcaacatccatcgccctcatgacaaagttgcccaagtcctcagacgaagcaatggtaccttcttttatagaggactttggtttactaacaccagcttcttagccacctacgatcctgagaatgtgcgttatatattgagttccaacagttctgtttatttgaaaggtcctgaatggctgaaacagtttgatatcttcggcgaagcacttttcaattccgactgtgaggcttggaaatgttaccgtagagttttccatgacttcttgaatcaccctcagtaccggcaatcactttcaaaggttc

SEQ ID NO: 203790 - DNA, 418 bp, Gossypium hirsutum
  unsure (1)..(418): unsure at all n locations
gaaaaatggagaaagcaatcaacagacaacaagttttggttaatcatttacaaccctctgctcaatctcatcaatcatctgctgctattctgtttccttcaaactgcgcggcgggggatagcgctgcctatcaccggacggctgcttttggggatgatgttgtgattgttgcggcatgtcgcactgcaatttgcaaagcaaagcgtggaggcttcaaagattcacttgcagatgatttgcttgcccctgttttaaaggctgtgattgatagaacaaagctgaacccaagtgaagtgggggatatagttgttggtacagtgttggcacctggttcacanagagcaatggaatgtaggatggcatcattctatgctggtttccctgatacggtgcctattagaactgtcaacaggcaatg

SEQ ID NO: 203791 - DNA, 299 bp, Gossypium hirsutum
gccatgttgtaaccaagaaggagttggctccaggtccgtgtaatctgaaaggaaaaactagcaaaagagtccattttgtgaggaacttgattagggaagttgctggtttagcaccatatgataagaggattactgaactactgaaagttgctgatgacaaacgagcgctcaaggttgctaaaagatagttgtgaacttacaaaactgctaacaataagcgtgaggagatatctagtgtactccgtacgattcgggctcaccctatatgcggaaaattgaagatgatcatctgtcctgtt

SEQ ID NO: 203792 - DNA, 358 bp, Gossypium hirsutum
ggaaactcatgacgaggcacaagaagaaacggggtgtgaacttgttcacggggatgtctgtaggcccccaatcaattatggtttactctgtgtttatgttggcacaggtgtccagattttcgcaatgtcgcttgtgacgatgatatttgcgttgctgggctttttgtctccttccaatcgtggagggcttatgacagctatggttcttttgtgggttttcatgggaatattttccggttactcttcatcacgtctatataagatgttcaagggcacatagtggaagagaaatacttttaaaaactgcatttatgtttccgggtatcttattcgccatgttctttgtactgaatgcact

SEQ ID NO: 203793 - DNA, 363 bp, Gossypium hirsutum
atcaacccgtgcagagagtttccaatctggacctttgtgtgacgggaaagatggaatgctagtattgaggaacaagtcaccgaggtggcatgaacaactccagtgctggtgtctgaacttcaatggacgggtaacagttgcatcagtcaaaaattttcagctggttgcatctcctgaaaatgcagctgctggtcaggagcatgagaatgtcattctccaattcggtaaagtggggaatgatgtattcactatggattatcagtatccaatctcagcttttcaggcatttgctatatgccttagtagcttcgatactaagatcgcttgtgagtgatatgcaaacaggttgtgcgaaatgcaatg

SEQ ID NO: 203794 - DNA, 255 bp, Gossypium hirsutum
attttccgtccactactcttccaaatcctcatcatgtggagcggatatccgtgtggagggcccctgtagataaactccactgattctgccactgacgacgacagtatcatgaatctgcaagacctgtatagggctgcactctctcgccccttggacgagactcatcaaagctggctgcttggcccctgtgagcaaaagaagaagaagaagtactttgatctctgatgtatcattgtgagctccaagatctttgta

SEQ ID NO: 203795 - DNA, 418 bp, Gossypium hirsutum
ctcaaaacactttgctttctttgggattcgtgattttcggaaagctgaattggccggaactcttaccaaaatacctcaggtacaagtgatcaaagagaatgggaagaggaaaaatagagataaagaggatcgaaaacacaacaaatcgtcaggttaccttttgcaaacgcaggaatggcctgctgaagaaagcttacgaactgtcagtcctctgtgatgctgaagttgctctcattgtcttctccagtcgaggccgtctgtatgagtactccaacaacaacataagatcaacaatagacaggtacaagaaggcttgctcagatacttctaacacaaacactgttactgaaatcaatgctcagtattatcaacaagaatcagccaagttgagacagcagattcaaatgttacagaattc

SEQ ID NO: 203796 - DNA, 399 bp, Gossypium hirsutum
aaactcttatctatgtctatcctctatctttttgccctgttgtgcatgcaaatccatgctggagagtacttcacctaattcccaagagttaacaccaatgagaaagagacaacatccagatagcaagagcacgagaccttcgttccccagaccacccaaaagccagacgagcaagagccaaggttcatacctgaaacccaaaatggttatggcctttacggtcactagtcatgctcaggctcatgctcaagctcaagccggcccagtttcaccaccaaagaaacctattaaccctatttcaaccctgttagatttcaccctgatgaaccctataacaacattcctccatccttcaacaataaagacacttactactacatcaagaatgcctacaagttc

SEQ ID NO: 203797 - DNA, 337 bp, Gossypium hirsutum
attgggattatagtgtgcggtcaaaggaacaaattgaggcaaggttgtttagcaaacatgaggctgccatgagaagagaaaggaccatggcgtactcatttactcatcagcaaacctggaagaatgcttagagatctatgaatccattattcatggatccaagcaatccctcatggggatggagctagatggaacggcggatgacagcgcggccatgggaggttcgtggtggcatgatacatatagaacatctcttataccaatcatcactaaagagtgcacgaagcaacttcagtggagaaatcatcaaagcttatgctcgttatcaactcaattt

SEQ ID NO: 203798 - DNA, 300 bp, Gossypium hirsutum
ctttgccttcgctgggtttttgattctaatggaagatggagagtgtgttttggtgctggagcccgcaaagaaagacttttggaaccccacctgcatggaccttgccgacacttccaaaccgtttaaagttactaacagtggacctgccaagcactggaccgacgcaatttccatctgaaatggtcgtcttggcgccatggtgtatggcggcattgcatcggaaactcttcagctcaatgatgacacattttggacttgtgtttcaggggattacactaatcctgaagctccaatctccct

SEQ ID NO: 203799 - DNA, 431 bp, Gossypium hirsutum
atcacatgccacctcatcaatcctggggtccacctcaaggtgtgcctccaaatgctagtggaggttctggttatggtcataatcctctgtacatgccaccttctcggcaaatggacaattactaccctcctgctgatatgccacctcatatggaaaaacagccccatcagggtatttctgcctatggaagagaggtgccaatgggtgcccatggatcatcaaatccccagaatgcaccatcaatgatcacacaggtcactcagcaaatgcaaattccactatcttatgctgatgctgttattgggacagctggtgcaagtattagctatattcgacgtgctagtggggcaactgtcaccattcaagatactccgtgtgtccctagtgaaatgacagtcgaaataagtggaactgcttcacaagttttaact

SEQ ID NO: 203800 - DNA, 344 bp, Gossypium hirsutum
tgcttgacttgggggagaagcagtcaggggaaaaggttggagatgtgggcctggctccttgggctaaaggcagtgctagggagttcatcaggaagcatagagaggccctagaatctgattttgtctcagaaaatctgcaccattggatagacctcatttttggatataaacaaaggggaaaggcggctgaagaagctgttaatgttttctaccattacacatatgaaggaagtgtagacatagactcagatacagatccttcaattaaagccttcattctagctcatatcaatcattttggacagacacctaatcaactattcctcaaaccccatgtgaaaagg

SEQ ID NO: 203801 - DNA, 438 bp, Gossypium hirsutum
aagaaaaaacccagtattctgtcatcactatggaggcgaaatggctgctattttgtacaatggcagcactaatggcagtggcaaacggccaggaatcagtgaagccattggtgaagatagttaaaggcaagaaactttgtgataaagggtgggaatgtaaagggtggtcacagttttgttgtaaccaaaccatttctgattacttccaaacttatcaatttgagaaccttttcgctaaacgtaatacaccggtggcacatgcggttgggttctgggattaccattctttcattacggcggcggctcagtatcagcctcatggttttggtaccaccggcggtaagctgcagagcatgaaggaaatagcagcttttcttggacatgtcggcagcaaaacttcatgtggttatggaatggcaactgggggaccattggctt

SEQ ID NO: 203802 - DNA, 218 bp, Gossypium hirsutum
ggaatttcagatatgattgatgatactgtgaacacaattgtcacagacatgcttcagtggccacatagaattgttgttccaattggtggtataccagttgatacaagtgaattagagctgaaaccggagggaaagctgacagttacagtagtcaaagctaatgatttgaagaacatggaaatgattggaaagtctgatccttatgtggttgtatacat

SEQ ID NO: 203803 - DNA, 416 bp, Gossypium hirsutum
attatttggctctgtctccatggagagtgatagtcgggatggcaagtccaaaatggactgtgaagttatagaacagattggaagaggagctttcggagctgcttatcttgttcttcataaacttgagaaaaagaagtatgtgttgaagaagattcgcctggccaaacaaacagagaagttcaaacgtacagctcaccaagagatggaattgattgcaaaactaaataatccgtatattgttcagtacaaagatgcttggattgataagggaaacagcatttgcattgtaaccagctactgtgaaggaggggacatggctgagcttattaagaaggcccaaggtatgcactttcccgaggataaaatctgcaaatggatgactcaattactcttagccgtggactacctacacttcg

SEQ ID NO: 203804 - DNA, 438 bp, Gossypium hirsutum
aagaacatgatggcagtactgtttgtatatctgggattgatggtttttggaataatttctcttcgttttctctatcgtttcatagacaacaatggcctccctcgaaactggctatttgttgggatgattcccacgttacttctcaacatccgtcgccctcatgataaagttgcccaaatcctcagacgaagcaatggtaccttcttttatagaggactttggtttactaacaccagcttcttagccacctccgatcctgaaaatgtgcgtcatgtattgagctccagttctgtttatttgaaaggtcctgaatggctgaaacagtttgatatcttcggcgaagcacttttcaattccgactgtaaggcatggaaatgtcacctcagagttttccatgcctacttgaataacccttaggttccgcaatcactttcaaag

SEQ ID NO: 203805 - DNA, 359 bp, Gossypium hirsutum
  unsure (1)..(359): unsure at all n locations
ctcgtgccgatacgatcctcgttgccgtcatcgtcgtggctgctttttacggcggcgcggtgacatctgcgcaggcaccggcagctggtccagcgatggccatgtcgccgtccgccatggcacctacgcctgactgtatgacgaacttgttcaacttatcggattgtttgacgtacgtggaggccggaagcaacttgacgaatccggacaagccttgctgtccggaattggctgggctagtggaaagtagccctcaatgcttgtgttatttgctggataagaacgcgacggcgaactatgggttcaacattgacatggatagagctcttaagcttccatatgttngccatgttaaaact

SEQ ID NO: 203806 - DNA, 366 bp, Gossypium hirsutum
tactattccagagcaattattggagaacgtaactgttagtgtggatgcttcagaggctgaggaatttgctgaagtagcttcaaagcctttaagacaacttccatatgattcacccggacagaccttcgtggcatttgaaaagccagagggggtctcagctgttggaaagttttcaaatatgctgaggttcattgtaaaagaggttgacccaagtactggcgaggctgaggatgacggagtagaggacgagtaccaactggaggaccttgaacttgttgcagccgattacatgttgaaggtgggtgtctctaatttcaggaatgcatgggaaagcatgggtgtggactttgaacgtgtagatgaata

SEQ ID NO: 203807 - DNA, 385 bp, Gossypium hirsutum
aaaaacccttgctgccgaaagacagaatagatgagttagcaacgtttatggacaaggtggagacttggttggatgagaaggaggcagagcaaaagaagacgtctggatatagcacacctgttttcacatctgaagaagtatacgagaaggtgttcaatttgcaagacaaggctgcaagtatcaagagaattcccaagccaaaacctaaagtcgagaagcccgtaaagaatgaaactgagaccaaatcagagaacacaaccagttctgagaaggatacctctgaaaatgacaaacccgcgggggactcagatagcttgaccaatgaaaaaataaaaggaggatccgagccccacgacgaagtattatctgtttttaacacaacaag

SEQ ID NO: 203808 - DNA, 404 bp, Gossypium hirsutum
ggtttttcttgtttggttcttgtctttgttgtccaacagttgtttggtcaaagttgtgcatatttgttgattcatggtgagcctaccaactacgtttctgccgttgtggacccaggaatgacgaacccaaacgtcagagttgctttggaagcttggaatttctgcaacgaagttggctttgaagttcctaacgtgggaagcccccgctgggctgattgtactgatctttactgctcttctgacttcgtttatctgggtggcggccttgttaataatggcagtcagtgcagagtacttcacaaagtgaatgaaactgacaacaggttaggagctggtgataaatgtcctataatgggctttgagtcttatgctgaccctgacctgtttgcaaaggagaaagaact

SEQ ID NO: 203809 - DNA, 296 bp, Gossypium hirsutum
cgacaatgtaacctctaagatccacgacaaggaacggagttcaccagatcatgagaggttgactgatgctctcaaacagctactagaggtgggacaccttgcaattatcatgttcagagggagctatccctgcattcggagttacccattcgtgggggcattcacatttctgggaaaactctcactgtaaggactattactttgtacgttataagttctgacaccatcgactatggttaagctaccaaccatgacatggatcggaatccaccatatcagcagatgtagattattgc

SEQ ID NO: 203810 - DNA, 325 bp, Gossypium hirsutum
cagagctgttttaatggaccttgaaccaggaaccatgggtagcgtgcgtactggtccgcggggacaactttttagacctgataacttcatttttggccaaaatggagctgggaataactgggctaatggtcattacactgaatgagctgaattgattgattcggttcttgatgttgttcgaaaagaatctgagaattgtgcttgcttacaaggcttccagatttgtcattctttgggaggtgtaactggttcagggatggagacactgttgatatcaaagatcaaggaagaataccctgatcggatgatgctgactttctcggtt

SEQ ID NO: 203811 - DNA, 403 bp, Gossypium hirsutum
ctgccttcgcttccctggtcagcttaactcggatctcggcaaacttgccgtaaacgcttattccattcccccgactacatttcttcatggtgggatttgcacctctcacctcacgcggttcccaacagtacagagccctcactgtccctgaacttacacagcaaatgtgggatgccaagaacatgatgtgtgcagctgatcctcgacacggccgatacctcacagcatcagcggtcttccgtgggaagatgagcacgaaagaggttgatgagcagatgatcaatgtgcaaaacaagaactcatcttactttgttgaatggatcccgaacaatgtgaagtccactgtttgtgacatccctccaatcggcttaaaggatgcatccacatttattgggaactctac

SEQ ID NO: 203812 - DNA, 400 bp, Gossypium hirsutum
atcagtttcaaggtgtgttcttgaggaggctagggaatgctattcggctggttcctcaaccattgttgtggatcgtcgtggaagggcaatcgtattcgaacgagctatccgaaatacttaggaaaacaggcattatgtataggcatttggtgttcaaggagaatttcacagatcctgaagcagagctaaatcatcaacgaaatgttgcattgaagcacattgagcaacacaagctgagtgggatagttcatttcgctggacttaccaatgtttacgatcttgatttcttcaaagaacttagacaaattgaggtgtttggcacttggccaatggccctgctatcagcaaactagagacttgttgttattgaaggacctgtttgtgattcattacaagttat

SEQ ID NO: 203813 - DNA, 362 bp, Gossypium hirsutum
gtggatccaaatatatatccagagctggctcttgccctgagggggtccatggaagaggagagagcaaggcaagaagctgctgccaagaaggctgccgaggaatcttctaatccagaaaaagaagaggaagtgcaaccacagtccgattcgcagcatgcaactgaacacgttactgatcccatggatgaggatgatgctttgctaaagcatgcccttgcattgtcgatgaatatcccaggatctgattcttctgccggtgatgctgagatgtctgaggctaccaatgatcaggaattggccatggcacttcagatgtcgatgcaggacagtttaaaagatccatcatcagaatcagatgtgag

SEQ ID NO: 203814 - DNA, 399 bp, Gossypium hirsutum
gtaacaccatggaacccgttgaaaaagttcttcgtgacgccaagattgacaagggctgtggtcacgacattgtcctcgctggcggttctactcgtatccccaaggttcaaaagatggtctctgacttcttcaacggtaaggaacccaacatgtccatcaaccctgatgaagctgtcgcctacggagctgctgatcaagctgtcattctctctggtgatacctctgaaaagactcaagatctccttctcttggatgatgctcctctctccttgggtatccgaaccgttcgtggtgtcatgactgccttgattaagcgtaacacaactgtccctaccaagaagtctgaagttatcttcacttacgctgattaccaacctggtgtcttgattcaagtctttg

SEQ ID NO: 203815 - DNA, 276 bp, Gossypium hirsutum
gtcttaataaacgccttctatataccttccatatccatgtactgctctatttctacgtgggcgaatttttagtgatcgacaatcatagagtgcatttcaatccacatcgctcaagctcatattcaattccgaaatgcctgctgggaactttactgccttgaacatcgaatccagcctcattgccaaataccaagtgacaagactttccaaacaggtgacgattctattaacacctttatcagtgaaactggatctcgaaagcacttccctcgttct

SEQ ID NO: 203816 - DNA, 382 bp, Gossypium hirsutum
taggacttgacaatgctggcaagaccactcttcttcacgtgttggaagatgagagattagggcaacatcaaccaacccagcacccaacatctgaggaattgagtataggcaaaatcaagttcaaagcttttgatttgggtggtcaccaaatcgctcgccgtgtctggaaggattactatgctaaggttgatgcagtggtatatttggtggatgcatacgacaaggaaagatttgcagagtcgaagagggaattagatgcgctgctttcagatgaagcattggccaatgttccttttctaattctaggcaataagattgacattccgtacgcagcttcagaagatgagcttcgttatcatcttgggctgaccaatttcacgac

SEQ ID NO: 203817 - DNA, 364 bp, Gossypium hirsutum
tgagaattccaattctctctctctttcccgccctttttgtgactgtctttctcactgcacactcacccccttcttcaatatacgaccacttgaaacacaacggcctccctataggtctcctccctaaggggatttctgatttctcaattgaccccaacaccaaccgtttccacgtcaacctaacccaaccctgcaactccgaattcgagattcagctccattacgatttcaacatctacggtgtcttgtctttcggcaagatcgctaatttgtctggtgtctcccaacaagaactcttcttatggtttcctgtcattaacattcgcgtcgatgatccaacctacggtttgatcaacttcgatgt

SEQ ID NO: 203818 - DNA, 357 bp, Gossypium hirsutum
  unsure (1)..(357): unsure at all n locations
atggaaaagatctggcatcatacattctacaatgaactgcgtgttgctcctgaggagcaccctgtgcttctcacggaggcacctctcaaccccaaggccaatagagaaaagatgactcagatcatgtttgagaccttcaatgtacctgctatgtatgttgccatccaagctgtcctctctttgtatgccagtggtcgtacaacaagtattgtgctggattccggtgatggtgtttctcacaccgtgccaatctatgaaagatatgcccttccacatgccatcctncgtcttgaccttgcaggtcgtgatctaaccgatgccttgatgaagattcttaccgagagaggttacatgttc

SEQ ID NO: 203819 - DNA, 402 bp, Gossypium hirsutum
cttctgcagtcaactccaccatattcctaagtttctctgtgaagctctttgcaatcccaaaaggagaaataaaaatcttcttgggtttgtcttttattgccttccatttttcttttattttcagaagaaaatggaaggacatggcagccgaggaggctcttgacttgtcaactttgcagtctcagctaagtgaaactcatgaaatgtggaaccaggagatggaaaaacaccaatgccaggtagattttttacaagacaaaattatggaggtaaaggcttgcttacaaggtccggaggaggaatcaaaagaggtagatgttctttggcgtatggtaaaaactacttgaactttgttggcttacttgaaatcaaaagcaagagtgatggctgttcctgatttag

SEQ ID NO: 203820 - DNA, 427 bp, Gossypium hirsutum
cacagtcatcattgctggaagaggtgcagcaccacaacgccacttgttcacgggattctttaggttgggtatagttgccatataaccatttagaccagctgcaagaatatgatagcagatatgtccaagaacataggcatagtcacaatcaaattttgatggtaaggatccacgagcttgatagccaaagaagtggcaaatagcattaaatttcttccccttgtaagtgcctgctttcaggcgcttattaatttcattctctacaaggtgcgccagtagtttctccgtctcaatctgtgatagctgtgcagaatcgtctgacttatgttggagaagaagctgtttccttatgaaatgtggcaaaaattcatacaaagcagatgcccaaggtgataactgggaagaaatttatcagcagatacatttt

SEQ ID NO: 203821 - DNA, 350 bp, Gossypium hirsutum
ctttgctgcaaattctcccaaatttttcagagggtctaggacaagggaaaagagtgagagagatccttcatgttcaaggtggacaatgtgggaaccaaatcggttccaagttttgggaggttgtttgcgatgagcacggcatagatccaatggaaggtacattggttcctcggatctgcagttggagcgtgttaatgtttactataacgaggcttcatgtggtcgctttgttccttgtgctgtgctcatggacttggagcctgttacgatggacagtgtccgaactggtccttactgccagattttcatgccagacaactttgtttttggacaatcctgtgctggaaaca

SEQ ID NO: 203822 - DNA, 383 bp, Gossypium hirsutum
gttttctctccctccaattaagatgcagatctgggttgggaccctgaccggcaagaccatcaccctcgaagtcgagagttccgacacgatcgacaacgttaaggcgaaaatccaagacaaggaagggatcccaccataccaacaacgtctcatctttgccggaaaacagctcgaagatggccggaccttggccgattacaacatccagaaggagtccaccctccatctcgtcctacgtctacgtggtggcatgcagatcttcgtcaaaaccctgaccggctagaccataactttggaagtcgaaagctctgacaccattgacaacgtcaaggcaaatatccaagacaaggaatgcatcccaccagaccatcaaaggctcatat

SEQ ID NO: 203823 - DNA, 419 bp, Gossypium hirsutum
cataatgatttgctcattccttccagttatcagtaactgtaatagaacaaaaggaggttggattcagttaaaccatggaaggcctcagccactgcaatacgtagtcaatgcatccttcttagccgccctatatagtgattatcttgatgctgctgatacacctggatggtattgtggtcccaatttctattcaactgatgtcctgcgtgaatttgccaaaacccagattgattatatccttggcaaaaatcctcgaaaaatgagctatgttgtgggctttggtaaccattatccaaagcatgttcaccatagaggggcatctatccctaataattagatcaaatataactgtaaagggggatggaaatggacggatacgtcaaaaccaaaccccaacacacttgtgggagccatggtag

SEQ ID NO: 203824 - DNA, 434 bp, Gossypium hirsutum
gaaacaggcgacgcattgaaggtggacttatggaaccagcctgaatacatagaaaacaatgcaaccttagctttccaggcagcactctggagatggatgacaccggtgaagaaacaccaaccgtcggcccacgacgtgtttgtcggcagctggaaaccgaccaagaacgacacgttggccaagcgggtcccggggtttggagccaccatgaatgtgctctatggagatcaagtttgtgggcgaggtgatgttgacaccatgaacaacatcatctctcattacctttcttaccttgacctaatgggagttgggagagaagaagcaggaccccatgaagtgctcacatgtgaagaacaaaagcctttcactgtatctccttcttctgcatcatcatcatcatcatcttgatctggttttggatttgatattgggtg

SEQ ID NO: 203825 - DNA, 446 bp, Gossypium hirsutum
gctaatatgagtgattaacgcagccttgaactagaggaggtgttgcagacatctcatgggaaattggagggtactgacaaaaaggtcaatgagttggagttgttacttgaagcagagaagtacaggattcaggaactcgaggaacagataagcaatttagaaaagaaatgtggagatgcagaaggcgagtctgttatgtactctgataaggtatccaaactctcttctgaacttgaggcattccaagctagaacatcgagccttgaaattgcactacaaatggccaatgagaaggaaaaggaattgacagagtgcttaaatttggcaacagatgagaagaaaaagctagaagagacatcgcaaagctccaatgaaaagcttgcggaagctgaaaatctggtggaaatcttgagaagtgatttaaatctgacacaacagaaactggg

SEQ ID NO: 203826 - DNA, 409 bp, Gossypium hirsutum
agcaacgcatagccatggctgcctcaccaaaactcttgtgtatgtctatcctggggctttgtgccctcttctccatgcaaatccatgctagagagtacttcagcaaattcccaagagttaacatcaatgagaaagagacaacaaccagagagcaaaagcacgagaccttcgttccccagaccacccaaaagccagaagaacaagagccaaggttcattcctgaaacccaaaatggttatggcctttacggccacgagtcaggctcaggctcaagctcaggctcaggctcaagccggcccagtttcaccaccaaagaaacctatgaaccctatgtcacccctgttagatttcaccctgatgagccctataacagcattccccgaatcctccaacattaaagacacttact

SEQ ID NO: 203827 - DNA, 412 bp, Gossypium hirsutum
tttttgtgaaaaatccaaactcaaccctacgggaaccagtgctccaaatctacacttgaaaaaacaaacagtttttacattctatgctcaagtaacaacatttggggggaaagatgaaccccgcaattatcaacaaatcttacactttgaaagcaaacggtttttacatttctatgcaagcaagctaaattacagatgccaccagaaccagacactaccatcacaaatttttataatctaattccgaatccttatatctcagcttctctcatgtctgcttcttttcaactgagtatctaatgttgataggatctgaagcattgacattcccccagatataacaatttcaattcctttacggactgacagattcaatctgattacatccttggtgttgatgaggaatatatca

SEQ ID NO: 203828 - DNA, 418 bp, Gossypium hirsutum
gcacattgagcaacacaagctgagtgggatagtggatggcgctggacttaccgatgtttacgatcttgatttcttcaaagaacttagacaaattgaggtgtttggcacttggccaatggccctgctatcagcaaacgagagacgggttgtgattgaaggacctgtttgtgattcatcacaagttataggatggcacctaaggaagatgaataaccagacagatgcagaaacagatgctgatacgaaacctcctattcatatatcaagttttgcatttaacagttcaatcctttgggaccctgagagatggggacgtctcacatcggtccaaggcacttcacagaactcactgaaatttgtgaaacatattgtaatggaagatgagggcaagttaaagggtatcccaccggaagagtgc

SEQ ID NO: 203829 - DNA, 397 bp, Gossypium hirsutum
ggaaaagcctaaagagcacgagaaacacgaaggggaagggcctgaaataccggaggacaagaaaaagcatgatgagggtaacgaacataaacatgagttcccaaagcatgaaaaagaagaggagaagaaacctgagaaaaaggcagagtaccttgagtgggctaaaatgcctgaatggtcgaagtccatgtttactcagcctggctcggccactaagccttgaatcatatgacactggtgcatgtgccatcatcatgcaataattacatggtatatcgtaatatatagataataaaaaagatggtgattgggaaatgtgtgtgtgcattcctacatgcactaatggtgaatctctttgcatacatagaaattctaaatggttatagtttatgttata

SEQ ID NO: 203830 - DNA, 410 bp, Gossypium hirsutum
tatgctttctattctgttaaccatggttcataacataggccaccctttcttgcttctccaacttttacttatttgtgtctcaccaatgattggtagccacaccgtctcatcagcaactcgacgtttattcgcgacacagacaacctcatcgacaactgccacaattatcttcaaaatacgacaaagcacgaatagtctgaatatgaaaagctacaatacacacagccaaagtatcatgaatagtacccaacacatgacaagcctgaaatgcactatgaaaaacacaaaccctgcacacaacaataacagtatgagacagaagaactcgcattactgaaaccggaaaagcctaaatagcacgagaaacacgaatttgaatatacgatcataccctaatacaaggaaaagca

SEQ ID NO: 203831 - DNA, 433 bp, Gossypium hirsutum
aaatggccaccattgatgttcctgagcaggtttcggttcttgcagatgcagaagctcttagaaaggcttgtaaaggatgggggacagatgagaaggcaataatttcagtgttgggtcacagaaatgcagttcaaaggaagcaaatcaggcttgcttatgaagacctttaccaggaagatctcatcaagcgtcttgaatcagagctttctggtgatttcgagaaagcagtgtatcgttggatattggatccagcagaccgagatgccgtgttagctaatgttgccataaagaaattaagccctgatcaccatgtgatcgttgaaatttcatgcaccaaatcccctgaagagctcttggctgtgaagagagcttatcaggctcgatacaagcattccctggaagaagatgtggctgctcataccaagggagacac

SEQ ID NO: 203832 - DNA, 432 bp, Gossypium hirsutum
cacatgctgtgcatcaacgctttggcattgagtgggaggtcattaacgatttgaggattgacatggctaggatgcagcaaaggatggataatatgcagaggatgctggaggcttgtatggatatgcaacttgagatacagcggtcaataagacaagaagtttctgctgcccttaaccgttcagctggttcacaaggggtgattgacgacaacttgccgaaggatgcttctaactgggacaatgtcaggaaaggcatctgttgtatatgctgtgaaggcaacattgattcattgctgtacagatgtgggcacatgtgcacgtgctcaaaatgtgccaatgagctggtccatgttggaggaaaatgtccaatgtgtcgggcaccggtagttgaggtcattcgtgcctactcaatcctttaatatgaagagtatt

SEQ ID NO: 203833 - DNA, 410 bp, Gossypium hirsutum
gaaatatcccattgagcatgggatcgtcagcaactggggtgatatggaaaagatctggcatcatacattctacaatgagctccgtgttgctcctgaggagcaccctgttcttctcacggaagcacctctcaaccccaaggccaacagagaaaagatgactcagatcatgtttgagaccttcaatgtacctgccatgtatgttgccatccaggcagttctttctttgtatgccagtggtcgtacaacaggtattgtgctggattccggtgatggtgtttctcacactgtgccaatctatgaagggtatgcccttcctcatgccatccttcgtctagaccttgctggtcgtgatctcactgattctctgatgaaaattcttactgagagaagttatatgttcaccaccactg

SEQ ID NO: 203834 - DNA, 439 bp, Gossypium hirsutum
gcagagttttccatgctttcttgaatcaccctcagtaggggcaatcactttcaaaggttctccatcaacgtatagaggaagcgcttgttaaagttcttgaatatgtttctggacgagagatggtggtgaacttgcaagatttgttggtagggcatgcgtttgacattggatgcataacgggcgtgggcttcaaccctggcctactctccattgaattccctgagaatcggttccaaaaagccatgagtgatactctggaggcagctttttacagatatgtagtgcctgacagtctttggaagttgcagagttggcttcagattgggaaagagaagaaacggagtgatgcttggaaggctcttgatgatcttttaacacaatttatatcgacccaacgccacaaatccaccaaatcagtggcatcctcaggctcaaatga

SEQ ID NO: 203835 - DNA, 419 bp, Gossypium hirsutum
tagttcaaagccactgatcaaaaatatcacttttcaacccaggcacaggtcaaacataaaacagcgtaacatacagttaaccatttcaagtctttaacaagcttcaaagaatataatcttgcataacacggtatcaacatgtaatataaagacatcgttagcacactcaatcacacgtacttcttactactcatcatcttcaccctcatcaccctcagctgactcagcaccaacttcttcataattcttatacaatgcagcaagatccttactagcctttcagaatactccttattccataccctcaccaacataccagtgaactaaagcacgtttggcgtacataagatcaaacttatggtcaatgccagagatgactttatcaacactgcttcaattagaaatcatgcaaacagctc

SEQ ID NO: 203836 - DNA, 424 bp, Gossypium hirsutum
gtcgctgaaatgccaagggatggaacaagtaggttcagggggatgaatggggagactttgcaccatttcttgtctgtttccagcttcagtgagtacacagtggttgatgtggtccatgttgtgaagatctcatcggaattcccagctgagaaagcttgcctccttagctgtggagtatccagtggtattggagcagcatggaaggtggcagacattgaagaaggctccactgtcgccatatttggcctgggagctgttggacttgcggttgcagaaggggcaaggttgcgtggagcttcgaagatcataggtgtagatttaaaccaagaaaagtttgagataaggaaaaagtttggagtcagtgaattcatcaaccccgcaacatgtggagagaaaaaagtcaatgaggtgattaaaggaaata

SEQ ID NO: 203837 - DNA, 415 bp, Gossypium hirsutum
gcgtcatgcagttaaagcaaagaacgcggcgtatgatcggatgacccttctgcaatcttacacttactttctttgtctcctcctcttgtttctctcttacaatctcaccttctttctttctttttcttcctatttttggccttctcttggccactgtgtcttcttttaacaacaatcaacatatataaccatattatatacatacatacacaagttctttccttctaaggaagccatgactggcaaagaaatcctccacaagatgaaggagaaagttcaagaaaaagttggcttaaacccttctagtaatgctgaatctggaaaagggaagagtaagatgtcgaagaatataacgcatggttatcatttagtgaatgggaaagcgaatcatccaatggaagactatgttttcgcg

SEQ ID NO: 203838 - DNA, 434 bp, Gossypium hirsutum
tttctgcccatgagttcgtgaatgcctatgcggcccaggtcaagcgctccggcgagattgagcttcctccatggactgatattgtcaagggtggtaaactaaaggagcttactccatacgaccctgattggtactatattagagctgcttcgatggcgaagaaaatctacttgagaggaggtcttggtgttggtgccttcaggaggatatatggaggtgccaagagaaatggcagtcgtccacgtcatttctgcaagagcagtggctctattgctcgtcatattttccagcaattgcaaaacgtgaacatcattgatcttgataccaaaggtggctccaaaatcacatcaaacggccaactggatcttgatcatgttgctggaatgattgcggttgccccttgaaaaattacagtaataattttctatggctag

SEQ ID NO: 203839 - DNA, 437 bp, Gossypium hirsutum
gttttgtttttttttttttatataaagaaatagcctttgattttattgaactgaaatctaaaatacatgcccttatagtttgcaacatttaagtcaaaatttagcagcaacatgatcttacaaacattaagaaaccagcatgtttaagaactatttcaaacctgcaatttattggaattaaaaccttttctttttctttctggaagtacccattgacaaactttgtttcatgtcctttttgcttctaaaatcttaaatcacagcttatgaatggtttccatgtcacttacttccttcagggtccctttctcgacatgatcccaccacttgaacaagaaattatccacgacgagtctgaaccatggtgacagtttcaaaccatcttcaccagcatcagctttacgcagtaactccttcagttggtcacggttcacgta

SEQ ID NO: 203840 - DNA, 434 bp, Gossypium hirsutum
tatcaatcaaggcttggccttctggttacgggtaagctggattacggtacgctctctcaaattttagctccgagatgtggtatccccgacggagaatcatcatctcccacattgcatgtaaataaaaactacgtgttctttcccgggaaacctcgatgggcgcgtcccgttccaatgactctaacgtatggaatctcccccgacaatttgatccattacttgagcttatcggatataagaaaaacctttaaacgagctttctcgagatgggcatcagttattccggtcagtttcgtagaaacaaatgattatgggttcgctgatatcaaaatagggttctacaccggtgatcatggagatggggagccgtttgatggggtgttgggaatcctggcccactcgttttcacctgaaagcgggaggtttcatctcga

SEQ ID NO: 203841 - DNA, 438 bp, Gossypium hirsutum
gtcgaatgcatttttctctaggtgctggctgcagtgctgctgcaggacctgtggggagagtgctggaagcagatcttcgagccggggatagtgggtccggcatgtgctacagttatagttgtagcaaaggggcgtttgttggtgtgtcattggaagggaacattgttgcaacaagaatggataccaacctacggttctatggtgatccgtatctcaccactgccgacatattactggggaccgtggacagaccaaaagctgctgagcccttgtatgctgcactacataacctgtactccagcctacgcttttagttccggcactatttggcgaagcagcttgtgaaacaagcaacagcttgagtgcatggtgcatttcttgccctggatgatttgtgactctatggtttatagtttatatgcatgtggatgatggatt

SEQ ID NO: 203842 - DNA, 435 bp, Gossypium hirsutum
  unsure (1)..(435): unsure at all n locations
gttggatgagatcatggactttggctacccacaaaatgggtctcctgaaattgtaaagctttacattactcaggaaggagttcggtccccattttcatccaagccttcagataagcctgttccaaatgcaactttacaagtcactggtgctgttggctggcgaagagagggacttgtttataaaaagaatgaggtgtttctggacattgtggaaagtgtaaacctactaatgtcttcaaaaggcagtgttttgcgttgtgatgttacgggaaagattcttatgaagtgcttcctttctggaatgcctgatctgaaattgggcttgaatgataaaattgggcttgagaaagaatcacaacttaaatcccgtcctnctaaaagtggcangacaattgagcttgacgatgttactttccatcagtgggtaaatcttac

SEQ ID NO: 203843 - DNA, 409 bp, Gossypium hirsutum
  unsure (1)..(409): unsure at all n locations
cagagagctgtttgcatgatttctaactccaccggtggggctgaagtcttctgtggcattgaccataagtttgatcttatgtatgccaaacgtgccttcattcactggtatgttggtgagggtatggaagaaggagaattctcagaggctcgtgaggatcttgctgcattggagaaggattatgaagaagttggtgctgagtcggctgagggtgatgagggtgaagatgatgagtactaagaagtacctgtgattgagtgtgcgtatgatgtcttttattacctgttgcttccgtgttatgcaagcttctattctttgaaacttgttaaagacttgaaatggtttactgtatgttatgctttttcatgttttaattgtgtttgggttgaaacttgatatttntggtgtc

SEQ ID NO: 203844 - DNA, 397 bp, Gossypium hirsutum
ctctattcacaccccattatataacttggtactggcctgaggctttcaccatgaggaaacagtgcaaatctcaatgcattaaccatggaaggtattgtgcacctgatcccgaacaagattttagctccggttatgaggggaaagatgtcgtgattgaaaacttaaggcagctatgcgttttcaaagtggcaaatgagagcaataagtcctggttgtggtgggactatgtgacagattttcaaataagatgccccatgaaggagaaaaaatataacaaggaatgcgccgatgctgttatcaaatctcttgggcttgacagttaaaagattgaaaagtgtttgggagaccctaatgttgatgcagataatcctgttctaaaagaaaaacaagatgccca

SEQ ID NO: 203845 - DNA, 413 bp, Gossypium hirsutum
agaatttataatgccaactaaagttgtttctgaagatagcatagcaccagatggatttggtaaagatattcctgagacaacggtccatcctgtgccgccagtgcctagcaagacggtaagattttcgactgtaaatatcgaagagatgggtgcaacgaatgagaaatatcagtcgcctaggattcctgaaatagagatctcaactccaccttcaaataatggaatggacaaggaaccaatgcatagcacgaagaaatggaacaacgaggagagccctcctaaagcagccaaagggtttagaaagcttcttttctttggaagaaaaagcaaaaactatgctactgcttagtgtatgcttgtctttccatattgcttatgtttcgggttttcagttgtttcgggtggaacgtacc

SEQ ID NO: 203846 - DNA, 353 bp, Gossypium hirsutum
attttatttaatcttttcttcaagttcccattgtccccgttgaccagtgttgaggttcaatcagctgcaacaacattgccagagaacgagacaacaccataggtaaccaatgttgtggaaacgccaaaagaggagccagctgccgcacctgtagaagctgagccggagacaacatcagatgctccggctgcggatgaaaccgaagtttccatagccgaagctccagctgaagtcgataccaaagaagtggtagaagaagaagcgaatgctgctgatgaatctgagaaagcaaatgatgatgtaaaggattagaccccggaggtgcatacagaaacagttacagaagatgccaa

SEQ ID NO: 203847 - DNA, 415 bp, Gossypium hirsutum
ctttgcacttggagctatgattgctaggtacatgagaggctctgactcgacggagccagcttggttttatcttcatgttttctgtctaacatcagctgatgccatatgagttgctggctgcagaactggtcttaagcttgaaagtgaatcctgtgttatcacatatccgggtcatagatacattggcattgcccttttcgtcctcgctactgtccagatctttgctacgttcataaggcctaaaatggaccactagctctgattctactgggacatttaccaccacagttgtggatactcgatacttgtcctcggcttcatcaatgtgttcaatggcttcaatatcttgaagcctgagcataattcgaaatcggcatatattattgtgatcattgctatgggcgatattttgctg

SEQ ID NO: 203848 - DNA, 402 bp, Gossypium hirsutum
ggttagggttcctatggcagagtttattatgcagattgggacaatggaaaagctgtggctgtgaaaaagctagatacttccgctgagcctgactctactgtagagtttttgacccaggtttccatggtttcaagattgaagaatgaaaatgttgtcgagttgcaaggttactgtgttgaaagaaatctccgcatccttgcatatgagtttgcaactatgggatcactacatgacatattgcacggaaggaagggggttcaaggggcacaagcaggtccagtgctagactggatgcagcgggtaagaatagctattgatgccgcaaggtgcttggaatacttacatgagaaggctcaacctgctattatacacagagatattagatctagcaatgtgcttctc

SEQ ID NO: 203849 - DNA, 381 bp, Gossypium hirsutum
gagaactaaaggttgaaaattaataaattacatcttttgaagaaagcttttattggcacaaaacagaatgcaccaaatacagacaaataggaattgactttttacttcacaattatatgcaatgcacacttatttttccctttacaattaaaacccaatttttgcatggctctattatttgtataaagggaggtacatatgtacgtaaaataggacacgaaacgtcacttgggtttggattttcagatgatggacatgcactccggtggggtaaccgggtaacgggacttgtcggtgcagtaatcgtatatcacgtggttcatacgaacccacctatatcttttagcttccatggcattaatggcttgataagcagtgccc

SEQ ID NO: 203850 - DNA, 437 bp, Gossypium hirsutum
cttcgtatgaaactcgacctcgatccaggaagtgttcgggcgagttagtgaacaatttaccgctatgttcaggaggaaagctttcttgcattggtacaccggtgaaggtatggacgagatggagttcaccgaggctgagagcaacatgaacgatctcgtgtctgaatatcaacaataccaggacgctaccgctgacgaggaaggcgaatatgaggatgaggaagatttggatgaagaacacatgtgatgaaagcgaaaaccaaacgaagttgtcggtaatgcagcatatacaggtatgtgattcgagctttgtgtttggatttgtatgtaatgagtaatgaaagtgtcttttccctatttttccctttcacgactttgctttttttggtttctatttgagagagtaatgtataatatattcgaaaatagtaatgtaa

SEQ ID NO: 203851 - DNA, 420 bp, Gossypium hirsutum
ggcatgtcttcctcagaagacccgtcaaacaggaatgaagttcaacattgcaaatccgactactggttgccaaaaaaagctggaaattgatgatgaccagaaacttcgagccttttttgacaagaggatctcacaggaagtcagtggtgatgccctcggtgaggagtttaagggctatgtattcaagatcatgggaggctgtgataaacagggttttccaatgaagcaaggagttctcactcctggacgtgttcgtcttttgcttcacagaggtactccctgcttccgtgggtatggtaggagaaatggagagcgcaggaggaagtcagttcgtggatgcattgttagtcaggatctttcagttttgaacttggttattgtgaaaaagggtgaaaatgatcttcctggactgactgacac

SEQ ID NO: 203852 - DNA, 437 bp, Gossypium hirsutum
gttttgtttttttttttttcatctcaaaaccggggcaggttggtagaagaattaaccgttgaaattgcccaattgattggtccacacctagggtcaaataaccacatgaatccattatacctgttgggcatttacaagttcccttaacaatttacttccaatacagacaacaaaaatatcaagtttcaacccaaacacaaataaaacatgaaaaagcataacatacagtaaaccatttcaagtctttaacaagcttcaaagaatagaagcttgcataacacggaagcaacaggtaataaaagacatcatacgcacactcaatcacaggtacttcttagtactcatcatcttcaccctcatcaccctcagccgactcagcaccaacttcttcataatccttctccaatgcagcaagatcctcacgagcctctgagaat

SEQ ID NO: 203853 - DNA, 391 bp, Gossypium hirsutum
cacaatgctctctctaattgtgctgatggtcttgttgaggctgtcatgggctcaactgccattaccatctccaacaaccacatgacccaccacaatgaggtgatgttgctagggcacagtgactcctacacaagggacaagcaaatgcaagtgaccattgcctacaaccatttcggagagggacttatccagagaatgccaaggtgtaggcatggatatttccatgtggtgaacaatgactacactcactgggaaatgtatgctattggtggaagtgcaaaccccaccatcaacagccagggtaacagatatgcagctccaacaaacccatttgcaaaggaggttaccaagagagtagatacagcttgaaggcagtggaagagctggaatt

SEQ ID NO: 203854 - DNA, 421 bp, Gossypium hirsutum
gatcacaaagttgagctgttttcaattgaatgacaaaacttatagttggtacaatgaatatataactacacaaaactttcactctaattttattctgtcttgtgcatctccattcttgtttgttcatacatcacataccataatctaaaagaaccacgcaagatgatttttttcaacagttaatgccacacattgtaatgtctggtcctttggttttcatcacaaatggatcaattcggacccaaagcaaggagaagattgaagccaatagcactgaccatataacaacaatggttggtgtcctgttttgtctccccattaaacctttaaggaatggatttagatggacaatcacccagaaagagaagaagagcttcccaaaaagaggtccccatgattggtatccattgtttatggcatc

SEQ ID NO: 203855 - DNA, 435 bp, Gossypium hirsutum
caagaatcccttctcagtttagaaaagagtaatgttgagtctgtggattccattgttaggggaggaatggaagccaatcagatcctccgagatcaattttcttgtgctgtatccactgctcttgaagatgtagacactgcaaacaacagttgcctaacatccattgattattcattacaacttgatcgtgatgcatgtgggaacatgaattcgatgattattccttgttgtgaggaattgagggaactgaaaggtggtcactaccacaagattgtagaaatcacagacaatgcagggaaatgtctggaggaggaatacatggtggacaagccatcgtgttcaacaccaacgaagagggcattcaacctaccaagcatgtcatcaatagaggaactgaaaacgccttcattcgaggaactattaaaagttgtttgg

SEQ ID NO: 203856 - DNA, 412 bp, Gossypium hirsutum
taaactgtctactacccagtataagccatgaatcttcgggctgaggtgaaatgggcacaaagaaccgataaggttctaattactgctatataacctgattcaaagaatgcaaaagataaccttgagcctgaaggagtgattaatttctctgctactgctggaactgacaataacacatatgaattgaagttccatctatatgataacgtcaacttggaggaaagcagaattaattttggagttaggagcatattctgcatcttggaaaaagcctcaaaagtgtgcccgaaaaaattattgcgctatgatggcaaagccccccattacctcaaagtggactgacacaaatgggtctatgaaaatcaagacattggtcatcgtgatcttgacttatgacgaacggacttctcca

SEQ ID NO: 203857 - DNA, 395 bp, Gossypium hirsutum
gtttccacttggagctatgattgctaggtacataagaagctttgagtcagcagatccagcttggttctatcttcatgttttctgtcaaatatcagcttatgccataggagttgctggctggggaactggtcttaagcttggaagtgaatcctctggtatcacatattcgggtcatagatacattgggattgcccttttcgtcctcgctactgtccagatctttgctttgtttataaggcctaaaaaggaccacaagctccgattctactgggacatttaccaccacagttttggatacgcgatacttgtgctcggcatcatcaatgtgttcaagggcttcaatatcttgaagcctgagcataagtggaaatcggcatatatgattgtgatcattg

SEQ ID NO: 203858 - DNA, 431 bp, Gossypium hirsutum
aaggtagaacatgtaatttttattcggataatgtcattagataagatggaacatagataaaatagtttaggtttatttatgaggccttaacagggccagacatcacaatcattcacataaaatccagaaacctcattttcataggagagcttacaaaccaccacgaagactcaagacaaggtggagagtggattccttctcaatattgtaatcagccaaagtccttccatcttccaactgtttcccagcgaaaatcaacctttgctgatctggtggaatcccttctttgtcctgaatcttcgccttaacattgtcgatcgtatcggaactctccacctccaaagttatggttttcccagtcaacgtcttgacgaaaatctgcatcccaccacgaagcctcaataccaaatggagggtcgactccttctgga

SEQ ID NO: 203859 - DNA, 424 bp, Gossypium hirsutum
  unsure (1)..(424): unsure at all n locations
gttttaatggaccttgaaccaggaaccatggatagctggcgtactggtccggacggacaactttttagacctgataacttcatttttggccaaaatggagctgggaataactgggctaagggtcattacactgaaggagctgaattgattgattcggttcttgatgttgttcgaaaagaagctgagaattgtgcttgcttacaaggcttccagatttgtcattctttgggaggtggaactggttcagggatggggacactgttgatatcaaagatcaaggaagaataccctgatcggatgatgctgactntctcggtttttccgtcgcctaaagtgtctgatacggtggttgagccctataatgcgactctatcagtgcaccagcttgtggaaaatggtgatgaatgcatggtgcttgataatg

SEQ ID NO: 203860 - DNA, 347 bp, Gossypium hirsutum
ctcgtgctttcctcttctgcatgcaaatccgggctagggagtacttgatcaagttcccaagagttaacaccaatgagaaagatacaacaaccagatatcaagagcacgataccttcattccccagaccacccaaaagccataagagcaagaaccaaggttcatacctgaaacccaaaatcgttatggactttactgacaccagtcaagatcacgctcacgctcatgcataagccagctcacttctaccaccaaagaaacctatgaaccctatgtcacccctgtcagattccaccctgattaaccctataacaacattcctgaattctccaaccatgaaaacacttac

SEQ ID NO: 203861 - DNA, 442 bp, Gossypium hirsutum
gcatgctaagaatattcttgtcatgtcaaaggttgaaagtcaagaatgggtagcaaattttgatgacatccttacaaattcagatgcatttatggtggcacgaggtgaccttggaatggagattcccattgaaaagatatttctagcacagaaggtgatgatttacaagtgtaacatccaaggaaaacctgttgtcactgcaacacagatgttggaatccatgataaagtctccccggccaaccagggctgaggccactgatgttgccaatgcagttcttgatggcacagactgtgtgatgttaagtggtgaaaccgcagctggagcttacccggaacttgctgttcagaccatggccaaaatatgtgtagaagcagaaaagcactcttgattatggagatgtcttcaaaaggattatggaacactcggcagtgccaatgag

SEQ ID NO: 203862 - DNA, 421 bp, Gossypium hirsutum
attattacaaaattcaactgcttcacagatagcccgagagcacctgttcaacgtcccacatatgggaatttgattactcttcttagcattgatggagggggtatcagagggcttattcctggaactctacttgcttttttagagtctcagcttcagaagctggacggtgagcaagcgagattggctgattattttgatattatttctgggacgagcactggtggcctcgtcactgccatgctaactaccccagatcccaaaaaagagaatcgccctctttttgctgccaaagatatcaatgagttctaccttgaacactgccctaaaatctttccccaagatagttctccttttgcaccagctgcaaatgtggtcaaatcactaatgggaccaaaatatgacgggtaatatcttcatgata

SEQ ID NO: 203863 - DNA, 438 bp, Gossypium hirsutum
gtcaggaccatcttcttcttctgtctctaaaccacgaggatttcgttctatcacgtaagcaccaaaaaccattgcccctggcatagctgatcttattgtgcttatcacgtcctctctttcacgctctcgttcaagccttctccatttctgttcaagagtaggatccacttcgcgtggcttggcacacggatgattggctttcatgtgtttccttagttccttaaaagtcccaacaaaggtacagtcatcctgcatgcagcttctctttttagcatttaaatattcccttgcaggttccaccacagtccatcctttcacttgacccctgcaaagtggacatgcaagttccgtcacttcacacttctcaacacttgacgctagaaccagattatcaatggaaccatgcaaagattcttcgtgactggatgagactacttt

SEQ ID NO: 203864 - DNA, 411 bp, Gossypium hirsutum
tcattatctcctttctatgtataaaacactgatgagcggtggacttcatggggtgttccaatgttcgtggtggctaatgttgctgttttttttgtcgtgatgtatatcaatgattgccctaacaacaatctgggatttgaaggcagctgcgtggctaagttccttggcaagctttcttttcagactttgaaagaaaatcctctctttggtccttcttctcatacattggacaaattgggagcactaaattggagcaaggtagcgcatggcaagcaaggatggaggctcatcacttgcatctggctacatgctggcgttattcatcttattgcttacatgttgagcttggtcttcattggaattcgccttgaacagcaatctggattcctgcgtattgcgcttatctatcta

SEQ ID NO: 203865 - DNA, 383 bp, Gossypium hirsutum
ttgaatccttggacaactggaatttttggctgtgctgaagatacggggaggggctggacaggactattgtgtccatgtgttctatttgggcgtaatattgagagcttgagagatgatacgccttggactacaccatgcatttgtcatgctatttgtgttgaaggtggcgttgcattggcagttgcaacagcttttgtccatggtattgagccgaagacaacatttctcatttacgagggtttgttgtttgcttggtggatgtgtggaatatatactggcctttctcggcaatccttacagaaaaagtatcatctcaagaattcaccctgtgatccttgcatggtgcattgctgcatgcactggtgtgctttatgccatgagca

SEQ ID NO: 203866 - DNA, 387 bp, Gossypium hirsutum
ggagagttccttactgcaaactcatgtcaaaaaacttggagaacagttggtgacggttgaagctcaattgaaagaagaggttgaaagtgttaagacagccgcctctgtaagagaagctgaattaacttcgaaattagaggatcatgcacaaaagattagtgatagagatgttatcaatgaacaagtggttcaacttcaacgagaattacaacttgctgaaacaacgatcactcaacagaaggatgcatattctcagaaagagatggatcaagaagcagctttaaaacattccatcgaagagctcgaagccaaaaacaaagaagcattacacctcaagaaacaagtcaaagagttggaagattaattgcaagaagctgaagctaaaat

SEQ ID NO: 203867 - DNA, 435 bp, Gossypium hirsutum
tttttgtctgagcaatttgatatcacgatctgattggggtgggagaaaatggagaaggtgatgaatatgataaagccaaaaccgaatccacaacagctattaagagattggcagcgtctccttcgccaggaatgccgaaacatcgagcgccaaatcagagatattcaaagagaagagaaaaatgtacaaaaagctattaaagatgctgccaagagaaatgacatggtttctgctaagtcactcgccatggaaattgtgagatccagaagaacagtcaatcgtctctatgaaaataaggcacaattgaattcaatatcaatgcaccttggggaaagtgtagcaattgcccgtacagttgggcatttgtccaagagtgctgaagttatgaagcttgtcaataaccttatgaaggctccagaagtggctgtcacaatg

SEQ ID NO: 203868 - DNA, 411 bp, Gossypium hirsutum
  unsure (1)..(411): unsure at all n locations
tttttattttcaaataaccacatgaatccattgtgccggttgggcatttacaagttcccttaacaatttacttccaatacagacaacaaaaatatcaagtttcaacccaaacacatataatacatgaaaaagcataacatacagtaaaccatttcaagtctttaacaagcttcaaagaatagaagcttgcataacacggaagcaacaggtaataaaagacatcatacgcacactcaatcacaggtacttcttagtactcatcatcttgaccctcatcaccctcagccgactcagcaccaacttcttcataatccttctccaatgcagcaagatccttacgagcctctgagaattctncttcttccataccctgaccaacataccagtgaatgaacgcacgtttggcataca

SEQ ID NO: 203869 - DNA, 254 bp, Gossypium hirsutum
gtaacacgcaaaatggctccaccgaaagcagggaaaaggtttccatcgatcgcggaatgcgatcgattgaatgacgaatcgatcgacgcctatctggatggcacgcttttaatctcacagaagctctttcccctacttcatgcttattagccgtcaagcagaaagcctccttcgaagacttatacttcttctttctctacctgtggtcatgatatcttatctcttcatttccgaagctattggtattcaaattc

SEQ ID NO: 203870 - DNA, 407 bp, Gossypium hirsutum
aacccgttcaacaatggcgattacgaagcaacgtttggtgccgctgttcgctagctcatttctcttgttttcccagctccattgctcaacaacttcagcccaagctccggctcagtctcccgcaccacctggtccaccagacgtcgccaaaatcctgcaaaaagccggccaatactccgtcttcgttcgtcttctcaaatccacccaagtctccgaccgtctcattggcgagctcaaagatacagatgatgggaagaccatttttgcccccactgataaggctttctccggcctcaaatctggtgccttgaattcactcaacgatgaacaaagggttcagctggtgctatttcacgtcgtcccagattatatcccatttttccaattccaaacagttagcaacccta

SEQ ID NO: 203871 - DNA, 288 bp, Gossypium hirsutum
aaaacacaccctaaagagacaatgagaaagcggctagggtttgcctttcttggcttcttcttttgggataaaacattagctcaaatagctccggcgccgccgttaaaggtggacaacatcacttccatcctcgaaaaaggtggccaattcaccactttcatcaagctattgaaagccacacaggtggctgatcaactaaacaaccagctaagcacaccggaccctaacgacgggataacggtgtttgcaccgagtgacaacgcgttctccggactcaaacccgggacg

SEQ ID NO: 203872 - DNA, 434 bp, Gossypium hirsutum
acgatgagtgcatcgtcccctgcgatatgaatctcatcgctgatgatgattgcagagagttggtggataaagtcccaaaaggtagccgcatttcaatcgtatcagattcatgccacagtgggggattgattgatgaggccaaagagcaaataggtgatagctctaagccccaagattcagaatcagaatcaggttcaggtgggtttaggagcttcttgcatcacactgtacaagatgcatttgaatctcgtggaattcatgttccttctagattacgccaccgcgaccaccaccatgataaggaagaggtggatgacaggggagtgaatgaagactatgatgacagtggctacgtcaaaagcagatctcttgccctctaactctaatgaaatgctcaagcagaaaactggcaaagatgatatttgatgtgggaa

SEQ ID NO: 203873 - DNA, 428 bp, Gossypium hirsutum
aaaccttcttaacatggggacaaactacagatgaagctgtagtgcaaggcataccgcaataaggccgacagcaccaagacagttatatccgaggtagaagagtgagtggctcagctggaatatcagaacttgcctgtagatatcttgttaacaacgtagtagtactaaaattaaagccttcaacaggttcactttttgtacgtgatccattaagctgttttcggacttgagtagctagtgacttacccaactcaactccccactggtcaaaagaattgatgccccaaacaaaaccttcaacagcaactctatgttcatagcttgccaagagctgcccaatattgtaagcgttaagagatggtagcaaaagactgagagaaggccgattcccagagaacgtcttatgagggataagatgctgcgaaaca

SEQ ID NO: 203874 - DNA, 424 bp, Gossypium hirsutum
attcaaactaactggattcgacccttcttgatgagcttgttgggaatatcgctacacttgcttgtgtctatcacaaacctcctgatggttttgtaactcgtgcaaagactgcaacacagaaaactgaagacgatgactaccctgatggaaatgaaactaggtattctgaaacactttccaatgctgctaatggtggtgcatcaccacccagttctagtagtgtcccacatgctgcagctaggcagccagctcctgccccagctgctcctgcacctgctgcagtgcctgacctcttaagtgatctgattggccttgataacaatcaaattgtccccgctgatcagcctgccacatcttctggcccccctttgcctattttattaccagcaagaaatggacaaggtttgcaaatcagtgcacaatt

SEQ ID NO: 203875 - DNA, 424 bp, Gossypium hirsutum
tttgcagtgtatcgggtagtcctttcaatcctcagccagggggggtcatacggagagagggttggtcaaacaacccaaggtgttattaagctctaaaaaaactgggaaaggaaagagacctggaaagggcgggaatcgcttctggaaaagcattgggttaggctttaagacacccagagaggccattgaaggaacatatattgataagaaatgcccatttactggcactgtttctattagaggccgtatccttgccggtacttgccatagtgcaaaaatggtaaggaccattatcgtccgaaggaactaccttcactacatcaagaaataccaaagatacgaaaaaaggcacagcaatatcccagctcatatatccctctgctatcgtgttaaagaaggagatcatgttataatcgggcaatgc

SEQ ID NO: 203876 - DNA, 428 bp, Gossypium hirsutum
acaaaacagctcctcgttatctccaatttcaaaatcaagatcaaaatcagaatcaagaatccaaagatctaaatctaaatccgtctcctctcctttctctttttttaaccttacaattaaggaaagaagatgaagagagtcttcggcgttaagaaagacaaggaacccccgccttctatccaagatgctaccgatcggatcagtaaaagaggggatacggttgatgagaagttgaagaagctagatgctgagttgagtaggtataaagagcagataaaaaagacaaggcctggccctgctcaagaggctcttaaatctcgagctatgagggttctcaagcaaaaacgaatgtatgaagggcaacgtgatatgctttataaccagacgttcaacctcgatcaagttgcttttgcttctgagggtcttaa

SEQ ID NO: 203877 - DNA, 387 bp, Gossypium hirsutum
ctaccttttcatccattatcattcacttcaccattgatgaccagtaccccatgcttgtacagctggacatgcaacaccattagagcacctagtgttatgtacagtgatcgggattccgataacgggatcgattctgatgggttatggatcgacggcgatgatctatggccatgttttggtttttgattttttcaggtgccttggacactccaatgctgaagttgttccacatgaagttttcaataagttacctttacttagatatttcatctatacccccacgtatcatagtctccaccacacagagatggagaccaatttttgtctgttcatgccgcttgttgatgcattggggaatacacttaacaccaaatcattcgagctaca

SEQ ID NO: 203878 - DNA, 410 bp, Gossypium hirsutum
aaaaaaagttcttcttttcttcattccaatccttccccgacatgcaatcaaatcaaatttgaatacttcccctcgtgattcaacccaatcccatttcttcttatcttgtttaaatcttggcttctttttagcgaatggctcctccagattctatgatcaaaccaagagatgcttgtattgttggtgttgcacgtacaccaatgggtggtttccttggttccctttcctcttcctctgctacccatcttggatctttagccattaaagctgcccttcaaagggcaaaccttgatccatcacttgtgcaagaggtgttctttgggaatgttcttagtgcaaatttaggtcaagctcctgctaggcaggctgcattaggtgctggtatccccaattctgtcatttgtaccact

SEQ ID NO: 203879 - DNA, 326 bp, Gossypium hirsutum
caagcttcgcgaatcaaactcctatagccaaaacgcgcgggcggtctttgcataagctgagcctgggaccacaatagcagacatagctgctgtgtcaaccgacatctcaggcatatatgaatgctgggagcagcctgtagaggcttgctagctctaagcccaaggccttgactcagttgctagacaaacgctgacatcaaagcacaatcgcaggaatcgtacattgaatcagggtgatgccatacatacttgggaggcatgatgagtcactgaactctttcgagagtgcattcacgtacattagagcaagtaatcatgaggacata

SEQ ID NO: 203880 - DNA, 398 bp, Gossypium hirsutum
tactgatgttaggaagaatggcacctgcccctggcgtaaggcctgatggtaaagccgaggtcactgttgagtactacaatgacagtggtgccatggttccagttcgtgtgcacactgtccttatctccacccaacatgatgagactgttacaaacgatgaaatcgctgctgacctcaaggagcatgtcatcaagcctgtcatccctgagaagtaccttgatgagaagacaatcttccaccttaacccatctggccgctttgtaatcggtggtcctcatggtgatgcaggtctcaccggacgtaagatcattattgacacttatggtggctggggagcccatggtggtggtgctttctccggaaaggacccaaccaaagtggacaggagtggtgcttac

SEQ ID NO: 203881 - DNA, 422 bp, Gossypium hirsutum
gaaaaaatggttctgctagacaaaatgtgggacgatgtgttagctgggcctgaaggctggcgtggtctcggcaggcttaggaagatcaccacccagcctttgtccatcaaagatgaaggagaaaagaaaaagtaccagaggtcgttgtcgctgccgaatagtccagtgtcaggtccgacacccgtgacaccgacgactccgactgcgcgtaaggagaacgtgtggaggagtgtgttccatccgggtagcaacctagccaccaaaagtataggttctgatgttttcgacaagccacaacccaactctcctaccgtctatgactgcaaccaaacggaggctcagagacagagcatgaaggaaaacttggctatttgtttggtcgctgcgtggaaataattccttttgatcagtatacactctta

SEQ ID NO: 203882 - DNA, 429 bp, Gossypium hirsutum
cagcattgaaggcaaattcgtacctacaaagaaacgtggtgggctagccgtacaggcaactgaactaaaatgtgggggtatagtggtggcatgcgcatttgatcatcgagtagctgatgcatacacagccaacatgtttcttgtgtcatgggcggagatagctcagtcgaaaccggtttcgatggtgccaagctttcgtcgatcgctgttgaatccgagacgaccagggcgtgctgacccgtcgctggacgagatgtatgtgccaataccctcattgccacgtccagaagaaaaccatgaacctactgatcatctcataagtcgcatttattacgttagtagtgaccaaatcattgagcttcagtcacttgcctcttccgatggggacaaaaggtccaagctcgagtcattcagtgcgtttttgtggaa

SEQ ID NO: 203883 - DNA, 318 bp, Gossypium hirsutum
tttattttaatgttgtagaaggtaaattgttgaattttgaaggaacagatccaccaaaaatcagctaaaatttagaccaaaaagaatgagttcgtcaaggagtgtaaggaagttggaagtggtatcaccagtgccggcagacatagatattgcaaactcagttgaaccatttcatatttctgagattgctaaggaccttaacctcagtcccaaccattatgatctttatggcaaatacaaagccaaggtgttgttatctgtactcgacgagcttgaatcctccgacaatggatactatgtcgtggttggaaggatcac

SEQ ID NO: 203884 - DNA, 358 bp, Gossypium hirsutum
agaagatgtcctggcaagcgtatgtagaatgatcacttggtgtgtgatattgagggcaaccatctctctgccgccgctatcattggccaagacggcagcgtttgggcccagagctccaatttccctcagttcaagccagaagaaatcactggcatcatgaatgacttttctgaacctggatcgcttgctccgactggattgtaccttggtggcacaaaatacatggtgatccaaggtgaacccggagctgttattcgagggaaaaagggccccggaagtgttactgttaaaaagaccaacctgtccttgatcattgggatctatgacgagccaatgactccaggtcaatgcaacatga

SEQ ID NO: 203885 - DNA, 397 bp, Gossypium hirsutum
ggaagttccactatcatatattaccggttccatgggaggtcctctggaggtagatgaggtcacaagcctattaaaacgaatgcaattgcatgctgaaaaagctggatcgggtgaagctaagatcagtgtgtctgtacctccaaccagaagtgacattcttcatccatgtgatgtcatggaggatgttgcaattgcttatggctataataatattccaaagagaacgctttcttctttgaagccccttcccttgaaccagctcagtgatcttattagatatgagattgcgatgaatggttttactgaggtgttgacatggattttatgttctaagaaagagaattttgagatgttaaaccggaaggatgataaatccactgcagtgatcattggaaac

SEQ ID NO: 203886 - DNA, 373 bp, Gossypium hirsutum
cggcacgagttggggacatctatggtggcatggatgacgctaagattggcctgtctgcatcaaccatagcttctagttttggcaaggctatttctgacaagaaggagcttcaagattacagacctgaagatatttccttgtctctcttgagaatgatttcctacaatattggacagatatcttatttaaatgcacttcggtttgggcttaagcgaatcttttttggaggatttttcataaggggtcatgcgtataccatggatacaatctcctttgctgttcatttttggtcaaaaggagaagcacaagctatgttcttgagacatgaaggatttttgggagctgtaagcgcatttatgagttatcaaaaaca

SEQ ID NO: 203887 - DNA, 411 bp, Gossypium hirsutum
tacatataagcttgggttgaacaagtttgctgatgtaggcaaccaagagtaccgagccaagttcttgggcaccaggactgaccctagacgtcgactcatgaagtccaagatccccagctcacgttacgctcaccgtgccggcgataacttgccggattcagtagactggagagatcatggagctgttagtccggtcaaggatcaaggatcttgtggaagttgttgggcattctcaacaattgcaacagtggaaggcataaacaaaatcgtgtccggtgaactagtctctctatcggaacaagaactagtcgactgtgaccgatcctatgatgccggttgcaatggtggcctaatggactatgccttccaattcattatggacaatggtggcattgacactgaaaaggatta

SEQ ID NO: 203888 - DNA, 375 bp, Gossypium hirsutum
  unsure (1)..(375): unsure at all n locations
aaacaaaccataaaaatcctatgatgctcttcttgtcagtaaactttcagaattgaaagtaaaatattctcaatttcattactgaattatatatacatacatatatatatttgaaggtgtcgcaatggagagcaccgactcgtcgaccggctcacagcagccgaacctcccaccgggattccggttccaccccactgatgaggaactagtggtacactacctcaagaaaaaagctagctccgctcctttgccggttgcaattattgctgangttgatttgtacaagtttgatccatgggaattgccagcgaaggcaacgtttggtgaacaagaatggtacttttttagtccgagagacaggaagtacccgaatgg

SEQ ID NO: 203889 - DNA, 431 bp, Gossypium hirsutum
  unsure (1)..(431): unsure at all n locations
ctgccatcacccgcctgtcacagaagcaaccgttcgcggactgggctgacccgatcaacagaatccacccgtttctaaagaaccgaaccaagacccaagccagggagtatgttcggttcccaaatgttgtacggaaagtaagagaatatgagatctccccctcccttttcagttcttcgttctcttcttcctcttcgtcttcaacggcgtcgtttgggaagctgggttttgttgggtggtatttaggaatggtgaagtcgtggcccgttttaaccaagagcgttacttcatcggctatttatgtagctgctgatttgtcttctcagacgatttcgaagtcatcttcagaaccttacgatttggtgaggacttcgcgtatggcgggatacgggtntgtaatattaggaccatcactgcatctttggttcaac

SEQ ID NO: 203890 - DNA, 458 bp, Gossypium hirsutum
ctcagatcagcgggctttttgggtcgtaggaacctggtatgagcctaggtcaacgcctcgaacgcggccgacgctctccacggaggcgagaacggccctaattgagtaactgagtccctagtagaaacttcgctgaacgcgaaacctacataggagaagtgcccaacagggaaacatcccgaggagaccagctaagacattgggaagcacgcccctggcgcggacgatatatcgaaggttccggagacgggagtcgccgagacatccactgcacgggaaaacacggatacaaacaggcatacgccgaagaatagtgccattggcgaagccgctacaaaatacccgaataaggaataagaagtcaacacgattaatccttaggatctacttaatctagtcgacccggaggcctaagaaaagacgttatccccagagcggcccgtcagcgaacataagtg

SEQ ID NO: 203891 - DNA, 385 bp, Gossypium hirsutum
ctagtctcgagtttttttttcatttcctttttttgtttgttggttttttatcgcgggctgttcaattattcttttttgggaaaaagatctctctctcactctttctctctcctctcttccctgatctcattagatccattcaaagggccacaaatcatcagaggaagaagtaaagcaaattaacaaaaatggcagcaacattaggagactcaagctcctggtccactgctcttgtcaagatttcaccttatactttcttcgccgtcagtatcgccattgccatcggcgtttccgtcctcagcgccgcctggggaatttacattacttggagtagtttgatcggtgccgctattaaagctcctcgaatcacttccaagaatcttat

SEQ ID NO: 203892 - DNA, 456 bp, Gossypium hirsutum
  unsure (1)..(456): unsure at all n locations
tctagaactggcgggtggatccggctgcatgctttaccatgcctcgccacgattctttgcccttgcggacttcaatgacctaggtgggataggccctatgagagacttgctggtggccaatacactttgcaattcaacgatgagtctggtaccgtccgcctcgattccggatggagcaaaacaaaagtcactagcgcagtacatacgtccaagccagtcgcagtctatcaaatcgataaggtccttcttccggaggccattttcgggaccgacatacctccgacacctgcacctgccccggctcttggtattggcccatcagctgacactccatcagcagcaaaatccgaagaaactggttcctcatcaaagccttcgttttcgggttcatcatctcctangatcatgatgaanctcggcatttggacttcagctgttttggcattcttaggtgga

SEQ ID NO: 203893 - DNA, 418 bp, Gossypium hirsutum
  unsure (1)..(418): unsure at all n locations
attgtctccaaggttttcaagtttgccactctctgggagggggaactggttcgggtatgggtactctgttgatttctaagatcagagaagaataccctgatagaatgatgctcacgttctcagtcttcccatcaccaaaggtttcagacactgtggttgagccgtataatgccaccctttctgttcatcagcttgtcgaaaatgcggatgagtgtatggtgttggacaatgaagctttgtacgatatctgtttcaggactctcaagttaactactcctagctttggtgatttgaaccatctaatctctgcaaccatgagcggtgtgacatgctgccttaggttccctggccagctcaactctgacctncggaaacttgctgtcaacctcattcctttccctcggctccacttttttat

SEQ ID NO: 203894 - DNA, 424 bp, Gossypium hirsutum
aagttgaaggcatcctaggggctttaaaaccagaggtgggtttttatgattgctgggtttggatcccagacttggctcgccaacttgggatccactccatatgctatgtactggtttcctcgatgatcatgtcgttaggatcaaacatcaggacgataaccaaagaaacgactgtagaagaagtggcgaaattgcctcctgattacccttcttccactgtgaaattcaaagctgaagaggctgctgcattgttgtttgaggctaacgatttcgggagtggactgtcgtttggggaacgcacaaggactgctgtgagtggaagtgatgccattgccttcaggacttgccgtgaaaccgagggaccattttgcgactattttgctcgaggaattgggaagtctgttttgttgacagggccttgctt

SEQ ID NO: 203895 - DNA, 310 bp, Gossypium hirsutum
  unsure (1)..(310): unsure at all n locations
tcctttattgctttttagaatttttcttaatcgaaaatgagggagtgcatttcgatccagatgggtcaggccggtatccaggtcggaaacgcttgctgggagctttactgtctcgagcatggaatccagcctgatggtcagatgccaagtgacaaaactgtcggaggaagtgatgatgcttttaacacctttttcagtgaaactggtgctgggaagcacgtccctcgtgccgtcttcgtggatcttgaacccactgttattgatgaagtgagaactggtgcttaccgncagctctttcacccagaacaac

SEQ ID NO: 203896 - DNA, 402 bp, Gossypium hirsutum
gagagagagaaatccaagtttttgttggaggaagtaggcgtgccaagggggcttttgccgcttagagacatcgaagaatgtgggtacgtgaaggacacaggtttcgtgtggctcaaacaaaagaagagcatcacccacaagttcgaaaagatagggaagctggtttcctatgcaactgaagtcacggctgtcgttgagaaaggcaagatcaagaagctgactggggtgaagaccaaagagcttttggtttggatcacactgagtgatatccaagtggatgatcctcccactgggaagatcactttcaagaccccttcaaggctgtttaggactttccctgtatcagcttttgagattgaaggtgaacaagttaaaggttctaagggtaaagatgaagagaaa

SEQ ID NO: 203897 - DNA, 399 bp, Gossypium hirsutum
agaattgaaacagaggggggaaggaataaaggagtagagatggggctcaaaaacagagtagaagaagataattgttcagtgaatgaagctttgttgtttgtcaccatctccatcattggtctgcaagtagatgtacacttgaaagatggctccgtttactctggaatcttccacactgcttctgttgagaaggaatatggtattgttttgaagaaagcaaaattgactaaacagggcagatgtgccaccaatgttgcgaatggcagtgtagtagagacgcttgtaatccttgctggtgatcttgttcaagtttttgcgaagggagtcccacttcctcttgatggttttgctggaaatatagcttgcggtaatggagaagctgcttctgagattccccct

SEQ ID NO: 203898 - DNA, 335 bp, Gossypium hirsutum
gttgagcctattgcgcctgcgagttatttcaacgagaggattgattatatgaagggcaaggtccatcctaaccttgctaaagaacggagagccatcataagggaatatgaacaacttaaagtaaggatcaatgcattattctcaaaagctcatacgaaaccaaaacaaggatggttgatgcaaaatggcaccccatggtcctgaaataacactcttgatcatcctggaatgattcacgtctatctatgaagtgccggtgcactccatgtcgatcgcaaatagctgcctcgactagactatgtttctcgttagaaacgacctgattatcagcacca

SEQ ID NO: 203899 - DNA, 341 bp, Gossypium hirsutum
gttgtctaatacgacaaatccttcacttggaaataatggctccttatctgaaacaggaaagttgaagggagattcacttgaatcattgcacgtgaagcagattaaaaagcacattagtacacctgttccgcatgattcatattcagttctttccataagcagttccggaaaatatcttgcaattgtgtggcccgatattccttatttctcaatctacaaagtcagcgattggtccattgttgattcaggaagtgcacggcttctggcttgggatacatgttctgacagatttgctatactagagtctgcattgccttctagaatgcccattcctcccaaag

SEQ ID NO: 203900 - DNA, 194 bp, Gossypium hirsutum
  unsure (1)..(194): unsure at all n locations
caagttatttttttccttacaagtttgttcatctggtcgtntattcatataggtaggtggatgtcccttaaacttgcatgtctgttggtgttgtgcatggtgatgggtgcacccctggctcaaggggccataacccgtgctgatggcttaatctgcctcccacgctgccttccttttntgtcatggaatggtga

SEQ ID NO: 203901 - DNA, 407 bp, Gossypium hirsutum
gtttctttcaatctttgcaactggtattctcgagctaaggtggagtggagtaagcattgaagaatggtggaggaatgagcaattttgggtcatcggtggcatttcggcacatttgttcgctgttatccaaggcttgttgaaagttctagctggtattgacactaatttcactgtcacatccaaggcaactgatgacgaggagttcggggaattgtatactttcaaatggacaacccttctaattcctcctactaccgtcttaatcatcaatttagtcggtgtcgttgcaagcatctcggatgccataaacaatggataccaatcatggggacctctttttgggaagctcttcttctctttctgggtgattgtccatctctatccattcctcaaaggtttaatgggga

SEQ ID NO: 203902 - DNA, 385 bp, Gossypium hirsutum
cttaactaaaaggatggaaataccattaggaagcagtgataaagttagtttcagacattaaatttacagaaaaacaaaggttccaagttcagacagttaaaataactgtcatcgtaaagggcaaagcatttactcaagcaaacaccatatagaatttacaccttttcttttagctatatatacataagcttctttctgcattgcattgaatcaagctaaaagtaaaggggaaccaaatgtgttttctccactgtaagtcatgtaaagaaaaccatcttcatccctgttttcctcgtaaatagcggacatcaaggcagcagtaggtgggagagtgttcttcacaaagacaaatatagctttctcggcactaagcttaatcctttta

SEQ ID NO: 203903 - DNA, 392 bp, Gossypium hirsutum
  unsure (1)..(392): unsure at all n locations
caagctagctaaggtcaaagctcaggtttctgaagtcagaggtgttatgatggaggacatcgaaaaggtgttagatagaggggaaaagatagagctgctagtggataagactgagaatcttcataatcaggctcaagactttcgaagtacagggacaaaaatccgaagaaaaatgtggctacaaaacatgaagatcaagctgattgttctaggaatacttattgccttgatccttatcattgtcctctctgtttgccatggtttcaactgtggcaaaaaaataaatgctattcttagaaggctgtattagctttcaccgcagcttttgtgatataatcttgtaagggaaagtttaaaatacatacatatatatataatactntatatgtcat

SEQ ID NO: 203904 - DNA, 303 bp, Gossypium hirsutum
ggacaatcaccggttttcattgcctcaactttggtggagaatggttgccttggtggaggaactaattccacatcactgattaaagaggccattcacgtaattagctgtggttatgaagaaaaaactgagtggggcaaagagatcggatggatttatgggtcggtgacggaagatatattaacaggtttcaagatgcattgtagagggtggaaatcggtttattgtgtaccaaaaagaccggcattcaaagggtccgctccaatcaatctctcggatcggttgcaccaagttttgagatgggca

SEQ ID NO: 203905 - DNA, 427 bp, Gossypium hirsutum
aacctggtatgaggaaagattaccatcccggaggccgagagcctagacattagcgataacgctaaggtcgagacttaggataaggagggcacctttttagattaatagaggccgactcccgttggcaagtaatccgaagacggttgtatctctgtcgaccataatacttaaaaggaacttatttcttatccggcgtcctgctcctgcggcggcacgtagacccccgcgaagatctccattgggaaaattactattccggaagccgagagtcttgatatcaccgataacgctaaggttaaaacttaggataaggaaggcactttcttagattaatagaggccgacccctgtgggcaagtagtccgaggacggtaggatatccgtagatcataatacctaaaaggagctgatttcctacccggcctcct

SEQ ID NO: 203906 - DNA, 413 bp, Gossypium hirsutum
attgatcggacccttcttcgtgcccgggaccccccacagcctgtgttccaccacgtcgagtatcaaccaccaccggcaatgaagattccaccccagtccaccggtcctgaaagcacagcaatctccattttcaaattgacccgggatcaactcaatgcactcaaagcaaagtgcaaggaagatggtaacgatgttaactatagttcatacgagatgttgtcaggtcatgtgtggagatcagtctgcaaggcacgtggacttgaagatgatcaagggactaaactgtacattgccactgatggaagggcaaggttgcgccccccactcccacctggttactttgggaatgtgatcttcactgctaccccaatagcagtggcaagggatctactgtcaaagccaacatggtacgc

SEQ ID NO: 203907 - DNA, 412 bp, Gossypium hirsutum
gagttttcttttctttttttaaacgatgatataaattctgacgttttttcttgatggttgattgtaaaaaataaattttgtttggttgaaattagatgtgaagaaagagattatgttttattttattttgtattaaaattgtaaatttttttttatgtgtatgtattttgcatgagacaggaatcgctgggttcgattttgtcagacaagatcggccaaattaagatttcaggagattagagaagatggaccctcatgatgagacgggccgccaagcttcagaaggccccatcctgtgtgttaataactgtggtttctttggaagtgcggcgaccatgaatatgtgctccaaatgtcacatggcaatgatcctgaagcaggaacaggcacaactcgtagcatcatccatcga

SEQ ID NO: 203908 - DNA, 397 bp, Gossypium hirsutum
  unsure (1)..(397): unsure at all n locations
gcggagcatccaccttaaacaccccgattttcttgtgtgtccttctcgaggacgtaattcctgggaatcatcacttcctcttccccaaaaagtcatcctcttaactgtggccctggcagaacactcaattaaacgccgtcctaataaaaaaacgctntctttttattaaccgacttgttaactcagtggtctctatctacaaaaccgagtcaagtggtgcggtttgatatcggtgatgcttcgtgagtttattttctttntcaagtgataagattcaagaaacttaaaaaaagagagaaaaatggatccggcagacatgatggtagggccgggtatggatatgccgatcatgcacgacagtgatcgatacgatttcgttaaagatatcgggtcgggt

SEQ ID NO: 203909 - DNA, 356 bp, Gossypium hirsutum
  unsure (1)..(356): unsure at all n locations
ctcgtgccgctcttttgaagcctaacatggtgacgcctggttccgactccccgaaggttgccccagaggttattgctgagtacactgtccgtgccttgcagcgtaccgtccctgctgcagtccctgctattgtgttcttgtctggtgggcaaagtgaggaggaggctacccttaaccttaatgccatgaacaagctccagaccaagaaaccatggtcactctcattctcatttggacgtgcccttcagcagagcactctcaaggcctgggctggaaaggaagaaaacgtgaagaaagcacaagatgctntccttgttaggtgcaaggctaactcggaggccaccttgggtacatac

SEQ ID NO: 203910 - DNA, 386 bp, Gossypium hirsutum
tcacatgctgccttcgcttccctggccaactcaagtccgatcttcgaaaacgggcggtagacttgatcccattcccacgcctccattttttcatggttggttttgcacctttaacatcccggggttcacaacaataccgagctttaacgatccccgagctaactcaacaaatgtgggattccaaaaacatgatgtgcgcggctgatcctcgtcatggaaggtacttaacagcctcggcaatgtttcgaggcaaaatgagcaccaaggaagttgatgaacaaatgatcaatgtccaaaacaagaactcttcgtactttgtggagtggattccgaacaatgttaaatcaagtgtttgcgacatcccaccaactgggttgacgatgtca

SEQ ID NO: 203911 - DNA, 427 bp, Gossypium hirsutum
agatggtcgaacatgtgtggagagaatcaatgctgccagtaggattttcaataacaagcttaggggtcttgtcgatcaattcaataacgccaattctgatgctaaattcatctacattaacgcctatggaattttccaagacatcaccagcaaccctgcagcttacggttttaaggtgacaaatgcaggatgttgtggagtggggaggaacaatgggcaaataacatgcttgccattccaaacaccatgccagaacagggatgagtacttgttttgggatgcatttcatccaagtgaggctgccaatgtgatcattgggaggagatcctacagcgctcaatctcctaccgatgcttaccccattgatatccgccgtcttgctcagctctgaaacttgaagtcgacgaggtttttgatgggaaattta

SEQ ID NO: 203912 - DNA, 408 bp, Gossypium hirsutum
gacgttgtcaatacaaaacgatggaataagattaaagtaagaaaattctcaaggtcaggctggaaaccgaagcataatcacaatatattctgtcaaaaacaaaaatgcaacagtcgcgaatggaaaaagatggaaatgataaaagaagggaaagtttttttttactatccctaaacacaacaaagggaaatcatccagttccatccatggatctcaaaaaaacttggttaatcgattaaaccaatgtcggacgggcaactcgcggcctcacgggtgtcttcgaaggacttaccctgataagctgggttcctagcaccattccactacaattcagtgcgactatggcactttccgccatggcaaattcaacaaaagcaattcgggttgaatgaacattatcacctaaaa

SEQ ID NO: 203913 - DNA, 405 bp, Gossypium hirsutum
agatgggagtagaaggcaccttggaatacatctctgatgggcttagcagcgtgaagaaggagaagaagaagaagaagcaaattcaaactgtagctctcaaaatcaggatggattgtgaaggttgtgctcgtaaggtcaagaaggtcctctccggcgtaaagggggcaaagtctgtggacgtggacttaaaacaacaaaaggccaccgtgacgggttacgtagaggcaaagaaagtactggcggctgcgcagtcaaccaagaagaaggtggaattgtggccttatgtgccttacactctggtggctaatccttatgtggctcaagcttacgacaagaaagctcctcccaatcatgtcaggaaggttccggccagtgccaccgtttctgagaccaccattgacaacc

SEQ ID NO: 203914 - DNA, 425 bp, Gossypium hirsutum
cggcacgagctggtgttcaatctcggccggtgagcggggagtgcccaataggaagctctgttgcttatggggaacacatgtcaaataaacgagttcatccatatcctatgtctgaacctggaagtgcaagatgggatgaaaagaaagagggaggatggagagaaaggatggatgattggaaaatgcagcaagggaatttgggtcctgaacctgatgatgcctatgatgctgacatggctatgcttgatgaagctaggcagccattgtcaaggaaagtgccaattgcatcgagcaaaatcaatccttatcgtatggtgattgtggctcgtctagttatccttgctttctttcttcgctatcggattctgaacccggtacatgatgcaattgggctttggctaacttccgtgatctgtgaaatctgg

SEQ ID NO: 203915 - DNA, 390 bp, Gossypium hirsutum
ttggttgtacagctctgctcggcgacgatctgatgttcgtcgtctgtctgagggacaccaacttcaatcaaaatcaatggctgcaatcttcgctcgtaactctctcaacgctctccgagctcgacaccttgctgtgtcagggcaagtgttgcagggttcacagcactacgggttgcgactcagttcacgctcatatggcacgcagaaagatgatgaagaaagagagcagcttgcaaaggagatttcaaaggactggagttctgttttcgagagaagcataaacacactgtttctaactgaaatggttcggggtctcatgctgacactcaaatacttctttgaaagaaaagttactatgaactatccatttgagaagggtccattgagccc

SEQ ID NO: 203916 - DNA, 363 bp, Gossypium hirsutum
  unsure (1)..(363): unsure at all n locations
gcagcatgcacgcacaatagctgggaaatctcaactttgtattaactcttatgcagaagcacttgaggttattccacggcagctttgtgacaatgctggatttgatgcaactgatgtgttgaacaaattaaggcacaagcatgcactttcatctggtgagggtgcaccttacggagtggacatcaacactggcggaataacagattcatttgcaaactttgtgtgggagccatcaattgtaaagatcaatgcaatcaatgctgcaactgangctgcatgtctaattctaagtgtcgatgagactgtaaagatccccaagtcgagagtgcacanggagaagctgctgcaagtgccatgggtggc

SEQ ID NO: 203917 - DNA, 440 bp, Gossypium hirsutum
ggttcggtttttgattcatggacctgtcaatatagtacggtgatggttgttagggcagaaggccttcaagactcatattttctgggtgatatggatccatatgttataattcaatacaaaggtcaagaacgcaaaagcagtgcggccagaggtgatggatctagtccatcatggaatgaaaaattcacattcaaggtggagtatccagggtctggtggtgactacaagctacttattaaaatcatggacaaagacaccttctcttctgatgactttgtaggccaagccaccatatttgtgaaggatttgttggcagttggagcagatgaaggaagtgctgaactacatcctactaaacatagtgtagttaatgctgaacaacgttattgtggagaaattgtagttggtcttactttcaccaaaaaggaagaaaatgatta

SEQ ID NO: 203918 - DNA, 403 bp, Gossypium hirsutum
gtcaaatatattgaaagaggaaagaagattgatgagaatgttcagagagaaatcattaaccaccgatctttacgacatccaaacataatcaggtttaaagaggttgtggtgactccaacacatttagctattgtcatggagtatgctgccggcggtgaactcttcgagagaatatgcactgcaagtcgatttagtgaagaccaagctaggtttttcttccagcagctaatatctggtgtcagctactgtcattccatgcaaatttgtcacacggatctgaaactagaaaacacactcctggacggaagtccaacaccacgtcttaaaatatgcgactttgggtactccaagtctgcagtgctgcattcacaacccaagtcaactgtaggaacaccagcctata

SEQ ID NO: 203919 - DNA, 439 bp, Gossypium hirsutum
gaaaaaaaacgcatcaaattcaaggatggcagttggaatattggaagggttgttggttagtgcaaaaggccttcaagactcagattttctgggtgatatggatccatatgttataattcaatacaaaggtcaagaacgcaaaagcagtgcggccagaggtgatggatctagtccatcatggaatgaaaaattcacattcaaggtggagtatccagggtctggtggtgactacaagctacttattaaaatcatggacaaagacaccttctcttctgatgactttgtaggccaagccaccatatttgtgaaggatttgttggcagttggagcagatgaaggaagtgctgaactacatcctactaaacatagtgtagttaatgctgaacaacgttattgtggagaaattgaagttggtcttactttaaccaaaaaggaggaa

SEQ ID NO: 203920 - DNA, 409 bp, Gossypium hirsutum
tttttgtttttttttttttgtcatacaaatgtctatatgtatatgaaacataggcgtggtaacatagttgaagtgtaaattattcaatcgtaattatgagaacgaagttggaatcagttgggtagaattttagagttcatctttgggataaaaggaaggtgttgtaggattagaggaagagttcttgatgggatatgaagcttgcattgctataccacagagaccttgtttgtctttgatgccacgttccattcttatgtaacctttctcaccccaatcaggtccccatgagttctttactatccaattcttagttccatcaagggttgttccatatcccactgctgcaaccccatgggtcagctttattccacattgtccaatgtataccccctccgagtagaattgg

SEQ ID NO: 203921 - DNA, 436 bp, Gossypium hirsutum
ggttgggtttttgattcagggacgggtcaatatagtatgtgttggttgttagggcagggggccttcaagactcatattttctgggtgatatggatccatatgttataattcaatacaaaggtcaagaacgcaaaagcagtgcggccagaggtgatggatctagtccatcatggaatgaaaaattcacattcaaggtggagtatccagggtctggtggtgactacaagctacttattaaaatcatggacaaagacaccttctcttctgatgactttgtaggccaagccaccatatttgtgaaggatttgttggcagttggagcagatgaaggaagtgctgaactacatcctactaaacatagtgtagttaatgctgaacaacgttattgtggagaaattgtagttggtcttactttcaccaaaaaggaagaaaatga

SEQ ID NO: 203922 - DNA, 408 bp, Gossypium hirsutum
agactgctctccaagctgggaactgagtattcttactcggtagatgaggagggtattggcaagactgcttttgaactgatctttgcttttgatgaagtcatttgtcttgggcacaaggaaaatgtgactgtcgcacaggttaagcaatactgtgaaatggagagtcatgaagagaagttgcacaagctggtattgcagagcaagattaatgaaactaaggatgtcatgaagcgtaaagctagtgagattgacaagagcaagattgataagaatagatctgacaaaggagggttcatgtcaatgggatctggaagaatagaaactagctttagtgaattgagtatttctagcagcgcaagcggctttggaagtggttctgggtttggtgggattaccactgatctcgat

SEQ ID NO: 203923 - DNA, 425 bp, Gossypium hirsutum
tgaagtcttctctcgcattgaccataactcagagcttgggtatgccaaacgtgccttcattcactggtatgttggtgagggtatggaagaaggagaattctcaaaggctcgtgaggatcttgctgcattgtataaggattatgaacaagtcggtgctgagtcggttgagggtgatgagggtgaagatgatgagtactaataagcacctgtgattgagtgtgcgtatgatgtctattattacctgttgcttccgagctatgcacgctactattctatgaagcttgttaaagacttgaaatggtttactgtatgttatgctttttcatgtttcactagtgcttgctatgaaactcgatatacaagttgcctgcattggaagtacatcgttaaggcaactagtacatgcccaacacgtatcatggatt

SEQ ID NO: 203924 - DNA, 237 bp, Gossypium hirsutum
gtcccccctaagagattcttcagcttgacctgcaagaagagagatagagaaagagttgagcaaaggtacttcccttttattaacaagactgcacaagaaattataaacaagagtgagagcctcagtatttacacatacgatcaagagtgctccctgtgggagcccacagttttcaagcaccctgcaacatttgagaccctggcaatggatccccaccttaaggagttcataatgaaa

SEQ ID NO: 203925 - DNA, 403 bp, Gossypium hirsutum
caatggcttcttgtctagctcttaagaggctcgtctcatccaacatcctcggtagctgcttacgcgtcgccatcgctccatccatctccagactctttaacaccaacgccgccacgcctgatgaccacgatgatcgccgtcgtgctgacggtttcttcccagatctgcaggggcggcgccagggggccaaaaaagatatgtttgatcctttgtctccaacaaggagcctgaacatgatggatcaagtcaaggggaatcgatttctctccacatcccgtgacattccagggcttgggagcgaggccaaagaatcaaaccttcgcccgttatctcctcatcttcctatttataagccacaactttctgcgactctttcaattaccaattggatcttccggggttt

SEQ ID NO: 203926 - DNA, 384 bp, Gossypium hirsutum
agatggctatcggtaatgcgccctggccaattggtgtcgctatggttggtatccatgaacgttcagctcgtgagaagatctataccaatagtgttgcccacataatgaacgatgagactactcgcaaatacttgcaatcagtgaaaaggctaatgaccttttgccaacgacgatatcctacccttccatctaaagcagttgagttcaacagcttggctaatggtagtgatttacagtcattgctagcagaagagagggattccagggttagttcctcagatgacaagcttaggttaatgcccacttcaacggacacctgattatcttcttatttttcctgaggttttaaattgctatattatacccgagaagttgattatgttg

SEQ ID NO: 203927 - DNA, 421 bp, Gossypium hirsutum
aaaggatgagaaggcagaagagaaggcaacagaggaaaagaaaggggaaccaccggcacccacccctccgcctcctccttttatcttgttagtggacttgcattgtgtgggatgtgcaaagaagattgagaaatccatcatgaagattagaggtgtggaaggagtggagatcgacatggctcaaaaccaagtgacaataaagggaataattgagcctcaaacaatatgtgctaagatcatgaagaaaaccaagagaagagctaaagtactgtctcctttgccaccagctgaaggtgaacctataccagaagttgtcacttcacaggttagtggattagcaaccgtggagcttaatgtagacatgcattgccaagcctgtgctgaccagctcaagaaaaagatactaaaaatgagaggcgta

SEQ ID NO: 203928 - DNA, 419 bp, Gossypium hirsutum
gttcaatgagactatgtttagctcccattccaagaaagcgtcctggttttcgacatcatccacttctttagattccaaggcttcttcatcatcaaaaaagtttcctgttttaacctttgatttttgggggaaaccacttgttgtcccagatcagaatggttcaagaaactgcaccaccaaacctgaaaacaaattctcggttcaagctgaaacaaactgtgtgagccgatgtattagatggtgggaaaaaaatcttaaacccaacatggtcaagatccactctgctcaagaacttgtatgttccttacaaaatgctggtgatcgattggtcattatcgacttctattcacccggttgtggtggttgcaaagccctccatcctaagatctgtcaactggctgaacagaatccaaatgcga

SEQ ID NO: 203929 - DNA, 316 bp, Gossypium hirsutum
agatagagatagaactagtctcgacacttgctggattgcactttgaatggggactctgaccactcccacatttggtacctatgagtcaccaaattattggaaaccccctactcctgtattcaagccttccaaagtgaaaccaccaccatattaacctaatccaccaatgtattaaccacccaaaaaagagaagccctaacctaaaccaccggtttattcaccttcaaaaaaagagaatccttgacccaaaccaccaatttattaaccttccaaaaaagaaaatccttaaccaaaaccccccatttatacaccttcc

SEQ ID NO: 203930 - DNA, 318 bp, Gossypium hirsutum
tttctgtgtttgattttctttcaatattcaaaaactttgcaaagctagtagttggtgtgattctcttttaagattttgtgtggaaaaaaatagacaaaaatatggctgagcactaatagaataagcacgaggaatctttgatggaaaagatagctgagaacatccatggtcatgattcatcgtcatcgtcttcagattccgatgactacaagcaatcggaatcttcgatcaaggacaaggtgtttcgtctctttggaagagaaaagcccgtccaccatgtttacggtggaggcatacctgccgacattttactgtgga

SEQ ID NO: 203931 - DNA, 385 bp, Gossypium hirsutum
atttatgattggtgcatgaagtctcaatatcatgctatgttacatttgacagtgaccaactctgtctccgatcagattctgtctgtaattcatatcaaaagataacatggaatcagatcttgctaaactcttcattggtgggatatcttgggacactgatgaggaacgtctcaaggagtatttcatgaaatatggacaagtcgtggaagcaatgatcatcagagatcggtttactggtcctgcccgtcgattcagtttcattgtctttgctgatcctgctgatgcttaaaaggtaattatggataagcatatgattgatggccacacggtttaagccaacaaagctgttcctaaggatgatcaaaacattttaaacaagaacatt

SEQ ID NO: 203932 - DNA, 354 bp, Gossypium hirsutum
aaaccatcaacgataaggatcgttgcccacaatgcaaaggtgatgaggttgtgcaagagaagaaagtcttggaggttattgttgagaagggtatgcagaatggacaaaggattactttcccaggagaagctgatgaagcgcccgatacggttactggggacattgtattcgtcctgcaacagaaagatcatcctaaatttaaacgaaagggtgatgacttatttgtagagcatacattggcacttactgaagccctttgtggctttcagttcatactgactcacttagatggcagacaacttctcattaaaacccaacctggggaagtcgttaagcctgatcaattcaaagcaa

SEQ ID NO: 203933 - DNA, 393 bp, Gossypium hirsutum
atgaaaccagattatgctgatgcacattgtgatgggggagtcagctttgcatgctctgggtgaagatgagagggcaattgaggttttccagaaagctattgacttgaaacctggtcatgttgatgctttatacaatctaggtgggctttatatggacttgggtaggttccagagagcttctgagatgtacactagggttttagcggtgttgccgaatcattggcgggcacagctcaataaggctgtttctttgttgggagctggagaaactgaagaagctaagaaagctttgaaagacgctttgaaaatgacaaacagggttgaattacacgatgccatttaccatttgaaacagctgcagaagaagaagtaaagagtaatggtggtggcaat

SEQ ID NO: 203934 - DNA, 319 bp, Gossypium hirsutum
gaagaatataacgcatggttatcatttagtgaaggggagagcggatcatccaatggaagactatgttttcgcggagtttaagcaagtcaatggcagtgagctcggtttatttgccatatttgatggccatttgagccatgttattcccgattatttgaaggcgaacttgtttaacaatatcttgaatgagcccgacttttggactgaaccagagaatgcgattaggaaagcgtatcgtttaacggatacaaatatattggaacaagccattgatttgggcaaagggggttcaacggcaatgacagcaatattgatcaac

SEQ ID NO: 203935 - DNA, 357 bp, Gossypium hirsutum
tgctttggttagggtgtctgcagttcttacaagtgctgcgttcatcctcaatgttgattgtgaccactatgttaacaatagcaaggcagttagggaggcaatgtgcttcttgatggacccacaagtcggtcgagatgtctgctatgtgcagtttcctcaaagatttgatggcatagataggagtgatcgatatgccaatcggaacacagttttctttgatgttaacatgaaaagtcttgatgggatccaagggcctgtttatgtgggaacacgttgtgttttcaataagcaagcactttatggctatggtccaccttcaatgccaagttttcccaagtcatcctcctcatcttgctc

SEQ ID NO: 203936 - DNA, 199 bp, Gossypium hirsutum
ggtgttaatttcatgcgtgcagttcgtggagtacagtagaatgatatacttggacggcgacattcaggtatacgacaacatcgatcacctgtttgatctgcctgatgggcatttctacgcagtaatggattgcttctgtgagaaaacatggagccacaccccacaatacaggatcggttactgccaacaatgccctgac

SEQ ID NO: 203937 - DNA, 378 bp, Gossypium hirsutum
caagtgttctttttcccttcttttgaaggggtggtttagtggattcaacagagactttgagaaagagaagaagatttattttttttaaaggagaatttttttaaagtttgggcttttgtttttggattaaaaaattcaaatgggatcattttcagggcaaagtagtggaagctgtgatctttcattcaagatcttgttgatcggagactcgtctgttggcaagagtagtatgcttcttagctttatttcagcttctgcagaagatctagctcccactattggtgtggattttaaggtcaagttgctaagtgttgctgggaagaggttaaagctcactatttgggatactgctggacaggaaaagttcagaacacttac

SEQ ID NO: 203938 - DNA, 416 bp, Gossypium hirsutum
  unsure (1)..(416): unsure at all n locations
aactttcaaaggatgaggttgtctttttccgaggggcggtcgaaaaagattattatttccaaatgtactatgatgatttgcctatctggggttttattggcaaagttgataaggaaggaaaagctgatcccagtgagtacaagtattacctttacaagcatatccagtttgatgtactttataacaaggatcgtgttattgagatcagcgcaaggatggatccacatttgctcgtggacttgactgatgataaggaagttgatgctgagtttatgtacactgtgaaatggaaggaaactgatactccttttgagaagaggatggagagatattccatgtcttcttctttgccgcatcatttagagattcattggctttcaattatcaactcttgtgtgacggttctncttttgact

SEQ ID NO: 203939 - DNA, 397 bp, Gossypium hirsutum
gtggctactgagtcgctaccgggggaccattggcttggggtctgtgctacaacaaagaaatgagccctagcaaaatatattgcgatgattactacaaatacacctatccttgcacaccaggagtctcatatcatggccgtggtgccttgcctatctactggaactacaactatggggaaactggagaggctttgaaggtggacttgttgaaccacccagaatacttagaagacaacgcaaccttggctttccagacagcaatgtggaagtggatgacgccggtgaagaaacaccaaccctcagcccatgacgttttcgttggcaactggaaaccaaccaagaacgacaccttggccaagagggttccaggttttggaaccaccatgaatggtcttta

SEQ ID NO: 203940 - DNA, 412 bp, Gossypium hirsutum
ctctctctctctctctctcgcctcggtcgtttgttttcgtttcgtttctttaggagggtggtcaatatggggtcttcgattttgccagatctcggagctgagatcttgatccccgtttgcgccgttattggaattgtcttttctcttgcacaatggcttcttgtttccaaggtgaagctctccccgggtcgagactcgggttcccccggtaacaacggtgcgggtgggaaaaacggctattccgattacctcattgaagaagaagaaagtcttaatgaccataatgttgctattaagtgtgcttaaattcagaccgccatatctgaaggagcaacctcatttcttttcactgagtaccagtatgttggcattttcatggttgcttttgcaatcttgattttccttttccttg

SEQ ID NO: 203941 - DNA, 315 bp, Gossypium hirsutum
gagaatatctcatccttttattttcatttcgtcttcttgtcaggtcaaattcatcatggaaattacttgtagttatcaaaatggggacaataggcaaaactactacggccgctctttttctttgtcttcttctgtttcctattgtcttttccacgcctaatgacagattggttagaattggactcaaaaagagaaagattgaccgaaacaatcggatggctgcacaccttgaatccaaagagggaaaggcatctgaagcttctcttagaaagtatcgtcttcataggaactttggggaatcagaggacattgata

SEQ ID NO: 203942 - DNA, 365 bp, Gossypium hirsutum
cgtaagcaaaccacaaaggaaagcttggagagagacccgaaaacaatgtctaaggaagttagtgaagaaggacagggtcgtaaggactatgtggaccctccaccggcacctctgattgacatggctgaactcaagtcatggtctttttacagagccctcatagctgagttcatagccactctcctcttcctctatgtcactgttgctactgtaattggtcacaagaaacaacaagatgcatgtgatggtgttggtctcttgggtattgcatgggctttcggtggcatgatctttatccttggttactgcacttcccgtatcttaagttgacacattaaccctgcggtgacttttgggttggtttt

SEQ ID NO: 203943 - DNA, 427 bp, Gossypium hirsutum
agcattagcaaccatagccatggcttcctcaccggaacgcttctctatgtctatcctctgcctttttgccctcttctccatgcaaatccatgctagagagtacttcagcaaattcccaagagttaacatcaatgagaaagagacaacaaccagagagcaaaagcacgagaccttcgttccccagaccacccaaaagccagaagaacaagagccaaggttcattcctgaaacccaaaatggttatggcctttacggccacgagtcaggctcaggctcaagctcaagctcaggctcaagccggcccagtttcaccaccaaagaaacctatgaaccctatgtcacccctgttagattccaccctgatgagccctataacagcatccccgaatcctccaacaataaagacacttactactacaacaagaat

SEQ ID NO: 203944 - DNA, 423 bp, Gossypium hirsutum
ctcaccaaatctcttctctatgtctatcctcttcctatgtgccgtgttctacatgcagaggcatgctagagagtactttagcaaattcccaagagttaacatcaattacaaagagacatctaccagatagcaaaaatacgagaccttacttcaccagaccacccaaaaccctgaacttcaagatccaaggttcattccttaaacccaaaatggttatcgcctttactgccacaagtcatgctcaggctaaagctcaggctcaatctcaagctcgcccagtttcactacctacgtaacctattaaccctatgttacgactaacagattccactatgatgagctgtataacatcattgatcgaatccttcaacaatcaatacacttactactacaacaagaatgtctataagtccactaagcttc

SEQ ID NO: 203945 - DNA, 465 bp, Gossypium hirsutum
ggcggtgcttgtctcagaatcagcgggctttttgggtcgtaggccctaacaggtaagtatcccacggtcacggcttattcctaacgttaaggcgcgttaagctacttcggctactccgtctgcgccgtcgttttggtaagaaggaattcaaagacttactagagtcacacagggacgtacaatgggaagaatccgacgtcgttactcccaattccagggaaaccgataaccacgacgagcacgaaagactaacgccgactctctaaataagtcccgagaaaatccccggtccactcctagctcctaccgaactcatatcaacggagaacggaggatcggtcgaactcgttaatttccttatatcaactaaggaagtaacctacgctactggtcgcggtcacgaggagaagatcgtacgggggaaagagaccggacggacacacggcctagctatcgaggacactc

SEQ ID NO: 203946 - DNA, 355 bp, Gossypium hirsutum
aatgaatattgtattgttcctgattggttgcataaaatgttttggggctatgggcatgcttctgctgcacagtggataaacatgcctgatcttctggagacagtggatttcaaagatacttttcttaatgcaggccatctgaaagagagtttttcacattatcaggtttgctttgttgattcagatggtatggaaactttggatccaagaccaccattccgcatcaagcttcctcggtcacttaaaagtgatactcatgctccatcagaaaatggaagatctgatactggtgtcaatgatgccaagatggtagatgcttgtgttgagaaagaaaaactaattgttgaagcatata

SEQ ID NO: 203947 - DNA, 401 bp, Gossypium hirsutum
ctttagcttctctacttttcgtacttcccacttgaaatgtcttatgattgaggtcagacatcaaacatacacactctcatcgatctttcttcttatgatacctggttttgcccttactcatgtcaatcaacacacagcataatgttctaatcagctagtcatgcttgctccatgtctcccatacataggcggagaggcaaaaacacccaccatagattgttgcagtgggctcaaacaggtgctggataagatcatgaaacgcctgcatgtgttgattaaagatatagacgacccgatcctccgcctcaagatcaaccgtactcttgcaggaactctctctagtacttgtcgagccagcgctagcatgacagaatgtatctccctgctgcacttggcaccca

SEQ ID NO: 203948 - DNA, 420 bp, Gossypium hirsutum
catggttgaggttatgcctcgtaatatttgcaggggtgggagcactggcagggtgtggacctgctctttattggagattcaagaaaactctcagattcgtcgattccaaatcctcttgtcctccttgtatctgtgattgtcctcctcctctttccctcctcaagattgcccctgggttggccaatctctcagtcacagattgtggaagcaacgaccccgatctcaagaaagagatggagaagcaatttgtggaccttttaaccgaagagttgaagttgcaagaagctgtcgccgaagagcacactcaccatatgaacattacctttggtgaagccaaaagggtggcttcccaatatcaaagggaggcagaaaagtgtattgcagccatagaaacctgcgagggagccagagaacgggctg

SEQ ID NO: 203949 - DNA, 424 bp, Gossypium hirsutum
attctgtgctttctattttgtaaaccatggctcgtaacgttcgtcaccctttgttccttttccaactttttctcatttgtgtctcaccaatgatcggtagccacactgtctcggcaacggctcgacgtttattcgagacacaaacaaccttatcggagctgccacaattggcttcaaaatacgaaaagcacgaagagtttgaatatgaaaagtcagaatacaaacagccaaagtatcacgaagagtaccccaaacatgagaagcctgaaatgcacaaggaggaaaaaaaaaaaccctgcaaacaacatgaagagtacgagaaagaaaaacctgagttccccaaacaggaaaagcctaaagagcacgagaaacacgaagtcgaatatccgaaaatacccgagtacaaggaaaaacaagatgagga

SEQ ID NO: 203950 - DNA, 358 bp, Gossypium hirsutum
ccacatcggtcaggccggtatccaggtcggaaacgcttggtgggagctttactgtctcgagcatggaatccagcctgatggtcagatgccaagtgacaaaactgtcggaggaggtgatgatgcttttaacacctttttcagtgaaactggtgctgggaagcacgtccctcgtgccgtcttcgtggatcttgaacccactgttattgatgaagtgagaactggtgcttaccgccagctcttccacccagaacaactcatcagcggcaaggaagactcagctaacaactttgcccgtggtcactacaccattggcaaggagattgtcgacctctgtttggaccgcatcaagaaacttgct

SEQ ID NO: 203951 - DNA, 415 bp, Gossypium hirsutum
ccggtgacaggaagctgttgcaatcgtcgtcgccagctgctacggcgaatatcgtcgtggcccaagatggttcagggaattataagacgataaaagacgctatatccgctgcttcgaagaggtccggaagtggaaggtatgtgatatacgttaaggcaggcacatacaaggaaaatgttgagataggaagcaagctgaaaaacatcatgatggtgggcgatggtatagggaaaactataatcacagggagcaaaagcgtcggaagaggatccacaacgttcaattcagccaccgttgccgttgttggagatgggttcattgctcgtggcattacgttcagaaacaccgctggtcctactaaccatcaagcagtggctctacgttcaagctccgatctctcggggttctacaaatg

SEQ ID NO: 203952 - DNA, 385 bp, Gossypium hirsutum
ccggtgacaggaagctgttgcaatcgatcgcaccagcggttacggctaatatgagggtggcccatgatggctcagggaattataatacgataaaagacgctatatccgctgcttcaaagaggtccggaagtggacgggatgcgatatacgttaaggccagcacatacatggaaaatgttgagattggaaacaagctgaaaaacatcatgatggtgggcgatggtatagggaaaactattatcacatggagctaaatcgtcagacgcagatccacaactgtcaatccagccaccgctgccgtacctggaaacgggttcattgctcatggccttacgtgcataaacaccggttgacctactaaccattaggcatgggctctaccttc

SEQ ID NO: 203953 - DNA, 418 bp, Gossypium hirsutum
caaaaatcacttgattgttgataatttgaaactgagacgaacacttggatggggtttccagtagtcgataccgagtatctcaaggagatcgataaagctcgtcgagacgttcgcgctctcatcgccttgaagaattgcgctcctatcatgcttcgcttagcgtggcacgatgctgggacgtatgatgtgagcactaaaaccggaggtccaaatggctctataaggaatgaagaacagttcactcatggcgccaatagcggattgaaaatcgctattgattttcgtgaggaagtgaaggctaaacatcctaaaattacgtatgcagacctataccagcttgctggtgatgttgctgctgaagtcactggaagtcctaccattgactttgtacctggaagaaaggattcaaacatttgcc

SEQ ID NO: 203954 - DNA, 351 bp, Gossypium hirsutum
cttacgaaactccccaccccccactaaaaaatttaattttttaattacacacctcactgttttttacaatgtattctcatgaaagccaaaaaaacaagctcctattgtttactttgctttctccggagttcggaagaaaactgactaagcttcattccacaaagcattcttgccttctccacaccgtccgtgaacatctttcatcctctcaacagacttgcatattccactgcaggtccaatcgaacgaaacaacacaaacgctgcctgctttaaccttccactcgcaatctgtggtgccacagcataagcttcgatcatctatatgatcgacatccaaccctataaacca

SEQ ID NO: 203955 - DNA, 398 bp, Gossypium hirsutum
  unsure (1)..(398): unsure at all n locations
acttaataatcanaacatttttattaaactagcaaatcatgtctatttgaaaaatttttcttaacttcccctgtttttaactttcatatagcatgcaatttatcaccaatattacctaaaacctaccctacataaaaccatatcaaaaacataatatatttaacacaaacatattataacaacctcactttatatattaagagacgtgctcgtgcctaattccttcatcctcttttatccactatttctagatctgtcgccacctctttttatctccatcttttgttccctttagttagggttaatttcaagcttatcataatcatattcatagctttttcctgtttaaaattgatatcctctcacatttccacacatacatactatccttaatcata

SEQ ID NO: 203956 - DNA, 450 bp, Gossypium hirsutum
  unsure (1)..(450): unsure at all n locations
ataagcagttgtgtgaatgtngaaggaggaatggaagcttgaaactcttgtgatctctatgagacccttgccatcaccggagtgtattttcgtgaacacaagacgcaaggttgactgctactgacaagatgcgaagccgtgaccacacagtttctgccacccatggagacatggaccagaacactcgtgacatcatcatgcgtgaattccgctccggttcttctcgtgttctcatcacaactgatctccttgctcgtggtattgatgtgcagcaagtgtctctagtcataaactatgatctgccgactcaaccagaaaactacctccaccgtatcggacgaagtggaaggtttggaaggaaaggtgttgccattaactttgtgactaatgatgacgagagaatgctgtatgacatccagaagttctacaatgtgatcattgaggagctgc

SEQ ID NO: 203957 - DNA, 423 bp, Gossypium hirsutum
aaaaccgcataaacatggcgattggaatcaactttaaaatagtgcttatacaagaaattcaaatgaagccctttaataatattggaaaaaaaaccttcaatagcaagaaaaacaaagagttaaaatacctaaaggaatttactccataaactcaaacccataatcaacgacaataccgttttgccttcataatctattaattcatgcaattaggaatggcataacggtaagcataaaagcttcgtatgtaaaagtcgcattaccactgtacatggcatccttctccttgaatttctcagttattcctttaactgtaaggcatcactcgatgaatttgtcatattcaatggccttgtttttgcctccaattttatcaaactttgatacaagcaaattccaaaacaacaggagagactgaaaatc

SEQ ID NO: 203958 - DNA, 417 bp, Gossypium hirsutum
  unsure (1)..(417): unsure at all n locations
cggaatgtcccaatattttagcaatttgataaagcagttctaacacaatggggggaggcgttactgctggacaggatatannaagataaggcaaaacacaaacggtgtaaggagtttaaagatcattctgataacagttttcagttttagtttttgagaggaaagccctacaagacatcaaatatcaatccatcattcttcccctcagcatggctgccgctttcctcacttgcctcacgggccctaagatgaataccttgtccggtgggcccttggcacccccaaaatgaatttccgcattgcaagactccttaattgacaagatggaaaccccttttcttccaatgacacgtcccatcttcccttgcggaacatccagaattgaaagtatttcttcttcaggagcatcccccttca

SEQ ID NO: 203959 - DNA, 436 bp, Gossypium hirsutum
  unsure (1)..(436): unsure at all n locations
ttagacaatgcagccagccagttataatatcgtaataaccaactcattcgctcttaccgttttagtgggcagcatcgaaatgacgaatgacttccattgccagttgatgagggctcttgttctgcagctttgcaagctcttccatggcttcgtatgtctctttatcggcgaatggcttaaggttataccttaccggtgattgaactggaccttcccacttgtctaccagctcatgaagtttttcgaatcccattcgggttgtgaagtcgccgaatgattctttgggctgtctttttcgtttccagtagtagaataaaggctcgaaaactttttcgagatcttgaactttgactttgttcataaaagttcttgctaattgggtttgattcggtgttcctccgaaccaaatctgataactgnttggaccgtcaccaac

SEQ ID NO: 203960 - DNA, 426 bp, Gossypium hirsutum
acataattacttttatataatatatatgaatcgtataaatccaaccaaacatattccaaacagggtggacaataaattccttcaaatacaaaaaaagagtgtcctcaaaaggtaaaaaaataataatgtctcaaagaatacaatataatggtaaagtaacgtaggctctctagtagaaaagtcccatatgagacatcagcccatagaatacgagaaaaacaaggccgaaataagcaaatgaatgaaacattacagagctattgcatcaaatgtgaggcactcttttgttttaaaccatcagattgagcagagcccatcccatggctaagcttcccatcatcttttgtacggtccacatttgatttgctccactcgtgtcaattccagctggacctggcgtatcaaccccgaaggtaggtgcttggg

SEQ ID NO: 203961 - DNA, 392 bp, Gossypium hirsutum
  unsure (1)..(392): unsure at all n locations
acaaacatagccatangtattacattactattttttaatatattatacattactctctcaaatggaagccttattaagcaaagtcgggaaagggaaaaatagggaaaagacactttcattactcattacatacaaatccaaacacaaagctcgaatcacatacctgtatatgctgcattaccgacaacttcttttggttttcgctttcatcacatgtgttcttcatccaaatcttcctcatcctcatattcgccttcctcgtcagcggtagcgtcctggtattgttgatattcagacacaagatcgttcatgttgctcttaacctcagttaactccatctcgtccataccttcaccgttttaccaattcaagaaagctttccttctgaacat

SEQ ID NO: 203962 - DNA, 438 bp, Gossypium hirsutum
  unsure (1)..(438): unsure at all n locations
tttatttttaacctttgagatgaatgcaaatttatgttgtacgctaaaatgtggctttagctggtaaaataagtagatttctcgaagtanggatgaaaattcatgatgtttagatagactcaggtaataagacggcaacaagggctgcagaacacatttaacttaaaacaacttaaaaggaagaaacaaacaggcataccagattcacgaacaaccaaaacaccgactaatggagaacagactagatggtggctccagtgatggctccagttctggcttcttgcgaggaagatgcttaaaaaatgcttttaccgctccactcaccccatcatcattctccattgccttggcaagttcaacagctctctctttaacctttgggtttagcatgaattttattgcatcaatcagcttgngaagtgagaattcatcattcgg

SEQ ID NO: 203963 - DNA, 409 bp, Gossypium hirsutum
tttgtagataaagttaatattacgtagtcgcataaatcggcatagtacacaacccacaactcgggaggtttaacatccatatttattctgtagctatcgttattttggcttccactagctggtgaactttccatgccaaaacttcacttgacgctgttgcagtcagtgctagggctgatcttgtaagggatgttgacaccgcacttgcctgggagtccgcttgcaataccatagttgatgccagaaatgccggcggccgcacttttgatgcatttgcaagctgcttgccggtctggtgttgtttgggcggcggagttgagagattttatgccgccgcagcaacctgggggaacgccaccagcaccattccctgtcaagtaaccaatgcagggtgcgagggagcttgtga

SEQ ID NO: 203964 - DNA, 369 bp, Gossypium hirsutum
  unsure (1)..(369): unsure at all n locations
attccctccttttttttattcattgaaatgtctgttggggtatgtaaggttactcagaaaaacgtccttgcctcnatttctaggcgtgcagttcgaatcaagactgctgctggaagaggtgcttatgtctcagatataacctatctaaatcttacatttaataatgcccgagttggaattatcatcaagacagactactatcagcaccctgacgatgactttgaccgacaggccctcccacttttaaggcacattatcttttccgccatacatggtcacggagttcgtgtacctgttaaaatacactgaagcaaagatattcccatcaaaaacgtgacgcttagggatatatctattgcgataacatat

SEQ ID NO: 203965 - DNA, 372 bp, Gossypium hirsutum
cctcaagactgaaagaaggaaacttgatgtcatatagtttgagtccatgcaacaactttcgggcgaagaagagcaatgatgatatgtttatcaaactgtgatctgaaaaggacaagcgcaaggatgctgataaagaagaaaaagtcaactagcctgtgagcatcaatgagttcctgaagccagctgaatgggagaggtactattgacctgggcatggacgatgccgtgaccgtggtcccagaggtgggtatggaggcaacacatccagcaatgtgcaagctccctcaattgcagatcctggacactttcgctcattgggtggcaaagtgatgtccgacaccacaatctacacaattggtctcacttggaatc

SEQ ID NO: 203966 - DNA, 470 bp, Gossypium hirsutum
taattatctgatgattattacgaggtctatgatatgatcgtatgattgtgtgtaaatttcgtgaagaaattctatgcataaggtgcggtattcgaagttagggactaaattgaatagttgcaaaactttcattctagaagtttctagtatgaaattgctttgaaatattaactaggaggtcttaaatataatttcaccaatttctaagtttatggacaaaaattggacatggatggaatttttggaaagtttactaaaaatggcattttggtcatttaggggtaaaatgaattaaaatacataattaaaagccaattttgttcatcttcttcaccatggacgtgtataccaagggagactccatggctagggtttccaagcgtccaagctcgattgtaagtccgttctagcccccgttttaatgatttttactttttggaatccctagtaaccttgatttagcttatgct

SEQ ID NO: 203967 - DNA, 374 bp, Gossypium hirsutum
gttaatgtccatcctatatttgaccttgtgcttaaaaaagctgaaaagggggcgggtccttttcaacctggacagggttggtatgattttcgagctggattctggggtgttcttggtgggccttgtcttggcataatccctcgatttatcgaataatttaattatccaatgccagaaaactgtgccggaggaaccactggtgttttcgtaaatgggagagagctccatcagaaagatttggatttgcttgctaatataaggcttccaaccgatagagatagatcttacatcatctagatctctggcagaatcctggacgaatacacttgtgaatagctagattgccttggcaaacttgcccctacagttgataa

SEQ ID NO: 203968 - DNA, 483 bp, Gossypium hirsutum
ctcaagtttttttaattttccttttgtttttttttttttgtttttttttttttttttttttttttttttttacaagaaaaaccaatctccaatcgaataatttggtgtatatcaatgcctttaaacaacacgcatgtacagctttcaatgaatagtacaaacagggcaaaggaaagataaaactttggttgcaaagccagggagcattacaagagctatttaaatgatacaggtgggaaaacaacgaccatcgcctaagagcaacaagatgcagttgcagtccgttctgaaggtctattcatgaaaaccattccagcaggattttgtgctggctgcactcgaggtaatcttttagctatttcataaaaaagttcattgacattggatgcggtctttgcaaaagtttccatgaaaaaaagaccattctcctgagcataagtttgtgcttcctctgctgccaccttccttgcatccaataagtca

SEQ ID NO: 203969 - DNA, 469 bp, Gossypium hirsutum
  unsure (1)..(469): unsure at all n locations
gtctaccttcgagggcctagtccagctggcagacatggagctggatgattgtgttgaaacaactctatatgatgtcaagattggtgaagatatgcgtaggaagcaggcgcaagcagctcaagaggcttatgaggaagatgatgacatgcatggtggtgcccaaagagtgcaatgcgctcagcaatgatcggtggcagacggtaaggaatggaatgtatgattgtttaacaaaaattatttgaaaataccattctggatatggttgtttgcttagaccatttcttctagagtgctatctgctttggtaactggtaaagtgtatggaaagatttagcgttggaacttgacctatttgtttatggtatacaacctattgcttcttgtgagcttagtttttttagttttgattntatatttgaatttgagaaatcatttanggatattttatgaattgaaggtgttcattgtt

SEQ ID NO: 203970 - DNA, 313 bp, Gossypium hirsutum
aatttttctgttttcatgcttttggaagtcatgtttatgttccttaccctcatcttgtttttccttgtattcggtatgttcaatattcgacttcgtgtttctcatgctctttaggcttttcccctttggggaaattgggtttttctttctcgtactcttcgtgctccttcgattcgtgtgactcgtggcactcatcatgtttatgttccttgccctcatcttgtttttccttgtactcgggtattttcggatattcgacttcatgtttctcgtgctctttgggcttttcccctttggggaaattgggtttttc

SEQ ID NO: 203971 - DNA, 407 bp, Gossypium hirsutum
ctgggaaagcatttgcgcattttctcgttaattatacatttttccagcccatcataaagcacagttaggatcagatacaccaaagtaccaacaaccaacaaacaaacatggaccgacggaaaccatgtttcgtgtttatcgcacaagaacacacacaaaaaagagaggatgaaatactctgtaatttgagtatttcggtctacaacaacagtcttgtccagcttatgacttgaacaaagaataccaaactgcattggcagaataactcgactttggagaacaaaaataataccctacttatgcttcagacataatgcaatctatagcctgcttgcatatgccagtcatcgtggcctcaggcccgtaaacctcaaggggtactcctagttcctccccaagagcacgca

SEQ ID NO: 203972 - DNA, 457 bp, Gossypium hirsutum
tttttctgttttttaaaaaaaaaaggatcaattttatatgataaagtataaaaataacagcatcctaaacaaatctgtctgatggggtttatatagaacccaaatattaataaatagatgatgcctaaaacttaatccaaggccctctgccacccatatgcatcaactatttgctagctgtcaatttaaggcacttctccaattcctgctaaatatctaacaaaaatcatagaatattttctatgacagaatggaaggaaatgaaaaataacctgtcactcgcatttgatagacctgtatatgtgacggacaaagagtagcgaggcacggaaaccaactgtcccgagcatgaggaagaatccgtagcagatgcaggccatataaccaaagaagaacgaggtttgcataaatccagacatgtctgatcgagcgtagtaataatacaagcagtaagcgt

SEQ ID NO: 203973 - DNA, 456 bp, Gossypium hirsutum
ttcaaaagaagttaatggagaatgtccaagttaaacatacaattttacaacatatcatgcaatgcatacaacgaacgggtttagctactaggggtaaaccacaacaaaatcaacacattgaacaacacccacaacagccacaaaccagtgattgtagctgattacaaagcaaacaaaaactaatgtgtattttcatcagctactactttaacaattgtatgacttccacaatttaataaacttgtcatgactcgcggaagaaaccaggccagtcaccggtgacactgccaatgcagctatcagtccttcatgagccgacaatgtctttgtcttaccctccgtcatattccatagctccaaagactggtaacagccaatgaccagcaatgaaggacttgtaagatggaaaacacactagtgaaacttgttgccattacaactcaattcatgaacaca

SEQ ID NO: 203974 - DNA, 455 bp, Gossypium hirsutum
ccctcaagttttttttctgttccttttgttatttatgttttgtgtaaaaagaaatgactcattatttataaattataataaaaaagtatttcgatagtgaaaaccataaatatcatggtcaatcatcaacaatcaaatttcagacattatggatatcacctctagagttcaaacttaatagtttggttcactataggaaatgtgtatattataggctaatggcacttgctcgcctatttcacacataaagccagcgggcgccactttgctacctcggcataaaacgctcatgtgccttatataagtaatatgtcaattccagttttaatattagacggacactataatattgtcttaaaactggcctccttcaaaagtttgtccgaattgccaaccagcgggcactacattgtagtttgtgatagtcctgctatcgctggcagtcactttgaaag

SEQ ID NO: 203975 - DNA, 320 bp, Gossypium hirsutum
atccaaaggtatgatatatccaaccattcagttcactatttacaatatagccataaattcctaactagcttagttatcatcacagaatgcaaataaaggcataacaacaatccgactgtctcagatgaaaaatgagggggaaaggagaatgaaaaataataataataagacgatataatgctcccccctgcttccagaacttcccacattgcacaaatctacttaatagcttcaagccttcgtagctaagttgtaggaaagccaatctatgcccttataaagcccctcaccagatgttgcacacgtactctggatatacc

SEQ ID NO: 203976 - DNA, 369 bp, Gossypium hirsutum
tccataatcatcccaggtaatccagattcaagtgcacaaatttcccgtccaccttgcactctgcgaacttggactggctcaactccaccttgggccagggtatcctcagtttcacctgaaatcatgtataactcctcatcttgacttggttctttatatggtttccgccaatcctgaaatccctgaattaattcccttcttatatcaaaaaaagtctccctcttattcccgcgcttcttgctttctagatagttatcaagacgaaagctttttaacaaacttggtctgtccctaacatgttctattgccattttcaatgcatcattcctcattattgtcacctttaaaatcctcatcgtaaacatcttt

SEQ ID NO: 203977 - DNA, 461 bp, Gossypium hirsutum
cttgtggaactttaatcagaccggccattaaataattgataacaagctatcacaagaactcttaaaagttgctgggaacattaaacattaaaacaaaatcccaaaacatcttagactaccattaccagaccatcctaccaaaccaacagaccaaaaaggataaaacgactgtagaaaccaatcatactcatagcaataacataaaactgtagaaataaataaccaccaaaactgcaaaccctccctttctcccgcttcttccaatcaaaatcttataaaccacactccgacagcagcaattaatttctactgctgcttgcattccggaggcctctcaccttgctgcccatcccctactgctttaccactcttcttatgagccgacttctttttggtcttacttccttcgtcatcatcctcatcctcatcgtcagcatcctcatcctcttcctcatcatcct

SEQ ID NO: 203978 - DNA, 458 bp, Gossypium hirsutum
  unsure (1)..(458): unsure at all n locations
aaattgccaggtctgttgcatcacaagatagcgtgtgccatgaacgcccttgttcgtgtctcgggggtgcttacaaatgctcctttgggtgggaacttggattgtgaccattatttaaataacagcaaggctgtaagagaggctatgtgtttcttgatggaccctcaaattggaagaaaggtttgctatgtccaattccctcaacgtttcgatggtattgatagacatgatcgatatgccaatcggaacacagttttctttgatattaacatgaaaggtctagatggtatacaaggccctgtatatgtcggcacggngtgtgttttcagaaggcaagctctttatggttatgaaccttcaaagggacctaagcgcccgaaaatggtaacctgtggttgctgcccttgctttggaccccgcagaaaggacaaaaagcactctaaagatggtggaaatgc

SEQ ID NO: 203979 - DNA, 477 bp, Gossypium hirsutum
cctaagttttttttcggttctgtttgacctggagaaactgctgcggagtatcttatattattagaagaaaaagtcaccactgaagagctggcatgcatgaataagatgactgatattgatactcatttaatattcatacatgctaccccataatatctatatatgttcatcgcaggtgagttattcgggctacatattatttctcgacagtcaccaactgcctgctactcacttcaagcttaggacttcaatctcgaattcgagaaccgagtttggctgtattccccatgcaggaaacccaccagcaccataagcatagtctggggagcaccgaagacgagcaacttctgccacttgcattcccatcacaccttcatcccatccttttataacagagcccttgccaatttggaaagagaaaagttgctgccctggatcctttgtgcttcaaaaatttctcagaccaatctccatttt

SEQ ID NO: 203980 - DNA, 410 bp, Gossypium hirsutum
ggtgaaattcaactttatgattcattaacaaagattttagaacgttacacaaagaattgatggcaaccgtgtaggaaagtagcatttttagtacaatattgagggtttatacagccttaaccctattaaaccctgttacttattttacaagcaattaaattaactatgaaatcgcaacatattaaagccctgaagtgaaaggcacaccggtgctcggcaaccaagaattcccagccagaaagttaccgacggtgaactttgacacctcgcttgcgctcttaagaacatggtagcctccccatttgactctattagaagtggatgaaccggggccagtgttcatatactccgataatacagcgtcttaagtgcaaaattaccatcccattccatccagccggccgggttaa

SEQ ID NO: 203981 - DNA, 379 bp, Gossypium hirsutum
gaaataaagatatagtagaagcaatgaagattatggatagcatcagtatgaagaaccacatcacagactgggaagcatatacccctcatgttctcttcggccattgcaccttcctttgatgcccattggaacccagcgactactgaatccttaatttcattcaggtactgaactcctttacacatatcaaccaccatgttaggacctgtggtctcagggccaaaacaccatatcttcttagcaagatctttgtcccatccatactcctcagccaaaatttttgaacgaaccttgggatcatctcttggaccaatacgaccttcatcaatggcttcagccagaccttcctccaagggtcgagcttccatgtataatcggt

SEQ ID NO: 203982 - DNA, 471 bp, Gossypium hirsutum
cctgttaagtgtaacaaggcaagttgcccttagcatacactgtttaaagcttgaccattagcactagcaaaggacgcttagtcttctcaatttaactcttctgtaccacacaaatgctcacatcaaatgctgctaatttttgttgaggaaagtgatgatgagctcattcacctgctctggtagttgttcttgaacaaagtgattcccttctgacatgaaagtgatgtccagattaggcataaactgcttcactatccctttcttcatgtactcctccattcctgggaatttcataaaatagtccttctcccccattatcagcaatgatggagctgtcacttttggattggttataccataatccaattgagagcacctgtaggggacctgcaatgcggttcggaaaccagaattttgatataaagctgcatagacctcaagatcctcctctgtgaaccatggtggcaatgg

SEQ ID NO: 203983 - DNA, 472 bp, Gossypium hirsutum
  unsure (1)..(472): unsure at all n locations
ttgccctagacggtgcaattggatcattttcagcctggatgcagagcaatggtcttttaacatgttttatcgagtcacaagtgctgcaattatagtaatagtcatccaccgacttgaaaccaaatgaaacccatgttaatccttcatcaaagtccctgacagattttgcattggcagctaaggggatattaaattcaccccccatatcttcaaataggagagcatgcttcttgaatattttacagagggctctagcaagagctttgtcataaacattattaaagcccttgtggaaatcctcatcagcgatgaccaaattgaaaggattgcacaatgacaccgtaccagaaagggggcaagcatgagattctgtaccaagatatcgaacangaatgtttgcacccagagaccaaccaacagcgtatagattagcttctgggtatctagcaccaacatgtctcactacttcata

SEQ ID NO: 203984 - DNA, 411 bp, Gossypium hirsutum
cattcatgactgcatccatggcaaactattgcctgagatggtttctggctaccacactatccaccacactaggtatggtcataactatggccggtacaccatcaggatggatgggatgcttgcaaccctacgtgaccctagtgacgaagaaagcgagacggtcaccgacttaccttcgagctcatcttgacatctcctgcgcgagtcgtaatacattctctctctgatgaatatgttcgcatgtatcatcgaggctgatatcatggcgtagactgcggtgcaacagtaagatcttaaacgatgctacactggtaacactggctctccattaagctacattggtgactattatgggagctcggagctcctgaattcttgagtcataaatcaagaagctgctattggcacttg

SEQ ID NO: 203985 - DNA, 477 bp, Gossypium hirsutum
ttttctgttaataaccacatgaatccattatacctgttgggcatttacattttcccttaacaatttacttccaatacagagaacgaaaatatcaagtttcaacccaaacacaaataaaacatgaaaaagcataacatacagtaaaccatttcaagtctttaacaagcttcaaagaatagaagcttgcataacacggaagcaacaggtaataaaagacatcatacgcacactcaatcacaggtacttcttagtactcatcatcttcaccctcatcaccctcagccgactcagcaccaacttcttcataatccttctccaatgcagcaagatcctcacgagcctctgagaattctccttcttccataccctcaccaacataccagtgaatgaaagcacgtttggcatacataagatcaaacttatggtcaatgcgagagaagacttcagcaacactggtggagttagaaatcatgcaaa

SEQ ID NO: 203986 - DNA, 477 bp, Gossypium hirsutum
agtttatttatttttctggttaaggccaatttcaaaagattcaagcaattaatttaaatattcatattaaacaaaaattcaaaattctgagagctcagtaacatcttaaaatcatagatatttatgagaaaaaaacgaaaatccagtttatttggccaaacaaaccctgaaatttcatcaacggtaactcttctggaaccttgccctagcacctcttccaccgaatttcttcggctcacacctccttggatcagccaccagcaaagtccggtcgtacgtcaccaaaacatccttaatatccttcttgctttgctcgtcgacatacttttggtagaaggcaacgagggctttcgctatgctttgacggatagcgtatatctgagaagtgtgacctccgcctttgactcggattctcatgtcgacgccggcgaaacggtggcggcctaagagaaggatcggttcgacagctttgaatcg

SEQ ID NO: 203987 - DNA, 480 bp, Gossypium hirsutum
gttaactttttttctgtttaaacctaaaaaacaactaaaagcgtttataaaaagcaattatttttacttgtaagcttcccctgcctagtggcgcagctcacatcagcatacgacccacaaacataacaaacttaacacatcaacaataactggacaggtgttcggcacaacacttaaaaccaccgcggaggcgaaggaccaggtgcaaagtggattccttctggatgttgtaatctgcaagggtcctcccatcttcaagttgcttcccagcaaaaatcagcctctgctggtctggtgggattccttccttatcctggatcttggccttaacattatcaatcgtgtctgagctctcaacttccagggtgatggtctttccagtcagggtcttcacgaaaatttgcatcccaccacggagacggagaaccaagtggagggtggactccttctggatgttgtaatctgcaagggtcctcccat

SEQ ID NO: 203988 - DNA, 477 bp, Gossypium hirsutum
agtttatttttttttctgtttgtttagagcatgaaagtgtaatgtatgtatttgcacttgcaatcttatcacagtagctcaaatatatagcgattgtacgaatgaaacattgctttgttttcaaatgaaagcacatatacttaatttataatacatcaacataaaatctccaaagaattatgataagaagaataaaaggattcaagaaatggaaaaggtgaattagcaaatatatgcaaccattagctaacttcaacaagcgcaccctactctctgctcaacttctgaagtagtctctgatatacctcggaaataaatgtcatgttgttcatgttcactggctagtgcagcatttgctacacataaaaatgcttcatcaacgttgtaatcctctttcgctgaagtctcacagtaaggtatatttacccttgaggcacaccaatccctagcttttttcttagaaaccattcggctatt

SEQ ID NO: 203989 - DNA, 478 bp, Gossypium hirsutum
gtttattttttttttctgttgttcttagaccatcagtatccatgtattattaatttaatccttaaaaaacctcaaaataataataataaggttcggcaaattatgtttagaaaatgtaaaatgtctctctttcatgctcagctaatgtgaaagcagaaattttaaatcaataattctaagcttgagcaccaagttcaaggagaagagtgtggctaacagcattggaagatggtccaacaaattgaatgggaccaggactaatgtagcagttcttaagtgcccaatcctccctcacggaagcaaatttcttgaatggagcaccttcaagctctaccattgccttcttgataacaggtttgaatttaccatgcctcctctcgacatccattaacgatgtaagagcagtcccttcgacagtccattcttcaaccggtgctcccaagtttcctaccgatgatatcaacccagtttttccact

SEQ ID NO: 203990 - DNA, 482 bp, Gossypium hirsutum
ctcagtttttttttgtttccgtttgggacatcacactgttgtgactattcatggtaaaacacattttcctgttcatggacattatgaggtaatgatcaattttcaaactgatgataaatatcacaaaatcttactttgtgtaaattcagaaatctcaacaacaaaacaccatatccaacttaagatgcagcaacagctgccttcttccttggaattgcttgagtgccttctctaaaaccagttttgaaccttcgctgcagatgacggacgtacctcatgcggcctgtcccactcgtctttcttctaatagccttcacactccagctatattttcggatgctgctgccatggtagccacaagcactgcaacggctcttctggacatggaagctacggcgcccacatcgaacgcaaagtgtgtgggtcttattccttcgctttccaaagctttcagttccttttcccatttcttttgtcggagc

SEQ ID NO: 203991 - DNA, 464 bp, Gossypium hirsutum
ttttctgtgaagtataaagacaatgtatatatgagtgtttattagaagcattgcatgatcttatgattatatcatggaggcccgaccttacacaattcttaatagcatcgtcatagaagcagatcaaggatggatacgtgataatagaggattgcggtgacaatttcatattgttatgccttgatgacaatggccatgggtgctgctacttgtttacctgctaacttgatcatttctgcgaatatgttgcacgaaaatagcgcatacttcttgttgtactccttgattttcacttttaagactcggtactccaattccacatccctattatcagggtcgatctccatggctttattgatatcagccttctgccaaatccaagtcaacatgttgcatatacgctagagctcttctgtagagtgctttcacaatgccgctatcaagctccaataccttagttcaca

SEQ ID NO: 203992 - DNA, 475 bp, Gossypium hirsutum
  unsure (1)..(475): unsure at all n locations
tcatcggacaaattcatttcagattccatgaaaatggcaatcatcatttgcttaacttcttctcgctcaataaaacctgtttgtcgcangtcatacaatctaaatgcaaaatcaattttatcttctaaaggggcacatggatgaaacacgttcagtgcatggacaaattcctcaaattcgatgacaccatttctcttttcatcaaaaagatcaaaaaccctgtcaagaaagagattgctgcctatgggtgtctggaacaaggctaactgaagctcttccttgtgaattaatccatcatcgattattgagctactcagcttcttgaagagttcgtacaatgcctctatttcattcaccgaaaatcgggattcatgagcgagccgggtaagatcagtgaactcatagatgcatttcttgggtcggngccggtatccaaagcaattagacgttgcataaatcaagaaatcgatcacta

SEQ ID NO: 203993 - DNA, 469 bp, Gossypium hirsutum
tataagattattatcagtttggccattaatggactgaagaatgcagttaaagtttatttaggattgccaaaggcaaagtgaagcctcttagcaaacctgtcattgaaagcatattcaagacgcagaagtcctaaaggcgagttcagtcggatgccaatcccgtatccgtatccactcccacacttattcctcgcaccggctggattccctggcacattggggcctgaccatagatcatgtccataatcagaaaaaataactccttccacaggccctagcatttttaaagaaacttcactggagccaactacgtaagatcgaccagagcctaaggcaccttctttataacctctcacgctgttcgttcccccaatagcaaaagcttcatgaagaggaaaattacccactacatgtccacccgacaatcttagaagaagacaggcaggaccaagtttaacacttttactcg

SEQ ID NO: 203994 - DNA, 478 bp, Gossypium hirsutum
  unsure (1)..(478): unsure at all n locations
tcgagttnttttacgtgtctgtttttgagaataaaaatggtattccattaatgatacacttcgtttatgaaatttcaacattctacacaggacgagagttactgatcgaactcaatttaagttttctaacatacgacaagaattaatggcacaacgcaaagccttttacatcttcattatgatggtcaaattccaattatgttttagctgggggaaaaacaatgttcaacacaactattcatctgaaactgaaatcagtaggcatgaatcaaactgacccggacttcatatgtaatccatcgacatttatgctactgcacgcatgttcttgaaccatggatccagtgtcttaccaattgagtacactatgaaaccaatctccctcagctcattcacgttcacgatgttccttgcatcgaaaacaaaagcctgcttttgcatgttgactgatatcctcttgaagtcaagtttcttgaat

SEQ ID NO: 203995 - DNA, 374 bp, Gossypium hirsutum
  unsure (1)..(374): unsure at all n locations
gccaactactctcaaatctattgcagtccatatagtcttgaacaaagcttanaaaatcgggtgctcacaatanaataagggaagcacacgataaaaggaaacaaatcattgggtagcaaaatgcaagccctccactcaaacattacttatttagtactcatcttcaccttcctcatcaccctcgcctgactcagcaccgacttcttcataatccttctcaagtgcagcaaggtcctcacgagcttccgagaattctccttcttccataccctcacccacgtaccagtgaacaaaggcacgcttggcatacatgagatcaaacttgtggtcaatgcgggagaacacctcagcaacgctggttgagttggaaatca

SEQ ID NO: 203996 - DNA, 408 bp, Gossypium hirsutum
  unsure (1)..(408): unsure at all n locations
aaggcattgatcatataatacacaaaattttaatgaatacaaacatagatatacgtattacatgtctattttcggatatagtatgcattactctctcaaatanaaaccaaaaaaagcaaactcgtgaaagggaaaaatagggaaaagacactttcattactcattacatacaaatccactcgaatcacatacctgtatatgctgcattaccgacaacttcgtttggttttcgctttcatcacatgtgttcttcatccaaatcttcctcatcctcatattcgccttcctcggcagcggtagcgtcctggtattgttgatactcggacacgagatcgttcatgttgctctcagcctcggtgaactccatctcgtccataccttcaccggtgtaccaatgcaagaaagctt

SEQ ID NO: 203997 - DNA, 334 bp, Gossypium hirsutum
aaaggaaaaagcatctactttaacattaatcatgaaaacaatcaaccttcaacttaatcgttttagacagccttgaagatgcgtcatgagttcataactcagtttccaaatcaaacataaagatgcatcagattttcatttcaactcctagtggggtcatcgatgttcttctcgtaccataaaatgtttccacaaagcataaaatgatggcgacgtctaccatgatcctacagcaccctgagtaggattctcaaaaacagagaactcccagtaggtctttaacgaatatggcggggaaatcgtcatgccttcttaagtgatcttagctatctga

SEQ ID NO: 203998 - DNA, 402 bp, Gossypium hirsutum
  unsure (1)..(402): unsure at all n locations
aacacgaactaatgcattanaaataaaatctttaaattccacaaaacttttaggaactacagtcgcgtacgtgattattacaaatttcgtactctttataaaaacttctctcaacctccaaaatagatcaaggatccttgcacataaactaaaatctcagaccgctaaatcaacaaatatcatgtctagttcattctcctaattagctcgttgatgtaattttcgcggttgccagcatctcctccttcaacatagtggattctcttcttcttcagacctcccaatggtgcctttatcttaaatggccaaagaaagttgttggcctccttaaaatgaagccccacactcattatctcatggatgacatctttcacacataatactccaaacttgcccaaaacc

SEQ ID NO: 203999 - DNA, 402 bp, Gossypium hirsutum
  unsure (1)..(402): unsure at all n locations
accacaaaagttcatcaacattccaatcctaactttatttctatcaaataatttacccaaaaaanagcaggagatcacagcaaagccatatcaaaggaaaataactttacagtcaaagctactttgtatttctaaaataagacccacatattttatcttacttttctaagtgctcccgccagggtagatgcaattactataagtaggattttgggatgttagtgttgccgtctgcgagaaatcacagttccacggattcttggcggaattctggtaataaaggttcatggcataagcaccctgagatgctatggtatttggttctaaacaagcacctcccggttggatgggacttcaatcgatgccttggccacatgcataatctaaactcgaatgcaattt

SEQ ID NO: 204000 - DNA, 406 bp, Gossypium hirsutum
aaaaaaccgtttacttaaggtgtacttgaaattacttataagatgaatcaacaagcaatacaagaacgtatactctgtaagctgtgaggacaaaactaaagtcgacacaatcaacaacacagtgatccaaagacccaaaacaggcagtgagaaattgcaccaacacactccacaagcccaatccaaaacacaacaaaaaacatccaaattattccattagattttaagcctctgcctcgtattcctcctcttcctcgtactcttcatcatctgcagttgcatcctggtattgttggtactcagaaaccaagtcattcatgttactctccgcttctgtgaactccatctcatccatcccttctccagtataccaatgcaagaaagctttcctacggaacatggcagt

SEQ ID NO: 204001 - DNA, 401 bp, Gossypium hirsutum
  unsure (1)..(401): unsure at all n locations
aaagncgttgaatccaaattttatagaagcaatcttgaatttcagaaaccctaaaattccccaataaaaagaaatccgcctgtacaaaaacatgattgggtgtaaatgtaaaggggcccgggggtggggggtaccggggaaaaaaagaatatggaaaagggatcacatccaagctccccatccaggaaacatctgacataatctctcaggatcaatggcatattgaatcagttgctgaacctgcccgtggacacttctcatttcaccttcttcatatccatctaacttttgttttacacgcaggagagcacgtgcagcatccttattaccttcataatcatcttgggaaccttctatgcttgtatccaaatcgtaatctgtttccttttgacgctgcaaag

SEQ ID NO: 204002 - DNA, 420 bp, Gossypium hirsutum
  unsure (1)..(420): unsure at all n locations
tgaggacttatggcgtaacgagcagttttgggtcattggtggcgtttcagcccatctctttgccggcttgcatggtttccttaagatgcttgcggncattgacaccaactttactgtcactgccaaagcagctgatgatgcagattttggtgagctctacattgtgaaatggactacacttctaatccctccaacaacactcctcatcgtcaacatggttggtgtcgttgccggattctccgatgccctcaacaaagggtacgaagcttgtggaccactctttggcaaagtgttcttttccttctgggtcatcctccatctttatccattcctcaaaggtcttatgggacgccaaaacaggacaccaaccattgttgtcctttggtcagtgttgttggcttttggcttctctcttgtttg

SEQ ID NO: 204003 - DNA, 358 bp, Gossypium hirsutum
  unsure (1)..(358): unsure at all n locations
actttttcnangnttntaattatacattttatttttaggacttattgagggcttctgctgagggttatataaaaggaactgatggtatttcctataaagcagtgctagaggatgcaacaacagtggtagtgaagaggttgaaggaggttagtgttgggaagcgttagtttgagcaacaaatggaggttgttggaagcattcggcatccaaatgtcatctagctgaaagcatattactactcaaaagatgaaaggctgatggtttatgattattacagtcagggaagcgtttcttccattttacatggtaaaaaaggagagactagaacccctctaaattgggataccagaatgaaaat

SEQ ID NO: 204004 - DNA, 282 bp, Gossypium hirsutum
  unsure (1)..(282): unsure at all n locations
acacanaaaacggcatttattaattattaccataactttatatcttatactatatcacactttatttggcgggtttcacacaaaccagggccctcaacaataattttatccttcccaaacaactatattactccctttctacatttcactcctttactcatcctccccaactccattttcaaatccttcttctcacattcaatccaaattctcacttctcacctcataatttatcatcccaaaaccattataatattccaattcttttaattttattattca

SEQ ID NO: 204005 - DNA, 338 bp, Gossypium hirsutum
  unsure (1)..(338): unsure at all n locations
aaaatattgctcattgaaaaagaaaaagatatagaataagcattcgaatgagtacagccatnagcaacttttctctcttcaagcatgaaaaaaaacattactacattccatacaagaataaaacagaacatcagccggcagttcctcttattataaatactaatttttctagtagctcaattgttgggaatggctagtctatgggagcattctattgaagcttccccaaaagtggatgtcctggatagtgaccgtatggtggctcatgtgccggaggctcataaactggtggtttaagttttggcttttcttcctttggtggttcataaaccggtggc

SEQ ID NO: 204006 - DNA, 407 bp, Gossypium hirsutum
  unsure (1)..(407): unsure at all n locations
aaaccacaaactcatctcaaccataancttattaaatgaaacgattggctcctttcatgaatagacatataaatgttattgtcagatgccatttcaagatgcaggcatcgaaatgacaccggcaaataggaaaaataaaaacaaaattcaattagcaagagggttcttaacaatcagaaacttgaaaacaacagtggagaggagatcaggaaagtggaatagctttatttaaattcaggcttttctgggtatgtgcatccagacctttggatgataacgttggatgcatagcaaccagcccttacgcaatcctcaatggacttcccttgaaccaattgtgaaagaaagcctccaacaaaggcatcacctgcaccatttgtatcaacaagcttttccttgggtaacaa

SEQ ID NO: 204007 - DNA, 354 bp, Gossypium hirsutum
  unsure (1)..(354): unsure at all n locations
aagaaaaaaaaatacaatcttatacccattttctttacaaaatcaattacacacaanattttcgttttttaatttcatgatggacaccaatatatattttcaaggatataacaacttttaaaagacaagttcattccatgtgtcttgaaggcctgacaaacaccaatgtacgcaatcatcataactaactgtattggctagctgctccactcttaatggactccattgcttcttataaatcgatgtctgtgcgtcttttcaataacttgacacttgactgatgtcgataaatgtgacgtgaaacttctatttactgaactcttcttcaatcaccttcattatgcttttcctact

SEQ ID NO: 204008 - DNA, 386 bp, Gossypium hirsutum
  unsure (1)..(386): unsure at all n locations
aagcaagaaaaaggagcanatatactgataaaatgattgctttctattgtcaaaacataagctaaagtttgagcacttgtatcaaatcgggcaccaagtttattttaatggaaatatactcttagaacttttgaccatttgaaagaagccatcatcacctttacaacctgggtacaacacgaggttcgtcccaatcggcaacaatgtggtttcgtgtgatctcctttagtgagcggcaaccacttaatgccatagtcagctcaaattcatcgcgtagcatctgaagcactttcctaacaccaacttccccttccgcagccaatgaaaacactactggccttccaataaatattcccgatgcacccagagctaatgccttgaagaca

SEQ ID NO: 204009 - DNA, 463 bp, Gossypium hirsutum
  unsure (1)..(463): unsure at all n locations
aggaggaaaaccgtccgcccgagctgaacagaatatgctgccgatgctgatcgatttgtttgtgacttgtcaatatatgcataccgttcgttacctttccagtacagagactatccnatttgtgcaagtatgcgaccagctatcacctagtgcaagagctaattgaaaggaggcttctgtatgcttagtggtcacctgattcaataaaacaaccgccaagctgaatcttttggccaggttcattaactttaaagccattccactgaggacccgggtcctaagggccatatcatcaaaatcttggcggaaatggaatgtaacactattcacaacaatcacctttacatctttatgttctgaaaggaacttgtctaaataatttatcagggccaattgctctttataactacaaatgcggaaaataaaatattttttcaggatattcctgagcacaattttattt

SEQ ID NO: 204010 - DNA, 446 bp, Gossypium hirsutum
  unsure (1)..(446): unsure at all n locations
gacttgttaattncaccgagtttgttgtttctgcactacatgtgaatcaaatggaagagcatgattgcaataagtggcgagatgcggttacaggctgctttcgagaaatttgatgtagatagagatggatatataactccggaggaactacgaatgcatacgggattaagaggttccatcgaccctttacttgaggaggctgacattgacaaagatggaaaaataagcctttcagaattccgacggcttttacgaactgctagcatgggttcacggaacgtatctagtccatccggtaatcggaatactcagaagttgttgattaaaaaatgaaaacgagagcaagaaaaatggagcatttccccgattnttgtgcttgcctggtatctataccggaccccgagcgtgtctacatctaccagtcaccaagcattgtaggacccttt

SEQ ID NO: 204011 - DNA, 333 bp, Gossypium hirsutum
gaatgatatgtaagcttaatttaattcaataacaaccattgctgattttaacgaggaacggcgaggcatcatcccatctacgagcccatatatgtatttccatatgtaagcttctacacaaaacttcaagaattttaaagaaaaaatttagtacaattgaggaggcctggtgaggcagtgaatttcaaataacacttgcatcagcatcaccacggtttcaagtccccaactggtcctgctgtccagttcaaaatcttttcaccaggcttcaagtatatactcttctgatgtggcaatttacgagctagcccattcaatatttgatggaaagca

SEQ ID NO: 204012 - DNA, 448 bp, Gossypium hirsutum
  unsure (1)..(448): unsure at all n locations
aaaaacataagcatgatttgattctcgaatgaaaattacaagacaagtaacagttgttcataatctgcaaactctgaataaataaataaaaacccatataattcaaaacaccacaaatgggtaacacttaatgactggccgatggattagtcagcaattcaagtgatttctttaagtgctcaactgccgtcgacacttcatcaaatgctaaggccccaaccgcaaaccgagcagccttgtgcgcctcagcgattttctccggtggcggttggtaattgctgtcgtattggtatttctcagaagtaggtggtgaaggttccgcgattttcccgtttctgctacttgaagagtattgagcggttgttgatgaatagcttgttgtcggaagagctgactggggaggaatgtaaggagtctcgnaaccttgataggatgatggatagtgaga

SEQ ID NO: 204013 - DNA, 365 bp, Gossypium hirsutum
  unsure (1)..(365): unsure at all n locations
aaccttnttaagaaaaaaaaaagggaaatttattaatttatcatcatcatcatcgtggggaagtacataaagcagtacaggggagatcatcaacgtcatccaacggtggaaaattgagatcaaaaggcaacattctccgacgtgaagatgatgcgataaccccatcatcaactaccgacgacgacgaatcgcagtcgctgtgacaatcctccggcgccaaaggcggagtcctcggacgatacttcctggtcgaaaccgccgcgaaatccgtcgacttctgtggcggtagttgagccggtctcggcccactaaaagattccaccgtgctactcatgctacttcttgtcggtctttgcgggttcact

SEQ ID NO: 204014 - DNA, 375 bp, Gossypium hirsutum
  unsure (1)..(375): unsure at all n locations
ggagaaaagagaaaaaaacaatgtcaggtcctcagtttctttcgaatccaccaacattggattctncaggtngttcttgtcacgttgagaatcttgctggtctcaacacttatgtttctgggtctcttcaatctaagcttgctgtttttcttatctctgatattttcggatatgaggctccaaactttataaaactcgcggacaaggttgcagcctctgggttctatgtggtggctcctgacttcttttatggagaaccctatgaccctaataaccctgatagacctttatctgtttggataaaggatcatggaccggataaaggttatgaagatgcaaaacttgtaattgactctttgaaaagaaaggattttc

SEQ ID NO: 204015 - DNA, 445 bp, Gossypium hirsutum
gcaaaaagccttgtctattttcaaaggtaattaagataacattacagtggacaaattacaattgtgagtttaaatataaaaccataaataaaaataaaggggaaaaaaatgataacaaaggtgaagatacctttggaaatttctcagcacaactttatgacagcaaaatttgttcattattgctacaaattgtaagtggctgagattatgacaattttttggacccactaatttaataataataataataataataattataatgtactcccccaaaaaatctttaattaattaattaattaatttttcttcccctcttcaccgccttcttccaagtaagccttctttctcctatcaacaccagcaaacaaacaaatcacaaggaaaaacgtggcgtacatcccatggacctttcaattagtcttaggcggttgatgcaaaaaca

SEQ ID NO: 204016 - DNA, 415 bp, Gossypium hirsutum
aaaaaacatctctttctttcattcttttataaacaaaaaaaaaagttttggatccccaacatggcagatcttattaagctgtagggggctcacaaatgaggccgaatccaaaggggaagagtggatcataatgtggatccccaacattcatcggcagttgatcaactgttttaaaccaagtacgaggaagcttgcctgaaaaaccatagtcaccaaatagaacatcagccacaccatgaccctcgcttcctggcaaccatgccgcaaccagagcatccacggagtcaatatcaggttctatcacaacggggcgacccgacattaagatgacaacacatttcaaagctccacatacatttctgattgtgggtggaccgggttctggaatcgcaagattcatgctgccaccttttgt

SEQ ID NO: 204017 - DNA, 335 bp, Gossypium hirsutum
ggttcgatcttttaaaacaagcataaaatgtaggcaggggcgataataatagtccaaatgcattcaattgatactaatacagaagtaaaatgaagtttatttatgcaaggatttgctcaagaggcttggtttccagttcgggcttcttggtcgactccatctgctgctccttggccagtttctttagcatggcaagctcaagatccttgctcatcttcctcctgtacatctcagcaaatgtgatgggctcctcaagtataggtttctctccttctcttatcttcaggggatacactgttgcatcgggtgctgggttttggaatgtggctattgac

SEQ ID NO: 204018 - DNA, 367 bp, Gossypium hirsutum
attttattaatagattgcaaaaaattgactgaacaaataaaaacaaaatgggggctaatctttgactcaaacagccccacggacaccttatatgtgtgaataacgatggaacttctaacattatgagtaccatctgaccatatcaatgttccagacaccattgatgtctcacccaaagctttgccagaaacaataacattgtaagacttctgttctgttagagacttgaaagacaagacttgaggaaccactttgatttcgggttccgacagggtagtgattgtcgcattgtaagtagatcttgctataccaacatttgttactgttctatggaaattaacaatgaatggcttgcctgctggtacta

SEQ ID NO: 204019 - DNA, 397 bp, Gossypium hirsutum
gcgaatagccaagtctaaagaacaattatatttggttctcctcaaaatccgggaaaattattcagaggtgggagaaatatcaactggctgcagctgcaattattccagttacaaaaacaacactaacaatgccctcaaagtccaaggcaaggaaaagcaaaattctgtaacaaaccttcggcattatctaataaaattataaaacttacgaaaacccaaaggaacgctaccaattcttaaccgataagcagtttgctctcatccaagaaggtgtaagtgggtacttccaggttgtatggtgctggacccttgcgaatcctgccagagacatcataatgggaaccatggcaagggcaaaaccatccaccataatcaccagcatttggcaagggaatgc

SEQ ID NO: 204020 - DNA, 406 bp, Gossypium hirsutum
aaaaaatgtaaccttacctctcataaaacctaaaattaagttgcatcattaattataagtatagggcaagtaaaattctttcctaataaaagctcctaccacacccaacattatatttacatgcaaattatcattagatactaaatcccactctcttatttttataagagtaatacttagcactgcatattatacataccaaaggggtttaaatgttgaacagtgattactttatgcagcctctgcaaatccaatgtgcatgtttccatagtcgaaaaccgtatggaacttgcccataaacacgtcgcccaagatccagagtggtccgcgaggcggtggtacatcaagagcaccgaatccgctaatgcattgagctagctctccgtcaccaacttttagaatgtac

SEQ ID NO: 204021 - DNA, 268 bp, Gossypium hirsutum
ataaatcggcatatttttcaacccacaactctggaattttaagatcgatatttattctggagctatcgctattttggcttccactagctggtgaactttccatgccaaaacttcacttgacgctgttgcagtcagtgctagggctgatcttgtaagggatgttgacaccgcacttgcctgggagtccgcttgcaataccatagttgatgccagaaatgccggcggccgcacttttgatgcatttgcaagctgcttgccggtctggtgt

SEQ ID NO: 204022 - DNA, 399 bp, Gossypium hirsutum
gcatcgatggaatttgcaactttttattgaattttcatacaagtttgaaaacaaaagtaatgaggggttggattcgtgaatcgaagtgtgtttctaatgacaacaaaagatacttcaaaatgaatatattcgcccccaaataaaaaaagcgaatgatggtgaaagtttttttttttctcccatttaaaattctaccaaaattagtacagtattatctcatttcactaaacacttaacagtatcaatcttttttccgtggcagcagccatcgaagatgtttgttttagagttcatcatgtgaatcatcctcttcttcatttgatgcagcactgccgggccctccaccagatctttgatatacagccgtgatgataggaatgcaaacaggctcaacttttt

SEQ ID NO: 204023 - DNA, 407 bp, Gossypium hirsutum
  unsure (1)..(407): unsure at all n locations
ctcaccaaaactcttctctatgtctatcctcttcctttttgccctcttctccatgcaaatccatgctagagagtacttcagcaaattcccaagagttaacatcaatgagaaagagacaacaaccagagagcaaaagcacgagaccttcgttccccagaccacccaaaagccagaagaacaagagccaaggttcattcctgaaacccaaaatggttatggcctttacggccacgagtcaggctcaggctcaggctcaggctcaggctcaagccggcccagtttcaccaccaaagaaacctatgaaccctatgtcacccctgttagattccaccctgatgagccctataacagcatccccgaatcctccaacantaaagacacttactactacaacaagaattgctacg

SEQ ID NO: 204024 - DNA, 402 bp, Gossypium hirsutum
gagaaactcaacaacgccactattcttgaacaacttggagccaggctttcctttcgcactattacggatacgaaaataatggaaaaagttggattcaattgtcaactgctcctatcggaaatacgattgactacggattcgagccatatacacatggtttcataaaaccgtacgattctcccgatctaaatcaagcaggttttacatgaacaacgtttgcctcaacatgttctattcgatactagtatgacaagcggtattcttacaaaaatagacaaatcagaagcaagttaagatcacaccgatcagccccttcttcttgcgccaaagatcctaccatttccgaaggaactggagttacatcccttttcagtttcattcaagagttcctatgggtttcca

SEQ ID NO: 204025 - DNA, 422 bp, Gossypium hirsutum
gttcatcaaatgtgtcactgttggtgacggtgccgtcggcaagacttgcatgctcatctcctacaccagcaatactttccctactgattatgtgccaactgtctttgacaactttagcgcaaatgtggttgtggacggcaacactgttaatcttggattgtgggatactgctggccaggaagactacaatagattaagacctttgagctatcgtggagcagatgtcttcttgttggcattctctctcattagcacagccagctacgaaaatgtttctaagaaatggattccggagttgaggcattatgcacctggtgttccaattaatcttgttggggacaagcttgatcttcgggatgataagcagttcttcgtagattaccctggagcagtgcccattaccacagcccagggggaggaat

SEQ ID NO: 204026 - DNA, 397 bp, Gossypium hirsutum
tctgtttgagatcaagaaagtaagtgacatcgaaccgtcgttaaaacgacaactgcttatctccaccgttctcatgactgccgggattgctgtcgttagcttctttgcattgccgtcagaattcactctcttcaattttggaactgaaaaggaagtgaagaattggcacttgttcttctgtgttgctatcggattgtgggctggactcattatcggttatactacagaatattatactagcaatgcttacagtccggtgcaggatgtagcagatgcttgcaggacaggagctgcaacaaatgtgatttttgggttggctctgggatacaaatcggtcattatccccatatttgccattgccatcgctatttacgtgagctttagcttgggtgcaatg

SEQ ID NO: 204027 - DNA, 419 bp, Gossypium hirsutum
acaacacaagctctttgtgatctggcccttcgatttggtgaaggagatgaagaatcgatgtcccggccgtttggtgtatcacttctcattgctggtcatgatgagaacgggcctagcttatactatactgatccatctggcacattttggcaatgcaatgcaaaagctataggctctggttctgaaggtgcagatagctctttgcaagagcaatacaacaaggacctaactcttcaagaagctgaaacaattgctctgtccattttaaagcaagtaatggaagaaaaggtgactcccaacaatgttgatattgccaaagtagcaccgatataccatctgtacaccccttcagaggtggaagcagtcatcagtcggctatgagagaaatgctttgttatacactatcatcccatgcagca

SEQ ID NO: 204028 - DNA, 377 bp, Gossypium hirsutum
aatttcttgtttacgaatatatacccaatggaagcgtttccagtcacttgtacggagttggtcaagtctcatcgcacaatatatgattcaagcatagacgttcactagctctaggtgcaacgaaaggcttggctcaactccactctttaagtcctcgattggtacagatatatttcaaaccggcaaatgttcttgtagatgaaaattttacagcaaacgctgcggttgcatgactgcgtaattttctgggaataattgatgttgctgggccttcttcgcaagtgacagcagatgagatatttcttgctcctgaggtgagggagtttagacgtttttccgacaaaagtgatgtgtatagtttcggcataatccttttg

SEQ ID NO: 204029 - DNA, 379 bp, Gossypium hirsutum
ctgtagtgaagatttagagcccagtatgattgaatgtaagaaatgggaaccgtcttgggaggacatagagggtgaatactggaggatagttgagcaggggaaagatgaggttgaggtatattatggagctgacttggaaacaggaacatttggcagtggctttcctaagttgtcttctgtgttgactggaaatgatgcagataaatatgcaacgtcaggttggaacctaaataatttcccacgcctacaaggttcagtgttatcctttgaacgatgcgatatatctggagttctagtgccatggctctatgtcgggatgtgcttcccatcattttgtcggcatgtttaagaccaccatctgttttccctaaactatatg

SEQ ID NO: 204030 - DNA, 327 bp, Gossypium hirsutum
ccaaggcacccatggttgaaaacaagatcagagaagaaataaagagacacttatcattgaaacaagtgcagggaatcttgcaaatgcgatccaactacgacgagttgagtaagctaacatatcttcatgcagcgttgtgcgataccctaacgctatatccaccgattccgatcgaattaagaacatgtataaagcacgactttcttccgagcggtcatcgggtggatcagaacaccctaatcataatcggaatacatgcaatgggaacgatggaaagctcattgggagaagattgctatcagttcaagccagaaacatggattactc

SEQ ID NO: 204031 - DNA, 437 bp, Gossypium hirsutum
  unsure (1)..(437): unsure at all n locations
aacatcaggcctaattctctaaggaagtttggagaaactgccgagaaatgtttagctgattttggtgtcgacaggccctccatgggagatgttttatggaacctggagtatgctcttcaacttcaggaggccgttgttcaaggcgatctcgaagaaaacagtacaaacatgattggtgagctttctccacaaatcaacaatttcagtcagcttgatcccactggttcagcaaaatttgaggtgtcaagtgtggatgacctctccggtgtttcaatgagtaaagtgttctcacagctggtgaagtcttaacgaaggtgatttccaacggaccgaaaatccaatgaattaagtctctcttttgacaatgcatacactgttttatccgatccaatacagcttgccanattttgagtagataaactgtctttcctttcctt

SEQ ID NO: 204032 - DNA, 426 bp, Gossypium hirsutum
atagcagtaatgttaaccagagtttgagagccgaaactccggttccagttccagttccggcaaagtctaatgagctagaaagtccgaaacaggtggatggtactgttgttcatgaagtcaagctgccatccaggagacttgtgattgttgttacaccaaccagcacaaaagatcagtttcaaggtgtgttcttgaggaggctagcgaatactattcggctggttcctcaaccattgttgtggatcgtcgtggaagggcaatcggattcgaacgagctatccgaaatacttaggaaaacacgcattatgtataggcatttggtgttcaaggagaatttcacagatcctgaagcagagctaaatcatcaacgaaatgttgcattgaagcacattgagcaacacaagctgagtgggaaagttcatttcg

SEQ ID NO: 204033 - DNA, 414 bp, Gossypium hirsutum
cgaggaagaaggcaaagcacagccaaaatgtcgtcgtttttgcaatcacttttggatccgaagaagagctggttagcttctttgcatatgagggcccttaccacacgcctccgcaaatacggccttcgttacgacgatctgtacgatccttactatgacttggatatcaaggaggcgttgaatcggctgccccgtgagattgtcgatgctcgtaaccaacgccttaagcgtgcaatggatctctccatgaagcacgagtatctcccagaagatcttcagaaaatgcagacaccatttaggagctatcttcaagatatgcttgctcttgtgaagaacgagagagcagagcgagaagcattgggagctttgcctctgtatcagcgaaccattccttaagggttttcatgccgtatc

SEQ ID NO: 204034 - DNA, 249 bp, Gossypium hirsutum
ggactatttattaaggacctctgtgtagctctccctaacgtactaggcttcatcttggggatgctccagatgcttctctacgccatttacagacacagtgaaaaggttaacatagaggacaagaagctaccagctgaataaatgaacagcatcaatgtcgtccttaccacattacgtgcctctgaagttcaccccgtagttttggacattcacactgatgatacaaaggacagatgattataacaacaa

SEQ ID NO: 204035 - DNA, 320 bp, Gossypium hirsutum
gacgaacaaaatcccaaggcaaatcccagagcaagcttggtatatgaacccgacattctctattctgatcggaggaatacttccatttggagctgttttcatcgagctgttcttcattctcacctcaatctggctgaaccagttctactacatctttggtttcctgttcttggtattcattatcctccttatcacttgtgctgaaataaccattgtgctttgctacttccaattatgcagtgaagattatttgtggtggtggagatcatatctcacatccggctcctcggctttgtaccccttcctctacgctacatttt

SEQ ID NO: 204036 - DNA, 238 bp, Gossypium hirsutum
caggcgctctcttgacattgagcgacccacttacaccaatcttaaccgtcttgtctcccaggtgatctcctctttgactgcttcacttaggttcgatggtgccgtgaacgtggatgtaacagaattccagaccaacttggtcccttacccaagaatacacttcatgctttcttcatacgctccagtcatctctgctgagaacgcttaccatgaacacctatcagttgctgaaatcacc

SEQ ID NO: 204037 - DNA, 170 bp, Gossypium hirsutum
taaagctgttattgctactaacattatgtatgtggctggacaatatccaaggtttttaagggcgcactggaagttccctaaaactgttgtggggtaaggtgttcgaattcatgcatgaaacacatccaggagttcacgatatggtctgtcactacattcctgaacattgt

SEQ ID NO: 204038 - DNA, 407 bp, Gossypium hirsutum
gacggaccagctgagcgaacctggcgcgccggagcaaatcatatattaccatataatcccagagtaccagacggaggaaagtatgtacaatggggtgaggagatttgggaaagtgtcgtacgatacattgaggttgccgcataaagtgttggctcaagaagctgatgggtctgtcagattcgggcacagcgatggatctgcgtatttgttcgatcccgacatttataccgacggcaggatctccgttcagggtatccacggcgtccttttcccgccggaagagaaagctaatgaataaaacaaccccatcaaagttgccaccgtgaaatccagaagagggaacttgcttgcagctgcattccgaatgcctgtggctatctggcaagattcacgtttcacccctttcc

SEQ ID NO: 204039 - DNA, 201 bp, Gossypium hirsutum
ttcagacctgggccatggagaataacatcatatttgccatctggaggcccatttgttcgaatggatacccatgtttatcctgattatctagggcctcggggctattattcagtacttggacagcttatcctatgggctccaaccacggaacacgcaattgaccgcatcaacacggttcttgatgacactgttattacacgg

SEQ ID NO: 204040 - DNA, 429 bp, Gossypium hirsutum
ggcaattagcgtgtgatttcaaccaaacgtcaatgcaatccacgtggaaggcatgcgagcaaactgggagtgttcgaacgtattcattgtcgtcgaacgccaatagacatacggcacagtctttggggctgttgttgggtctattttttgaagtatagagggaaagcggcagggttttgatggcagagtcatcaagaccgtaaggggaaagagggagatcgaagggatcagaaggtggaagagagtcaaggtcggtcgtggtggatggaaggaagcgacgacggcggcggcggcggcggaagaagctcagtagacggagaattacagggacgagccgttttgagatgagacgccaatacgtaacgactaaaaatgctgcagcaactactaccaccattgcgataaacggttggctgaagtcaactggaa

SEQ ID NO: 204041 - DNA, 353 bp, Gossypium hirsutum
gaaaagcctaaagggcacgagaaacataaagttgaatatccgaaaatacacgagtacaaagaaaaacaagatgagggtaaggaacataaacatgagttcccaaagcatgaaaaagaagtggagaaaaaacccgagaaaaaggccgagtaccctgagtgggctaaaatgcctgaatggccgaagtccatgtttattcaatctggctcggtcactaagccttgaaccatatgacactggtgcatgtgccatcatcatgcagtaatttcatgatatatagtaattatatagttaataaaaaagatggtgagcgggaactgtgtgtgcgcattcctccatgcaccaatggtgaatct

SEQ ID NO: 204042 - DNA, 246 bp, Gossypium hirsutum
gcacctccccgtaagcaaaccacaaaggaaagcttgtagagagacccaaaaacaatgtctaatgaagttactgaagaacgacagggtcgtaaggactatgtggaccctccaccggcacctccgattgacatggctgaactcaagtcatggtctttttacacagccctcatagctgagttcatagccactctcctcttcctctatgtcaccgttgctcctgttattggtcacaagaatcaacaagat

SEQ ID NO: 204043 - DNA, 347 bp, Gossypium hirsutum
aaaaatcgagacaagtagcagagaatcagcgccacccatacaatacatagtctttgatccacctaaagcttttccttagagaccctttcatcgggccgggaaccgcgtaaaccttgtaaccagcaacccttttcttcctctgcagctccggatcattgaagctccatgattttgaagaagacccaaaagtgcttttgcttttcttcatcttaatttccttgcccagctgatttggtggttgaacagagttgggataattggcactgtagcactcgaggtcctgcatgttccctggccctccttctttagcttgatagcagtagctatccatctggatctcaccatcc

SEQ ID NO: 204044 - DNA, 418 bp, Gossypium hirsutum
ctgatgcttcaaatgcatggagaactgctgcatgggtcagaattccgtaccctttacagtggggtgtccctatcttccatttccggacgtcggtgatgaggatcattgtgtcacttgttgcatcggtagattcggtcggaacatatcactctgcctctttgctagtcagttcgaagcctccaactcctggagtagttagcagaggcattgctttggaaggtttctgtagcctgcttgctggaatttggggttcgggtactggctcaacaactttgacagagaatacacatacgatacacataacaaagatggcaagccgaatagctttggtatttggggcacttttcttgatcctctcctcacttgtaggaaaagtgggtgcaattcgtgcttcaataccactgtccttggctgctgc

SEQ ID NO: 204045 - DNA, 382 bp, Gossypium hirsutum
tcgattcacatcggtcaggccggtatccaggtcggaaacgcctgctgggagctttactgcctcgagcatggaatccagcctgatggtcagatgccaagtgacaaaactgtcggaggaggtgatgatgcttttaacacctttttcagtgaaactggtgctgggaagcacgtccctcgtgccgtctttgtggatcttgaacccactgttattgatgaagtgagaactggtgcttaccgccagctcttccacccagaacaactcatcagcggcaaggaagacgcagctaacaactttgcccgtggtcactacactattggcaaggagattgttgacctctgtttggaccgcatcatgaaacttgctgataactgcactggtcctc

SEQ ID NO: 204046 - DNA, 280 bp, Gossypium hirsutum
gctttttagaatttttcttaatcgaaaatgagagagtgcatttcgatccacatcggtcaggccggtatccacgtcggcaacgcttgctgggagctttactgtctcgagcatggcatccagcctgatggtcacatgccaagtgacaatactgtcggaggaggtgacgatgcttttaacacctttttcagtgcaactggtgccgggaagcaggtccctcgtgccgtcttcgtcgctcttgaacccactgctattgaccaagttagacccggtgcctaccgcc

SEQ ID NO: 204047 - DNA, 409 bp, Gossypium hirsutum
gtggagagttcagacaccattgataatgtgaaggctaagatccaagataaggaagggatcccaccggatcagcagaggcttatatttgctggcaaacagcttgaggatggccgcacgctagccgactacaacattcagaaagaatccacccttcacttggttcttcgacttcgtggcggcatgcaaatctttgtcaagactctcactggaaagacaattaccttggaggttgaaagctctgacacaattgataatgtaaaggcaaagatccaagacaaggaatggatcccaccagatcagcagaggcttatctttgccggaaagcagcttgaagatggtcgcaccttacctgattacaatatccacaaagagtccaccctccacctggtacttcgtcttcaaagtggca

SEQ ID NO: 204048 - DNA, 264 bp, Gossypium hirsutum
tatggctcaggccactggaaaagtgtgtgtgacaggagccggcggctaccttggctcttgggttgtcaagcatcttctctccaacaactaggggttcgagggcaccgttagacaacctggggatgccaaatatgcccatttcaatcaacttgacagagcatctcacaacctccacctcttcaaggctgatgttctggattacgattctctttgttccgccactacaggctgcaccggtgtcttcaatgttgcctctcccgttcc

SEQ ID NO: 204049 - DNA, 318 bp, Gossypium hirsutum
gctgacgaagagatacgctactgcctggaaggcagtgggtattttgatgttagggacaaggatgaccgatggattcggatttggatcaaaggaggagatcttattatattgcctgctggaatctaccatcggttcactctcgacaccagcaactatgtcaagttgatgaggttgtttttgggagaaccggtttggacagcgtataatcggccccaggaggaccaccctgcaaggaaagagtacattaaaagcttgactgagaaagtttgggtgccattagctgctcattaaagcctattgttacattaaatttcccct

SEQ ID NO: 204050 - DNA, 319 bp, Gossypium hirsutum
ggattcccggaatgctggtgttctgcacgtggctccccgtgcgctcctcttctgcctggcttgcggtgggtactttggtgttcgggatctggctggccgctggcttcggctttggttccttggcggcgatcttattatcttgcctgctggtttctaccatcggttcactctcgtcgccagcaactatgtcaagttgatgaggttgtttttgggagaatcggtttggacagtgtataatcgtgccccaggaggactaccctgcaaggaacacctccattaacggcttgactgagaaagttggcgtgcccttacctgctca

SEQ ID NO: 204051 - DNA, 295 bp, Gossypium hirsutum
tagccccagaccacccaaaatgccagaagagcaagagccaaggttcatccctgaaacccaaaatggttatggcctttactgccacgagtcatgctcaggctcatgctcaggctcaagccggcccagtttcaccaccatatgaaatcctatgcaccctatgtcacccctgttagattccaccctgattaaccctataccagcatccccgaatccaccaacactaaagacacttactacctacctcaccaatgcttacaactcctctactcaacaaaactttggctacggcattttc

SEQ ID NO: 204052 - DNA, 369 bp, Gossypium hirsutum
gaagaagccatattagaggcagaggaaaaaggtgttagagtgttgagtctaggcctcatgaaccaggctgaagagctgaacatgtatggtggggtgtggagacgggaacatccccagcttaaagtgaagttggtacatgggagtagcttggcagttgcagttgtgttaaatagcatacccaagggaactacacaagtagtccttacaggcaagctgactaaagttgcttgtgctcttgcctttacgctatgccaaaagcgcattcaagtctctgtattacctgaggatgaatacgacaagcctgatacattacctggcagcaagtctgacggtcaattggttctctcacaaagttacacttgtgagaca

SEQ ID NO: 204053 - DNA, 426 bp, Gossypium hirsutum; identical to SEQ ID NO: 192334

SEQ ID NO: 204054 - DNA, 446 bp, Gossypium hirsutum
  unsure (1)..(446): unsure at all n locations
atcaagtagaaaatcaataatggagaaggtggaaaaatggatactagctcgtgatgaggagcggtggctggaagaatatagcatggatgagaatagatattcggtcagcaggggcgctcacagaaacctgagacgtgcagaaagggcccgagtaacggtcaacaaaatcccagcattggtggattcactcatggcaaaaaccaagagttgggaagaagaaagaaggaaagttttcctgtatgatgaggtacctcttttggcaatgttggaagagtacaacctgtctaggcaagaaagagaagaagaaaagcaaaggcaacggatgaagaaggtccaaagccaggttgtagttgagcaagaaaacttcactacatctaggccatccnacagtaatcggcgcctttcaaacaagagcttaaatggaggttttggcaatgcaagccctt

SEQ ID NO: 204055 - DNA, 397 bp, Gossypium hirsutum
agaatctgcattgggcttaacaaagcgtcttgcccagacagctcaggagacctttggtgattttgaagaagcagttgaaaaagatgcgacaaaaactgctgtcctggatggaactgtccatcctttaaccagctatgtgatcaattatgtaaagtttttatttgactaccaatcaacactgacacaacttttccaggaatttgaaactggtgatggtacagtatctcagttggcttctgtaacaatgagaattatgcaggctcttcaaacaaatttggatggaaaatccaaacagtatagagatcctgctttgactcacttatttctgatgaataacattcactatatggtgagatctgtgcgcaggtctgaaaccaaagacctgttaggggatgat

SEQ ID NO: 204056 - DNA, 442 bp, Gossypium hirsutum
caggaaccaccgtggtctgaggcactactggggccttcgtgtacgtggtcagcacaccaagactactggtcgccgaggaaagactgttggtgtgtctaagaagcgttgaattcttcataacataatctatagtatgacgaggcagatatttatttctttgcttttaagcgatgtttgcatcaaagacaaaattttggatttggttttgttgttttagttggttttttaaaccttgcagacaagtagtgtttctcttttaatcgattgtttgatctttttatcaattgagattaaggatacctgctttgatagataaagattacacatgttttcttcacctcaagtccaagtcctgaagaattggtggcgtccatgaccagattgggttattcacatatgggtattaacctcacatggttgttcatgttgggtgctcatattt

SEQ ID NO: 204057 - DNA, 429 bp, Gossypium hirsutum
tgaactacctcctaaaatacccagtatctcccaaaattggccttcttttcctcatgacaagatgccttccatggcaaacttctttccctccaccatcaccaaccacccttcatgggtggacgagttcctcgacttctcctccgcccgtcgcggcgctcaccgtcgttccatgagcgactccatagccttccttgaacaaccattggtggaggaagaatgcagggactccaatgccacgcccatgatgactaccacgacggtatcaaatttacatatgttcgatcgtcttgaccatgaccagctcatgtcgttattctccgacgatgtcgccgtcaccatggcagcgcctgctccaacggtatccttcgtccaatccatcgacgccgacgtctagcaacattgatgatgaaaatagcaccctcaacggat

SEQ ID NO: 204058 - DNA, 342 bp, Gossypium hirsutum; identical to SEQ ID NO: 192336

SEQ ID NO: 204059 - DNA, 298 bp, Gossypium hirsutum
tgctaactgctacaactctgatcatttgaagaagcctgataattgggcgttggttgagaaggccacgtacttctacattgctggatttttccttactgtagctccggaatccatacagcttgttgctgaacacgcacgccgcaaaaaacaaggtgttctcacctcatctttctgctccatttatttgcgagttcttcaatggtgcacaagacaaaccactatcgtatatggactttgtctttggcaactatactgaagcatgaactttctcaaaggttcacggccgggacactgatca

SEQ ID NO: 204060 - DNA, 381 bp, Gossypium hirsutum
gaacgtcttgcaacaagattggctgctcttaggattgaactttgcccaggatatatgagtgagggttgcttttggaagatctattttgtacgtcttcgtcggcgactaaataaacaagatgcagaacttctgtctacttcccaaatagttgaagcaagagcaatgttaatgcaagggatacacaaccgatctaaggctaagatggaagatcattctgaaagtggcacttcaaatataaaggctgatttaccacatgaagagtttccttctgtgccttctcccgctcaatctaagctaacatcatttaatgaatctcgaaatgacgcagccgatactgctgtagctgttgactcttcaacacaaaaaccacctagtccagac

SEQ ID NO: 204061 - DNA, 434 bp, Gossypium hirsutum
atttttaaagacatgggttaatttgcctatggctgttgggttcatgttgttatacacaaagttggccaatgagttgtcaaagaaggctcttttcgacagtgttattcttccttttatagccttttttggtgcatttgggtttccattgtatcctctcagcaatcacatccaccctgaagcacttgctgataagcttcttgcggtgcctggacccagatttcttggtcctcttgctattatgaggatatggagtttctgtttgttccatgtcacggctgaactttggggcagcgtggtcatttctgttttattttgggggtttgccaatcagataactactgtagaggaagcaacaagattctaccctctgttcggtcctgcgaccaaaaaatccctcaattctctcggtaaaaatgttaacatccttctccaac

SEQ ID NO: 204062 - DNA, 379 bp, Gossypium hirsutum
cacgtttatgcaccagagttgttggtaccctgttcggatatcggcgtggtcacgtcgactttgcatttcaagaaaaagcagcagtaaatccagcattttgaatccaccttgcagcaccgactagtgttttagttcgggaaagtggcttctggattgggtcgaattgccttacagtgtgaaaagaatatggggaagaaaggggtgaacttgctgaatgagcctgtttgggggacttactgcactggaaataaatgtgggttcgcaatgaggcgctagtgcggatcccatgattggcacctgttacaggcggtggagccaatttcattgggtgcgggtgtgctaccaggacattgcaatgagactggacctgggtccgaag

SEQ ID NO: 204063 - DNA, 419 bp, Gossypium hirsutum
ggaatgctgtgaattgctgaatgaggtggtggatgacagtgaccctgacctggatgaacctcaaattcagcacctcttgcagtcggttgaagctattagggaagattatcctaatgaagattggctgcatttgactgccctcattcatgatcttgggaaggttcttcttctacctaaatttggagggcttccacaatgggctgttgttggagacacatttccgcttgggtgtgcttttgatgacgccaatattcatcacacgtatttcaaggaaaacccagattacagcactccctcttataacactatgaatcggcatttactgggatggctgtcgccctgaaaatgttacaatttcatgggggcatgatgattacatgtttttggtagccaaggaaaatgaactaatctaacttcag

SEQ ID NO: 204064 - DNA, 437 bp, Gossypium hirsutum
cttctgctgaaatgctttgctttctagtttctagacagaaattcgatcagctctagtagtttaataagttatataaagaagaaagatctccttgaattttatttttgaagtaagaaggtgaatatgggtgcttcggaggagaacagtgccttgttcccaatctttgtgttcacgataatggctctgccattagtgccagacactatagttaagatattaaacacattctcgaacaaggcaatgactatccattgccagtgttctgtgtgttctccgtctgggaagtatacgaaatcaattttcaaacggatctcgaacttctcaagttgtagtaatctgacccctgtgcttccctggattgtcatggcggtgctgatatacgatatcaagcatacaagttatgaggttaaagtatttgagccaatcagtattcttgg

SEQ ID NO: 204065 - DNA, 415 bp, Gossypium hirsutum
ctgggccacactccattattggaagagctgtcgttgtccatgctgatccggatgaccttggcaagggggggcatgagcttagcaaaagcaccggaaatgctggtggtagagtaccttgcggtattatcggtctgcaagggtgaaatttcagtcctggtgagcgggaataatacattgagtggagatgcaatggcctaagagcaaactctgtatgtgaactacgaagtttgtgaataaaagtaaaacaacccttgttttgtgttggttttcagactcaaaggagtgtggtctcttaaccggatccttaacccatttatagtaagctgtcttttgctgacatgcttaactttggtgctttacttcctggtaagggtcccatgattcatgaatgcttcaagccactttcatgggtaat

SEQ ID NO: 204066 - DNA, 439 bp, Gossypium hirsutum
tcttgagacatcagcgctggaagcaaccaacattgagaaggcattccaaactatattgactgagatctaccatatcataagcaaaaaggcattggcagcccaggaagcagctgctagtaccgcaattcccggccaaggaactaccattaatgtcactgatacatcaggaaacactaagagaggatgctgttctacttagaaaggtaataggttacatttgatgctgttctacttaaaaaggtgataggttacatttgagaaggtaaaaaatatttgctaggaagtacgcccttttcatgtctttgtcaatttttggctgagagagagacatgtaaaatacatatatatattttacttgaattgtgataataagcttgtgatgttttaaacaaccataaattgttggtacaaatagaatggaacgcctggttttacttat

SEQ ID NO: 204067 - DNA, 355 bp, Gossypium hirsutum
  unsure (1)..(355): unsure at all n locations
cttccctgactgatgcgacattcatcaagggtcccagcctgaacggtttgactcttgctgttgaaaaacccggcttcttcatcatcgactacgatgtcgccaaaaaggatttttggtttcagttcatgaactcagttagggttgcggagaagccgttgaagcttacttacattcacggcagaggggacaaccggaccgtgttggacgggacactcaccttanactctgccaacaaggtgtcggctaattacatgtttggtacgaggaactgtaaggtcaagtacagttactcgcacggaggggctacgacttttgagccatgctatgatttcgggaaaaatgcgtgggattttgc

SEQ ID NO: 204068 - DNA, 391 bp, Gossypium hirsutum
tctaagtcggcggaaacttacgaatatcgtgtcggtgaaacatgcaacgtaagaccagagaaagctccagcagataaggaagccaaaccacagcaccagaggaaccgatccatcactctcggatcagctaaagaattcaattttgacaaccccgatggaggtgatgtccataacaagcccattgttagttccgattggtgggccaacgagaaagtagccggaaacgacgatggcattcccaagaattggtcctttttccccatgctgcaacctggtgtaagttaaaaaactggtaagcattttagtggggtgccttctgattttccacattattttaggaacttaggtgtggcttgggttggggattcaaacaatttggtaacaacaacag

SEQ ID NO: 204069 - DNA, 195 bp, Gossypium hirsutum
tcgagttttttttttttttttttttaagttgaattttagaaaaaataataatcaccttaattttccattgcctcatcttcataatcttcatcattgtgagctgggggagcatcttgatattgctgatactccgaaaccatatcattcatgttactttccgcttccgtaaactccatttcatccattccttcccct

SEQ ID NO: 204070 - DNA, 432 bp, Gossypium hirsutum
ggatattccttcaccaccacagccgaacgggaaattgtgagagatgttaaggaaaagctgtcttacattgcccttgactatgaacaggagctagagacctcaaaaacaagttcatcagtagagaagagctatgagttacctgatggtcaggttattaccattggtgctgaacgtttcagatgccccgaagtgcttttccaaccatccttgattggtatggaagctgcaggcatccatgagactacatacaattcaataatgaagtgtgatgtggatatcaggaaggacttgtatggtaacattgtccttagtggtggtacaaccatgttcccgggtattgcggacagaatgagcaaggagctttctgcactcgctcctagcagcatgaagatcaaggttgtcgctccacctgagcgaaagtacagtgtctgg

SEQ ID NO: 204071 - DNA, 454 bp, Gossypium hirsutum
caaaaccaaacttcaaacaaaagggaattttcttgtcataattttctgaggaattcatcgatggcaaccaaagtgtatattgtatactattccatgtatggacatgtggaaaaactagcagaggagataaagaaaggggcggcatctgttgaaggtgttgaagcgaaactatggcaggtccctgagactctgtcagatgagattcttggaaagatgagtgcaccaccaaaaagtgatgtaccgatcattacaccacatgaccttcctgaggctgatgggtttatttttggcttcccaacaagatttggcatgatgtctgcccaattcaaagcatttatggatgcaactggtggtctatggagaactcagcaacttgctggaaaacctgctgggatattctatagcactggatctcaaggtggcggacaagaaactacaccgttgactgcaatca

SEQ ID NO: 204072 - DNA, 201 bp, Gossypium hirsutum
gatccaaaaactgtcccaccaaagcgcacttacattccaccacagcaaacgccttacaatcccgataagacccctgagtttgtcatggggatgggacaggttcttgttcccctcttgatcctgggtttggctattgccgtacgtcactataccaagaaagagtagcttattactatccatgagtttacctgttacgaggga

SEQ ID NO: 204073 - DNA, 440 bp, Gossypium hirsutum
  unsure (1)..(440): unsure at all n locations
accatatagaaattaaattgaaccaacaaaatcataggagactttttacaaacaagataaatcccttttagaatcacagcaaatcaacagtagtggcaaaaagggaaaataaaataataagaaaggtttgtaaaacaccatttagcactccacgccacattgtttaagaactggacctgtttgtttgggcaagaagggatcgatccgtacccaaaccagtgagaaaatcgatgccaaaagtatggaccaaagcacaacaatggtgggcgtcctgttttgtctccccatcaaacctttgaggaatgggtaaagatgaagaatgacccagaatgcgaagaacagtttgccgaacaatggaccccatgaaccatagccgttgttgattgcgtctgaaactccggccacgactccgnacatgttcagtattatcagagttgtgg

SEQ ID NO: 204074 - DNA, 427 bp, Gossypium hirsutum
  unsure (1)..(427): unsure at all n locations
ccaacattgacttcaagcaaatggtggcctggtggattgggtaaagtatccacacatgctgtggtctatgcacgtcttataacaggtgctcaagaccatggagtgcatggttttattgtccagctgcgtagtttggatgatcactcacctcttccaggcataacagtaggtgatattggaatgaaatttggaagtggggcatataacagcatggacaatggtcttctgagatttgatcatgtgcgcattccaaggaaccaaatgctaatgcgtgtttcacaggttacaagagaagggaaatttgtgcaatctgatgtgcctcgccagctggtttatggcaccatggtctatgtccgacanacaattgtatctgatgcttcttgtgctttagctagagcagtttgtattgcaacaaggtacagtgctg

SEQ ID NO: 204075 - DNA, 425 bp, Gossypium hirsutum
  unsure (1)..(425): unsure at all n locations
gaaatggctacatctcagctaacagcgtcgccagtgacagcatcagctaggaacttggcttcattacaagggcttaagctgtccactatcaaattctcttccattggaacattaaagcctggggctttgaccagcaggtccttcaaaggtttggttgttaaagcagctaccgttgttgcccctaagtacacttcagttaagcccttgggtgacagagtgttggtgaagatcaaagaaacagaggagaagactgagggtggcattttgcttccaacaactgctcaatcaaagcctcaaggangtgangtggttgctgttggtgaagggaanacaattgggaatacgaaatcggaaagttctgtgaagactggtgctcaggtcatatattccaagtatactgggatggaggtcgagttcaatggtgc

SEQ ID NO: 204076 - DNA, 448 bp, Gossypium hirsutum
caaagaattaaagttggaaaacgaaaacatggcaagggatctttctcaatgcactgaaaatctggagatgaccaagtctcagttacacgaaaccgagcagcttctagcagaagctaaatctcaattggcttatgctcaaaggtcaaacagcttggctgagacacagctcaagtgcatgacagaatcttatagatcacttgaaacacgtgctgaagagttagagaccgaggtgaaccgtctccaggtaaaaatagaagctcttgaaaatgatcttcaagatgaaaagagaagtcatcaagatgcttttgcccgatgtaaggaactagaagagcaattgcaaaggaatgagacctgttctgtatgttcttcagcagccaagaatgacctcaagaacaagcaggagaaagaattaccagagaaactagcggaatgtcaagaaaccatattc

SEQ ID NO: 204077 - DNA, 185 bp, Gossypium hirsutum
caaccacgcattttccttacaactttgttcttcttgtggttaatcgatatcgctagctcaatgtcccttaagcttgtatgtctggccgtgttgtgcatggtggtgggtgtaccccttgcctcaaggggctgtaacctgtggtcatctcacaagctccttcgcaccctggcattggctacctcatc

SEQ ID NO: 204078 - DNA, 267 bp, Gossypium hirsutum
cggaatcaatggatttggaacgatcgggcgtttggttgcgagagttgctctccaaagcgatgatattgagctcgttgctgttaacgatcctttcatcaccactgaatacatgacgtacatgtttaagtacgacagtgttcacggtcaatggaagcatcatgagcttaaggtgaaggactcaaagacccttctctttggggaaaagcctgtcacagttttcggtatcagaacccctgaggaaatcccatgggctgaaggtggagctga

SEQ ID NO: 204079 - DNA, 391 bp, Gossypium hirsutum
gttaatatgcttgtttgggatgatagaacttctgttggattgctgaagaaggatgggttaatggccacccatgatgaggaaactgaacaattcttcaaggatactgatgtcaactgtgtcttatgccctcgtaatccagatgatggtggaagttttgtgcaggaattacaaatatctacaatgttcactcatcaccagaagattgttgtagtggatgctgcaatgcctaatggagatccagagaaaaggagaattgtgagctttgttggacgtattgatccttgtgatgggagatatgacacacctttccatttccctgttcaggaccttggaccacgctcaccatgatgatttccaatcagcaaacttcaatgatgcttcaatcaccaaa

SEQ ID NO: 204080 - DNA, 149 bp, Gossypium hirsutum
cgaggagtcggtttgtgaaccgggttgtttcctcaatgttgaggagagtttcagggaagaggattgcgattctcggatttgctttcaagaaggagaccggtgacagtcgggagagcgcagggagcgatgtatgcaaagggctgttgggc

SEQ ID NO: 204081 - DNA, 249 bp, Gossypium hirsutum
tgagaatgctggaaaggcctctggtaatgtccatgatgcaatgtgttctgtttgtgacatggcagtcatatgggtgcaaagccaacttaaacagaaccagactcaggagcgtatacttgattacgtcaatgagctctgtgaccggttgcctagtccaatgggagaatcagttgttgactgttacagcctatctgctatgcctagtgtcgccttcacaattggtggaaagcatcttgagccttaccctga

SEQ ID NO: 204082 - DNA, 278 bp, Gossypium hirsutum
tatacgtcgagcaacgcttgtttctgagaatgcgcagggaactgatggatttacaatcagcacaactgcgggtgaaattgactcacgccatagtggtttgcttacggaatcacgtctggcagctgctgctgaacagaccgaactacatgcatttgccactgaccctgctcatgttcatcatctcactcatagatgcttgccacatgcttcacattatccactgctggaggagtctgacttcagtaaccgacagtgttaaccccgaccttgacatggca

SEQ ID NO: 204083 - DNA, 244 bp, Gossypium hirsutum
gtttctgtagctgaagaaactcttcaatggctgaaaagagcaaggttttgatcatcggcggaactggatacctgggaaagttcattgtggaagccagtgcaaacgagggtcatcccacttttgtttttgtaagggagtccaccgtctccgaacctgttaagggaaaacttgtcgacaacttcaagaacttaggggtccatttgttgttaggggatatgtacgaccatcgatagtttggtcaaag

SEQ ID NO: 204084 - DNA, 246 bp, Gossypium hirsutum
cttccatgtcttaaggaactgtcattggattcttcccatcatgtctgcgctgctttggcttcagttgtgatgggaatggctcctgtccttgggaacgatgcatcattcgaccagcttcttccaatatttctctcccttttgaaggatgaattccctgatgtgcggatcaacataatcaccatacttgatcaagtgaatcaagttattgggattgatctattgtcccaatctttaccactacccatt

SEQ ID NO: 204085 - DNA, 336 bp, Gossypium hirsutum
aatcagccaagttgaggcagcagattcaaatgctacagaattctagcaggcatctaatgggagattcgttgagttccttgacagtgaaggagttaaagcagctagagaatagacttgaacgagggattactagaatcagatcaaagaagcacgaaatgctgctagctgaaattgaatattttcagaaaagggaagttgagctggaaaatgaaagtgtatgtctccgagctaagattgcagagatagagagggttgaggaagcacacatggtaacaggagcagagctgaatgctattcaagccttggtatctcgcaatttcttcactccaaatgtga

SEQ ID NO: 204086 - DNA, 178 bp, Gossypium hirsutum
agaggaggcaacggaagcattagagaggattgtcgaatccgcggtatgtgcacgggatcgaacttgtgccatcaccgaagcgcattgctctcagtgaagaagatcggaagaaatggattgagcgtaccggaagggatttaaacttcacgattccactcgaggctagtgagtttaggtc

SEQ ID NO: 204087 - DNA, 359 bp, Gossypium hirsutum
aaaccagcaccctgtaggtcgagagctcggacaccgttgacagggtgaaagcgaaaattcaggacaaggaggggattcctccagaccagcagaggttgatttttgctggaaagcagcttgacggtgggaggacacttgcagactataacatccaaaaggaatcgaccctgcatctagttttacgacttcgaggagggatgcagatattcgtgaagaccttggccgggaaaacaatcaccctggaggtggagagctcagacacgatggacaatgtgaaagcgaggattcatgacaaggaggggattccaccagagcaccacatgttgatatttgctgggaagcacttggaggatggtcga

SEQ ID NO: 204088 - DNA, 251 bp, Gossypium hirsutum
ctcgtgccgtcgtggtcgagatgggctgcatacggtgtcttgcataagccagacttgaggaatatggccctcaagtttataaaacaactcggacatgcactgcattctgtggcatcaacaaggaatcccaagcaacaattgcagttggtatatgttgtaggtccaccacattcagatgcgctccagcagcattgattttggaccagctgatcttcagagcgtgagtgggtctgtggatggtttttcactta

SEQ ID NO: 204089 - DNA, 375 bp, Gossypium hirsutum
cagctcaggaaacacctgatgaaggatggacaatgcaagatggaacttcttggccaggaaataacccgcgtgatcaccctggcatgattcaggtttgccttggatatagtggtgctcgtgacatcgaaggaaatgaacttcctccactggtttacgtctctagagagaagagacctggctaccagcaccacaaagaggctggtgctgaaaatgctttggttagggtgtctgcagttcttacaaatgctcccttcatccgcaatcgtgacgtgtgaccaggatgttaacaatagcaacgcagttagggaggcaatgtgcttcatgatggacccacaagttggtcgagatgtatgctatgtgcagtttccgcagaga

SEQ ID NO: 204090 - DNA, 364 bp, Gossypium hirsutum
gtcacatccagggcaactgatgacgaggagttcggggaattgtatactttcaaatggacaacccttctaattcctcctactaccgtcttaatcatcaatttagtcggtgtcgttgcaggcatctcggatgccataaacaatggataccaatcatggggacctctttttgggaagctcttcttctctttctgggtgattggccatctctatccattcctcaaaggtttaatggggagacaaaaccggagaccaaccattgtgtgttataggggcagtgctagtggcttcaagcttctccttgctttgggtccgaattgatccatttgtgatgaaaaccaaaggaccagacactacaatgtgtggg

SEQ ID NO: 204091 - DNA, 161 bp, Gossypium hirsutum
taagagtctcaaaaaatatggctcctggggtcttattactggaccaactgatggtatcggcaaaggatttgcctttcagctggctaggaaagggcttaatcttgtcttggtgggccgtaatcctgataaactcaaagacgtttccgattcaatcgttggca

SEQ ID NO: 204092 - DNA, 257 bp, Gossypium hirsutum
aaactatgaccatgggttctgcagacaagagggaggaagttattcaggcatggtacatggatgatagtgatgaagatcagaggcttcctcatcagcgtgaacctaaggaatatgtatccttggataaacttgctgagcttggagtactcagctggcgattggatgctgataactatgaaaatgatgaagagttgaagaaaattcgtgaagaacgacgttactcctacatggacttctgcgaggtttgccctgagaag

SEQ ID NO: 204093 - DNA, 245 bp, Gossypium hirsutum
tacatcacggatgcttctcactaccaccatgaacggaactcttggttacctcgatgaagacttggtctcaaccgaccttgtcggttatagcaagtgaggcatctttgatgctaaagccggcatcgccttgcatgacacctttactaagcttgttgcgtggcatgataatcacctggggttacagttctcgagtgatcgacttggttcgaccaatggcttcttgccagctgtgtgaggttttagct

SEQ ID NO: 204094 - DNA, 257 bp, Gossypium hirsutum
gaaagtcgattgcctgaatagccttttctctaagctgcaaaaccaatcaatcattttctgcaactcggtcaatcgagtggagctgttggccaagaaaattacggaacttggctattcttgcttttaggttcatgcgaaaatgctccaagaccatcgtaacagagtatttcatgatttccgcaacggtgcatggacgaaccttgtttgtactgatctttttacaatgggtatacatatccaaagctgtgaaatgttgt

SEQ ID NO: 204095 - DNA, 352 bp, Gossypium hirsutum
aattggtatcatgagagcacttgcagagagagatgacccatcagttaaggaagtggatgattttatgatacggagattccttacagctcgtgatttggatatagagaaagcaaacaccatgtgattgaagtatttgagttggagaagaacgtttttgcctaaaggattcgtatctgaatcggagatttcaaagcagttggctgataataagctttgtatggaaagagttgataaacaaggtcgacctattgtcgttgctttgtggtgtagacagaggcctaggaaagggaaccttgaagaggttaaacgctttgttgtcgatggtttacagaaaatttgtgccagaatgcca

SEQ ID NO: 204096 - DNA, 355 bp, Gossypium hirsutum
ctcatctgggttgtcgtttctatagctgaagaaactcttcaatggctgaaaagagcaaggttttgatcatcggaggaactggatatctgggaaagttcattgtggaagccagtgcaaaagagggtcatcccactttcgtttttgtaagggagtccaccgtctccgaccctgttaagggaaaacttgtcgacaacttcaagaacttaagggtccatttgttgttaggggatatgtacgaccatgagaatttggtcaaggcaataaagcaagttgatgtggggatttcggttggtgggtcaatgcagttagcagatcaagttaagatcattgctgctaataaagaagctgggaatgt

SEQ ID NO: 204097 - DNA, 320 bp, Gossypium hirsutum
caagtaggggctccagcctgatggtcagatgccaagtgacagcatcgtccgctgatgtgatgatgcttttaacaccctttacattgaccctggtgatgggaagcatatctctcgtgccgtcttcgtagatcttgataccactgttattgacggagtgcgacatggtgcctaccgccagctcatctacccataacaactcatcatcagaattgaatacgcatcaaacaactttgcacgtggtcactacaccattggcaaggagattgtcgacctctgtttggaccgcatcaggaaacttgctgacaactgcactggccttc

SEQ ID NO: 204098 - DNA, 358 bp, Gossypium hirsutum
ccgagaacgtcccgaagagcagaatctttttcatcgcatggtctcccgacacgtcaaggatcaggagcaagatgatttacgccagctccaaagacagattcaagcgagaactggacggaattcaggtggaattgcaagcaacagatccaactgagatgggtctcgatgtgttcaaaagccgtgctaactgaatacggttcttttaggcatctgcaaccgggaagcttccttccttcctacctacagtatgtctttacttaagtgaaatgtttataggtttcgaaacggcaaactcgggatttccgagttatgccataagacttttatcagtctccatgatgataaacccgtactttcg

SEQ ID NO: 204099 - DNA, 372 bp, Gossypium hirsutum
ggcaggcaaaggaagcctgaaaagactaactgggtgatgcatcaatatcacctcggaagcaatgaagaagagaaagatggagagttagtaatttccaaagttttttaccaaactcaacctagacaatgcggtcacagtagagtcatgtatacgcacggccgaaagcttatcacccaaagcccgctgcaccaaaatgcaaatcctatggctaagagcagtgacagccggggtcttgttgagtataacaatccagcttttattccatacgatgatgggagtcacgataatagggaaagctcaccgcagctcaacacagatttggatgttcaaagtgatggatccacgtttattcgattaacctctgatacaagc

SEQ ID NO: 204100 - DNA, 399 bp, Gossypium hirsutum
cggggcgaccacgcgtccgaaagaaattgcattctggttgatggataaggatatgtatgatttcatggctctggacaggccttcaacgcctcgcatcgatcgtgggatagcattacataaaatgattacgcttgtcacaatgggtttaggaggtgaaggctatctaaatttcatgggaaatgagtttgggcatcctgaatggatagattttccaagaggtcctcaaagtcttccaaatggctccgtcattcctgggaataacaatagctttgataaatgccgccgtatatttgaccttggagatgcagattatcttagatatcgtggtatgcaaagagttttgaccaaagcaaattgggccagcaccttgagggaaaatataattctgacatctgatac

SEQ ID NO: 204101 - DNA, 405 bp, Gossypium hirsutum
  unsure (1)..(405): unsure at all n locations
atcatcggccctgcattgattggaaaggacccaaccgagcagactgcaattgacaatttcatggttcaacaactggatggaacccaaaatgagtggggttggtgcaaacaaaagctcggtgcaaatgccattcttgccgtgtcacttgctgtttgcaaagctggagctgaagtcaagaaacttcccctttacaagcacattgctaaccttgccggtaacagcaagttggttcatcctgtcnctgctttcaatgtcatcaatggtggttcacatgcangaaacaaacttgctatgcangagttcatgattcttcctgtangagcatcatccttttaagatgctatgaaaatgggtgttgaagtctatcatcattttgaagtctgtgattaagaagaagtatggtca

SEQ ID NO: 204102 - DNA, 441 bp, Gossypium hirsutum
  unsure (1)..(441): unsure at all n locations
ggtgaaggggaaataatggatatgatggaagttgctgatcctgatgctgttcatgctgttcgaaccttcattagaaaggagcttgcctcacaactaaaatcagagtttttaagcacagttgagaacaatagaagctcagaggagtatgtatttgaccatcctaatatgtccggacgtgccctcaagaatactgctcttgcatatcttggttcccttgaagatacagagataactgagcttgcactgcatgagtacaaaactgcaacaaatatgacagaccaatttgctgctttgtctgccatttcncagaaaccaggtaaaactcgtgatgacgttttggccgacttctatacaaagtggcaacataactacctggttgtaaacaaatggtttgcccttcaagccatgtctaacattcccggtaacgtcgagaatgttcgc

SEQ ID NO: 204103 - DNA, 486 bp, Gossypium hirsutum
  unsure (1)..(486): unsure at all n locations
tacggtccgaaaatcncgggcggccaagccggtatccaagtcggaaacgcgtgctgggagctttactgcctcgagcatggcattcaggctgatggtcagatgcccggtgacaagaccattgggggtggtgatgatgctttcaacaccttcttcagtgagactggtgctgggaagcacgtccctcgtgctgtttttgttgaccttgaaccaactgtcatcgatgaggtgaggactggcacctaccgccagctcttccaccctgagcagcttatcagtggcaaggaggatgcagccaacaacttcgcccgtggtcactacaccattggcaaggagattggttgacctgtgccctttgatcnngcatcaggannagncccctttgccgacaactgcactggtctccagggcttcctcgtcttcaacgctgttggtggaggaacaggctctggccttggttccctcctcctggagcgtctgtctgttgac

SEQ ID NO: 204104 - DNA, 493 bp, Gossypium hirsutum
  unsure (1)..(493): unsure at all n locations
cggtcgtgacttccggggcgtgcagccgtatgttattgctgaccctgaaatcaaggaggaggtggtcgacagctccctcgaattcctcatccttgctagcgacggactctgggatgttgtcactaatgaggaagctgttgccatggtcaagcctatccaggacccccaggaagcagcaaacaagcttctcgaagaagcttcccgaaggggaagctccgataacatcacagttatcatcgtccgcttcatagacggaactaccggtgagaaatcaggcgacgacaaagagaccaccaacgaccaacactcctagctgtctcgtgtagggatccatcngtgctgtgtgttccttcctggctggttgnntaccnnttgggatgctcagagtagacactggctgctgctccgcaaggaaactgactcccccgaccgccgttcatgctcctggctggctcgctggccgcctcgacgggaacgctgccgcagaatgacg

SEQ ID NO: 204105 - DNA, 281 bp, Gossypium hirsutum
cacgaattctgatcggcttaaaatgtcctggtgagcatgttttaggaagtcctcattcacgattcaatacccgatatcaatgttatgggaatcaacattgggggaaaaggcacacggtttcctgttcaaccccattaagccattgtttgtcccaatggttttgctcactaaagtggtattcaccaagatgggatgctcaatcacacacgttcatatcgaattaactcccccgaagatattgcccctcaccggtccaattaagcctggaatgtccttgggaa

SEQ ID NO: 204106 - DNA, 388 bp, Gossypium hirsutum
  unsure (1)..(388): unsure at all n locations
cacagattgatgatggtgatgttgctgttgggaaggatatacaggataatcaaacacagattgatcagcaatatcccctgtactatttgtcctcgaggcagcctcaagcttacaacatgcctgtccagcaacctagcattaatgaagcccccacagggatcccatcgagccggccgcagactccttccaatcctaccatggctcctactcatgtagcatacaaccctatgagaaatgctcctcttgctaaacctgaaatgactgctgctgctggtgtatacagaacaacanatactggtaacccacaactggttcaagtgcanaacagccagcatcaacaacaatatgcgggttattctcagattcatcatgcatcacaatctgttgc

SEQ ID NO: 204107 - DNA, 390 bp, Gossypium hirsutum
tttgtgcctatcaccttccttgcatgggcggtcctagtgccggttaattacactaataaaacattggagttgcagctgaagaatgttacttcaagtgatattgataagctctcgatttcaaacgttccagatggatcggataggttttggacacatatagtaatggcttatgcttttaccttttggacatgctatgtgttgctaaaagagtatgagaaagttgcgaatatgcggttgcaatttcttgtatcagaaaaacgccggcctgatcagtttactgtgcttgtgagaaacgtaccaccagattcagatgaatctgtaagtgagactgtggagcactttttcctggttaatcaccctgaatactatcttacacatcaggtagtatgc

SEQ ID NO: 204108 - DNA, 436 bp, Gossypium hirsutum
tcgtgatggccttaaaatgtcgtggtgagcatgtattaggaggtcttcatacaggaatcaatacccgacacattgtaatggcaagcaaaatggtagaagaatacacagggttacatgttcagccgcataaagccattgttggagccaatgctttcgctcatgaaagtggtattcaccaggatggaatgctaaagcacaaaggtacatatgaaattatatcccctgaagatattggacttgagcggtccaatgaagctggcattgtccttggaaaactcagtggacgtcatgctttgagcgaccgattgaaagagcttggttatgagcttgacgatgttcagcttgggaacatattctggcgcttcaaagaagtagctgaacaaaagaagagagtcactgatgctgatctagtagcattggtttcagatgaagtttt

SEQ ID NO: 204109 - DNA, 253 bp, Gossypium hirsutum
agctacttaagcatggcttctaaaccatgaatcctcagtgactggccatggaagcctcttggaagctttaagtatatactcctacttcctttgacaagggtacacatatactcgtttatggataaagatgattatatagacgtgtccatgctggtattattcccatttatgttatggcgaatgcttcatcaccagctatggagtaacctttctcgttatctaacgtgccaaaggcagcaacatgattgtggac

SEQ ID NO: 204110 - DNA, 245 bp, Gossypium hirsutum
ctgccctgacatcactaaacctggggaatgcaagattggaattatgcctggatacattcacaaaccaggtcgtgtaggaattgtttctcgatcaggcacctttacatatgaagcacttttccaaacaactgcagtatgtccggggcaatcaacccgtgtaagaattggcggggattgctttaaggggaccaacttcgatgattgtgtgacaaaattcctttccggatccacagacagaatggatc

SEQ ID NO: 204111 - DNA, 283 bp, Gossypium hirsutum
attcttccggccttccctttgaatattgttatgacctaagtgcaaatcaaaccagctttgagtaccccattgtgaatctgacaatgaaaggtggagactatttttttgttaatgatccaataatagtgatttccttgcagggtggagatgtatactgtttaggtattgtgaaaagtgacaatgtgaatattattggacaaaatttcatgaccggttatcggatagtttttgatcgtgagaggatggtgctgggctggaaagcatcctactgtaatgatttaga

SEQ ID NO: 204112 - DNA, 356 bp, Gossypium hirsutum
aacacctcattttcctgagaaaaaaaaaaacaaaaaagaagcgtacgtgaagaaggagaagaagaaaaaagaaaatggcggaccagcttaccgatgagcagatctctgagttcaaggaggcctttagcctctttgacaaggatggcgatggttgcattactaccaaggaactgggtactgtaatgcggtcactcggacagaagcctactgaggcagaactccaagatatgattaatgaagttgccgctgacggaaatgggaccatcgatttccctgaatttctcaaccttatggtaaggaaaatgaaagataccgattctgatgaggaacttaaaaaagctttcatggtgttcgat

SEQ ID NO: 204113 - DNA, 123 bp, Gossypium hirsutum
ctgccctgacatcattaaacctggggaatgcaagattggaattatgcctggatacattcacaaaccaagtcctgtaagaattggttccccattagggaccttaacataagaagcaattttcca

SEQ ID NO: 204114 - DNA, 300 bp, Gossypium hirsutum
ctctttgctcacgtgcctcaaccactctgacattccagcaacacccaaaggcgtgccccatgttacagtttgcatccacattgttcatactggtatcatgcaggtctctgcagctgaaatcatgactggtcatacaaccaagattacgatcacaaacgacaacggtcggttgatctatgatcaaatctagaagatggttcatgaagcggcgaagtatatgtcctacgatgaagatcactcgaataaggttgaagccaaggacacattggagaattatgcctacaacatgaagaacactgt

SEQ ID NO: 204115 - DNA, 264 bp, Gossypium hirsutum
cttagaggttaatgttgagaaagatatacagactgagcaatagattactttcccacgagaatctgataatcgctcgataccgatactggggacattgtattcgtcctgcactataaggatcatcctaaatttattcgactcggtaattacttaattgtagagcatacattggcacttatcgaggccctttgtggatttcagttcatactgactcacttagctgccacagaacttctcactaaaatccaccctgcgtaagtcatt

SEQ ID NO: 204116 - DNA, 254 bp, Gossypium hirsutum
gcgacatcgaataagcacaagcatcactccagtcaaagcctaagctcacaatccagaggtttcaaactcactgtccttctccttctcagacgtctcgagggactgagagatgattgtgactgccaaaacagttggcgttcctgtaacaattgctcacagtggatctgccactaccgtcagtgctacagagcatatgcctctatttgcaccatctgtgggaatgttccggtttaggtctttctgtaagcttcact

SEQ ID NO: 204117 - DNA, 440 bp, Gossypium hirsutum
cacgcgtccgtgatgatcgtatgcgcagataacatgtccgaggtagacgatcgacgatgccccaaagtagcactttgaccacttcatgtggaggtcatgtgcgcggagggcgtcaaggacgagcatgaatcgacagaagggtataaggacgtcattcatgagcgtctagaacatgaccgatgcattgaagaggtcgaagggcatgacgaggaactcaatgggtgtggtgggtatgaaacaccgtcttctcgatgtcctcaagatgcatccgcacttggtgatagccgaattgcaagtctagcttggtgaagtacttagcaccaatggaggtccatccgaggaaattttcccaattgaccacaaggatggggaacttgtcatgggatgtcctgtcgtttaacatgcggtaatcaatgcagaacctccaggagccctctgcc

SEQ ID NO: 204118 - DNA, 295 bp, Gossypium hirsutum
caaaggatgctgccagcttcacctctcaggtcatcatcatgaaccaccctgggcagattggaaacggatatgccccaatccttgactgccatacggcggagattgctgtgaaattttcccaattgctgaccaagattcactggcgatctggaccggatcttgataacgagtccaagttcttgagcaatggtgattcacggattataaagatggttctcaccaaacctatgggtctggatactttcgctgagtacccagtacttggaccgtttgctttcatggacatcagtccaac

SEQ ID NO: 204119 - DNA, 416 bp, Gossypium hirsutum
attttatgctggaacaggtaacttgttgtgtaagtctgaggatacagtatgtatatttgatctccagcacaggcttattcttggcgatcttcaaaccccttttgtgaagtatgttgtttggtctaatgacatggagagtgttgctttgctcagcaagcataccattgtcattactaacaagaagcttgtgcatcagtgcactcttcatgacacaatacgtgttaagagtggagcttgtgacgagaatggtgtttttatttacaccaccttaaaccatgtaaaatactgccttcccaatggagatagtggaatcatccgaacgcttgaggttcctatatacataactaacgtttctggcaatactatactttgcctggatcgtgatgggaagactaagactatcgtcattgaaggta

SEQ ID NO: 204120 - DNA, 388 bp, Gossypium hirsutum
gtaatgtgaaggttcttgtgtttgatgaagctgatcacatgctggctgaggatgggtttaaagatgactccttgagaataatgagggatattgaaaagatgagttctcactgccaggttcttctgttttctgccacatttagcgacactgtgacgaattttgtctcaaagatagtcaagagagatcacaatcaactttttgtcaagaaggaagaactatctttggagtctgtgaagcaatacaagggtgaatgttccagatgaactttccaaagttttggtgaataaagatagaatttttgaaattggagaacgcctatggcagactataatatttgtacgcacaaaggatatccgaagcatgtttgcaaaaaacacttgtttaattt

SEQ ID NO: 204121 - DNA, 328 bp, Gossypium hirsutum
  unsure (1)..(328): unsure at all n locations
cggggccnccacgcgtccgcacacgcgtccgcaccgaattccctgcgattcctctcccctcgcctcctcgtctccccctaagggatcgtcggagaggaatcgcaaagagggccgtctcatccgagttaaggaagccatggagcacaaggaggctgggtgccaggcccccgagggacccatcctctgcatcaataactgtggcttcttcggcagcgcggcgaccatgaacatgtgctctaagtgccacaaggagatgataacgaagcaggatcaggccaagctggctgcctcctctatcgacagcatcgtgaacggcagcgacggccgt

SEQ ID NO: 204122 - DNA, 374 bp, Gossypium hirsutum
tttatcaatggcggagaagagtttcaagtacgtcatcctcggtggtggtgtcgctgccgggtatgcggcgagggagtttgccaagcagggagttcagcctggtgagctagccattatttccaaggaaacggttgctccatatgaacgtcctgctctgagtaaggcgtatctcttccctgagggagctgcaagacttcctggtttccatgtctgtgttggaagtggtggagagagattgcttcctgagtggtacaatgaaaaagggattcagttgatccttagcactgaaatagtgaaagcagatcttcctggcaagactctagtaagcgcagctggagaaacgttcagatatcaaattttgatcattgcaactg

SEQ ID NO: 204123 - DNA, 358 bp, Gossypium hirsutum
  unsure (1)..(358): unsure at all n locations
caaagtctcacactttggcagagaaaaaacaaaaacaaaaacctaaaaacccaaagttcataatggatgtaattaaaacccagcagatttcatctcgacccatagagaaggtaatagttcatcctttggttcttttaagtatcgtcgataactacaatcgcgtcgctaaagacacgcgcaagcgcgtcgtcggagtcctccttggttcttccttcaaaggcaccgtcgatgtctccaacagctacgcagtgcctttcgaggaagatgagaaggactcgagcatatggtttctcgaccacaactaccatgaatcaatgtnttcgatgttcacgaggattaaatgcaaggagcatgttgt

SEQ ID NO: 204124 - DNA, 175 bp, Gossypium hirsutum
aggattccggacgagaataagcttgctggtgctcaggtgcttctgagccgattgagattgtttttgagtcctgggtatccatatgaggaaatattgagtacgtttcatagtgcagacagcataagtatgtgctcattccttccgggtttcacgaactttaatagaacaaaaggag

SEQ ID NO: 204125 - DNA, 230 bp, Gossypium hirsutum
aatggctgtgcatgatgattgcaagttgaacttcatggacctcagggcaaacccaacccaccgcttcagtgtttgcaaaattgaggagaagcaggagcaggtgtagctgtggataagcttggcgaagcaaccggatagctatgaggatttgacgagatgtctccccgctgatgaacgtccatatgcgagtgtgcgactttgattttctaaccgccgagaatcgttccgtc

SEQ ID NO: 204126 - DNA, 401 bp, Gossypium hirsutum
tttttcttttataagtctcaaagaaacttagaccccttcgtattctccgctcataccccaaatccccataccccttctgttcaacagcaaagatggcaactgtgcgagttacctcctctagtatcgttcaagcttcgatcccgaaccgattcacgagtgccattgtcaaggccccgacttctcttggatcttttaagaacatctccaaaccttttggcttgaaatgttcctccaatcacaaaacatttatggcagcttataagattaagcttgtaggaccggatggtgaggtgagcgagtttgaagcccctgacgatcaatacattttagatgcagccgacgaagcaggagttgaactgccatactcttgccgagctggagcttgctccacatgtgccggg

SEQ ID NO: 204127 - DNA, 413 bp, Gossypium hirsutum
  unsure (1)..(413): unsure at all n locations
caggacccgacccggtaggatcaagtaggtcaagagaattttcctcactcagcttagcgtacatccttgtcctcaagtctctcccggattccactctctccattgcaggttcctcaaacgcattattactttcccagagctcaaacttactgagtacggaccgagtcggtgtacgagttggagtgagaggagagccaggtcggagcatggagctccttggagaaacaaaacatgatccccgagaacaagtagttcccattttagctttaccaatctgtagattacgtacggaagaggtgagttcacttaccgagttaaatgagccgctcggcgacgtaagtggtgagtcagaaggtggggatattggaggcgaagccaaaatggaagttggtganaaacataatctaaacgat

SEQ ID NO: 204128 - DNA, 312 bp, Gossypium hirsutum
cagacttttgtggcatttgagaagccagagggggtcccagctgttggaaaattctcaaatatgctgaggttcattgtaaaagaggttgatggaagtactggtgaggctgatgatgatggagtagaggatgagtaccaactacaggagcttgaagttgttgccgctgattacatgttgaaagtgggtgtctcaaatttcaggaatgcatgggaaagcatgggtccagactgtgagcgtgtagatgaatatcaccttggcccaagggaaaacctgtctgaagctgttaatgccgtcataaatcttcttggcatg

SEQ ID NO: 204129 - DNA, 249 bp, Gossypium hirsutum
gtggcaggtcacatgactggactgagtgtccgtacgctcaccccggggagaaagcccggaggagatacccgaggaagtttcattactcgggtacagcttgccctgatttccgtaaaggaatctgcaaaaaacgcgattcgtgtcagttcgctcatggtgttttcgagtgttggctgcacccatcacggtaccggactcagccgtgtaaggatggtaccagttgctacaggagggtctgttttttcgctc

SEQ ID NO: 204130 - DNA, 374 bp, Gossypium hirsutum
gaacatctatatgcaaacattccggaggctcaagagaaactccaaaagttaagagaaatcgagctagaaacacaattgacctcatctgaaattagaaaaagggaggaggaacacttgaaacttgccgcagacctcaagaagcagcccgaggtggcatctcggagatcctatattgagcggataaaagagattacaaaaaacagtggcaaactcgattctgacatagaacgaatcttaagagatactaggacactccaattagaaagcaattccattcaggagagccttcatcgcacctatgctgtcatagatgaaattgtcttcagagaagcaaagaaagacacaaaacggggacaagcttatatactgctcac

SEQ ID NO: 204131 - DNA, 370 bp, Gossypium hirsutum
gtgttgttttgcttgaaatcattactggaaggaaagctatcgacaattcgagagctggtggtgagcaaaatctagttgcctgggctcgtcgtttgttgaaagatataaggaaattcgcgcaaagtggcagagccattacttcaaggacaatatccggtaagaggtttgtactaagctcaagctgtggctgctctgtgtgttcaagaatagccgaatattctaccacttagacccgatatagtcactgccctcacctatcctgcatctcagaagtatgatccaggaattcagaccgtttaaggatcacgtaccggttcttctactccgagaatgaaactggaatactttcaggtaacggaaagtaaccatt

SEQ ID NO: 204132 - DNA, 227 bp, Gossypium hirsutum
gcatgaattctgcactatggagctggattcattggctcccatttagtggataaattgatggagaatgaactgaatgaggttattgtcgtcgacaactactttagcggcacaaaggacaatctctataaatggattggacatccgatattcgagcttattcgtcacgatgtcatcgatccgttgctcatttatgttgatcagatttatcatcctgttttccctgcttc

SEQ ID NO: 204133 - DNA, 357 bp, Gossypium hirsutum
gagattttacagcaatttgattgggaagttccagattgggtcattgttcccggtggaaatcttgggaatatttatgctttttacaaaggattttcaatgtgcaaagagttgggacttgttgataagattccaaggttggtctgcgcccaagctgcgaatgcgaatccgttgtatttgtatttcaagtctggttggaaagactttcagcctgtgaaagcgaaaacaacatttgcctctgccatccagattggtgatccagtttccattgatagagcagtatatgccttgaagaattcaaatgggattgttgaggaaaccaaagacgaagagttaatggatgccatggcacaagctgat

SEQ ID NO: 204134 - DNA, 369 bp, Gossypium hirsutum
gtggctatgaggagaagactgcatgggggaaagagattggatggatatatggttcagtcactgaggatatcttaaccggcttcaaaatgcactgccgaggatggagatcgatttactgcatgcccttaaggccaacattcagatgatctgcacccatcaatctgtctgatcggttgcaccaggttcttcgatgggctcttggatctgttgaaattttcctaagcaggcattgccctctatggtatggctttggaggtggtcgtcttaaatggcttcaaagactagcatatataaacaccattgtctatcctttcacatcccttccactcattgcctattgttcactaccagcaatctgtcttctcacag

SEQ ID NO: 204135 - DNA, 289 bp, Gossypium hirsutum
gaatttatttgcatggggcttgttaagaaagagaagataaatatggcagatgataacacagctacgtgcgtagatatcctcttagggatcattttgcctcatctcggtgtcttcctcaagtttggttgccacgtggagttctggaattgtcttgtagtcaccctgtttgggtacatccctggtattatttatgctatctatgctatcatcaaattgtcctctaaacgcatccttctcatctgtagagatttggacttcgactctggttctgtttgaatacgtttccgtt

SEQ ID NO: 204136 - DNA, 364 bp, Gossypium hirsutum
gtgagaagtaggaaaagcaagtgcaaggaagagaagaaagatgagcagcattggaactggttacgatctctcagtcaccactttctctcccgacggccgcgtttttcagatcgagtacgcctccaaggccgtcgataacagtggaactgtaattggaataaaatgcaaagatgggatcgttatgggagtggagaagctgatagcatcaaaaatgatgttacctggctctaatcgtagaatcctttccgttcatcgtcattccggcatggcagtagctggattagcagctgacggcagacaaattgtggcccgtgctaaatctgaagctactagttatcaaagtgtgtatggtgaacccattcct

SEQ ID NO: 204137 - DNA, 257 bp, Gossypium hirsutum
gcataactcggtactttcctgccaaggaaagcctgccaatggcaaagagctttatagcgacatactattggggattcccttccctgtaaacccagcttctctgcaataatccgatgtaataagacacaacaatgtatacggcaccttcaccggtcgaactctgttcttcaatttactatcactgtttctttccacaattccactcccacattccaacactttcttcacgaatctttcaaattcggctaacggttcat

SEQ ID NO: 204138 - DNA, 272 bp, Gossypium hirsutum
gttaacagaactcacaccacttgtggagtccagcatttgccacagaagtaaacattgtggacaactcagtctgtgtgctttttccttaaacaacatgtggacacttaagattgccaaagggggtgttcgatatagtgggggatggctaatgactttgaccaatcatgaacgatctcaagtctgggaattctgccctgaatcaggaaccccggaagatctttctaaggtggaaatgggtcgtcagagttttcgggataaccgtttccacaaaa

SEQ ID NO: 204139 - DNA, 273 bp, Gossypium hirsutum
ccccgggcactaaaattcgggccgatgactctcatcttgtccgtgactattttgctaacagactggtgccccactttgttcaatactttaacataaacaccattaacgatattcttcctctctccacagcgctgaggaggttgaggactgcctgctcaaacggcacacagaactttatcttccactgctcaaccaaccactcatcttcgacccttgtaagacggtacccatttttactccagcattacccaagccacgttttactaacttatc

SEQ ID NO: 204140 - DNA, 274 bp, Gossypium hirsutum
gtggaccctccaccggcacctctgattgatatggctgaactcacatcatggtgcttttagagagccctcatacttgactttagaggcactctcctcttcctctatgtcactgtttgcactgtaattggtcacacgaaaaaagaagatgcatctgatggtgttgggcccttgggtattgcatgggctttccgtggcatgatacttatccttgtttactgtactgccggtatcttcacgtggacacattaacctcgcggtgatctttgggttgttt

SEQ ID NO: 204141 - DNA, 360 bp, Gossypium hirsutum
  unsure (1)..(360): unsure at all n locations
gggctgcaaaaattnacacgagtcagcattacagggggaaccttctgtattgcattatggcgtggaacacaagttgctgtgaaaagggttggggatgaagtttttaccgatgacgataaactgacggcatttcgagatgagcttgcattatttcacaaaattcgacatccaaatgtacttcaatttcttggtgcaataactcaaagtagtcctatgatgattgtgacagaatatttacccaagggagatttacgagccttcttgaagagaaaaggagccttgacaccaatgacagctctgacacttgcacttgatattgccaggggaatgaattatttacatgagaacaaaccggcacca

SEQ ID NO: 204142 - DNA, 381 bp, Gossypium hirsutum
  unsure (1)..(381): unsure at all n locations
agagaactagaaggacattagtggtaaccccagagctcttaggaggttgaggactgcttgtgaaatggcaaagagaactttatcgtccactgctcaaacaaccatcnaaattgactccttgtatganggtatccatttttactctaccattacccgagccaggtttgaagaacttaacatggatctattcagaaagtgtatggaaccagttgagaaatgtttgagggatgctaagatggacaagagcactgtccatgatgttgttcttgttggtggttccactaaaatttcaaaagtccaacaacttttacaagattttttcaatgggaacgagctttgccagaacatcaacccctgataggccgttgcatgtggtgctgc

SEQ ID NO: 204143 - DNA, 350 bp, Gossypium hirsutum
acaagcctagatcctcttcatctgccgcatctcagtacctccgcagttcactgagaaatggatgaggaagtttaaggctgtggttcctgagtcactcttgaagaaacaaaagagggctgaggaatgggagcttgccacaaagcacgagcgttaagttgcaaagaataacaaagtcgagaaccgcaagctgatttacactacggctaagcactatgcacaggagtacgacgctcacgaaaaagagctgattcacttgaagcgggaggcacagttgagaggaggattctatgtagatcaagacacaaaactcttgttcatcatccgaacccgtggtatcaatgccatgcacc

SEQ ID NO: 204144 - DNA, 458 bp, Gossypium hirsutum
ccccgggcacaagaattcgacgaggaagacgcagctaaactttgcccgtggcacacaccattggcaagagattgtcgacctctgtttggcgcatcaggaaacttgctgataactgcactggtcttcaaggattccttgttttcaacgctgttggtggaggtaccggatcaggtcttggttctctccttttggagcgtttgtctgtcgattatggcaagaaatccaagttgggtttcactgtctacccatctcctcaagtctccacttctgttgttgagccttacaacagtgttctctcaactcactcccttttggagcacactgatgtggctgttctccttgacaatgaagctatctacgacatttgcaggcgttctcttgacattgagccggccacctacaacaatccttaacgtcttgtctcccacgtcatttcctccctgactgcctcactgagg

SEQ ID NO: 204145 - DNA, 154 bp, Gossypium hirsutum
agcaagctctcttcctactttgttgagtggattcctaacaatgtgcaatcaacattttgtgatattctacgcacacgtctcaagacgggctccacatttatctgggggtcagcgtcgactcacgatatctttaggcgtgtgagtgaccagttta

SEQ ID NO: 204146 - DNA, 203 bp, Gossypium hirsutum
gttatggtgggtaccgaggaccatgttaatctatgagcaaacaatttctcagagagatatgctattgggacatcagcctagacagacaatgactatggggaggcacgagcaccacccttctttgatctggtggactcaaatcatggtctttttacagacctggtattgccgagtttgtagccacttttttgttcctttacatc

SEQ ID NO: 204147 - DNA, 242 bp, Gossypium hirsutum
gccttttcatcgaatgtagtgctaaaacacgcgttaatgtacagcagtgcttcgacgagcttgttctgaagatcctaaatactccgacccttttggctgagggttccaaaggtgggaaaaagaacatctttaaacaaaagccaccagaactcgatgcatcggcaagcggctgttgctaataccaaatctcaagcgcggtgattcttacccacttctgaccattatttacagtatggtttttc

SEQ ID NO: 204148 - DNA, 383 bp, Gossypium hirsutum
ggaagaagtcaaattcctaccctcgggggaaaagagagagataggcatactcttccatgggtctttgcacctccaaaccctccccaaacccttctgattctacaaatgcctctatcaatacccggaataacgatatccaccgcaagcctaactctgtttcggcttctcctttacctgatggtgtaaactccaaggaagatcaaggtaaacaaggagaagaagaaaaagaaagctccaattccaacaatgaaggcaagaaatcgccgtttttcccgttttatagtcccagtccagctcaatacttgttttccaaaaagtctccggcgagatcttcaaccaattccactccaaaacggtttttcaagagggcattccctccgccg

SEQ ID NO: 204149 - DNA, 310 bp, Gossypium hirsutum
caatctgatatgtttgatcagcggcttcaggctaagattctgaatgtggttgatgtctcttatggaggagagaatggtttcaaccaggcaattgagctttcctctgagatactggcgaatgtgaaattcatacaggagaagcgcttaatacggaaatactttgaggagatcagtcaagatactgcgaagtatgttttcggagtggatgacacactgaacgccttggagatgggagccgttgagacacttatagtgtgggaaaatctggacataaatcggtatcacctgaagaatagcactactggtgaaa

SEQ ID NO: 204150 - DNA, 226 bp, Gossypium hirsutum
  unsure (1)..(226): unsure at all n locations
tcccgttttccantcttttttgagaaatcggtaccgaaaaatgtcgtcgtcggggaggaacatcacccttaagagctcagacggcgaatcattctaggttgaggaagcggtggcgttggcgtcccacacgattaagcatatgatcgaggacgattgcgctgataacgggataccgttgcctaatgttacgagcacgatcttacccaaggtgatcgagtactgcaag

SEQ ID NO: 204151 - DNA, 430 bp, Gossypium hirsutum
ggcgagcggagggaaagtgtcttttaaagtcactcttacctctgatcctaagctccctttcaaagtgtttagcgtgcctgaagcagccccttttacagccgtcttgaaattcgcagccgaggaattcaaagtccctcctcaaaccagtgctatcatcaccaatgatggcgtgggaatcaatcctcagcaagtgcaggaaatgtgttcctcaaacatggatcggaacttcgcttgattccccgtgacagggtgggagccttttgaaataacaaaaacttcatttgttatctctgagtgagaagactggttatgactttgtttggttatgggtcctttgttttggtatgtatgtttaaacttttacttgatgtagaacatgacggatagcaacttccttttttcctacagaaaatatataagagcaatataa

SEQ ID NO: 204152 - DNA, 370 bp, Gossypium hirsutum
gaaaaatacagcaatggagataagcaaggcgatgatgatggcagtggcagctgtcggattggctttagtgctaatggtgcctcaggccgatgctacaacgtacattggtggagggggaggcatcggttggactactaatgtcaattacactgtctgggctcgaggaaagcacttctacaatggcgactggctttattttgtatatgatcggacccacatcaatgtgctacatgtgaacaccactgcctacgagtcatgcaatgccgatcactcccttcacaactggaccaaccggatctggaaaggatgtggttccgcctaatgtgactccccactactatttcaatagtggcacaagcttcctgctacg

SEQ ID NO: 204153 - DNA, 418 bp, Gossypium hirsutum
cgagatttgattaaccatggctcatagcattcgtcaccctttcttccttttccaacttttactcataagtgtctcactagtgaccggtagccacactgtttcggcagcggctcgacgtttattcgagacacaagcaacctcatcagagctcccacaattggcttcaaaatacgaaaagcacgaagagtctgaatacgaaaagccagaatacaaacagccaaagtatcacgaagagtactcaaaacttgagaagcctgaaatgcaaaaggaggaaaaacaaaaaccctgcaaacagcatgaagagtaccacgagtcacacgaatcaaaggagcaaaaagagtacgagaaagaaaatctccagttccccaaatgggaaaaagctaaagagcacgagaaacacgaggtcgaatatccgaaa

SEQ ID NO: 204154 - DNA, 474 bp, Gossypium hirsutum
aaatatcatgcatttttggcctctgaatctgtcatcaaacagatcccccgtctcttgggtcctggtctcaacaaagcagggaaattcccaacccttgttactcaccaggaatctttggagtccaaagtgaatgagacaaaggcaatggtgaagttccaattgaagaaagttctttgcatgggagtcgccgttgggaatgtagcaatggaggaaaagcagatcttccaaaacgtgcaaatgagcgtcaatttccttgtttcattgttgaagaaaaactggcaaaatgtgaggtggctttacttgaagagtaccaagggaccttcaaacaggatcttttgaattatgcatggagtgaaatcatttttttaattgagaatgttcaaaaattatgttatttgatgttggaatcacgaattttttagacattgaaagtttttgtttgcattcaaaaaaaaaaaaaaaaaaaggggggcc

SEQ ID NO: 204155 - DNA, 301 bp, Gossypium hirsutum
attcattcagtgaggtgaagaaaaatgtcttgctgtggtggaaactgcggttgcggctccggttgcaattgcggcggcggcggcggctgcggctgcggcggttgcaagatgtaccctgagatgaactttgctgagcaaaccacaactgagacacttgttcttggcgtggcaccccggaaagtgaactttgatggagctgaaatggaaactggggctgaaaatggctgcaaatgtggagataactgcacttgcaaccccttgcattgtaaatgaagggaaaaaaaaaaccgaagcatattat

SEQ ID NO: 204156 - DNA, 407 bp, Gossypium hirsutum
atcactaaaattaagttaaatttcatgctacaaaaatcactaaaattaagttcagatttcatgctacaaagcaaatgcacaacatgcagtctcgtggggaaacagataattcaaacaggcatagataaagctcaatcaaatgataaaaacatattaacccacaatttcaacagattgaaaacctttctccatcgacgccttcacagcattcaagaacaattgtgtcttccggctgattgtcggccactttttatccggttgtgctccattctttttaatatttgcaaccaagctggcaaactctctcaccatgcaggctttctgaggtaaatctacagtgacagtgtgctcactcggaagttgcacccatccggttacaagttcgttaaatccaggttttgcggacg

SEQ ID NO: 204157 - DNA, 397 bp, Gossypium hirsutum
gaaaaaatggttctgctagacaaaatgtgggacgatgtagtagctgggcctcaacctgaacgtggtctcggcaggcttaagaagatcaccacccagcctttgtccatcaaagatgaaggagaaaagaaaaagtaccagaggtcgttgtcgctgccgaatagtccagtgtcaggtccgacacccgtgacaccgacgactccgacggcgcgtaaggagaacgtgtggaggagtgtgttccatccgggtagcaacctaaccaccaaaagtatatgttctgatgttttcgacaagccacaaaccaactctcctaccgtctatgactggctttacagtggggagaccaagagcaagcatccctgagagggtggggactgacaggccgctatcacgctgctct

SEQ ID NO: 204158 - DNA, 353 bp, Gossypium hirsutum
gagagacacacctcaaaaaggatctagaaaagagaatatctccttttattttcatttcgtcttcatttcatctcaaatccatcatcgaaattacttgtagttatcagaatggggacaataggcaaaactactacggccactatttttctttgtcttcttctgtttcctattgtcttttccacgcctaatgacagatttgttagaattggactcaaaaagagaaagattgaccgaaacaatcggatggctgcacaccttgaatccaaggaggaaaaggcatctgaagcttttcttagaaagtatcgtcttcatgggaacttgggggaatcagaggacattgatattgtggcact

SEQ ID NO: 204159 - DNA, 393 bp, Gossypium hirsutum
acagaaaggcactcaaagcataggtactatagataacaaatcacatatacccgaaactacgggtttatcatcatcgagactgataaaagtctttatggaaaaacttggaaatcggtaattgtccaagttttgccatttcgaaacctataaacatttcacttaagtaaaagacatactgtaggaaggaaggaagcttccccgttgcaaaagcctaaaagaactgtattcagttagcacggcttttgaagacatcgagacccatctcggttggatctgttgcttgcaattccacttggattccatccagttctcgcttgaatctgtctttggagctaccgtatatcattttgctcctgattcttgatgtatcgggagacaagcaatgaaaaagat

SEQ ID NO: 204160 - DNA, 242 bp, Gossypium hirsutum
aaaccttcttattaaacgccgcgaaggacttctctctcgacagcaacatccggagcgacggcggctgctctcttccgtcgtcgggtccgagaaaaagttagaaagtcttcccgccatggttgcgggtgtttggacagatgacaggaatatgcagcttgaggcaacaactcaattcaaaaagctgctatcaatagaacgtattccttcgatcaacgaagttgcacagacaggtgttattcctc

SEQ ID NO: 204161 - DNA, 407 bp, Gossypium hirsutum
tttggctttattgtgatggatggcaatggaactctttgtgggacattaagtggtaacaccagggaggtacttcataagttcagtgttgatcttccaaagaagcatgggagaggtggacaatcagcccttcgttttgctcgacttcgaatggaaaagcgccacaactatgtgaggaagacagctgaacttgctactcaattttttatcaacccttccaccagccagcctaatgtatctggattaatattggctggatcagctgatttcaaaactgagctgagtcaatctgatatgtttgatcagcggcttcaggctaagattctgaatgtggttgatgtctcttatggaggagagaatggtttcaaccaggcaattgagctttcctcttaaatactggcgaatgtgaa

SEQ ID NO: 204162 - DNA, 333 bp, Gossypium hirsutum
  unsure (1)..(333): unsure at all n locations
cggcacgaggaaaaatggttctgctagagaaactttgggatgatgtagtggccggacctcaaccggaacgtggccttggccggctgaggaagatcacaaccaccccacccttgtccaccaaagatgaggcttcatcaatggcgatgccgacgagtccgacgacacctgggacaccgtcgacgccggtgtcggctcgtagggacaacgtgtggaggagcgtgttcaatccaggtagcaaccttgcaaccaaaggtattggcgctgaagttttcgacaagcctcaacctaactctnctactggttatgactggctttacaagcgggagaccccga

SEQ ID NO: 204163 - DNA, 367 bp, Gossypium hirsutum
gattgccttattctctatctgtgaatcagtttgctgatttgacatgggatgagtttcgaaaacacaggcttggagctgctcaaaactgctctgccaccagaaagggcaatcaccagctcactgatgtcgtccttcctgaatcgaaagactggagggaatcaggcatagttagcccggtcaaaaatcaggggtcctgtggatcttgctgggcattcagtactactggagctcttgaagctgcttaccatcaggcatttgggaaaggaatctctctttcggagcagcagcttgtggactgtgctggagcctttaacaactttgggtgcaatggtggtttgccatcccaagcctttgagtatatcaaata

SEQ ID NO: 204164 - DNA, 378 bp, Gossypium hirsutum
ctgtttattaaattttcggcaggaattgtactagattcatgccatgaatctaacagatctcatctcgttgccaagcttgtatttctggaccaactctgtgacatttcaccataccttccaagaagctctcttgaggcccatgttccttatgctattctccgttcaatatatagccagtactacgcaaactctcctttgatgccaatggcattattaagtgcttcaccacgccattcacctgctgtatcattggcccatgcgtcccctataatgaggcaaccccgtggagattcgactccacagtacagtgctaatgattcaggttattttaaaggttcatcatcacacagccaagagcagctttatgatgctgaaagt

SEQ ID NO: 204165 - DNA, 323 bp, Gossypium hirsutum
gacgatatgccattgatgcctcaattgtacgtatcatgaagagtcggaaagttctgggtcaccagcagttggttatggagtgtgttgagcaattgggccgcatgttcaagccggatttcaaggccattaaaaagcgaatagaagacctgattactcgagactatcttgagagggacaaagataaccccaatacattccggtatttggcatgataacctagtcattatcccgtaatgaagcggtgactgttgccgctgcaaataactcgaagcggctggatatgatcggttcgtgacgaaagttgcatacacataatgagatgc

SEQ ID NO: 204166 - DNA, 444 bp, Gossypium hirsutum
gaaaagcccatagagcacgagaaacatgaagtcgagtatgggaaaatacccgagtacaaggaaaaacaagatgagggcaaggaacataaacatgatgagtgccacgagtcacacgaatcgaaggagcacgaagagtacgagaaagaaaaacccaatttccccaaaggggaaaagcctaaagagcatgagaaacacgaagtcgaatatccgaaaatacccgaatacaaggaaaaacaagatgagggtaaggaacataaacatgagttccaaaagcatgaaaaagaagaagagaaaaaacctgagaaaaaggcagagtactctgagtggccaaagtacatgtttactcaatctggctcgggcactaagcctttgaccatatgacactggtgcatgtgccaatatcatgccataatttcatggtatatcttaattatatgggtaatt

SEQ ID NO: 204167 - DNA, 395 bp, Gossypium hirsutum
ctcaagctcatagctgttgattggttcaaagtcgataaaggaacagataaaattgcattgcatccaaagagtctagctcagtctgatgccggaaaaaatcttccatttatccttgtgattaatctcgagattcctgcgaaaccaaactatagtttggtcctctactatgctgctgaaaggccagtgaggaaagattctttactggaaaagtttgcagatggaacggatcaatttcgtgatgcaagatttaaactgataccaagcattgttgaagggtattggatggtcaagcgtgcaattggaacaaaagcttgcctacttgggaaagctgttacatgcaaatacttcaggcaagacaattttctggagattgacgtggacattgggtcatcatc

SEQ ID NO: 204168 - DNA, 320 bp, Gossypium hirsutum
tcttaaccgtcttgtctcccaggtcatttcctccttgactgcgctcactgaggtttgatggtgccttgaatgtcgatgtgactgaattccaaaccaacttggttccctacccaagaatccacttcatgctttcctcgtatgctccagtcatctctgctgagaaggcttaccacgagcagctctcagttgctgaaatcaccaatagtgcctttgagccctcatctatgatggctaagtgcgatccacgccatggaaagtacatggcttgctgtttgatgtaccgtggtgatgttgttcccaaggacgtcaatgctgcagtc

SEQ ID NO: 204169 - DNA, 444 bp, Gossypium hirsutum
gttggctcatgaagctgatgggtctgttagatttgggcacggcgatggatctgcgtatttgttcgatcccgacatttataccgacggaaggatctccgttcagggtattgacggcgtccttttcccgctggaagagaaagctaaggaagaaaagaaaaccatcaaagttgccactgtgaaacccagaagagggaagttgcttgaggctgcatgccgaatgcttgtggctattggacaagattcacgtttcacctcttgccgactatgaacacaacaattacttcccccatatcataaacaaatcttcaaacaacaaaaaaaggtgaaccagcatagtataaaagcctggaatgatggtttgctctcttgattaggattttaagtttctttttttcttctttccccttttttggtctatattctatcggtcataaggcaacaaaa

SEQ ID NO: 204170 - DNA, 365 bp, Gossypium hirsutum
ccactccagttatttacctgaacctgaccttgagaagcaaggaaacaaccaggtgttgcctcaggatgaaggactgccaggctcagttaggggttcagcctgtgagtccagtcccacattgttaaccatcgtagtaacgaagggtgagtctcatgtaactcagcagccgatagctcaattaaaagttatggaatgcgttttggaggaattgcctcgtgtggctcctcaaaagggctattttttgaggaacagttgttctgatgaggaatgcagagtttgtcaacaggagaaggaagaaagtcttatagatcttgggtgccaatgtaaaagtggtcttgcaaaagctcatcgatcttgcattgaca

SEQ ID NO: 204171 - DNA, 434 bp, Gossypium hirsutum
tacgttgccacccgcatgaccctttgggaccagatcatgcctcgttgaccattatacgattcgtgctgaaccaccggtccaggggtccctagtctcggtgtgatttcaccatcttgctcaatcacatcgttcttggttgcatgtttgttcgctcttctgtaaacaaggtttgtattgccaaactgattgtacttgctggcgatatcaatatttagggtgaggagcaaaagatactggatgtgctttcaaatgaagactatatcaaagctttattgagcagtggcagaactcgcatccttatctcggaagacgatgaacatgctattatcgccgagccctcaaagtgcgtaaggtactgtgcatctctcaattcgctacaccggtcattcaacattgattgcattgtttatcttgaaacaatttttgggctttac

SEQ ID NO: 204172 - DNA, 382 bp, Gossypium hirsutum
acgaaccaggcctcgatggccgtttacccacgcgtacgggaccttcgggacagcgaggacacatggatgaacccggatattccatgaatattaacatgagttcttgcaacggaccactcccagttaaaagaggaccaccaccaagaagtgggggtcctgctactaaagatctgcacactcaggaccagttcgcattaacagaggaatgggcagaagacctgctgtatcacgtactagagatagctatggacgtccacctggacaggaaccgttgtcctctcgtacagatgtttatatgtgcccaaaagatgaagggtattactctacagacagcatattccgcagaaatgacccaagctctggagatactagagattatgca

SEQ ID NO: 204173 - DNA, 454 bp, Gossypium hirsutum
gaggacccttaagggtgctttttatggcaactataaaccaggcactgatattcccatggttgtcgacaaatatttgaacaaggagctggggctggatatggacaagttcatcacacactctgtgccttttgccgatattaacaaggcattcgactacatgctccagggtataggtctgagatgcatgattcatttggatgcttaaggaaatgttgctgctgtatatttgcccatccaaggatcaaaactctaatgttttgtcctactatgtgttatattatgtgcctacttaagctacctttcccggttatcaagagtgcctatatagaactctctctctcaaaaaaaaaaaaaaagagaaaagagttctttatatggagttttatattatatgctgagagaataaattatcttgtaaaagcatgcttttgtaatgaaataaatttctattact

SEQ ID NO: 204174 - DNA, 376 bp, Gossypium hirsutum
ggctctgagtatgcctgtaagtctatatccaaaaggcaggggatctggaaagacgatgtggaggatgtacggagggagattcagataatgcaccatttggctgggcataagaatattgtgaccattaaaggtgcatacgatgatactacgtatgtgcatattgtgatggaactatgctctggaggtgaattgtttgatccgattatgcacagggggcattacttcgagaggaaagcaactgaattgactaagatcattgatgctgttgtcgaggcttgacattcactcggggatatgcatagagatttaaagcctgagaatctgttgatagttaacaacgatgatgatttctctctgaatgccattgagtttggac

SEQ ID NO: 204175 - DNA, 448 bp, Gossypium hirsutum
  unsure (1)..(448): unsure at all n locations
ctcataacggtcgaattgcatctttgattttcgttaaagagtgtaagtcanggtcgccaatcgaagactcgcaacaaatcgacaaaattgaagcacgtttaaggaatgttttgaaaggagataacgatattcgtagcgcgaaaaccacggtttctatggccgtaactcataccgaaagaaggttgcatcaaatgatgttcgcagatcgtgattacgaacggaaaccgattttggaacataagtcggagttgtcggctgtcaccgtgcaaaactgggtggaaaggggttattctgttgtgaatgttcaatgcaaggaccgaactaaactcctgtttgatgttgtttgcacattgacagatatgcaatatgtngtgtttcatgccactatcaaaacatcaggccgataagcatattttgaattttatattaagcacagagaccgaatact

SEQ ID NO: 204176 - DNA, 408 bp, Gossypium hirsutum
atcatctcctttttctcccattctcctctctctgtttctactattcagttgtgtcgtgtcagctcaaacggctcccgcccctgccccctctggccccttgaatttcactggaatccttgacaaaaatggccaatacacctacttccttcagcttttggcacagactcaagttgcgagccaagtacacactcaactgaaaaccaccactgaaggctttaccgtctgtgctcccacagataatgccttcaacaacctcaaacctggtaccgtcaataacctgtacccacaacagaaagtacaactagttctataccacgttatttccaaatactactcctagaacgatctccaatttgttagcatccccgttagaacccaatctggtcaggatttccgcctaacgtcact

SEQ ID NO: 204177 - DNA, 194 bp, Gossypium hirsutum
taccaccgaccaggaagaacaaaattccatactctatctgaaatccaaactgtaccgatttgataaacacactaatcaatgtaaagagagacacactaatactgtaaaactcttcaaccacaaaaagaccacaaaagttcaactttttattaagcaatctaaaactctcaaaatctgcaccaatcattatatgt

SEQ ID NO: 204178 - DNA, 349 bp, Gossypium hirsutum
  unsure (1)..(349): unsure at all n locations
aagagatggctgtgagcgcaacggtgatcggagcacttctgggactgggcacccagatgtactccaacgctctccgcaagctcccttatatgcgacatccgtgggagcacctgttggggatgggtctgggagccgtgttcgttaaccagcttgtgaattgggacgctcagctccaacgggaccttgacaatatgctcgaaaaggccaaggctgccaacgagcgccgctactttgatggagatgatgattaatgctttcgccctatcatcagataagacattcatgcgccaagctactgtggtcataaaccggttcagattgtgagtgggtaactttggactnctttttt

SEQ ID NO: 204179 - DNA, 329 bp, Gossypium hirsutum
ggggaagtcaatgtcgttgacgaacaccgggtttcgttgcgggagggtcccaaactggtggagaagcggttcaagttcccaactttggaagtgcccggtggagtttcctttgaggatttgggtcaccatgctgggtattacaagcttcctaattctcatgatgccagaatgttctacttcttcttcgaatcacgcaatagcaaaaaggaccctgttgtaatctggttgactggagggccaggttgtagcagtgaattggctttgttttatgaaaatggccctttcaccattgctgataacatgtctctggtttgaaatgattatggttg

SEQ ID NO: 204180 - DNA, 443 bp, Gossypium hirsutum
  unsure (1)..(443): unsure at all n locations
acacaattgtagaagctcatgaatgcatattgcgaccgacgatctgtggatttcaactcgattgccttcttgttcgatggtcgccgcctgcgaggtgagcaaaactcctgacgagcttgagatggaggatggtgatgagatcgatgctatgcttcaccaaaccggtggtactgtgtgaagcgagtactactttgccacatttagtatttgatgagttagttatggtctgattatgtagatgtttccaatgtttttatatacgatcttattgccatgttatgaagacttgtggaccttgttttgagtcatcttgctcttatagaagagcttgagtttctagtgtttacaaagtgagatggaactcgggactttgttccgatatgcactcngtttgaaggcttgttaacagtcactatctataagtattgatttctgggttgctt

SEQ ID NO: 204181 - DNA, 328 bp, Gossypium hirsutum
ctcgtgccgtatcggcacgaggtttttttttttttggtttgttataaaaccatatgcatccgtacgagtctagtatctactgatgtaaagatgttcgtaaacaaaaatacataagccaggaaacaacatttctaacacccaaacaaggtattcaggttgaaagaacagaaacattttccaaaacgttaagaaagcaaacagtaagaaacacacactactactattcctggagttcctcctcctcatcctcctcctcctcataatcatactcctcatcagctgttgcatcttgatattgttggtactctgaaaccagatcgttcatgtt

SEQ ID NO: 204182 - DNA, 427 bp, Gossypium hirsutum
ggtattcaaggcattgcttggtcttttggtggcatgatctttgctcttgtgggctggggtgccggcatttcaggtggtcatattaaccctgctgtgacctttggattgtttctagcaaggaaactgtcacttacaagggcattgctctatatgatcatgcagtgcctgggtgctatctgtggagctagtgtggtgaagggattccaaggagataaccgatatgagatgttgggtggtggagctaatgttgtgaaccatgtctacactaacgatgatggtctaggtgctgagataattgggacttttgtgcttgtttacactgttttctctgctactgatgctaagagaaatgccagagactcccatgatcctatcttggctccactttcgattgggtttgcaatgttcttgggtcatttggacacca

SEQ ID NO: 204183 - DNA, 400 bp, Gossypium hirsutum
ccccgactgtttgtcatttaaacaccgcatctcattcaggaggtacctgttggattcaccctgtctctgacaccaccaacgatattcagctttatgccacacttatatcatcaacccatagttttccaacatacgatctccgacgatcatggtattagagagaccacaccgaccacaacgactactcccatcaggcataacccaagaccataccctggccaatgtagcacacgaagctctctatgatacaaccatctcatggtccccattccatgacacttatgaattcattatctcatgtcatcctgttgtcactgatgaacaacccttacagttcacggttcctacaacttataccagtgccactctgacaggcctcaccagtggtgccatctacaac

SEQ ID NO: 204184 - DNA, 324 bp, Gossypium hirsutum
catggatgaaatggaatttaccgaagcagagagtaatatgagatgatttggtatcagagtatcaacagtatcaagatgcaacagttgatgaagaagaagagtatgaagaagaaggagctgaatatgaatgagaaaattaatatttgaacttattaaatataatttccagtttctgttttttttaattaattattgcgaaagaaattagttattttgatgtgtatggagtttcatggtaatggccagtttcaatatgaagcaaaagggattgtattattgttcaaaagcctttgaaaaacagatttaagaaatcaaagtacttac

SEQ ID NO: 204185 - DNA, 463 bp, Gossypium hirsutum
aaattttgctccttttcttgtgtttcttcagaaggaagaagatcccatcccttatttgctctttattttcgcatcttacttcttaaggagaaaaacaaacacgatcattgtcggctacactcccaaacactcaactctccttcctctcataaacaatttttgcccaattcttcaagaaaaagaaaccctagctaaacatggctgttcccaaactagaaatgagacctctcggaaacacgggcctcaagctcagcagcgtgggcttcggagcttctcctctcggcagcgtcttcggttccgtttccgaaagcgacgctgtcgccttcgtcctcgaagccttccgcctcggaatcaacttcttcgacacctctccgtattatggagcgacattgtcagagaagatgctgggtaaaggaacttaaagctcttggagttcctagaagtgaatatatagtttcgacaa

SEQ ID NO: 204186 - DNA, 405 bp, Gossypium hirsutum
cacaccctattgagacaatgagaaagctgctagccgttgcgtttcttttcttcttcttttgggataaaacattagctcaaatagctccggcgccgccgttaaaggtggacaacatcacttccatcctcgaaaaaggtggccaattcaccactttcatcaagctattgaaagccacacaggtggctgatcaactaaacaaccagctaagcacaccggaccctaacgacgggataacggtgtttgcaccgagtgacaacgcgttctccggactcaaacccgggacgttaaactcactttcgaccaagagaagcttcagttggttcagttccatatactcccgacgttaatgtcgacgtcgcagtttcaaaccgcgagtaaccctttgagaacccaagcttgggatgt

SEQ ID NO: 204187 - DNA, 352 bp, Gossypium hirsutum
aaattttctttgcctagaagcagccgaagatgacagggagttattgatgtcccacatgaactttgaaaagaaatttggacaatcagccatttttgtaacttcaacactgatggaacaaggtggtgtccctccttcttcaagccctgcagctttgctcaaagaagccattcatgtaattagttgtggttatgaagacaaaaccgaatggggaagcgagcttggctggatttacggctcgattacagaagatatcttaacaggattcaagatgcattgccgtggatggagatcaatatacttgatgccaaagttgcctgcattcaaaggttcaagttccatcaatctatcggat

SEQ ID NO: 204188 - DNA, 430 bp, Gossypium hirsutum
gtcttaataaacgccttcgatttaccttcgatttccatttggttctcgattgctacgtttttgaatttttagtgagcgaaaatgagagagtgcatttcagtccacatcggtcaggctggtattcaagtcggaaatgcctgctgggaactttactgccttgaacatggaatccagcctgatggccagatgccaagtgacaagactgtcggaggaggtgatgatgcttttaacacctttttcagtgaaactggtgctggaaagcacgtccctcgtgctgtctttgtggatcttgagcctactgttattgatgaagtgaggactggtacttaccgtcagcttttccaccctgagcaactcatcagcggcaaggaagacgctgtcaacaacttcgctcgtggccactacactattggcaaagagatcgttgact

SEQ ID NO: 204189 - DNA, 434 bp, Gossypium hirsutum
ggaaaacgtcttcgtctttgggcttgatcgtgccgtcatagactctgaccccaagttccggttcagcaaaaaggaggtgtctacggcggtggaggtgacgggttctagtgctgggaacaccatttgttcgatatgtttgtgtgagtatagagaatcagagatgttgaggatgatgcctgaatgtaggcattgttttcatgtaacttgtattgatgcttggctgaaacttaatgggtcttgtcctgtttgtcggaactcaccgcttccgacaccgatttctacgcctttgtcggaagttgtacctttgtctcagtacgatgctgatcggaggtggtggtgacttttggcttttgggttaccatctttttcattttttttttcttcaatttttttcctgtgtggaaaatttgttttttggcatggatgcttttttt

SEQ ID NO: 204190 - DNA, 406 bp, Gossypium hirsutum
  unsure (1)..(406): unsure at all n locations
cagagaagaattatggcctccattgatgttcctgaacagggtgctnntggttgcacatgcagaagctcttagaaaggcttgtaaaggatgggggacagatgagaaggcaataatttcagtgttgggtcacagaaatgcacttcaaaggacgcaaatcatgcttgcttatgaagacctttaccaggaagatctcatcaagcgtcttgaatcaaagctttctggtgatttctagaaagcagtgtatcgttggatattggatccagcagaccgagatgccgcgttagctaatgttgccataaagaaattaagccctgatcaccatgtgatcgttgaaatttcatgcaccagatcccctgaaaagctcttggctgtgaagagagcttatcatgctcgatacaagcattcc

SEQ ID NO: 204191 - DNA, 413 bp, Gossypium hirsutum
ctcctctcgaggtctctctttttctcctatttctggttttgtcagcttatgtcttcaattacaatgaatctacccaaatttaaagtcgctttcttgatttgaaggtaaatgaatctttagaactggttccattggtggacgaaaagatggtgaagatgatgatgtttaatgaaagcagaagaaagttggggactttccagatatgtgctgcttgtacatgctgtggtggaccgaaaggtgtttgcttgccatccccttgttgctatgccttcaattgcaacattccaaacagaccttttggtttctgctccttcactcccaagacctgtaattgcttttgatgccatctctagtttcaaagtttattttatctatatttcgtaattttggcttggttttaactaaggagttcc

SEQ ID NO: 204192 - DNA, 363 bp, Gossypium hirsutum
tcgagttttttttttttttttttttttttttttaacacacaataacattctttgtatagtaacacacagtaacatacatatgaaagaaaatggggtctaaaaatcacagtaaattgagaaccccataacataaaattataacatctcagaaaaatagaaccagccatccacctaagaatgccaaaaccagcagagtccaaatgcccgagttcatcatgatcctaggtgaggatgaacccgaagacgaaggctttgatgaggaaccagtttcttcggattttgctgctgatggagtgtcagctgatgggctaataccaagagccggggcaagtgcaagtgtcggaggtatgtcggtcccgaaaa

SEQ ID NO: 204193 - DNA, 388 bp, Gossypium hirsutum
  unsure (1)..(388): unsure at all n locations
tgagagcaatgagcatacttggtttttccaaagnggaaatccagtaccgaggtgtcaaggcttgtgacatntccataaaancgagnntaccttcagtgttgatgttcaatattnctgatgnntgagtgatttgcaggccccggcaaagatcagtacatacatgattggtcctttcccaacattaagaagtgaaaaaccaaaattgaaggtcaaagttcgtttgaatttgcatggaattgtgtctgttgagtcagctacactcttggaagaggaagaagttgaagttccagtttcaaaagagccggcaaaagaagatgctaagatggagacagatgaaaagcctaatgatacttctgcccctggtgccaacgagacagatgttaatatg

SEQ ID NO: 204194 - DNA, 396 bp, Gossypium hirsutum
tggaaatcggaaaccatgaaaccggtgatgctcatcctttgctgagagggggggggagaaaaactacatacacccatggtttctcttcagctcaaatccgatcacttgctgccacctgtgaagctttaatccctcctctcccacttgattcagcccaccaggcttcttcccttgatgctttctacaaagcttctggggctgagcctccacttcctgatgaggtagcagagatgatggtgaagagggtggttgaacccagggtactctcgtttgtgaaagtagtattggcagttatatcgtttagattgggcgcattgttgctttgcgggtgggattgctgtgactggaaatggccattcattcacaaagtttcggaactgccaatggagaagagag

SEQ ID NO: 204195 - DNA, 430 bp, Gossypium hirsutum
ctttcgaaccctatcctgcatcttttaccctttaccaacgcctccgcttcaactggcccctgttgtactcaccctgactatgacactgtcaatggtattcaatttcatgccactcctgttcatcaacccagcgttgggcaacaaatgatctttgacgaacatcttcttaggctgaccacaccgtccacaactgccacccccataatgcatacgccaagaccatacccgacgcatgtacgactagaaactctctctcagacaaccatctcatatgccccattccaggacacttctgagtacatcatttcatgtcatcctgttggcactgatgaagaacccttacagttcagggttcctggaacttctaccagtgccactctgacaggcctcaccaaatgtgccacctacaacatcatattggacgcactta

SEQ ID NO: 204196 - DNA, 417 bp, Gossypium hirsutum
gggaggatgattaaaggggacagggtttggcaaatagcttggggaaggggattcaagtgtaacagtgcagtatggaagtgcaacagaaccatcaaaacaccaaaagatggaccatgggcggattgcattcagaggtacccagctcatatccctgaagttgtcaagctgtaggctaatagcaacaaacaaatatggttgattcatggctttgtcaaactcagatccttctggatctctgcatttatttatatttctactggtaactttttctctactcattttgtttctgtcatactgtatcccttttccattttcttttcaaaatcatgagtttgcataggtacccgatatggtgctctttgtatttgctaattaatgtacaccctgctggggaaaataacaagtgtggaaaaacaa

SEQ ID NO: 204197 - DNA, 351 bp, Gossypium hirsutum
catcagccctgacacagtctgagattcgtgacatcatcctgggagctgagattactccaccctctcaacagaggcagcagatagcagagattgagaaacaggcgaaggaggcaagccagctaacagctgtgacaactaggactacaaacgtgcatggagatgagctcattgtcaccaccacaagtccctatgaacaagcagcatttgggtccaagacggattggcgtgttagagcaatatcagctactaatctttatcttcgagtgaatcatatatatgtgaactcagaagacataaaggaaactgggtacacatatatcatgccaaagaacattttaaagaaggtcatct

SEQ ID NO: 204198 - DNA, 261 bp, Gossypium hirsutum
gaaatggctgccatgaagagggacgctgagcattattcacgccaggagcatatggaactagagaaacgctaccgtgaactaactgacctactgtactacaagcaaacacagttagaaaccatggctagtgaaaaagctgcagctgagttccagctggagaaggaaataaagcgtcttcaagaagctcaggttgaagtagagagaagtagagttcctcgtcgcgcgtcatcttcctgggaggaagacacagatatcaaatct

SEQ ID NO: 204199 - DNA, 329 bp, Gossypium hirsutum
cttcttatggtcctaattacattgtaccagacattgcggaagggcgatataagtgcaccaggagcggatatattggctgcatattcaccggtagcttgaccatcgataactacaaccgatccaaggcgagtttaatactacatactatcatgaacctcaacgtcttgtcctcatgatgctggtgtatctgcatacgttaagacttttcacccgcattggtctccctaaaccattaaatgtgcttttatgactactgcttgtgcgatagatgcaccgacgaatcaaagagctgaatatgcttatggatcatgacatatgaaccctgtcaa

SEQ ID NO: 204200 - DNA, 345 bp, Gossypium hirsutum
tttctctgtgttcccttcccctaaggtgtctgacactgggggcgaaccttacaatgctactctctctgttcaccagcttgttgagaatgctgatgaatgtatggttttggacaatgaagctttatatgatatttgcttccgtactctgaagctcactactccaagctttggagacttgaaccacttgatttctgccaccatgagtggtgtgacatgctgccttcgtttccctggtcaattaaactcagatctacgcaagcttgccgtcaatctcattccattccctcgcctgcatttctttatggttggctttgctccacttacttctcgagggtcacagcaata

SEQ ID NO: 204201 - DNA, 318 bp, Gossypium hirsutum
  unsure (1)..(318): unsure at all n locations
catcagccctttcctattctgagattcgngacatcatccttgcaacgtttattactccaccctttcaacacaagcagcagatatcagagattgagaaacaggcgaaagaagcaagccagctaacagctgtgacaacttttactactaacgttcatggagatgagctcattgtcaccaccacaagttcctatgaacaattcagcattgggtccaaaactgattggcgttttaaaacaatatcagctactaatctttatcttccaatgaatcatatatatgtgaactcagaggacattaaagaaactgggtacacatata

SEQ ID NO: 204202 - DNA, 342 bp, Gossypium hirsutum
tggttatgaataaaaaactgagtggggcacagagatcggatggatttatgggtcggtgacggaggatattctaacaggtttcaagatgcattgtagagggtggaaatcggtttattgtgtaccgaaaagaccggcattcaaagggttcgctccaatcaatctctcagatcggttgcaccaagttttgagatgggcacttggctctgtagaaattctccttatgtcgcactgtccactttggtatggttattgcggaaaactgaaatggctcgagaggcttgcttatatcaacaccattgattaccctttcacctcgatgcctttactcgactattgtactat

SEQ ID NO: 204203 - DNA, 333 bp, Gossypium hirsutum
tgtggattgttgccctactggattcaagtgcggtatcaactgccagcggccaactgttgttccaggaggggaccttgccaaggttcagagagctgtctgcatgatctccaactcaaccagcgttgcggaagtgttttcccgcattgatcataaatttgatctcatgtatgccaagcgtgcatttgtgcactggtatgttggtgagggcatggaggaaggagagttttctgaggcacgtgaagatctcgctgcactggaaaaagattatgaagaagttggcgctgagtctggtgaaggagacgaaggggatgaggaggagtattgagggatgta

SEQ ID NO: 204204 - DNA, 367 bp, Gossypium hirsutum
cagaaaatctaacacatgggaaaaaatgagagagatccttcatgttcggggtggacaatgtgggaaccaaatcggttccaagttttgggaggttgtttgcgatgagcacggcatagatccaactggaaggtacattggttcctcggatctgcagttggagcgtgttaatgtttactataacgaggcttcatgtggtcgctttgttcctcgtgctgtgctcatggacttggagcctggtacgatggacagtgtccgaactggtccttacggccagattttcaggccagacaactttgtttttggacaatccggtgctggaaacaattgggccaagggccattacactgaaggagccgagcttatcgat

SEQ ID NO: 204205 - DNA, 368 bp, Gossypium hirsutum
ctcgtgccgaatcggcacgaggaaaacttccgagcactatgcacaggtgaaaaaggtgttggaaagagtgggaaacctctccacttcaaaggaagtgctttccaccggattattccaaacttcatgattcaaggtggtgattttacacttggtgatggaagaggtggagaatcaatctatggtgagaaatttgctgatgagaatttcaagctgaagcacactggacctgggcttttgtcaatggcaaatgctggtcccgacaccaacggctcacaattcttcatcacaaccgtgacaaccagctggttggacggcagacatgttgtgttcggaaaggtgcttgctggaatggacgtggtttacaaagt

SEQ ID NO: 204206 - DNA, 390 bp, Gossypium hirsutum
gagaatcatgagggtgttatcaacttcgacgagatcttgcgtgagactgatgcatttatggttgcccgtggtgaccttggaatggaaattccggttgagaagatcttcctagcacaaaagatgatgatatacaagtgtaatcttgcaggcaagcctgttgttaccgccactcaaatgcttgaatccatgataaagtctccgaggccaacccgagctgaagcaaccgatgttgctaatgctgtcctggacggtaccgattgtgtcatgctcagtggtgagagtgctgctggagcctatccagagcttgccgtgaagatcatggctcggatttgtattgaggcagaatcttcccttgactatggagcaatcttcaaagaaatgatccgatcg

SEQ ID NO: 204207 - DNA, 360 bp, Gossypium hirsutum
gagaagcatttttaattctctcatcttttgctcctgggctagttcaagctacttgagcagcatagtagtgaatgttgtgcatcatgtcaccggaggccacggccaccccgactggttgactaatgatattaatgctggcagattggattacttttactacattctagcagtgatgagcgccttcaatttcctttatttcctctatgttgctcatcggtatcgttacaagggccaagcacgaatagaaccgaaatctgaacccgatgtagagctaagttcgatgtaaccatgaaaccaattaagctgttgtagttttaatgtatatcacatgctaccaaataataaaaaacgtactcattt

SEQ ID NO: 204208 - DNA, 415 bp, Gossypium hirsutum
  unsure (1)..(415): unsure at all n locations
tgtgaattaaaattaagtaagcagaagattagttgatattatttatcatcatcgtcgtcgtccatattaaattatacaggatgggtcaccattcttgctgcaatcaacaaaaggttaagagaggcctttggtcccctgaggaagatgaaaagctcattaggttcatcaccactcatggctatggatgttggagtgaagtccctgagaaagctggtcttcagagatgtgggaaaagttgtaggctgagatggattaattatttaaggcctgatataagaagaggaaggtttacacctgaggaagagaagttgatcattaacctccatggggttgtaggaaacaggtgggctcatatagcaagtcacttgcctggaagaacagatnatgagattaaaaactaatggaattcatggat

SEQ ID NO: 204209 - DNA, 382 bp, Gossypium hirsutum
  unsure (1)..(382): unsure at all n locations
ctctttctaagaacatgatggcagtactgttgggatatcttggatttatggtgtttggaataatttctcttcgttttctctatcgtttcatagacaacaatggcctccctcgaaactggctatttgttgggatgattcccacgttacttctcaacatccgtcgccctcatgataaagttgcccaaatcctcagacgaagcaatggtaccttcttttatagaggactttggtttactaacaccagcttcttagccacctccgatcctgagaatgtgcgtcatgtattgagctccagttctgtttatttgaaaggtcctgaatggctgaaacagtttgatatcttncgcgatgcacttttcaattccgacggtgaggcatggaa

SEQ ID NO: 204210 - DNA, 369 bp, Gossypium hirsutum
gaataggcctggtttcttgcatcacaagaaagggggtgccatgaacgcccttgttcgggtctcgggggtgctcacaaatgctccttttatgttgaacttggattgtgaccattatttaaataacagcaaggctgtaagagaggctatgtgtttcttgatggaccctcaaattggaagaaaggtttgctatgtccaattccctcaacgtttcgatggtattgatagacatgatcgatatgccaatcgtaacacagttttctttgatattaacatgacaggtctagatggtatacaaagccctgtatatgtcgacacgtggtgtgtttacagaaggcaagctctttatgggtatgaacctccaaagggacc

SEQ ID NO: 204211 - DNA, 374 bp, Gossypium hirsutum
gaatttttgaggatacttatgttaaacactttgctaatggaaatcgtagaaaaggactgaaaactctaagaccacaagctaaaaaagaaaggcataggattacatttctctatggcttcttctctggttgctccattgcactaatagtggccattattgtgagcatacatgctagaaatcttcttaagagtcaaggaagagatcaatacatggtcaatatatttccactttacagcctatttggttacattgtcttgcatatgctcatgtatgctggaaatgtattcttttggaagcgttatcgagtcaacttttcgtttatatttggtttcaagcaaggaacatagttgggatatagagaagtacttcttctt

SEQ ID NO: 204212 - DNA, 431 bp, Gossypium hirsutum
ttccaacacactttattacaagcgtttctttccttattattctgttaatgttttgggtggccttgataacgaaggaaagggttgtgtcttcacatatgatgctgttggttcctatgagaaggttggatacagttctcaaggttctggttcaacgctcatcatgcctttcttggataaccaactgaaatctcccagtcctcttctattgcctgcccaggatgctgttactccgcttgtggaagctgaagctattgatttggtaaaaactgtttttgcatctgcatccgagagagatatatacactggagacaaactcgaacttgttatcataaatgcagctggtatccgccgggaatacatggaacttaggaaagattgattaatctccattcttcaaacttggttaccacctcttatagatgtgtgagttc

SEQ ID NO: 204213 - DNA, 436 bp, Gossypium hirsutum
caatgtatgaaccttctaaaaaacctccaatgtatgaacctaggccgccgaagccaccggtttatacacctccaaagaaagaaaaaccagaacccaagccaccaatgtatcaacctcccaacaacccaccaatatatgagccaaaaccacctaagccaccagtttatgcaccaccaaaggaagaaaagccaaaacctaaaccaccagtttatgagccttcggcacatgagccaccatacggtcactatccaggacatccacctttggggaagcctcaatagaatgctcccatcgactagccattcccaacaattgagctactagaaaaattagtatttataataagaagaactgccggctgatgttcatgtttattcttgtatggaatgtagtaatgcttactttcatgtttgaaaagagaccagctgctcatggc

SEQ ID NO: 204214 - DNA, 445 bp, Gossypium hirsutum
caaagatcaaggaagaataccctgatcggatgatgctggcgttgtcggtttttccgtcgcctaaagcgtctgatacggtggttgagccctataatgcgactctatcagtgcaccagcttgcggaaaatggtgatgaatgcatggtgcttgataatgaagctctctatgatatctgttttagaactctcaagctcactaatcccagctttggtgatttgaatcgattgatttcaacaactatgagtggagctacatgctgccttcgtttcccaggccaactcagctccgatctccgaaaactagccgtaaacttgatcccattcccacgcctgcattttttcatggttggttttgcaccctggacatccagtagctcgcaacagtaccgagccttaacgatccccgagctaactcaacaaatgtgggatgctagaaacatgatgtg

SEQ ID NO: 204215 - DNA, 448 bp, Gossypium hirsutum
cacaaatcgaatgagcacgaagagtaccagaaagaaaaacccgagttccccaaattggaaaagcctaaagagcacgagaaacacaaagtcgaatatccgaaaatacccgagtacaaggaaaaccaagatgagggtaaggaacataaacatgaagagtaccacgaatcacgcgaatcgaaggagcacgaagagtacgagaaagaaaaacccgagttccccaaattggaaaagcctaaagagcacgagaaacacgaagtcgaatatccggaaatacccgagtacaaggaaaagcaagatgagggtaaggaacataaacatgaggagtgccacgagtcacacgaatcgaaggagcacgaagagtacgagaaagaaaaacccaatttccccaaaggggaaaagcccaaagagcacgagaaacatgaagtcgaatatccgaaaatacccgagt

SEQ ID NO: 204216 - DNA, 439 bp, Gossypium hirsutum
aaaacatgaaaattcataacatacagtaaaccatttcaagtgtgtaacaagcttcaaagaatagaagcttgcataacacggaagcaacaggtaataaaagacatcatacgcacactcaatcacaggtacttcttagtactcatcatcttcaccctcatcaccctcagccgactcagcaccaacttcttcataatccttctccaatgcagcaagatcctcacgagcctctgagaattctccttcttccataccctcaccaacataccagtgaatgaaggcacgtttggcatacataagatcaaacttatggtcaatgcgagagaagacttcagcaacactggtggagttagaaatcatgcaaacagctctctggaccttggcgagatcaccaccagggacaacagtgggtggttggtagttgataccgcacttgaatcca

SEQ ID NO: 204217 - DNA, 396 bp, Gossypium hirsutum
  unsure (1)..(396): unsure at all n locations
ttgaacttaaaacactgttctgttctccccctttcctcttggtgggcggtttcagttccatctatttgtccatggatcttacacctcagcaacttatccagttcaacggctccgacccatccaagcccatctacgttgcaatcaatggtcgcatctacgatgtcaccgccggcaaatccttctacggtcctggtggtgcctacgccatgttcgccggcaaagatgccagcagagctcttgcaaagatgagcaagaacgaagaagatgtctgtcccaaccttgacggcctctctgaaaaggagatggatgtccttaacgattgggtcaagaaatttgaagctaagtaccctgttgtcggccgcgttgtctcttgaaantttgcaccttttctctatg

SEQ ID NO: 204218 - DNA, 361 bp, Gossypium hirsutum
ccgaaaaccgaatcaagatcttcgcaatctcatcgagctacaggagggaaaaatggatctcagaatcatgggtttcgattctccgctcttgaatactctccaacacatgatggatctttctgacgatacggagaagatcccgaacgcaccatcaaaggtttacatgcgggatgccaaagccatggctgcaacaccagctgacattaaagagtaccccaagtcttacgtgttcatcgtcgacatgccggggctgaaatcaagggacatcaaagtccaagtggaggacgacaatatgctcttgatcagcggagaaaggaaacgagaggtagagaaagaaggagccaagtacgtgagaatggaa

SEQ ID NO: 204219 - DNA, 380 bp, Gossypium hirsutum
  unsure (1)..(380): unsure at all n locations
ggatactactactgggatcccttataatgttagcaacttggctcatggaaatgcacataaccctggttgggctgggggtcaaagtattcttgcagactcagggactgagcaactagagtttattgctctttctcaaagaacaggagatcccaagtatcaggagaaggtggagaaggttatagttgcccttaataaaacttttccggccgatggtttgcttcccatctatattaatcctgaaactgcaactggttcatactccactataacctttggtgctatgggtgacagcttctatgaatatctgctcaaagcctggatacaggganacaaaacatcatcattaaagctttatagagatatgtgggaaacatcaatga

SEQ ID NO: 204220 - DNA, 328 bp, Gossypium hirsutum
gagtgagagagagagagagagactccaagcaggcattttccttacaagtttggttttcttgtgattaatcgatatggctagctcaatgtcccttaagcttgcatgtgtggcggtgttgtgcatggtggtgggtgcacccctggctcaaggggccgtaacctgtggtcaagtcacaagctccctcgcaccctgcattggttacttgacagggaatggtgctggtggcgttcccccaggttgctgcggcggcataaaatctctcaactccgccgtccaaacaacaccagaccggcaagcagcttgcaaatgcatcaaaagtgcggccgcc

SEQ ID NO: 204221 - DNA, 436 bp, Gossypium hirsutum
agttgatgtggtgatttcggttgtgggtcaaatgcagctagcggagcaagttaagatcattgctgctattaaagaagctgggaatgtcaagagatttttcccatcggaatttggaatggacgtggacaagaacaatgcggttgagccagcaaaatcgacattcgcaatcaaggctcaaatccgtcgtgctgttgaggctgaagggatcccttacacttatgtgcctgctaactgctttgcaggctattttcttcctacattgtcgcagccaggagccacctctcccccaagagacaaggtggttattctaggtgatggaaatcctaaagctgttttcaaccatgaagctgacatcggaacgtacaccatcaaagctgtcgatgaccccagaacagcgaacaagactctattcatcaagccttccaagaacacctac

SEQ ID NO: 204222 - DNA, 436 bp, Gossypium hirsutum
gagcgattcagcgatggtggcatttccattgctgactacgcggatcgaatccaactacagggcatgcaccattccttacagattcccttccgataatcctcgaaaggctacccctactgaaattgcctggatcgaccttttccgcaattccattccctccttcaagaagagagctgagagcgatactaccgtggttgatgctccaactaaagctgagaaatttgctcaaaggtatgctgatatacttgatgacataaagaaagatccagaaagccatggcgggccacctgattgtactcttctctgccgacttcgggaacaggttcttagagaactggggtttagagatatattcaagaaagtcaaagatgaagagaataccaaagctatctccctatttccggaagtagttcgtcttaatgatgatattgaagat

SEQ ID NO: 204223 - DNA, 440 bp, Gossypium hirsutum
  unsure (1)..(440): unsure at all n locations
gaatccaaatggttgnctcctactgagtaaaagagacccttggtgccgctttcatttaaggtgttttcgtaaaggagagacgttatggattgcggaagcggcggcggcggcttaggagcgagtggttccggcggagaccatgattcctccgacctttcacgacggaaaaagccttaccatcgtcacacagctcaccagattcagaggcttgaatcgatgttcaaggaatgtccacacccagacgagaaacaaaggttacagctaagtagggaattgggattagcaccaagacagatcaagttttggtttcaaaataggaggacacaaatgaaggcacaacatgaaagagccgataactctgcacttcgtgctgagaacgataagatccgatgtgaaaacatagccatatgagaagcacttaagaatgtgatttgtccttc

SEQ ID NO: 204224 - DNA, 443 bp, Gossypium hirsutum
aaaagtggtgctttgcgtcatgatatacactattggcttggtggagacacatcccaggatgaagcaggtgctgatgcactcaagactgttgaacttgatgctgcccttggagggcgtgctgttcaatatcgtgaagtgcaaggccatgaaactgataagttcctttcctattttaagccatgtatcataccccaggaaggtggagtatcatccggattcaaacatgttcaggaagaggaacataagatacgtatgtctgtctgtagaggcatacatgttgtccatgtaaaagaggttccttttgctcgatcctcacttaaccatgatgatatctttatactggatacaaagtctaaaatctttcaattcaatgggtccaattcatccattcaagagagggcaaaagccctagaagttgttcaatacattaaagatacttatca

SEQ ID NO: 204225 - DNA, 382 bp, Gossypium hirsutum
ctgtgttggcgattctatagctgaagaaactcttcaatggctgaaaagagcacggttttgatcatcggatgaactggatatctgggaaagttcattgtggaagccagtgcaaaatagggtcatcccactttcgcttttgtaagggagtccaccgtcttcgaccctgttaagggaaaacttgtcgacaacttcaagaacttatgggtccatttgttgctaggggatatgtacgaccatgacagtttggtcaaggcaataaagcaagttgatgtggcgatttcagttgcgggtcaaatgcagttagcagatcatgttaagatcattgctgctattatagcagctgtgaatgtcaacagatttcttccatcggaattttggaatg

SEQ ID NO: 204226 - DNA, 431 bp, Gossypium hirsutum
cataacgtcacctttcaatacaacccacaatgaggcaacaatgtgtgttcactactctcacgttgctcatcctgttttccctcagttgttcaacaacattagcccaagctccggcactggctccagcaccttctggtccgacaaacgtcaccaagatcctcgaaaaagccggtcaattcaccctcttcattcgtcttctaaagtccactcaagtggccaaccagctgctcggtcagctcaacaattccaacaatggtatgaccgtttttgcaccaacggacaatgctttctccagccttaaatcgggcacattgaattcactcaccgatgaacaaaaagtggagctggtgcaattccacatcgtcccaacatacctcacctcgtctcagttccaaaccattagcaatcctttgagaacccaagctggtgat

SEQ ID NO: 204227 - DNA, 226 bp, Gossypium hirsutum
aaaacatgaaaaagcataacatacagtaaaccatttcaagtctttaacaagctgcaaagaatagaaccttgcataacacggaagcaacaggtaataaaagacatcatacgcacactcaatcacaggtacttcttagtactcatcatcttcaccctaatcaccctcagccgactcagcaccaacttctacataatccttctccaatgcagcaagatcctcacgagcc

SEQ ID NO: 204228 - DNA, 352 bp, Gossypium hirsutum
  unsure (1)..(352): unsure at all n locations
ctttcacttaaaattgtttgggaatcagatgcgaagcattaatttcctcggaagctcatttggctggagtcctgatgacatcaagcctgaggatattaatgctttgcatctgattcccaaagaactttcacttaaaattgttagcaagatcgaggcaggagaacggtttacagtttatgttgttgtccctatgtggccagaaggaatcccagagagtgcctcagttcaggcaatattagattggcagagaaggacgatggacatgatgtataaggatgtcattcangctctcagagccaagggtagcgacgagaatcccagaaactatttaacatttttctgccttgggaac

SEQ ID NO: 204229 - DNA, 436 bp, Gossypium hirsutum
  unsure (1)..(436): unsure at all n locations
aaaaatttaaagtttgatagtactttattttgataaaaataggaggcgcgatttctcgaattgcagtcgggtctccggccgaagccggccaagcagatgcactcaaggcggctttagccgagttcatttcagtccttatttttgttttcgccggtgaaggctcgggcatggctttcaacaagttgaccgacgatgactcgtcgacaccagcgggtttagtagctgcggcattggctcacgccttggcgttgtttgtggcggtttcggtcggagctaacatttccggcgggcacgtaaaccccgccgtcacgttcggtgctttcgtgggtggccacattacattggtgaggagtattttgtattggatagctcaattgcttggatctngtcgtgcttgcttgcttctcaagttctcaaccggcggaatgacaacatc

SEQ ID NO: 204230 - DNA, 446 bp, Gossypium hirsutum
gtcagtagtttctctgcctggtggtgatgtccctgctgacactgagtatgtccaagcagccgctttggtgagtcattcggctctttattcctcagagcttgtgaagcaacatccggttggaccagctatggttcatccagctgaaacggcaaagggaccaagttggactgatatctttgaacccggagtcaagcatgctttatttgtagggattggaattcaaatacttcagcagttctctggtataaacggcgttctatactacactccccaaattcttgagcaggcaggagtcggggttcttctttctaacttgggcctcagttcatcttctgcatcgctgcttatcagtggcattacaacctttgtgatgcttccaagtatagctgtcgccatgcggcttatggatatagccggtagaaggagtttgctactcaacacacttc

SEQ ID NO: 204231 - DNA, 439 bp, Gossypium hirsutum
aaaatctccattttagcagactatcttcgccgcctcctcttggtcgtatctcatagcagccatgatcattccagagaagaaccgccgcgagatctccaagtacctctttcaagagggtgtttgctatgcaaagaaagattacaacttggcgaagcacccagaaatcgatgttcccaatcttcaagtcataaagctgatgcaaagcttcaagtcaaaagaatacgtgcgtgaaacttttgcatggatgcattattactggtaccttaccaatgatggcattgagttccttaggacatatctgaatcttccttctgagattgttcccgctactttgaagaaacaagctaagcctgctggtcgtcccatgggccctcctggtgacctgccacgtggtcctcctcgctttggtgacggtgagaggagatttggtgatagagat

SEQ ID NO: 204232 - DNA, 392 bp, Gossypium hirsutum
caaaaatcgccgaggaaaacaagttgtcggggcagcaagaagaagataagaaaccgagcgatcagtccgccgctcacatcaacctcaaagtcaaaggccaggacgggaatgaagttttcttcaggatcaaaagaagcacacagttgaagaagctcatgaatgcatattgcgaccgacattctgtggatctcaactcgattgccttcttgttcgatggtcgccgtctgcgaggtgagcaaactccgtacgagcttgagatggacgatggtgatgagatcgatgctatgctttaccataccgcatgtactgtgtgtagcgagtactactttgtcgcatctagtatttcgatgagttcgtcatggtctgattatcgtagatgcactcaatgtttc

SEQ ID NO: 204233 - DNA, 440 bp, Gossypium hirsutum
cttgcctgctgtcttccgacaagcttatgaaatgggattggtgagttcagcacaaatggtaaagttcttagcaattaatgccagaccaaccaccagtcgatttatttctcgaacactcccacaagcaatgtctcgggcatttattggcaggatgcttgcagatcctgcctttttatacaggcttcttttagaagaggttgctactattggttcttctgtttggtgggagttgaagaatcgaaaggataggattaagcaagaatgggatctagcacttatgaatgttctcacggtagcagcttgcaatgctcttgtagtttggtctcttgctccttgtcgttcttatggcaacaccttccggtttgacttgcaaaacacattacagaagcttcccaacaatatatttgaaaagagttacccacttatagaatttgacttgc

SEQ ID NO: 204234 - DNA, 383 bp, Gossypium hirsutum
tcaccactatctttcctctttattttccctcactttcccaataaaatggcggaaatccttcacatgcaaggtggccaatgcaacaatcacataccagccaagttctgggaagtcgtatgtgccaaacatgccatcaattcaacgggtctatattgtttttactcttacctccagcttgagcgaatcaatgtttactacaacgaagccagttttttccgttttgttccccacgcagttttaatggatctggaacccataaccatttatagcgtaagatccagtccttacggacaaattttccgacccgataacttcgttttcggacagtcctgttcatgaaacaattggtctaatggacattacactgaaagatcataacttat

SEQ ID NO: 204235 - DNA, 305 bp, Gossypium hirsutum
gatctaatggcctgaatcttcgaattcggaggggtggtcatgactatgaaggcctatcatatgtctgttatgacccataagatggtcttgatttcaccaattatcaatcacttaagatcgatctaacgaacaaactcacatggtttcaatatggtgcactcctctatgagttacactcttaaattgctagaaaactttaatccctcgctcatcatgctgatatttgcacacactggctgcggtgatgcttacttaatcggcgaggatatggtttattggtacgaaaatatctgcttgcactggat

SEQ ID NO: 204236 - DNA, 385 bp, Gossypium hirsutum
cggcacgagtgaatgacaggagtagtcgatctcacagctgctggagagttcacgttcaaggaaaagacctcacatcaggaaacattattcatggctgtatgcatctggttgacctggcaggaagtgaaagggtcgataaatctgaggtgatgggagatcggttaaaagaggcacagcacatcaacaaatccctttctgctttaggtgatgtaattgcggctcttgcttcaaaaggttcacatgttccctatagaaacagtaaactcactcagttgctccaagattcacttggaggacaagccaaaacacttatgtttgttcacattgctcccgagtacgaagcttctggagaaacaattagcacgcttaaaattgcagaaagggt

SEQ ID NO: 204237 - DNA, 321 bp, Gossypium hirsutum
ctgtctatgatcgtatcaacaagctggtcccggtttgtgaaatggcaataaagctttgcggcactgatggtacaatctcttgcatggcttcatattttgtctgcaataacatattcaatggcatcatggcacttgctggcgatacaaattactatgacgttagaaagaaatgtgaagggagcctttgctatgacttctcaaacatggagtcatttctgaacaagaaatctgttagggatgcccttggtgttgggaacatagatttcttgtcctgcagccctactgtgtatcaggccatgctggttgactggatgaggaatc

SEQ ID NO: 204238 - DNA, 360 bp, Gossypium hirsutum
  unsure (1)..(360): unsure at all n locations
ctttctataaacaacaggatccaattttttcacccagttcgtcctcaacttattccaatgtttcctgctcctcagcagcctgcacttcattgaattctgctacaggtaactcgcctggctgctcatcatcaacttgtgtctatggcatccaatatggagattcatctttctcgattggattgtttgctaaagaaaagctcactttgacatcaaacgttgtgtttgacaactttctatttggttgtggccaaaacaatcaaggcctttttggtggtgctgccggtttgctaggactaggccgaaataaactatcttttccatcacanacagccataaaattcaagaaaatattttcctact

SEQ ID NO: 204239 - DNA, 375 bp, Gossypium hirsutum
  unsure (1)..(375): unsure at all n locations
taataacagcgcagatttctggttgtgagaggaaaggagatatggctgagagtaacgtgaaggtattgggtacatgggcaagcccgttcgtgatgagggtgaaaattgcccttcacctcaaatctgtccgctacgaggacgtggaggaagatttgttggcacccaaaagcgagcttcttcttaaatctaaccctgtttacaagaaaatcccggtcttcttccatgctcataaccctatctgcgagtccctaatcatccttcagtacatcgatgaggtttggaccacctctgcttcttccatcctcccttccgatccctatgaacgttcccaatcccgattntgggctgcctatgtcgacgataagttttttccct

SEQ ID NO: 204240 - DNA, 405 bp, Gossypium hirsutum
tatttttcctctccaattttccgtcactttcccgagaaaatgagagaaatccttcacatccaaggtggccaatgcggcaatcagataggagccaagttctgggaagtcgtatgtgccgaacatggcatcgattcaacgggtcgatatggtggtgactcggagctccagcttgagcgaatcaatgtttactacaacgaagccagttgtggccgttttgttccccgcgcagttttaatggatctggaacccggaaccatggatagcgtaagatccggtccttacggacaaattttccgacccgataacttcgttttcggacagtccggtgcgggaaacaattgggctaagggacattacactgaaggagcggagcttatcgattccgttctcgacgtggttagaaag

SEQ ID NO: 204241 - DNA, 422 bp, Gossypium hirsutum
gtttttcttgtttggtacttgtctttgttgtccaacaattgggtggtcaaagttctgcatatttgttgattcatggtgagcctaccaactacgtttctgccgttggggaccctggaatgacgaacccaaacgtcagagttgctttggaagcttggaatttctgcaacgaagttggctttgaagttcctaacgtgggcagcccccgctgggctgattgtactgatctttactgctcttctgactccgtttatctgggtggcggccttgttaataatggcagtcagtgcagagtacttcacaaagtgaatgagactgacaacaggttaagagctggtgataaatttcctataatgggctttgagtcttatgctgaccctgacctgtttgcaaaggagaaagagctgtatctcggttctttatgt

SEQ ID NO: 204242 - DNA, 432 bp, Gossypium hirsutum
gaagaattgattaagtgtcgttatgtgctgaaggagaaagaggttatcatatctcagcagaaacaagcagaaaatgctttagcacatcaagcttgtgctttgaggtccgacttagagaaagctgtcaaggataatgctttgttgttcctaaaaattggaagggaagacaagctgaatgctgataatagagtagtggttaataactatcaagtagaacttgcccaacaaattggttctatttgcaacctggtgtcctcattaatgtctcagcaaaacgaacaccttgagagtgttgagaaactctgttgttcttttactgatacacatcaaaaggcaatcttggatatgaagaaaaaggtcactgccgcgaggactttgcatgtttcccagatggaggcagtccaaaatattgtgcgtttgcacaagggtagc

SEQ ID NO: 204243 - DNA, 435 bp, Gossypium hirsutum
gaaacatcgctggtttcatttctgaagccatacagggtgttggtggaattatcgaattggccccaggttacatgcctgctgtttatagcaccataaagaaagctggaggcctttgcatagctgatgaggttcaggctgggtttgctcgcacagggagccatttctggggatttgagaaccatggagttgttcccgatatagtaacaatggcaaagggcattggaaatggcatccctctcggtgccgtagtaaccacccctgaaattgcagaggtcttgacccgcagaagttacttcaatacctttggtgggaatcctgtatgtactgctgcagggttagctgtcctgaaagtgatcgaaaaagaaaagcttcaggagaatgcacatgttgtgggatctcatttgaaggagaggctaactgcattaaaagataaat

SEQ ID NO: 204244 - DNA, 381 bp, Gossypium hirsutum
gaactttgaagagcggctgctcagattttgcgtatttctcagatttttctctgagtttgaaacgatgtctacggctggcgaagctgcttgttcttacgctgctttaattctctatgatgatggcattcccatcaccgctgagaaaattgcaacaattgttaaagctgcaaatgtctcggttgaatcttattggccaagcttgtttgcaaagcttttcgaaaagtgcaacattgaggatcttataaccaatgttggtgctggtggtgctggtgctccagttgccgcagctgcacctgttgctgctggtggtggtggtggtgccgctgctccaccttctgctgaggaaaagaagaaggaagaaccagaggaagagagtgatga

SEQ ID NO: 204245 - DNA, 339 bp, Gossypium hirsutum
tcgtgttttttttttttttttttttttttttggtacttctattgattttattgtctcttgtttgaattggatgcattcttattcatttgcttgcttccctgtttcatttctatagttgggcttttcaaggattacaatcagttcatatttcctagattcatgtttgagatgagttaattgtttttttccctctttgttttagcttatttgtacattttgattcttctcgtctggtggagctgcacatggaccagtacgagaaagtagagaagattggtgagggaacctatggcgtttgttataaggctcgtgaccgtgtcaccaatgaaacaattgctt

SEQ ID NO: 204246 - DNA, 353 bp, Gossypium hirsutum
  unsure (1)..(353): unsure at all n locations
cagagtaattgctaatatatttatagtaccaaattccatagttaccaaaaagcaacatcccatacaaaaccatatgcatccgtacgagtctagtatctatctactgatgtaaagatgttcgtaaacaaaaaaacataagccaggaaaccacatttctaacacccaaaccagcaattcaggttgaaagaacagaaaagaaaaatccaaatcgttaagaaagcaaacagtaagaaacacacactactactattcctggagatcctcctccgcatcctcctcctcataatcatactcctcatcagctgttgcatcttgatattgntggtactctgaaaccagatcgttcatgttgc

SEQ ID NO: 204247 - DNA, 345 bp, Gossypium hirsutum
gctctaggttttcttttttttttcagttcttagtactttgtttcatttcgtcaaaaaaaatcccatcatgagagaaatcctccacgttcaagccggtcagtgtggaaaccaaatcggaggctaattctgggaagttgctagcgactaacatggaattgatcccaatgggaactacgtccgtacttctcgtgttcagcttgagagggttaatgtttactacaacgaacctagtggtggtcgttacgtacccagagctgttttaatggaccttgaaccaggaaccatggatagcttgcgtactgctcctcacggacaactttttagacctgataacttcatttttgg

SEQ ID NO: 204248 - DNA, 433 bp, Gossypium hirsutum
atactttgctgcaaattctcccaaatttttcagaaaatctaggcgggggaaaaaaatgagagagatccttcatgttcaaggtggacaatgtgggaaccaaatcggttccaagttttgggaggttgtttgcgatgagcacggcatagatccaactggaaggtacattggttcctcggatctgcagttggagcgtgttaatgtttactataacgaggcttcatgtggtcgctttgttcctcgtgctgtgctcatggacttggagcctggtacgatggacagtgtccgaactggtccttacggccagattttcaggccagacaactttgtttttggacaatccggtgctggaaacaactgggccaagggccattacactgaaggagccgagcttatcgatgccgttcttgatgttgtgaggaaagaagctgagaac

SEQ ID NO: 204249 - DNA, 443 bp, Gossypium hirsutum
  unsure (1)..(443): unsure at all n locations
aaccctctctcaaatcttggctcgccagtcgcctctctttcttgttctgcttcttcttcttcattctgttggctgctgctgctgctttggtggcgtgatttagaagccacaactcaatttcatataaagaaaaaaaaaagagtgagatggatccagacgcagtagccaaggccttcgtcgagcactactactccacattcgatgccaaccgggccggtttagccaatctctaccaggaaggttccatgttgaccttcgaaggtcaaaagatccagggctctcagagcatcgtggctaagctcaccagccttcctttccagcagtgcaagcacaacatcaccaccgtcgattgccagccttccggctccggcggcatgctcgtattcgtcagcggtaacctncaactcgctggcgagcagcatgctctcaagtttagccagatg

SEQ ID NO: 204250 - DNA, 444 bp, Gossypium hirsutum
gaaagtaggtgacgacagaagagggttgtggaattgggaagcggaagaagaagctactgcgattgcgattgccaactcattcttccgtcatgggcaactgtggcactagagaggaatctgacgttgttactcatgctcaagttcagcagctccacaaccacatcttatccgacaagaagcttactcaaagtcagagccagactcagaatcgtaccctctcagatctgagcgacttcgaggattccaggaaaaatgcgcttctctatacccacattattgccttcactttattcgagcttgagactattaccaagagcttccgttctgactatattctcggggaaggtggcttcggaacagtctataaaggttatattgacgagaatgtgcgggtcggtctcaaatctcttcctgtcgctgtcaaggtcctcaacaaggagggcc

SEQ ID NO: 204251 - DNA, 444 bp, Gossypium hirsutum
caaccttccagttctctccattgccataatccacaaaaatggagaaataaataaacactgtcgctttctcattagccagcttcgaagaatcgcatattactttgatctctccaacgaaatttaagtaataaaaatggtgttcgaggtgatgaaagttccaacgacgacgtttgaaggccagaagccaggcacttctggtcttcgtaagaaggtgaaagtttttgttcagcctcattatttgcagaatttcgttcaagcaacattcaatgcccttacacccgagaaagttaagggtgccacacttgtcgtttctggtgatggtcgttatttctcaaaggatgctgttcagataataatcaagatgtcagctgcaaatggagtaaggcgtgtatgggttggtcaaaacggattactttctactccagctgtatcagctgtaatacg

SEQ ID NO: 204252 - DNA, 420 bp, Gossypium hirsutum
caagaaggaagctttgaaggaaaagtttgagggtctttgcagggtcatcaaggatgtgctgggtgacaaggttgaaaaggttgtggtttctgatcgtgtggttgactcaccttgttgtttagtgactggcgagtatgggtggactgcaaacatggagagaatcatgaaggcccaggctttgagggataacagcatggctggttacatgtcaagcaagaagacgatggagatcaacccggagaaccccatcatggaagagctgataaagagagccgatgcagacaagaatgataaatctgtgaaggaccttgttctccttctcttcgagactgctctcctgacctctggcttcagccttgatgaccctaacacctttggcaacaggatccacaggatgctgaaactcggcttgagcattga

SEQ ID NO: 204253 - DNA, 293 bp, Gossypium hirsutum
atcttgctagatttcgatctccttgtttctagtttgatgtcttttcttcaaagaatttaaaaattttgaatttttatatctactacaccgccagtcgccagagccagttggtttattctgtgccggaatggctggaaacgactggataaacagttacctggaagcaatcctggacgttggtccaggaatcgactatgctaaatcctccttgttgttgagagagagaggtaatttcagtcctactcgctacttcgtggatgaggtcattactggattctatgatactgatctac

SEQ ID NO: 204254 - DNA, 425 bp, Gossypium hirsutum
tctgcttcaaagctcctgtccgggtagaattctcttcttccgttgcgttgtgttctttgttgttcaatcgccatggcttcaaagcggattttgaaggaactcaaggatttgcagaaagatccacccacttcttgtagtgctggtccagtagctgaagacatgtttcattggcaagcaacaatcatgggaccctcagatagcccttatgctggaggtgtgtttttagttactatccatttccctccagattatcctttcaagcctcctaaggttgcgtttaggaccaaggtcttccatcccaacatcaacagcaatggaagcatttgtcttgatatcctcaaagaacaatggagccctgcactaaccatttccaaagttctgctctcaatctgctcgttgctgaccgatccaaaccctgatgaccc

SEQ ID NO: 204255 - DNA, 441 bp, Gossypium hirsutum
ccgacttgaatcatctcagagctgttaccgaggaggatggtcgagctctggctgagagggaaggtctttcatttcttgagacatcagcactggaagcaaccaacattgagaaggcattccaaactatattgactgagatctaccatatcataagcaaaaaggcattggcagcccaggaagcagctgctagtaccgcaattcctggccaaggaactaccattaatgtcactgatacatcaggaaacactaagagaggatgctgttctacttagaaaggtgataggttacatttgatgctgttctaccttaaaaggtcataggttacatttgagaaggtaaaaatatttgctaggaagtaggccctttttctgtttttgtcaatttttggctgacagggagacatgtaaaatacatatatatattacctgaattgtgatatga

SEQ ID NO: 204256 - DNA, 365 bp, Gossypium hirsutum
accaccatcaatcattttatttattccaccatgactgctataccatgcggcgctttactacccggaccggtgagctccaacattcgcaaactcatcataagccctatacccttaactacactacatctctccatattatcatttacaccaactacctcactccttatccatcaatacaaaccctctattctccctgaacttacacagctttcaaaactagccaaaaacttgatgctaacagactatcctttacactttcaaaacctcacactatcaaaacatatttcttacaccatatatacgattcatcaactatatcatacgaacaatatccatttaatgaactctacttctattcatgaaat

SEQ ID NO: 204257 - DNA, 431 bp, Gossypium hirsutum
cttgtttcttatccttctccgctacctaagacagagagagggagagagagagagagagagagaaacacagagagggagaaatggtttctctgaagctacagaagcggctctccgcgagcgttctaaattgtgtaaaaggaaaggtttggctcgatcctaatgaagtcaacgagatctctatggccaactcccggcagaacataaggaagttggttaaagatggttttatcatcaggaagccaaccaagattcactctcgatctcgtgctcgtcgcatgaaggaagccaagagaaagggacgtcactctggatatggtaagcgcaaggttacaagggaggcaaggttgcccacatagatcttatggatgagaaggatgcgtgtacttagacgcctactccgcaagtacagggaatcaaagaagattgacaag

SEQ ID NO: 204258 - DNA, 383 bp, Gossypium hirsutum
aaatcatgggaatgccgctagtttccattgctgcagctcccaaaatcacctttgttcccaattccatctctctaccttcaattaaggtgcgtaatattccatcttcgacagcttccaccggtgggttgtcgatagaatgttcgtcgaggccgcagaagaaggcaacgaagcatcatatgaagaccaggccacgcaagacgcagccatgggacataaggaggaaacccaccgtttacgctcctttgcctccgctgcctcctgattgggccttagtttcaagcgtcggagaaaatgatggcgccgatgttgctgaggttggtctcgctggctctgctctacaggctcctgcttcaactgggtagtttttttttcactgttcatcg

SEQ ID NO: 204259 - DNA, 415 bp, Gossypium hirsutum
aatagctaacattcaagcagtgaaccatttttaaacaaatgccccaaagcatgtaaatcaaaaatcaccttctgtcttaagttgaaccagagatggctaattggcaacaacaatgcaatattacaaacttttaagtgctaataaaaataaaaatgcctgctcaatgtctcgaaataatttctctttgcaaagaaaaggaaaataaatgctcaacaaggtagctactaactagcttagataataccaattttgtttgcaacgtccaaagcatcgtattcgggtgtcaacctaacgtatgctttctttgttccatcaagcctgatcaaagtgttaactttcttggcctgaatatcatacatcttcttgacagcatctttaatcttcttcttatcagcacgaatgtcaacaatgaaaa

SEQ ID NO: 204260 - DNA, 372 bp, Gossypium hirsutum
gtttaagtacgacagtgttcacggtcaatggaggcatcatgagcttaaggtgaaggactcaaagacccttctctttggtgaaaagcctgtcacagttttcggtatcagaaaccctgaggaaatcccatgggctgaggctggagctgagtatgttgttgagtctactggtgtttttactgacaaggacaaggctgctgctcacttgaagggtggcgcgaagaaggttatcatttctgctcccagtaaggatgctcccatgtttgttgtgggtgtcaatgagaaggaatataagcctgaccttaacattgtctccaatgctagctgcaccaccaactgtcttgctccattggctaaggtgatcaacgataaatt

SEQ ID NO: 204261 - DNA, 390 bp, Gossypium hirsutum
gtgtgcgagatccgcagaaagttttcaacaggtgagaacacgttcactgttggaggggcttacgctgttgatcatctcacactgattaaagctaagctcaacaatcatgggaggcttggagcattgctgcagcatgaagtcataccgaagtcattgttgacagtctctggtgagcttgacaccaagtccttggacaaaagtcctcgcttaggattggcctttgctctgaaaccctaatcaattatttgcaacccaatgatgcttttacagatttgattacgattttttttttgtggtgatttaaaatgggggtgtcaataagttgctccacagacgattaatattcatttctaggttcgcattttctgtggatggatgattgatactttt

SEQ ID NO: 204262 - DNA, 414 bp, Gossypium hirsutum
tactttgctgcaaattctcctaattttttcagaaaatctaacacgggggaaaaaatgagagagatccttcatgttcaaggtggacaatgtgggaaccaaatcggttccaagttttgggaggttgtttgcgatgagcacggcatagatccaactggaaggtacattggttcctcggatctgcagttggagcgcgttaatgtttactataacgaggcttcatgtggtcgctttgttcctcgtgctgtgctcatggacttggagcctggtacgatggacagtgtccgaactggtccttacggccagattttcaggccagacaactttgtttttggacaatccggtgctggaaacaattgggccaagggccattacactgaaggagccgagcttatcgatgcccgtcttgatgttgtg

SEQ ID NO: 204263 - DNA, 440 bp, Gossypium hirsutum
acattttgcttcgtatctttgataatggaagccaaatggctggttgtgttttcagtggcggcaatgctggtggcactggccaactgccaggaatcgttgaagccattggtgaagatggtaaagggcaagaagctgtgtgacaaagggtgggaatgtaaagggtggtcaaagtattgttgcaaccataccatttctgattacttccaaacttaccagtttgaggacctttttgcgaagcgtaacacgccggtagcacatgcggttgggttctgggattaccattccttcattactgctgctgctcagtatcagcctcatggatttggtaccaccggggaaaagctccagaatatgaaagaagtcgctgcttttcttggacatgtcggcagcaaaacttcatgtggctatggagtcgctaccgggggaccattggcttgggg

SEQ ID NO: 204264 - DNA, 446 bp, Gossypium hirsutum
  unsure (1)..(446): unsure at all n locations
tgtgtttatgtttttttatttttataccatatcaccattcattgagccaaaaaaaagcagccatgacaaaaaaccaaatttgcacacaggaaaaaaattgaagaaaaaaaaaatgaaaaagatggtaacccaaaaaccaaaagtcaccatcacctccgatcagcatcgtactgagacaaaggtacaacttccgacaaaggcgtataaatcggtgtcagaagcggtgagttccgacaaacaggacaagacccattaagtttcagccaagcatcaatacaagttacatgaaaacaatgcctacattcaggcatgatcctaaacatctctgattctctatactcacacaaacatatcgaacaaatggtgttcccagcactataacccgtcacctccaccgtcgtacacacctnctttttgctgaaccggaacttgaggtaagagtttat

SEQ ID NO: 204265 - DNA, 432 bp, Gossypium hirsutum
gtttgagctagctagctcttactcaaatggcaaccaaaacgagaatgttgcaaatattttcacttttcttctttttgttcagtatctgcaactccattttccttggtgctaatggagatgacaatggtggttggcaaactgcccatgccaccttctacggtggtgctgatgctaccggcacaatggggggagcttgtggttatggaaacctgtacagtcaagggtatggaacgagcacagcagctttgagcactgcacttttcaacattggcttgagctgcagtgcctgctacgagctccggtgcaacaatgatccttactggtgcattagtcgaaccataaccgtgacagccaccaacttttgtcccactaactatgctttatctagtgacaatggcgtgtggcgcaattccccacgagaacactttgatt

SEQ ID NO: 204266 - DNA, 434 bp, Gossypium hirsutum
aaaaaattttatgaaaccatattttatactaaacaaaaaaatggcgccatacatgttttctttttacatcctaagtagttaaattgaaaaaaaaaaactaacacttaaaatattttcagtgttgaatttctaaagttaatctgaatagagaggtgattgaaaaaccaatatggtggaaatatatagtaatcaaaaagatcaaaggtcagtgttgggattgttaccagcgaggataagtgaaatttccaaacctctgctgaaagcttgattgaacatcaaccttgtctggaaagtcgagacgaacgggaaccatgagaaaaatgctatcggaacgaatataatcattcccattccagcatcgtataatcgtgccatcgatcgcactgatttccacaaccccgtctttttcacaaatggtttccaagctgcagcaa

SEQ ID NO: 204267 - DNA, 440 bp, Gossypium hirsutum
aaaaaaaacacaccctaaagagacaatgagaaagctgctagcctttgcctttcttttcttcttcttttgggataaaacattagctcaaatagctccggcgccgccgttaaaggtggacaacatcacttccatcctcgaaaaaggtggccaattcaccactttcatcaagctattgaaagccacacaggtggctgatcaactaaacaaccagctaagcacaccggaccctaacgacgggataacggtgtttgcaccgagtgacaacgcgttctccggactcaaacccgggacgttaaactcactttccgaccaagagaagcttcagttggttcagttccatatactcccgacgttaatgtcgacgtcgcagtttcaaaccgcgagtaaccctttgagaacccaagctggggatgtaaaggtgggaagtttccgcttaatgt

SEQ ID NO: 204268 - DNA, 372 bp, Gossypium hirsutum
ttcgagcttatgtatgccaaacgtgccttcattcactggtaggtaggtgagggtatggaagaaggagaattctcagaggctcgtgaggatcttgctgcattggagaaggattatgaagaagttggtgctgagtcggctgatggtgatgagggcgaagatgatgagtactaagaagtacctgtgattgagcgtgcgtatagatgtcttttattacctgttgctaccgtgttatgcaagcttctattctttgaagcttgataaagacttgaaatggtttactgtatgttatgcttgctcatgcatcatctgtgtctgggatgaaacttgatatattagctggctgtaaactatgggcttacctagctccagggg

SEQ ID NO: 204269 - DNA, 393 bp, Gossypium hirsutum
  unsure (1)..(393): unsure at all n locations
cgagcatacaattntgctcaaacatgcaagngaaaaatggcctgcttgttctcccaccacaaatcntgttgaatcaatncgagttgcaaattggcattgagaaacttaccagaagacgtttataagcttaaatgggatgttgtggttgtggacgggccgatcggggacacgccggaagcaccagggaggatgccaactatctacactgccggcatgttggcaagaactggtgggattgggaagaagacgacgactgacgttgtagttcacgatgttcatcggacgattgaaaaatggttttcttgggaattcttctgcgaacaaaactttgtctctgctaaagggaaactctgggtttttagaatacctgtccatcaatcgaattctacaagc

SEQ ID NO: 204270 - DNA, 391 bp, Gossypium hirsutum
  unsure (1)..(391): unsure at all n locations
caaattttgaatcaggtttttgagtttaagtggcgagatctgaggaatggcagcaaattcatcaaatggggaacaacaaacaccctcaaagccaccacctttgccatctccattgcgtttttccaagtttttccagtccaacatgaggattttggttactggaggagctggttttatcggctcccacttagttgacaaattgatggaaaacgagaaaaatgaggtgattgttgttgataactacttcactggatccaaggacaatcttagaaaatggatcggtcatcctagatttgagcttattcgtcatgatgttactgagccattgttggtcgaggtcgatcagatttaccaccttgcatgtccagcttctncaattttctacanacac

SEQ ID NO: 204271 - DNA, 446 bp, Gossypium hirsutum
gaagaatacgagaaagaaaaacccgagttccccaaactggaaagggctaaagagcacgagaaacacgaagtcgaatattcggaaatacccgagtacaaggaaaaggaagataagagtaagaaacataaagatgaagagtgccaggagtcacacgaatcgaaagagcacgaagagtacgagaaagaaaaacccgatttccccaaatgggaaaagcctaaagggcacgagaaacataaagccgaatatccgaaaatacctgagtgcaaggaaaaactagatgaggataaggaacataaacatgagttcccaaagcatgaaaaagaagaggagaagaaacctgagaaaggcatagtaccctgagtgggttaaaatgcctgaatggccgaagtccatgtttactcagtctggctcgagcactaagccttaagccatatgacactggtgca

SEQ ID NO: 204272 - DNA, 436 bp, Gossypium hirsutum
aaacaaaaatttcatggctcggaaattctttgtcggtggcaactggaaatgcgatgcgacaactgaggaggttaaaaagatcattacaacattgaatgaagctgaagttccttctgaggatgttgtggaggttgttgtgagccctccatttgttttccttacctttgtgaaaagtctgttgcggtctgatttccatgttgctgctcagaactgttgggttcgcaaaggtggtgcttttaccggagaaattagtgctgagatgcttgttaatctgagcattccatgggttatcatcggtcactctgaaagaagggctctcttgaatgagtccaatgagtttgttggagacaaagtagcgtatgcactttctcaaggcttgaaggttattgcctgcattggggagactcttgaagagcgagaatctggctctaccatg

SEQ ID NO: 204273 - DNA, 422 bp, Gossypium hirsutum
caaggagtatctggtggataatagccttgaagatttaatgggaggtctcaaccgagggaaaatggaggacaatctcctggacttctttccatctgcaaagcgatcccctgaaggtttctctgaacatttcaccaaggaagggttggcgcccttggttgaatacaatgagaaaaaaatatttgaagtaaaacttaaggaactgaagtctgctttgacaacccacatagcacaagaatctgatatatctgaagtcattgagaatgtcaaacaacgtgttaatgatgctaaatcacctgatattgaggttgtacgaattctttgggatgtaataatggatgctgatcagcggactggatagaaccagcatcaaaatgccaattcagctttacgacaagtcataacatgggcaaagctggcaaatt

SEQ ID NO: 204274 - DNA, 431 bp, Gossypium hirsutum
agattgttttgaaaaacaccatctttcttgtgaattctgcagcctttggagtaacttaagaagaaatgggggaaaagagtttaattgccaaggatgtcaccgaattgatcggtaacacgccactggtatatctcaacaatgttgtagatggatgtgtggctaaaattgctgccaagttggaggcaatggaaccctgctccagtgtcaaggacaggattggatatagtatgattgcagatgcagaggagaagggtctcattgtaccaggcgagagtgtgctgatcgagccaactagtggtaataccggaatagggttggcattcatggcagctgctaagggttacagactcataattacgatgccttcttcaatgagtttagaaagaagaatggtcctccgagcttttggagctgagctggttcttacggat

SEQ ID NO: 204275 - DNA, 439 bp, Gossypium hirsutum
caaatcagtatcattcagaacacagattctctcacggaaacagagtaccccatcactgtttagtccaaaacccgttgtactaccaccctcaatctactagaatcaaagtcccaacgactcatcctccaactacttatccttaatctactcaatctatgacggcttaacctaaagctcggctaataaactaccatcctcaaataaaattcagcgagatatcgccctcaaatcagtcatagccctacggctcagtgcatcaaccaccatattggccttaccagagtggtactcaatggtgtagtcatagtctttaagtagctcaatccatctgcattgcctaagattaagttccttctgagtgaggagatacttgaggctcttatgatcagtgtagatgaccagtgcgaatactacaacagccaactccaagtcacacgtc

SEQ ID NO: 204276 - DNA, 386 bp, Gossypium hirsutum
ccgttctagaccggtgagtggggaattcccaggagcaggtgctcttgcttatggcgagcatatgccaaatgcttctcttcataaacgagtgcacccatatcccatgtctgaaactgaaggagctgaaagatgggatgataagaaagagggaggatggaaagagaggatggatgattggaaaatgcagcaagggaatctcggtcccgaagctgatgatgcgtatgacgacatgtccatgcttgatgaagctaggcaaccactgtcaaggaaggtgccaatagcatctagcaagatcaacccttaccgtatggtgatcgtggctcgtttacttatcctggctttcttcctccgctatcgaattttgaacccggtgcatgatgctattg

SEQ ID NO: 204277 - DNA, 341 bp, Gossypium hirsutum
cctccaaagaaggagaaacctgagccaaaaccaccgattgatacacctccaaagaaagagaaacctgaacccaaaccacccgtatatgaacctccaaagaaggagaagcccgagccaaagccaccggtttatacacctccaaagaaagagaaacctgaacccaaaccaccagtgtatgaacctccaaaaaaacctccaatgtacgaacctaagccaccaaaaccaccggtttatacacctccaaagaaagagaaacctgaacccaaaccaccaatgtatgaacctccaaaaaaaccttcaatgtatgaacctaagccaccgaagccaccggtttatacacc

SEQ ID NO: 204278 - DNA, 340 bp, Gossypium hirsutum
  unsure (1)..(340): unsure at all n locations
attttccttacaagacagttgatcatgagattaatccatatggctagctcaatgttccttaagcttgcctgtctgctggtgttgagcatggtgatggcagcacccctggctcatggggccataacccgtgctgatggctcaatcggcctgccacactgccttccttatttgtcagggaatggagacggtgctgatgccacaagttgctgtgccaatcgtcatgaatgccttgnggatcgctctgtggtgatacataggaaccgatctaacttgaaatcgggatcggatcagcgtggaatgtcaaaatggcgtattatgggaaccccaactaattcttttt

SEQ ID NO: 204279 - DNA, 433 bp, Gossypium hirsutum
  unsure (1)..(433): unsure at all n locations
agtaggaatagcttttttaactcaattcatttcattaacaaaatgtaaaatggagtttcatggtaatgaaatattaacacaaatcaaagtatgatagttacataacaagatcaaaaccttttaattttagaattcattaagtgcttcatgcaaccactcttacgatatggtattttattaggtcggaatttggactgtgaggcgagaatcatggaccacgaagcgaggttaaacataagcatgttggcgtttggtcgtccggtatcatccctcctcctttgcttgtattaacagcttctagcattctcacaacctnctncattgcagggcgtttctccggattcgcatcccaacattttttcatgatgtttgctaaagaattcgggcagcatctcgggatatctggtcgtagattctgtcgaacaacagcaga

SEQ ID NO: 204280 - DNA, 384 bp, Gossypium hirsutum
caagacacaagaaccaagagacataccacgatggcaacagcgacggagaagcaagccatggttgttggaatcgacgacagcgagcacagtacgtacgcgctgcagtggatcctcgatcacttctttgctcctttcgcttccaatcctcctttcaagctcgtcatcgttcatgccaagcctactgcttcttctgctgttggtctcgccggacctggagctgctgatgtattgccctatgtggatgcggatttgaggaagatcgctgccagggttgttgagaaagccaaggaactctgccttagcaaatcggtacatgatgccgtaattgaagtggtggaaagtgatgcaaggaatgttctctgtgacgctgtagaaaaacaccat

SEQ ID NO: 204281 - DNA, 437 bp, Gossypium hirsutum
gtttatctgggtcgcaaagattcacgagtttcatgggctgcttcactagaagggaagttacctaaacccaccatgagtatgtcacaacttataaatcttttctcttcaagtgggttcactgttcaagaaatggtggctttaagtggagcgcatacaattgggttttctcattgcaaagagtttagctcaaatataagcaacgatacccattataatcctagatttgctcaagcattgaaacaagcttgttcaggttatccaaataacccaacattatcagtttttaatgatattatgacccccaacaagtttgataacttgtattatcaaaatctaccaaagggtttggggcttttggaatcagatcatggattgtatggtgatcccagaacaaaaccatttgtggaattgtatgcaagggatcaaaacaagttctt

SEQ ID NO: 204282 - DNA, 421 bp, Gossypium hirsutum
gccttcgttacgttacgcgccgacggagagcgtgagtgcgtgttctataggaatcctagcgccgatatgctgttgaagccggaggagttgaaccttgatcttatcagatcttccaaggtatttcactatggatcaataagtttgatcgtggagccatgcagatcagctcatttaaaggcaatgtaagtagccaaaggagctggtgcattgctctcatatgatccataccttcgcttgccactttggccttcagctgatgaggctaggaaacagattttgtccatttgggataaggcagatattgtcaaggttagtgatgtcgagcttcgagttcctcaccggtagcaacaaagtcgacgactaaactgccatgaaactttggcgacctaactttacactgctcttggtcacccttggtgaa

SEQ ID NO: 204283 - DNA, 368 bp, Gossypium hirsutum
  unsure (1)..(368): unsure at all n locations
ataagggatcagggatccggaaaagtacatgctggaggacgagtaacctacaagttcgaagaggtagaccgacaaaacttacgagccggtttgcgacagtcattgaggatattagtagcagccggggcagtcgaggtgggtactcatcgtagtgacgggcagagaataagatgtaaagggataagcaatgaggagttagatgagtttttggactcggtttctatgttaacaagcccgttgtgtaccggggaaaactgggtggtgcacaccactgctcaccagatgggaagctgtangatggggataaatgaaaaggaaagggcagttgatgaaaatggagagagttgggaaacttaaagaatggttgg

SEQ ID NO: 204284 - DNA, 366 bp, Gossypium hirsutum
gagctattcagatgcgaagttctttatcattaaatcctagagtgaggatgatgtccacaaaagtatcaaatacaatgtgtgggccagtacatctactggcaacaagaaacttgatgcagcatttcacgagaccaaggggaagcctgatagctgtcccgtgtttttattgttctcggttaataccagtggacaatttgtcggattagcagagatggtgggccctgttgattttaacaaaactgtagaatattggcaacaagacaagtggaccggttgcttccctgtgaagtggcacatcattaaggatgtgccgaacacttcattgaggcacataacacttgagaacaatgagaacaagcctgttac

SEQ ID NO: 204285 - DNA, 337 bp, Gossypium hirsutum
caaaagtcaagagtagattaaactaatggccggaatcgggcctttgactcaagattgggagcccgtcgttattcgtaaaaaagcccctaccgccgccgccaagaaggatgagaaagtcgttaacgccgcccgccgtgccggtgccgagatcgagtccatcaaaaaatcaaatgctgggacgatagggcggcttcaagtagtacttctttgaacacaaggaagctcgatgaagacactgagaatcttgctcatgaccgagtgccaactgagctaaagaaagccatcatgcaagctcgaatggataagaaactacccaggctcaacttgctcagatgat

SEQ ID NO: 204286 - DNA, 438 bp, Gossypium hirsutum
cgcctaataaccgctcggatttttctcagacgtgaaaaaaatggggctgtctttcaccaagctattcagccggctatttgccaaaaaggagatgcgcatactgatggttgggcttgatgctgctggtaaaaccaccattctttacaagctgaagttgggagagattgtcactactattcccaccatcggtttcaatgttgagaccgttgaatacaagaacatcagcttcactgtttgggatgttggcggccaggacaagatccgaccattgtggagacactatttccaaaacacgcaaggacttattttcgtggttgatagcaatgatcgtgaccgtgtggttgaagctagagatgagttgcacaagatgttgaatgaagatgagttgaaggatgctgtgctgctagtatttgcaaacaagccagatcttccaaatgc

SEQ ID NO: 204287 - DNA, 394 bp, Gossypium hirsutum
  unsure (1)..(394): unsure at all n locations
gcaaaaccctccttccagacatcttctgcttcttcctccaaacaatctccaaggaaacgaaaatggctgcctcttctgcttttctttctacttttatttctccccaaacggtctccttctcacccaaatccttctcttctcttagcctccttcctccaactaacgtgcgcacggtacgcactgtgaccctagccaccggttcacagcccgccaccggcccccggacgccacgcggcatcatgaagccacgtcgtgtaacgcctgagatgcaggatgtcgtangagtccctgaaattccccgaactcaagcccttaagcagatttgggcttacattaaagagcacaatcttcangaccctgnaaacaagaagattataaactgtgatgagaagct

SEQ ID NO: 204288 - DNA, 432 bp, Gossypium hirsutum
ataagaccgtaaaagttcgccttgctatgaggcaatctaggactctcaagatctgcgccaatcattatgtgttggcaacgatgacggtgcatgagcacgcagggaacgacaaatcgtgcctatggcacgcttctgactttgctgatgatgaactgaaagatgaacttttctgcattcgttctgcatcacgtggacaattgcgaaagcttcatgtgaaacggtccgagaagttgctgaatcacactaatcagcagaggaaaataaagaggcatctgctgcagctggtctacttgataaggtgagtgttgaggaaaaggatgccaaggatacagtggcagagacagatgttaaagcaaaggaagaaaccgctgcacaggacgatgcaaccaaagtagatgatagtgagaataaagatggggagccagaatccac

SEQ ID NO: 204289 - DNA, 439 bp, Gossypium hirsutum
  unsure (1)..(439): unsure at all n locations
ctgaattttacataaaagaacagaagtaaatatggtacagacaaaacaagatcaagcatcgaattgagtatcatcaaattaaaaccagaaagccaagttgagaatctcagaaaataaaatgcatagccataactttaaataagcactcgatgcagtgctcgttcaacaacaacaaaagaacatttgcaatgagtaaaagtataccttaatcaggcaatgcggttcctcgttcgagattattttttatttccaatgtgtatttcccgaaggcccgttcgatcttcttattgaaatgctcgttacggtcattgatcgaatcgatatccttctcatcgtgaaatttcctcctcctactaaatgacttgcgtttttcttcccggtccttaagtttctttaccatcttatcaatcttatcttccgaaaccttangtgccttccc

SEQ ID NO: 204290 - DNA, 439 bp, Gossypium hirsutum
gatttcgacctgccaattgtcacttgatctcatcgtttggcccgtctattcttctcggcgatttagattaattaaatcgtaacagcatgaatttcctgcttggagctttcaagccggcatgcaatatcttgatcacattttccgatgctaaaactcgcaagcaggtccccatgaaaaacgaaaatggccaaatggttatggtaccgcttttccaaagtcaagaaaatattgctgcgaagatctccatagaaccacttcaagggaagaaaattgaacataatggtgtgaaagtcgagcttcttggtcaaatagagatgtattttgacagaggcaacttttatgatttcacctctcttgtacgtgagttggatgttcctggggatatatatgaaagggaaacttacccatttgagttttctacggttgaaatgccatatga

SEQ ID NO: 204291 - DNA, 417 bp, Gossypium hirsutum
gccatttgggaatgttcaatcggaggtgcttctgcgaagggataaagataccttcactttaaagcaaggatgggcctttccaaggaaagtgtatttcaatggcgatgaatgcatgctgccaccacctgatacttacccttttctaccaaattctgccccccatcaacaactattctccggtttgacagccattgctgctatggttttcttgttggtcactgtttggtgattgttatatatactcccatggagtatgaaaagttttggattctgaaaatattaattactgtaataaatttaaggagatatgctagaataaaatagcaattatgtgaagtgattttaagaacagtgttactgtatatttgaaacataaaactattttgactaataataaataaattttagttagtacat

SEQ ID NO: 204292 - DNA, 418 bp, Gossypium hirsutum
tatcaagagattgttgatgcatatggtgttgcaggatatgaggaggcaaatcctgcagtttacactgttgttacttttccttttctttttgcggtgatgtttggtgattggggtcatggaatatgcttgttattgggagcattggtccttatagctcgagaaggcaggctcagcactcagaagcttggaagttttatggaaatgctatttggggggcgatatgtactccttttaatgtcacttttttcaatttattgtgggttgatttacaacgagttcttctctgttccctttcacatatttggtggttctgcttacaaatgccgagatgttacctgcagtgatgcaaagtcagctggtttgattaaatttcgtgatccatacccatttggtgtggatccaagctggcgcggaagtc

SEQ ID NO: 204293 - DNA, 372 bp, Gossypium hirsutum
aagaaaagagaagagtgttgaagtattgaagctgtctgggttctgtttgttttttgaaatctgatgtctccgccgcttcttggcgtggaggaagggggtcagaacaatgtgactttactgggttcttctggctctatggatagtgtgtgccagaataatgctgaattgaaggaacgcaattacatgggcttgtctgattgttcttctattgatagctctgttgtcacccctggttctgacgatggcaacgtaagtacgaatctgaaggcaacagagctcaggcttgggcttcctggatcacagtctcctgaaagaaatcctgagctttgcttgttaagctctgctcaacttgatgagaaacccctttttcct

SEQ ID NO: 204294 - DNA, 305 bp, Gossypium hirsutum
cacgtttgtttttcttgtgattaatcgatatggctagctgaatgggccttaaacttgcatgtgtggtggtgttgtgcatggtagtgggtgcacccctggctcaaggggccgtaacctgtggtcaagtcacaaactccctcgcaccctgcattaattacttgagaggcagtggtgctggtgccgttcccccaggttgctgcagcggcatcaaatctctcaactccgccgcccaaacaacaccagaccggcaagcagcttgcagatgcatcaaaagtgcgggcgtcggcattactggcatcaacttt

SEQ ID NO: 204295 - DNA, 435 bp, Gossypium hirsutum
agaaaatggtttctattgagttatcaccggaggggattgccggtttacctgaggaaattggactcgattgtttgattcggtttcattattctacttacagagtcgcagctcgagtctgccgacgatggcaacagcatctccaaagcagggagttgcactatctcagaaagcaagccggatatacccgtaaagcggcttgcttagttcaattactcaataacacctccgattctgctgggtcaaagccggttggtccgcccacatacggccttacagtttttgatcctgtgagtggaatctgggatagaattgacccggttcccaagtacccttatggtcttcctttggtttgccagatagcaagctctgaaagaaagctagtggtgatgggtggatgggacccctcaagttatgacccagtgcgggatgtcttca

SEQ ID NO: 204296 - DNA, 429 bp, Gossypium hirsutum
tcgagttttttttttttttttttcccatcaaaaagaaaggtatttcaataaaaataaaatacaacaaaaacaaacatgaaaactaaaacccattgttccatccatcacaagagacagtcacaagtaaaaacataaaacaggtccagattattatattcacaagtcatagcccacataaacaggattcaaagcagatcaactctcagaaaccaacggctccatttcagtcgtctgctcaccaaacaccttagcgatcttctctgtaggaaccaaaggcaaataggaggcaaccttgtaccctttctctgcactgctagccactgtctcgttatacttatcgctgcaataagcagctgttgggacaacgaccgaggcaacttgagggaagagcgggagcatgttgagtttacgccaagctgaaaccgcaca

SEQ ID NO: 204297 - DNA, 269 bp, Gossypium hirsutum
gctgataccattgacctgattgccgcgcatgtaggaataggaaatagatcttgacgagtttcagcccctaatgatcattattgcttaagacactctcaagacattgattatccccgtactgtatatgaatgtcatagttgctccgatcttgctgcttaaatggctgatgctttggcttctgcttacatcgattttaaagacatcaaaacatactcttaaaagcttgttcatggtgcccgaacactctttaagtttgctagtgatcaaag

SEQ ID NO: 204298 - DNA, 445 bp, Gossypium hirsutum
gaagaagatcttcaaagtcgacgaccatatcggtgtcgcgatcgccggtctcaccgccgacggacgcgtcctttctcggtatatgcggaacgagtgtatcaactatagcttcacgtacgagtcgccgcttcccgtgggccgactcgttgttcaactcgccgataaagcccaggtctgcacccaacgttcttggaaacgaccttatggtgttggtttgttggtggctggcttggatgaatccggggctcatctctactataactgcccaagtggaaactactttgagtaccaagcttttgccatcggatcacgctcgcaagctgcaaaaacgtacttggaacgcaggtttgagagctttagagacgcatcacgggatgatctggtcaaagatgctctttatggcataaaggagaccctgcaaggagaaaccttaaaaagctcggtt

SEQ ID NO: 204299 - DNA, 441 bp, Gossypium hirsutum
cgctaacaattgctgttgagaacaaacaaacgcagagttgggctgcaatggcggtgaaattcttgatagcgttaatcttagtaattgcagcatctctttgctgggtatcgtcggctgattcgtctgaagctgctttcgtcaaaaagaccatctctgcccacaagatcgtcatcttctcaaagtcctattgcccgtactgtaggaaggcaaaatctgtgttcaaggagttgaaagaagttccattcgttgtggagcttgatgagcgagatgatggatggaatattcaggatgccttgagtgagattgttggtaggcgtactgtaccacaggttttcattaatggaaaacacatcggaggctcagacgatactgttgaagcatatcagagtggaaaattggctaagctgttgggtattgagttgaactagttgaattggaagc

SEQ ID NO: 204300 - DNA, 431 bp, Gossypium hirsutum
gggataggccaagaaaaaactgtccctatttcttgatcgaggttgaagaagaagaagaagccatggaaaaacaaaacaggtcgggaactgcaggaaaagttataagatgcaaagctgcagtttgcagaaatccaggggaaccacttgtgatagaggaaattatggttgacccacctaaagcttgggagattaggataaaaattctctgtacttctctttgtcattctgacgttaccttctggaaaatatccattggaccatttgcactttttcccagaatttttgggcatgaagctgttggtgttgttgagagtgtaggggagcatgtggaggaatttcaggaaggagatatggtggtacctgtgtttcgtccgaattgtagagaatgtatggactgcaagtcccaaaagggaaatggttgttccatattc

SEQ ID NO: 204301 - DNA, 431 bp, Gossypium hirsutum
ggaaccaaatcggttccaagttttgggaggttgggtgcgatgagcacggcatagatccaactggaaggtacattggttcctcggatctgcagttggagcgttaatgtttactataacgaggcttcatgtggtcgctttgttcctcgtgctgtgctcatggacttggagcctggtacgatggacagtgtccgaactggtccttacggccagattttcaggccagacaactttgtttttggacaatccggtgctggaaacaactgggccaagggccattacactgaaggagccgagcttatcgatgccgttcttgatgttgtgaggaaagaagctgagaactgtgactgcctgcaaggtttccaggtatgccactcattgggtgggggaactgggtccggtatgggtacattgcttatctcgaagatcataga

SEQ ID NO: 204302 - DNA, 378 bp, Gossypium hirsutum
gagaagcatggttgaaacacaagatccttcttccaagggggtagatgatatgacaatgagaagatttctaagaggtcgtgatttagatgtggagaaagcatcgagcatgttcctcaagtacctgaaatggagacgaagctttgttcctaatggtttcatttctccatcagaactcacacatgaaatccaacagaacaagatgtttttgcaaggttccgacaagaaaggacgacctatttctgttcttcttgctgcaagacatttccagcataatggcggcctcgacgaattcaagcgttttatagtctacattttcgacaaaatactgaccaggatgcttccaggacaagattaatttattgtgatcggggatctttg

SEQ ID NO: 204303 - DNA, 444 bp, Gossypium hirsutum
gtcatgctcacacccctcgttgttggtatctttttcggcgtggagagtctctttccggtgtcctcgctggatccctcgtctcaggtgttcagatcgctatctctgcatccaacacggggggtgcttgggacaacgccaagaagtacattgaggctggtgcttcaccacatgcaaaatctcttggccccaaaggttcagatccacacaaggcagctgttatcggcgacaccatcggtgaccctttaaaggatacatctgggccatcgttgaacatcctcatcaagctaatggcagtcgaatcactcgtcttcgctcccttctttgctacacacggtgggctgcttttcaagttattttgagtgaaggtcaacaaaaagtaaacagctaatggtccgtccacccattgctgactctctcaattgatccatttgaatctgtagaaca

SEQ ID NO: 204304 - DNA, 360 bp, Gossypium hirsutum
cgtcaacgaagctcaatgtacaataatgatgctgtaattgctaaaagcacgtggctatcccggtgcaaaattatctattatacagtttttagcatgatgtatggaatggtgggatcttgtgcacatcttgtaatggtcaactcttcatggactcagtctcacgtcgagaagctttggggaattcctaagcgcattaagcgactttatccaccttgtgatacttcaggacttcaggcacttcctttggaaaggtcaatggaaactccaaaaatcataattgttgcacaatttcgtcctgagaaggcacatagtctttaacttgaggccttttctattgccataaaaaaactagatgaacac

SEQ ID NO: 204305 - DNA, 278 bp, Gossypium hirsutum
tatcctgctgcacaacaaatgcataactataatggaaaaggtcttaaagatgacacgacactgtctgaaagcagtgtcactgaaaatagcttcattgtgatcatgttgacaaagaataaggttgcatctgtggagggttcaactgcttcagccgcttctacaatgaaagctcctgaagcaagcacgccaccaactgctccagcaccagcttctactgcacctgttgcaacatctgctacggctgcacttgctgctgactctgctcctgttgcttcaag

SEQ ID NO: 204306 - DNA, 327 bp, Gossypium hirsutum
gaccattcaagatcaacggtgttcctttaaggcgcgttagccaatcctatgtcattgctacttccaccaaggttgacatctcaggggttaacgtagacaagtttgatgacaagtactttgccaaggaagtagagaagaggaagaagaagactgagggagagttttttgaggctgaaaaagaggataagaaaaaactgcctgaagacaagaaagaagaccagaaagcagtcgacgcctctttgataaagtccattgagggagtcccagacttgaaggcctacctcgccgcaagggtttctctcaagtctggcatgaaaccgcacgagc

SEQ ID NO: 204307 - DNA, 431 bp, Gossypium hirsutum
gtaaactttgaggacaatcatgttgcaactgggtttggagatcagcttgctcggccaattcttcgtcaagagtggcatgagaacttgagctttgaagatggtgttagactattggagaaatgcatgcgtgttctcctgtatcgtgatagatcagctgttaacaagcttcagatagctaaaattactgagaatggggtaccattttccaagacatatatatggaacacactctgaaaattctgcgtttgagagacctgtgcacagggctctatgagcacaggggctcgtgcaaactcttcataccctttgggaacttctatgcgctcatatgataagaacatcttacatcgatgggagacaacttgttgcatgatgttatatgtctggaagaaacttattgagtttgatgctgattgtcatttgatttaatg

SEQ ID NO: 204308 - DNA, 424 bp, Gossypium hirsutum
agctgacaaatctcaagtgtaccccaaatttgtgtttgaggactacatgaatctctatgctgacctcaagttccaagccaaggagccaaggttcgaagccatgaagaccgtggagtctgcagttaacttgggtcctattgcaactgtttgagtccttcagtgattgaagagcgatgggttttaattagcagtgtgtttctgttaataagtttagtcggctgatggataaattctgttaattatagttctggaattagagagtgcctgcaggtgtggagcttagtagtttaaaataagctgaaaaagcttgtactaagaattcctcagttatatatggtgcctggtcgccagtggctgtgctttaaatgagatgttttggctgtcggaagtgaccaaattatatttgatatgaaaaattgtcctt

SEQ ID NO: 204309 - DNA, 439 bp, Gossypium hirsutum
ctcgagtttttttttttttttttttagacatgcaggatgggtcgtcactcgattgcatttccataacttgtacaagacattcgaaaatttcagttgttcaaactactgagataaataaattggagaaagaaaccgtctctgacaaactataactgatgagagcaaagattgtaatgggaaatgaagaagtagaaggaatgaacaaacccaaacatcttggaacaatcgatttgacactagaaacttgcgttgttgttctttgtgtctttcatcgagcatcagctgatgcgaatgaatcagcaaaacctggcggccggcatggtatgctggtctgtgtagtgtctgtacttcccagaaatgatgaggagtcatccacattgctgttcccctcgaaggcttgccactttttcaatgcttggggtaaagttaattcaaggtc

SEQ ID NO: 204310 - DNA, 373 bp, Gossypium hirsutum
gtttctagaggcaaatccatctgagattatcaccatattgattgaggactatgtggtatccccacaaggcttaacaaaggttttcaatgcatctggtttgaggcagtactggttccctgtttcaaagatgcctaagaatggtgaagattggcccacagtggacgaaatggtcaagcagaaccaacgacttgtagttttcacttccaaatcagctaaagaggcttctgaggggattgcttatgaatggagatatgttgtagaaaaccaatatggagatgatgggatgaaagctggttcctgcccaaaccgtgctgagtcattctctatgaatacaaaatcaagaacattgattcttcaaaactattttcctact

SEQ ID NO: 204311 - DNA, 414 bp, Gossypium hirsutum
gaaaagataagggcaacaacatcattggcgaagctgtgggaatcagtagtgcagggactaatgatttcgttttcaatttctatgatattccgaccagacgattggagttcgacattgttggataccaacattttctgcttcagaaactagaagattttctcaaggaattgtatgaactcggatgccgaaaaatgatcgtagccggactgcctcccatcggttgcttaccgattcaaatgacggcgaaatttcaaattccaacaaatcgaaaatgcttggaagatcagaactcggacgctgaatcttataacaagaagcttgccaaactgttgcctgaactacaagcaaagcttccagggagcaagcttgcatatgcagacgtttatgaaccattatttgacatgattaattatt

SEQ ID NO: 204312 - DNA, 257 bp, Gossypium hirsutum
cccagaccatccaaaagccagaagagcaagagccaagggtgatcccgtagacccaaaatggttatggcctttacggcctttagaaaaaataatactaactctcatttgaaaagggttccagtttaaccaacgcataaacctatgaaccctatgtcacccatagtagttataactttaatttaccgtgtatcaacctcacataatgcttcaataataaagacacagacccataccctggacttgtattcattactgat

SEQ ID NO: 204313 - DNA, 355 bp, Gossypium hirsutum
  unsure (1)..(355): unsure at all n locations
accgtatcctctgttacactctcgactcttatcaaaatggatctgggtctcaccatggcacaaacccttacccgtgcggccacatccaccctcacgcgccacctttctctctccttaatcctccccaagcgcctcctttcctccaaatccatcacccatcctcctcccatcccttccctccgcttctcccgccgccctcttacccctctttcccacgccgtccgatgtctccctctcgctcccacgcgcttcacttccatccgttgccgcgtcaaccgctccgggaactccgcttactctccgctcaactccgggtcgaacttcagcgaccggtcgncgactgaaatggccccgc

SEQ ID NO: 204314 - DNA, 439 bp, Gossypium hirsutum
taccttttctgatggaacagtctacaaggggactttatgaagtggggtcgaaatagcagtgacatcaactgcgatttcgtctcgtgaagactggtcaaagaatttagagacacaatttagaaacaagatagactcgttgtctaaagtgaaccacaagaatttcgtgaacctcattggctattgtgaagaaaatacgcctttcacaagaatgatggtttttgagtatgttcctaatggatcactctatgagcatctacatatacaagaagctgagcacttggactggggaatgcgcctaaggatagccatgggaataacgtactgccttgagcatatgcatcagcttactccccctatagcccatagaaacttgcagtcttgctctgtatatctgactgaagactatgctgcaaaaatatctgatttcagcttcttgaat

SEQ ID NO: 204315 - DNA, 441 bp, Gossypium hirsutum
gctgttctctctctctctctttcccatagtttcagccatgttttaatccatcgctcacaaaattatgggtttgaaggaggaattcgaggagcatgccgagaaagttaagaccctcccggccgccccttcgaatgatgacatgctcattctctatggactgtacaagcaagctactgttggaccagtgaataccagccgtcctggaatgttcaacatgagggaaaagtacaagtgggatgcatggaaggctgttgaagggaaatcaaaggaagaagcaatgggggattatatcaccaaagtaaaacaactgtttgaggctgctggaagttcttgatgtgtgtgtgtatgaccaatgaaactggtgtaatttcaagcccttgtcggttacttggggttttcattactatgaataaattatgtactctttttctattgctatta

SEQ ID NO: 204316 - DNA, 437 bp, Gossypium hirsutum
ctccacttctgttgttgagccttacaacagtgttggctgaactcactcccttttggagcacactgatgtggctgttctccttgacaatgaagctatctacgacatttgcaggcgttctcttgacattgagcggcccacctacaccaatcttaaccgtcttgtctcccaggtcatttcctccttgactgcctcactgaggtttgatggtgccttgaatgtcgatgtgactgaattccaaaccaacttggttccctacccaagaatccacttcatgctttcctcgtatgctccagtcatctctgctgagaaggcttaccacgagcagctctcagttgctgaaatcaccaatagtgcctttgagccctcatctatgatggctaagtgcgatccacgccatggaaagtacatggcttgctgtttgatgtaccgtggtgatg

SEQ ID NO: 204317 - DNA, 438 bp, Gossypium hirsutum
ataaaaactagtttcgcggattttaggttttcggaaggggaagggagaggattgttaagcgacacgcctctctcactcaaaccctattctttttcccaatttctcgaatctagggttttacattctccttttcctctccaaatcaaccttatttcattttttttcttctcttagaaataatatcgtcaatgagcaacgaattagttaacttcaacatgtccggtcttggcgatgctcttaatgccgaagcacgagctggtctcgttaacgctctcaagaataaacttcaaagtcttgctggggatcactccgatgtgctggagagcctatcaccgattgtcaggaagcgtgtcgaggttcttagggagatccagagccaacatgatgaaatggaggctaggttttttgaggagagggctgcacttgaagctaaatatc

SEQ ID NO: 204318 - DNA, 292 bp, Gossypium hirsutum
gttagagcagcgtataattgagagtggtgaagcttcaatggctaatgcttcatttgtggatatgcagcatacagttatgagattgatgacacaatgtaatgaaaagagttttgagctggagataaaatcagcagataatcgtatcctccaagaacaattgttgaacaagtgttctgagaatgaggaattgcagaataaggtgaatctcctggagcagcggttggcatctttgtccggcgacaaattatccttgtcctctgaacaaggaatatctgaagaatattctgatgag

SEQ ID NO: 204319 - DNA, 293 bp, Gossypium hirsutum
actacggatcccccctcttaccctacccatacgaaccataactccatcatcttaacccactcttccaacacatcgatcttgcggccattaccatgcaaatctgatactcaaacttacctaccctacctcatgattcaaaaaactatacccactgattaagaactgtcttaagccaccgtacggagtattatacttaacaacaaagaacaactatgtcagcttcaacacagcagctagacacctcatgagcctaatacatgaacaaggcatttttggaagccatttaatccaaa

SEQ ID NO: 204320 - DNA, 291 bp, Gossypium hirsutum
ataactttgtgttccgtcaaaatggacctgccaataacggggctgggggacattatactgaacgagctgaatagattgattcacttcttgatgttgttcgtaaagaggctgataattgcgattgtttacaaggttttcaggtttgccattcactggcagtttgaacaggctcagggatgacgacattgttgatatcaaagatcagggaagaatacccttaccggatgatgctaacgatctaggagtttccatgacctaaagtatcagctactgcgggtgaaccctataatg

SEQ ID NO: 204321 - DNA, 282 bp, Gossypium hirsutum
cgtgctcctgcgcctactgagatagcttttaagccctgggaatccatatgcggaaatattgaatccgttgaataatcaaaccagcatcattatacgctcattacttccacgatgcactaactttactacaacacatggaggtttgattcaaataaaccatggaaggcctcagccactgcattacgtagtcaatgcaggcttcttagccgccctatatagggatcatcctgatgctgctgatacacctggatgcgatagcggacccaatttctattcaactga

SEQ ID NO: 204322 - DNA, 384 bp, Gossypium hirsutum
ccggcttccttggtctctgtggtaaaaaagtagacaggagagagtgctacaatgaaaagattaaggaattgacacaaaaattggaagctgaacaaaaggtcaccctccgagaaaagcagcaaggttctgctttggttttctttaccagtagggtgactgcagccctggctgctcaaagcctacatgctcagatggttgacaattggaccgttactgaagcgcccgaacctcgtcaactcatatggagcaacctgaccatcaagttttacaataggataatacgacaatatgtcgtttatattgtcgtgtttctgaccatagttttttatatgattcccattgcttatatctctgcagtcacaacccttaagaatctgagaaaac

SEQ ID NO: 204323 - DNA, 414 bp, Gossypium hirsutum
attggacggagcgttgatgaaacaatgaggactgcgccaggccttgcagtatgtgcaggaaaatccagatgaagtatgcccagctgggtggaaacccggagagaaatccatgaaacctgaccctaagctcagcaaggattactttgcagcaatttgaggtatagcctagaaagcagaaggtatgtgttgcgtccattaggattgactaaatgagtttttgtttttcaatgtatcttttttgttttaaagaattgcttagccttggatggtaatataaaagtatggggaaataatcaaatattaatgtttggattgtgtcttttgtatcttcaaaggctgaagcataataatcttactgtctggactgcctgcatgatgatttttctactattttttgttaaaaaaaaaaatact

SEQ ID NO: 204324 - DNA, 438 bp, Gossypium hirsutum
agggggtatccgggaccaagtggctttggttcaggctccgccgcccaagaggttaccgaagggattgatggaaccaacttgactgctctagttaccggaggagcaagtggaattgggttggaaacttctagagtattggctcttcgtggagtccacgtcatcatcggtgcaaggaacatgaaagccgcgaatgaagcaaagaacaaaattgttagagagaacacaagagcccgtatagatgttctggagctggatctttgctctactagttcaatcagatcatttgccgacaatttcattgctcttcatcttcctcttaatatcttaataaacaatgctggcatcatgttttgtccctttcagctttctcaagatggaatagaagtgcagtttgcaactaatcatataggacatttcctcttaacaaaccttctactg

SEQ ID NO: 204325 - DNA, 320 bp, Gossypium hirsutum
agcgatgatggtgcggccatgctgacatctgaatctctagtggaaacggtcgactttgcaagaaagtgggtttcattctgcaaaaaattttccattgaaccacgggcacctgagttttacttcttacagaagattgattacttgaaagataaagtgcagctctttttttgtaaaagaacgtatagctatgaaaagagattacgaagagtacaaaattcgaatcaatgctttagttgcaaaggctcagaaaacacctgaagaaggatggacaatgcaagatggaacttcttggacgggaaataacccccgtgatcaccctt

SEQ ID NO: 204326 - DNA, 433 bp, Gossypium hirsutum
catcctaaaacatacatttgcatatattattgttgtctgggtcattgtttttccaagaaagcacaatgaatgtagacgaggaggtggagagactcaaggaagaaattcaaagactaggccagatccaatcagatggttcttacaaggtcacatttggggtgctatttaatgatgatcgctgtgcaaacatctttgaagcactagttgggacactaagagcagcaaagaaacgaaaagttgttgcatatgatggtgaactactactgcaaggagttcatgacaatgtggaaatcattctcaaagctacaacaccagcagcagcagctcaaagtagcaactaatgcagttctaaataaataattgcaattatagttttgcagcaaaagtttgatgatattctatgtaatttttcaatgtttatcatgtttgaaag

SEQ ID NO: 204327 - DNA, 445 bp, Gossypium hirsutum
ggttgtagtagctatgctttgtgcaggagccacagctcagtcaggttgcgctagtgtgttgatcggcatgtcaccctgtttgagttacattacagggtcctcatcaaccccatctcaacaatgttgcacacagctagctaatgtcgtgcgttcatcaccgagatgcttgtgccaggtccttaatggtggtggttcatcatttgggatcaacatcaaccagactcaagctttggccttacctgattcatgcaatgttcagactccacctatcagcagttgtaatgctgcttctccagctccagcagactctccggtaggatcacctgaatctggaagcaaaattccaacaggagatggatctagaagtgtaccaactgcacgggagaatggctcatctgatggaagcaccaccaaaatgtcactctctttgttcaccttccttctg

SEQ ID NO: 204328 - DNA, 437 bp, Gossypium hirsutum
gttagaatagcatcagcagcatcagcagcagcagggggcgtaaacgatcaaccaaccagaaaagagaaacaagatggtttcagggtcagggatctgcaccaagagagtggttgtggatgcaaggcatcacatgctaggaaggttggcttccattttggccaaggagttgttgaatggccaaaaagtagtggttgttcgatgcgaagagatttgtatgtcgggtggtttagtgaggcagaagatgaagtacatgaggttcttgaggaagcggatgaacactaagccttctcatggccccattcattttcgtgctcctgctaagatcctctggcgtaccattcgtggcatgattccccacaagaccaagcgtggggcagctgctcttgctcgattgaaggcttatgatgggatttcagctccttatgatcagacaaaga

SEQ ID NO: 204329 - DNA, 435 bp, Gossypium hirsutum
ataacggtctggttcctatacctggatcaaacagggaaggttggtgtcaaagctaggctggattgtcatcaagatctgccgagtactacaaacaaggtgctcagtttgccaagtggaaatcaatatttagcattccttgtggtccttctgctctggctgttaatgaagcttcactttgactctctctttatgctaccatttttttacccacaaaggtcttgtgccaatattgagaacctcgaattcttttggatcgacaccaccctattgataagactcttgaagtaactgatatatgttgtacataagtcttttactactttgaagataacaatgatacatttgtaggcatattactcaatcccaatcttgtaaccacaagttctgaacacaatgagaggtctaatcctgatactattgccaaatatactccta

SEQ ID NO: 204330 - DNA, 429 bp, Gossypium hirsutum
gctaaagcaaaggaagaagaagaaatcaccaaaataagtcttatgagaagcatggttgaaacacaagatccttcttccaaggcaaaatcatgatttcttctgttatgtcaaaattatgattgaaaaattgaaccagaagtccgacaagttgaactttcgcttcttgtaggaagtagatgatatgacaatgagaagatttctaagaggtcgtgatttagatgtggagaaagcatcgagcatgttcctcaagtacctgaaatggagacgaagctttgttcctaatggtttcatttctccatcagaactcacacatgaaatccaacagaacaagatgtttttgcaaggttccgacaagaaaggacgacctatttctgttcttcttgctgcaagacatttccagcataatggcggcctcgacgaattcaagcg

SEQ ID NO: 204331 - DNA, 423 bp, Gossypium hirsutum
gagagtagatattcgctcgtttctctctttcgtcgaactccgcgtaataatcgctcatatttctcgcagacgtgaagaatggggctgtctttcacaaagctgttcagccggctttttgccaagaaggagatgcgtatattgatggttggacttgatgctgctggtaaaaccaccattctttacaagctcaagttgggagagattgtcaccacaattccaaccattggtttcaatgtggaaactgtggaatacaagaacatcagctttactgtctgggatgttggtggccaggacaagattcgtccattgtggaggcattacttccaaaacacacaaggactcatttttgtggttgatagcaatgatcgtgatcgtgtggtcgaagccagggatgagttgcacaggatgttgaacgaggatgag

SEQ ID NO: 204332 - DNA, 377 bp, Gossypium hirsutum
tttcagcatcgattactttttatttttttcagagcctccttcaccaacctccgctctgttcagcccgtgatcttttgatctttctccatggctaccatttccaagctcgctaaccccaacccagacgcttctctttcattatctttcaaacccagatcttcttcatcgcttaaatgcttcgttgggctccctaccaggcctgctttcagctctaagctggtttcatcttctagcttgtcctcgataaacacccaccctttcaggggctccttggttgtcaggtgttctcttgctgatggaaacggtagttcagtgaagacgactactttgcatgatctgtatgaaaaagaaaggcagagtccatggtatgacaacct

SEQ ID NO: 204333 - DNA, 376 bp, Gossypium hirsutum
  unsure (1)..(376): unsure at all n locations
gttggggctaggtttttgctgacaagcacgagtgaggtttatggcgatccgcttcagcatccacagaaagagacctattgnggaaatgtcaatccaattggcgagaggagttgctatgatgaagggaaaaggacagctgaaaccttagctatggattatcatcgaggtgccggtgtcgaggtgcgaattgctcgtattttcaatacctatgggcctcgcatgtgcttggatgacgggcgtgttgttagcaattttgttgctcagaccattcggaagctaccaatgactgtttatggtgatggcaaacaaacacgcagcttccaatatgtttccgatttggtggatggactttgtgctttaatggatggtgagcaca

SEQ ID NO: 204334 - DNA, 359 bp, Gossypium hirsutum
gtacaagccatgctggtaggtactgcttggagacgtgggaactgggaaaacaagcttggttctgagatttgtcaaaggccagttttctgattttcaggaatccacaattggagctgccttcttgactcaaggtctgtctctaaacgaagacacggttaagtttgatatatgggacacagctggacaggagagataccatagcttggctgctatgtactatcgaggtgctgtaactgccatcgtggtctactatatcacaaactcagaattctttgagcgtgccaaaaaatgggtgcatgaactgcaaagacgaggaaatccgaatctgataatgttcttggtagcaaacaaggttgacc

SEQ ID NO: 204335 - DNA, 402 bp, Gossypium hirsutum
ggactgcctcaaacaaggaagtcaatgtcgttttctgagttcaggccactaaacgagaactccctcatcgaatacattaaagccacgccgtctttgtcatcgaagatcggccacaactatgatggtttaaagattaaggaagttggagatggcaatcttaatttcgtccacatcatcgttggcccttctggttcttttgtaatcaagcaggcacttccctacatacgatgtattgtggaatcttggcccatgactaaggaacgagcatatttcgaagcggtggcgttaaaacaacatggtgggttatgccctgaacatgttcctgaagtttatcacttttgaccgtaccatgtccttgattggaatgcgatatttagagccgccccatataatcctgagaaa

SEQ ID NO: 204336 - DNA, 426 bp, Gossypium hirsutum
tgtgcatcaactcatacataccatagagtttgtgctcggtgccgtttcaaatacagcctcataccttcgattatgggccctaagtcttgctcactcacaattgtcaattgtgttctacgagaaggttcttctccttgcttggggatacaacaatatggtcatcctcgttgttggcatcatcatcttcatttttgcaactgtcggtgtattgctaattatggaaaccttaagcgctttcctacatgcattgagacttcattgggtcgaattccagaacaaattctacgagggagacggttacaagttctatccattttcattcatcttgatcgatgatgaagactattgaagcaacaaagaatcgaataaaaacgatttcggcggagttgaattttgatagagatatggaagttttggtgaaaattt

SEQ ID NO: 204337 - DNA, 399 bp, Gossypium hirsutum
cacgagcagaagctcgactgtggtggcggctacatgaagctgctcaatggcgacactgaccacaacaaatctggcggtgacaccacgtacagcgttacgttcggacctgatatgtgcggctacagcgccaatatagtgcatgccattcttacgtacaatgtgacaaatcacttgatcaaaaaggaaggtgctcgtgagactgaccaactcactcatgtttatacattcattctccgatcagatgctacctacagcatgcttatcgataatgttgacaaacaaactggtagcttatacactgactgagatattctcccaccacattagatcaacgatcctgaggccaatatgcctgacgattgcgatgacaaggaatacattccttctcctgcatacaaa

SEQ ID NO: 204338 - DNA, 317 bp, Gossypium hirsutum
  unsure (1)..(317): unsure at all n locations
ctacaacacacttgctagtattcctacttggagtggtgactctcaccactcccacatttggtacctatgagtcaccaaattatgggaaaccccctactcctgtattcaagcctcccaaggtgaaaccaccaccatatgaacctaagccaccagtgtatgaaccaccaaaaaaggagaagcctgaacctaaaccaccggtttatgcacctccaaagaaagagaagcatggacccaaaccaccaatgtatgaacctccaaagaaggagaagcctgagccaaagccaccagtttatacacctncaaagaaagaggagcct

SEQ ID NO: 204339 - DNA, 368 bp, Gossypium hirsutum
ctgatgcaaagcttcaaatccaaggaatacgttcgtgaaacttttgcttggatgcattattactggtaccttaccaacgatggcattgaatttttaaggacttaccttaatctcccctctgagattgttcctgctactttgaagaagcaaactaggcccggcggtggtcgtcccatgggtccttctgatagccgcccacgtggtccgccacgctttggcgacggtgagaggcgattcggtgacagggatggataccgtggaggtccacgaggagtcggtgatttcggtgataagggtggtgcgcctgctgattatcagccttcattcaagggccctggttcaaggcctgcttttggtcgtggaggcgg

SEQ ID NO: 204340 - DNA, 425 bp, Gossypium hirsutum
gaaggatattgaggcattggagcttttcagagagatgcagagtgcaggggtgaagccaaactctgtaacaataccttgcttgctaccagcttgtggaaatattgcagcattggtacatggaaaagcagctcatggtttttcccttagaacaggaatcattgctgatgttcatgttggtagtgcattagttgatatgtacgctaagtgtggaagaatccatttgtctcgactttgttttgatagaataccaaacaaaaactcagtctgttggaatgcgattatgggtggttatgcaatgcatggtaaggctaatgaagctattgatatttttcatttgatgcaacagaaagggcacaagcctgattttatcagctttagttgtgtattatctgcttgcagtcagggtggcctaacagaacaaggtt

SEQ ID NO: 204341 - DNA, 406 bp, Gossypium hirsutum
aaatgctttgctttgtatttcgttaaccatggctcatagcactcgtcaccctttcttccttttccaacttttactcattagtgtctcactaatgatcggtagccacaccgtctcgacagcggctcgacgtttattcgagacacaaacaacctgatcggagttgccacaattagcttcaaaatacgaaaagcaggaagagtctgaatatgaaaagccggaatacaaacagccaaagtatgacgaagagtacccaaaacatgagaagcctgaaattcacaaggaggaaaaacaaaaaccgtgcaagcaacatgaagagtaccacgagtcacacaaatcgtaggagcacgaagagtaccagaaagaaaaacccgagttccccaaattggaaaagcctaaagagcacgag

SEQ ID NO: 204342 - DNA, 376 bp, Gossypium hirsutum
  unsure (1)..(376): unsure at all n locations
caaagattgagaagcttgagaccaaatgccagtgtcagtgagcagcatgaagcggttgaaacctggcgcaatgagaaactgaaagaagccaaaaatttagcccttggaggagagagattggattcaactcttctgcgagaggaagcagggaatttagtaaaagtcttggagtcaaattgggctgcactgtcagaagagattggcctttggattcccaatgaaatcaagaatcaagaacataatgataagcctgaggacgtggaagatactgatgatccagaacaaattttagctgggaggcctcctctgccggagtgccgtactgaacttcacactgattatgatggtgattgtgttcgatggngtcttacacatc

SEQ ID NO: 204343 - DNA, 429 bp, Gossypium hirsutum
gagagagagaagaccatggccgatcaacttacggacgatcagatctctgagttcaaggaggctttcagcctctttgacaaggatggcgatggttgcattactaccaaggagctggggactgtgatgcggtcacttggtcagaaccctactgaggcagaactccaagatatgatcaatgaagttgatgctgatggaaatgggaccattgattttcctgaattccttaacctaatggcaaggaagatgaaggatactgattccgaggaagaacttaaagaggctttcagggtgtttgacaaggaccagaatggtttcatatctgctgctgagcttcgccatgtcatgacaaatctcggtgagaagcttacagatgaggaagttgatgagatgatccgtgaagctgatgttgatggtgatgggcagatcaac

SEQ ID NO: 204344 - DNA, 415 bp, Gossypium hirsutum
gtgcaaccgatagggcaaaagcggctgacgaatgtggccgtcgtgcgtttgaagaaacacggcatgcgatttgaaatcgcttgctacaaaaacaaagtcctctcatggcgttcccgggtcgagaaagatttggacgaggttctacagtcccatacggtgtactccaatgtttcgaaaggggttcttgctaagaccaaagatttggttgctgcttttgggactgatgatcagactaaaatttgtttggagattttggagaaaggggagctacaagttgctgggaaggaaagggaatcgcaattttcgagtcagtttcgggatagcgacgattgtcatgcaaaaaaccatcaatcctgaaactcagcgcccttacaccattagtatgattgagagactaatgcatgaaatttatttc

SEQ ID NO: 204345 - DNA, 388 bp, Gossypium hirsutum
ccaaatcggttccaagttttgggaggttgtttgcgatgagcacggcatagatccaactggaaggtacattggttcctcggatctgcagttggagcgtgttaatgtttactataacgaggcttcatgtggtcgctttgttcctcgtgctgtgctcatggacttggagcctggtacgatggacagtgtccgaactggtccttacggccagattttcaggccagacaactttgtttttggacaatccggtgctggaaacaattgggccaagggccattacactgaaggagccgagcttatcgatgccgttcttgatgttgtgaggaaagaagctgagaactgtgactgcctgcaaggtttccaggtatgccactcattgggtgggggaact

SEQ ID NO: 204346 - DNA, 391 bp, Gossypium hirsutum
aaaccaacccatcaatccattaacattattagtgatgatacaaactaaaactttacaacaattaccaaacagaacaacactcatcatttggagctacatataaaagtgcatatatatatatattgcttgccacttcccttagaacaataacacttatgattgtaagctgttacacaattcaaaacgacacaaatatagaaagaattctacaacgattcaattaattatctataaattcccatcaaaaacctcgtcgactttcagtttcagagctgagcaagacggcggatatcaatggggtaagcatcggtaggagattgagcgctgtaggatctcctcccaatgatcacattggcagcctcacttggatgaaatgcatcccaaaacaagt

SEQ ID NO: 204347 - DNA, 294 bp, Gossypium hirsutum
atctggggattcatcacgttctgctgtttctgcatattcttactctttgcaaaagaacactgcttggttagcaaaaagcatttcaaataatgggttggctgaccaagattcttaaaggttcaagtaataaagggcgatatcatgagagatatggagatggtagaacttgggatgaacctcgccgttcaacagaaggctctgatggttttgacaaagatgaaattgattgtgctattgcaatttccctttcagaagttgaccaaaaaggcaagatagtcatagaagatgagtctg

SEQ ID NO: 204348 - DNA, 403 bp, Gossypium hirsutum
aaagtatcgaagctgtgaaaatgtccaagcaagctggatggggtgtgatggccagccaccgcagtggtgaaacggaggatacttttattgctgatctttcagtcggtttggccacgggccaaattaagaccggagctccatgcaggtctgagcgtttagccaagtacaatcagcttctgcgaattgaggaggagcttggtgcggaagctgtctatgctggagccagcttccgtgctccagttgcaccctattaagatgcttgtttagatgataatttgctgagactggatgcgtgcggcagagcttcagtggtttattgtgaccctaaaacatgtttcaataattttgatagcaattttgtacttgttcagaattatatcaatctccgtgttatttttgttgg

SEQ ID NO: 204349 - DNA, 357 bp, Gossypium hirsutum
ctctccctccaattaagatgcagatcttcgttaagaccctgaccggcaagaccatcaccctcgaagtcgagagttccgacacgatcgacaacgttaaggcgaaaatccaagacaaggaagggatcccaccagaccaacaacgtctcatcttcgccggaaaacagctcgaagatggccggaccttggccgattacaacatccagaaggagtccaccctccatctcgtcctccgtctacgtggtggcatgcagatcttcgtcaaaaccctgtccggcaagaccataactttggaagtcgaaagctctgacaccattgacaacgtcaaggcaaagatccaagacaaggaaggcatcccac

SEQ ID NO: 204350 - DNA, 318 bp, Gossypium hirsutum
tggaaaaccattctttgcgctaaaaaaaactaatgttgcgccgtggcacaataaattctttcacctctattaccatctcagtcaactatcaatgctcagggagccactgatgttaatatcaggctaattattattttctgttgattgcattgtttacatgcatgcagacacatcaatctccaagtattctgctacttatttggctaaacagcagtgttaataggaccaggcattcatgcagcaggttcacactattataagttgatgcttgacaacacatgataacatggaagcatcactacctgatctttctaggac

SEQ ID NO: 204351 - DNA, 410 bp, Gossypium hirsutum
gcagcagctacgtggatgagagtgggaagcagttggttgcagctggtgatacaggcaactcagtagaacttgtcggtggttcagagcttgttataaccaaaagaagtgatgagggaatattgagtaaaacacttggttcccgagaatacatgcgctactatcagcagaagcctcgtccatcacctgcaaataacatggccattacagctgccttggcctcaaggtacaggagtatgggcatagcaaccgtgcagtcaagagagcaaatggtgagaatgaaagtgatgaaagcaatgaatagagggggtgtggaggcaatgcgtacaaaagttggcatgaagaataatgtcattcggaacttgcccaagaatgttccgtattagtcagcacatgggttatccttctcagca

SEQ ID NO: 204352 - DNA, 372 bp, Gossypium hirsutum
gagatattaaactctatggcagtcacaaacgaacacttcgcgactgctcttggaacaagcaatccatcagctctgcgtgaaactgttgttgaagtgcccaatgtcagttgggaagatattggaggccttgagaatgttaagagagagcttcaagagacggttcaatatccagtggagcatcccgagaagtttgagaagtttgggatgtcaccgtcgaagggagtgctattctacggccctcctggatgtgggaaaacccttctggccaaagctatcgcaaacgaatgtcaggcaaatttcattagcgtcaagggtccggaattgctcacaatgtggttcggagaaagtgaagccaatgttcgtgaaattttc

SEQ ID NO: 204353 - DNA, 349 bp, Gossypium hirsutum
gtgatgaagtgtgtgatgatgtgcgcgccttgttgagaaggtataaagatggttggtcgatgacacaatgccctgacgccggaatattcttgtcgtggaaagatcaggtggtggtttgggccagtgcatggcggccttgacgacggcgaccggtggcagatggcgtttttcttttcttttcctttttgttgcatggcaaggggagtggttcacacgtgtgttatggttttttttctcgtacgtgtaatgtggattggcgtatttttttctttataatatggtattggggagtgccaagaatttgcttattttcaataggattgggagtaattaaaaatttattttcact

SEQ ID NO: 204354 - DNA, 402 bp, Gossypium hirsutum
attgaatcaacattttccttggatgttaattcgaaattggattgggaatcaattggcaaaattcttgcacgaggtcatagtcgtatccccgtttatgctgtgaatccaaaaaatatcatcgggttgttactggtgaaaagtcttctcacggtacgaccagagaccgagactccagtcagtgctgtttccatcaggagaatgcctagggtcccagcacatatgcctctgtatgatatcctcaatgaatttcaaaagggcagcagtcatatggcagctgtagtgaaggttaaaggaaagactgaagaccctcaattttttgttgacggacagaaatttgacgagcacaaagttaccaatggaaattctcaactaaccacccctttgctgaccaaatatgactct

SEQ ID NO: 204355 - DNA, 315 bp, Gossypium hirsutum
actaaaagaaccatttaatttattccaaaaacaaactacattttaagagtttgacaaaataaccaaaacctttgtgggttgcaaaaccataaaagctaagggaacgttcaaaatagagatcatactagtaaatgtgggcatcaaaataatggttaagattttagtcaacttcctccattttgctgcccttgccatctgcattctccaatgggggcatgtcaacatcagcatttgcatcaccagcatcctcgtcgatgctcaacccaagtttcaacatcctgtgaattctgttgccgaaagtgtttggatcatcaa

SEQ ID NO: 204356 - DNA, 365 bp, Gossypium hirsutum
tgaggctggacctgtatcaccaactcctgctcttgccaatggttttattacatttggcagctttaataatctggcaaagataacacccaaggtattgcaagtttgggcaaggatattatgtgctgttccaaattcccgtctcgtggtaaaatgcaagccattttgttgtgacagtgttcggcagaaatttctatcaacattagagcagctcggtttagaatcgcttcgtgtcgatcttctccctctaattcttcttaaccacgaccatatgcaagcttattctcttatggatattaggttggacacatttccgtatgctggaacaacgacaacatgtgaatctctatacatgggagtaccatgcg

SEQ ID NO: 204357 - DNA, 391 bp, Gossypium hirsutum
  unsure (1)..(391): unsure at all n locations
gttctcttaaaactcaacctctcaaatcctctggaccttttttttttcttccaatccatacagcacccaattccatggccacctcttccccacgtgaggataatgtctacatggcgaagctcgccgagcaagccgagcgctacgaggagatggtgaagttcatggagaccgtcgtctncgccgtaccctcctccgacgagctctccgtcgaggaaaggaaccttctctctgtcgcatacaagaacgtcatcggcgcccgacgcgcctcctggaggatcgtttcctccatcgagcagaaggaggaagaacgcggcaacgccgaccatgtctncgtcatccgtgagtacagggccaagatcgaggctgagttgtccgagatttgcgccggaat

SEQ ID NO: 204358 - DNA, 419 bp, Gossypium hirsutum
  unsure (1)..(419): unsure at all n locations
gtataatccaatcctatcttatagtttggtgggttgaacatggagccgccgcctactggtgaagaacccacttcgtgggatgagctatataacataaatttgattccttctgagctgttcctcaagtttagaaaagaaattcaggggtttcgagttggtgtcaatttggagttcttcaatgcccctatgaatgatttccaaactaagcttgtgctgaaacctttatcccctgaacggaggtggaagtttgcatatgagcctataagacaagatgtacgccttatttccaaaaagatccctgtcacaaaatttcttaatctccaggttggcataggccacaatttcaagatgaatgcaattggntggaaaatggaagctcaccacctgttttggtggaaatggaattttttcgattcgga

SEQ ID NO: 204359 - DNA, 413 bp, Gossypium hirsutum
ctagtctcgagttttttttttttttttttggaactcaaaggcgggtagctgagatcgtctttctccggtttcctcattgtttttgtttttcgcagttaatacaagatggctgatggtgaggatattcaaccacttgtctgcgacaatggaactggaatggtcaaggcgggatttgctggtgatgatgctccaagggctgtgttccctagcatcgtggggcgtccacgtcacactggtgtgatggttggtatgggtcaaaaagatgcatatgttggggatgaggctcagtccaaacgtggtattttaactctgaagtatccgattgaacacggtattgttaacaactgggatgatatggaaaagatttggcatcataccttttacaatgaacttcgtgtggctcccgaagaaca

SEQ ID NO: 204360 - DNA, 405 bp, Gossypium hirsutum
cgagatcgccttctcaggcttttgtgccctaagaattctgacttttctcgctgtaaataagtgcaaaagtcggtgaacttttggggacgtgttctttctgaggttcagagccttcattcgaggattcttgttcttccttagcatggcaaccaatgaaaatcttccaccaaatgttataaagcaactggcaaaggaattgaagggtcttgacgaatcacctccggaaggaattaaagttggtgtaaatgatgatgatttttcgatcatttatgctgacattgaagggccagctgggactccatatgaaaatggtgttttccgtatgaagttgttactgtctcatgatttccctcattctcctccgaaaggctactttctgaccaagatttttcatccaaatattgc

SEQ ID NO: 204361 - DNA, 398 bp, Gossypium hirsutum
gaagattttactccatttccttgcaaaggccagcctggcaaggatggatggtatcctcctggtcatggtgatgtgttcccagctctaatgaacagtggcaagcttgctactttcttatcacaggacaaggagtatgcatttgttgccaactcagacaacttgggtgctattgttgacttgaaaatattgaaccatttggtcaaaaacaagaatgaatactgtatggaggttacacccaaaaccttagctgatgtgaagggtggtactcttatttcttatgaaggaaaagttcagctccttgaaattgcacaagtccctgatgcacatgtcaatgaattcaagtctatagagaaatttaaaattttcaatacaaaacaattgtggcttgacctaaatgc

SEQ ID NO: 204362 - DNA, 412 bp, Gossypium hirsutum
ggccatcgtttttgcttaaaaaatatggggacattactaattgggtgagaagtgccatgtatttctggatcacaaaagtctcaaaaatctgatgcctcatagagacttaaatctgcgaaaaagacgttggcttgagtcgttgaaagattacgagcttgtcattgattaccacccgggaaaggctaatatggttgcggacgccttaagccggaaatcattgtttgctttacgagcgatgaatgtgcacttgtctgttctacccgacaatgtgttaatagttgaattaaaagccaaaccattattgattcatcaaattcgtgaagcccagaaagttgatgatgaattagttgcataacgggctgagtgtgctccgaacaaggaatcggagtttcaaatcgatgatgatgattgg

SEQ ID NO: 204363 - DNA, 304 bp, Gossypium hirsutum
  unsure (1)..(304): unsure at all n locations
agactagagagaatggctgtntcttcttcatttactgtcatgtgtgttgtggtggcttggatgatggtggggagcagtanctatgctcagctctccactaatttctactctcaatcatgtccaaaggtgttgcctacagccgagtcagtggttaaatcagccctgtcaaaagagaagcgcatgggtgcttctctcgtccgcttgttcttccatgactgctttgtcaatggttgtgataggtcaatactcctagacgacacttctcctttcacgggggagataactgcggctcccaataatattt

SEQ ID NO: 204364 - DNA, 328 bp, Gossypium hirsutum
gggctgggactttgcccgcagcacatccgcgccacactctccaggaagctcatcaaccatggcggaacagaccgagaaagcatttttgaagcagcccaaagtgtttttaagctctaagaaaactggtaaagggaagagaccaggaaagggagggaaccgcttctggaagagcattggtttgggattcaagacccctcgtgaagctattgaaggaacttacatcgataagaaatgccctttcactggccctgtttcagtcaggggccgcatcttagctggtacttgccatagtgccaagatgatgaggacaatcattgttcgacggaac

SEQ ID NO: 204365 - DNA, 426 bp, Gossypium hirsutum
ctgggccgtttattaaagattgggcgacgtggaatcaggtattcttgctagttgatattatctgctgttgcgccattattttcccaattgtttggtctattcgttcgttgagggaaacttcgaaaactgatgggaaggctgcgaagaatttggcaaagttaactctgtttaggcagttttacatcgtggtgattggatatctatattttacgagaattgtggtgtttgctttgaggacgattgcagcttacaagtatcaatgggtaagcaatgcagcggaggagactgcatcattggcgttctatttgattatctttttcatgtttaggcccgtggagaaaaatgagtactttattcttgaagaagaagatgaagaggctgctgagctggctcttagagatgaagatttcgagctttgagaacctg

SEQ ID NO: 204366 - DNA, 327 bp, Gossypium hirsutum
caacttcaagaacttaggggtccatttgttgttaggggagatgtacgaccatgagagtttggtcaaggcaataaagcaagttgatgtggtgatttcggttgtgggtcaaatgcagttagcagatcaagttaagatcattgctgctattaaagaagctgggaatgtcaagagatttttcccatcggaatttggaatggacgtggacaagaacaatgcggttgagccagcaaaatcgacattcgcaatcaaggctcaaatccgtcgtgctgttgaagctgaagggatcccttacacttatgtgcctgctaactgctttgcaggctattt

SEQ ID NO: 204367 - DNA, 358 bp, Gossypium hirsutum
atcaaactgtaagaacctaagatatcaacgttatctctgcgaaaggcttgaaaaacgtcaacctcatcgataaaatggacgtttacgccgtcgtttcactcaagggtgattcatcgaagcacaaattgaagacgctggtgcataaagattgtggcagaaccccgaattggaattttccggtcaagttcaccgtcgatgaatcattggctaaaaacaataagcttagcatcaagttcaagatcatgtgtgaacgtatatccggtgataaagaacttggtgtagtcaacgttccggtcaaagagcttctggattcgccgggcgatggtgggtcaatgaaattcgtttgttttcaggtgag

SEQ ID NO: 204368 - DNA, 370 bp, Gossypium hirsutum
atcccgagctaaacagccttgattgaagcggcacctcataattccaatagcgatgagaacagttgacattatgactacttgaaagaataatcgttattctgactgctcttccatcttcctttaccattttcaattttggagaccacaaagctgtgaagaactggcaactattcttatgtgttgctgctggtctttgggctggactaattattgatctgggaactgatatctatactatcaatgcatacagccctgtacaagatgtcgttgattcctgcaggactggagctacgactaacgttattttttggccttgcgttgggttacaagacttgcattattcctatttttgctattgcaatcaggattt

SEQ ID NO: 204369 - DNA, 371 bp, Gossypium hirsutum
aataaagccaaatgaattaaatccaaaagacgcagcttcgatcttatccatttctcaaaatccatcatcaaaattagggtttctgtaaagtaaaaaaataaattgaaatcaaaatcgttttgaaatcttagggaatgcggccgaattgttgtcatgtttcgtttgcttttgttctgaagttcttgaattttctccaagctttccttggagtgtcgattttactctactcgttttggatgttggatcaatggaatcatcacgtccccatttctcctccgccgtcagttccgtggccggattcttctctctcggctctcttcaattcgagaccggaggttgggggagctcgaggagccaaggttttcgatgat

SEQ ID NO: 204370 - DNA, 284 bp, Gossypium hirsutum
atcaaactgtatgggtccagcatcctgtatatatcatggggcaaataccttgctgcattctgtctcaacatatcgtatgctgtgcctttcacatctacactaactggatgtatagcaagtaatccaattgacgcgacattgggattttgagaccagcgcttcacagacatcattgcttgaagaggtgcagcaccacaacaccacttgtccacaggattctttatgttggatatagctgccatataaccatttataccagctgcaagaatatgacagccgatatg

SEQ ID NO: 204371 - DNA, 389 bp, Gossypium hirsutum
  unsure (1)..(389): unsure at all n locations
tagattataagcacctccccataagcaaaccacaaaggaaagcttggagagagacccaaaaacaatgtctaaggaagtgagtgaagaaggacagggtcgtaaggactatgtggaccctccaccggcacctctgattgatatggctgaactcaagtcatggtctttttacagagccctcatagctgagttcatagccactctcctcttcctctatgtcactgttgctaccgtaattggtcacaagaaacaacaagatgcatgtgatggtgttggtctcttgggtattgcatgggctttcggtggcatgatctttatccttgtttactgcacctgncggtttctcaagtgggacacatttaaccctgcgggtgactttttggggttgtttt

SEQ ID NO: 204372 - DNA, 357 bp, Gossypium hirsutum
ccggcgtgggtgaaggcggcatgttagaaagacgtgactgcgccgccgacaatttgcattctaaaggaacgcttgatttgaaaaatggacagagtagcactaattctggaggagacaccaccgttaagaagaaaaatatccatgggatactgaatactgcgagccggagaatattgcttccacttggagctatgattgctaggtacatcaaaagctctgagtcaccagatccagcttggccctatcttaatgtatcctgtcaaatatgaccttatgccataggagttgctggctggggaactgatcttaagcttggaagagagtcctctggtctcacatattccggtaatagataca

SEQ ID NO: 204373 - DNA, 425 bp, Gossypium hirsutum
tggcatcctcaggatttcaagctgacgtgagggctttacaaaagcaactggcagctaggcacttgatttatcagcatcagcacaacaagcaaatgagctgccctgcaatggctcaattgctttccaacacactttattacaagcgtttctttccttactattcttttaatgttttgggtggccttgataacgaaggaaagggttgtgtcttcacatatgatgctgttggttcctatgagaaggttggatacagttctcaaggttctggttcaacgctcatcatgccgttcttggataaccaactgaagtctcccagtcctcttctattgcctgcccaggatgctgttactccacttgtggaagctgaagctattgatttggtaaaaactgtttttgcatctgcatccgagagagatatatacact

SEQ ID NO: 204374 - DNA, 412 bp, Gossypium hirsutum
gtgcaaaaccagaaagtaaaaagaacagagctttgatatcctaagctaatgtcggacgaggagcaccatttcgagtccaaggccgacgccggcgcctccaaaacctatcctcagcaggccggtactatccgtaaaaacggctacatcgtcatcaaaggccgtccttgcaaggttgtcgaagtttccacttccaagactgggaagcacggacatgctaagtgtcactttgttgggatcgacatcttcactgctaagaagctggaagatatcgttccttcttcccacaattgtgatgtgccacacgtcaaccgtactgattaccaattgatcgacatttccgaggatggatttgtgagcttgctgaccgacagcggagacactaaggatgatctaagggctccaactgatgaaa

SEQ ID NO: 204375 - DNA, 363 bp, Gossypium hirsutum
gttaagctcaaggctttaaatggagaaagaagtagattagcacaaagctttgagtacaactatggtgattttatccccattttgaggccattcttgagagggtatttgaagttatgcaaggaagtgaaggaaatcagattgcagcttttcagggaccaattccttgaggagaggaagaagcttgcaaccacaaaaagaattgacaacaatgctttgaaatgtgccattgatcacattcttgatgctcaacgaaagggagagatcaatgaagacaatgttctttacattgttgagaatatcaatgttgctgctattgaaacaaccttatggtcaattgaatggggcattggttagcttgtgaac

SEQ ID NO: 204376 - DNA, 301 bp, Gossypium hirsutum
aacaaaagatgtatcaaattaccaaaatcctcatccttaacaaccttaataataaatgagcaagcgtaagtctcagtatctaacataacttaaagcatatgacactgtcattaaataaaaatactagaggtgcagcaaccaaaatgtctcttccaagtaaagatgcagaaatggacttcatttcagaggaatgaacctagaagaatgggtggcaccaataccaggtctaccatgcttaacgggcttgtacgaaatggaaaactcggcaaggtaatggctgatcatttcaggcttgatttca

SEQ ID NO: 204377 - DNA, 364 bp, Gossypium hirsutum
aaaaatatgatattagcctggattttgattctcagctccgccatggcagtagctcgttgccaagatttttactcccatgccggaccatatgttccgcctccacaaaaagtaacctatctccacttctttttacacgacactatgagcggcaacaaccctagtgcaatccccatagtcagtccaaacatcaccacctcgacggggttcggcggcgtgatagctttcgatgatccactcaccgttggccccgacataacattagaggtcatatggaacgctcaaagcctctgggtgtcgacaggcaaagacgttttgactctgatggcgtacctggacatcgggtttacgaaaggtgaatttaacc

SEQ ID NO: 204378 - DNA, 326 bp, Gossypium hirsutum
cggtcgtgtcttttctggcagagttgcaactggtttgagggtcagaatcatgggtccaaactatgtacctggggagaagaaagacttgtatgtaaagagtgtacagagaactgtgatttggatgggaaagaagcaggagacagttgaggacgttccttgtggtaatacagttgccatggttggtttggatcagttcatcaccaagaatgctacattgaccaatgagaaggaagttgatgcccacccaatacgtgccatgaagttttctgtctcacctgttgtccgtgttgctgttcaatgcaaggttgcatcagatcttgccaaac

SEQ ID NO: 204379 - DNA, 394 bp, Gossypium hirsutum
cgatgatgatcagcataaagacaatgaggaggaaaggatgattgacaagctgttgatacagtacagtaagaaaccgccatctggtgaagagggaaagataagaagaaagtctaaaagtcgtcatgcacatcatatgggaagtgatgtgtgtgaagctcctcataaatcaagtagggatacatccgatgatatgtccgagaccatttcccgtccagcccgttcaatatctctccctcctgcacaaacagctgaatcaaaaggaaccaaagtttatgctcgtgctaactcattcgagtctgataagtcgagtgcaacccagcatgtgcattcaaagttaccagattatgatgaattggccgctcactttgcaacaatgaaagggagataaagcttt

SEQ ID NO: 204380 - DNA, 425 bp, Gossypium hirsutum
cttttatatttttcctctccaattttccgtcactttcccgagaaaatgagagaaatccttgacatccaaggtggccaatgcggcaatcagataggagccaagttctgggaagtcgtatgtgccgaacatggcatcgattcaacgggtcgatatggtggtgactcggagctccagcttgagcgaatcaatgtttactacaacgaagccagttgtggccgttttgttccccgcgcagttttaatggatctggaacccggaaccatggatagcgtaagatccggtccttacggacaaattttccgacccgataacttcgttttcggacagtccggtgcgggaaacaattgggctaagggacattacactgaaggagcggagcttatcgattccgttctcgacgtggttagaaaggaagccgagaattg

SEQ ID NO: 204381 - DNA, 409 bp, Gossypium hirsutum
tttatatttttcctctccaattttccgtcactttcccgagaaaatgagagaaatccttcacatccaaggtggccaatgcggcaatcagataggagccaagttctgggaagtcgtatgtgccgaacatggcatcgattcaacgggtcgatatggtggtgactcggagctccagcttgagcgaatcaatgtttactacaacgaagccagttgtggccggtttgttccccgcgcagttctaatggatctggaacccggaaccatggatagcgtaagatccggtccttacggacaaattttccgacccgataacttcattttcggacagtccggtgcgggaaacaattgagctaaaggacattacactgaatgagcggagcttatcgattcacgtctcgacgtggctagaaag

SEQ ID NO: 204382 - DNA, 404 bp, Gossypium hirsutum
ccgtgttcccctcgccaaaggtttccgatacggttgtctgtccatacaatgctactctttcggttcatcagcttgttgagaatgctgatgagtgcatggttcttgataatgaggctttatatgatatctgcttcaggactcttaaattgactactcctagctttggtgatttgaaccatttgatctctgcaaccatgagtggagttacttgctgtctaagattccccggccaactcaactccgacctccgaaagcttgctgtgaacttgattcccttcccccgtcttcactttttcatggtcggatttgctccactgacctcccgcggttctcagcagtaccgagctctaactgtccctgagttgacacaacaaatgtgggatgcaaagaacatgatgtgtgct

SEQ ID NO: 204383 - DNA, 417 bp, Gossypium hirsutum
  unsure (1)..(417): unsure at all n locations
ccggtgttaagaggctttatcagatgcaggccaatggaagcttgttgttccctgctattaatgtcaatgactctgtcaccaagagcaagttcgataacttgtatggatgccgtcactctcttcccgatgggttgatgagagctaccgatgtcatgattgctggtaaggtcgctgttgtctgtggttatggtgatgtcggcaagggttgtgctgctgccttgaagcaagccggtgctcgcgtcattgtcaccgagattgatcccatctgtgcccttcaggctctcatggaaggacttcaagttttgacccttgaggatgttgtctccgaggctgatatctttgtcaccacgactggtaacaaggacatcatcatggttaaccacatgangaagatgaagaacaatgccattgtttgca

SEQ ID NO: 204384 - DNA, 422 bp, Gossypium hirsutum
atggggaagtttaaggaagcgctaaaggattttcaacaggtcaaaaagatttgtcccaatgatcctgatgctaccaagaaattaaaggaatgtgagaaggcagtaatgaaattaaaatttgaagaagcaatttctgtacctgagtctgagaggcgttttgtagctgactctattgattaccatagcatagaggtggagccacaatattcgggtgcaaagatagatggagatgttgttactttggattttgttaagaaaatgatggatgacttcaagaatcaaaagtgtttgcataaaagatatgcattccagattgtcttacaaatgagaaaaatgcttcgatctcagccttctcttgatgatattaatgttcctgatggcaatcatttcactgtctgcggtgatgtacatggccagttcta

SEQ ID NO: 204385 - DNA, 418 bp, Gossypium hirsutum
cggcacgagcggaagactcagttgtctcgtccacattcgttccctgtctttccccaggtaggtccattcaggcatagaactggagtttggagttctctaccaggttgattgagtgctcgaccaaagggaaagggcttgagcgtccttgattcaaagtctctatatcccaaagggaagcaactgagcttgatagctgccacctccgcatctccgataacaatatcggaacccaagatagcataggtagtaaataaacccggatccactaactcggtactcaaccacacggtgttgtggtgtgctagagtgaataatgtccaggaaccatagaaagcaagtggttgtccccgtgccgaacgccaccaaacagtaaccttctcgacgatgggaacataagtgagatttcgtgggttatcat

SEQ ID NO: 204386 - DNA, 336 bp, Gossypium hirsutum
ttccggatgggtcatgtaaggtggcccttggatcaagtggcagtggggatacagtaatcgccatgcctagtgagatggaaatcataccaccgaagaaatcagacaagatcaaaatcatgggtggctcactacgcggtctgactggcaagctaatcggggtagatggcacggatggcattgtaaggatagatgacagtcttgatgtgaagatattggacttagttatactagcaaaattaccctgataataataacaacaacaataatgataactagcaatgtatatgactggtaagtagtttttgagtaaattttgtttggaattaaaaaaaacaa

SEQ ID NO: 204387 - DNA, 423 bp, Gossypium hirsutum
  unsure (1)..(423): unsure at all n locations
atcaaccttgtgaaaatggcgacaccccaattcctatcagccttccggtactccgacagtctaacagtcgtagctatctccttttgcactgccattgtctgcgaagccatctcatggctcttaatctaccgcaccaactcttacaaatccctcaaatcctctatcgacaaagccgccaagaaactcgaaatcatgaaaaccgaccaaaaccctagcaagttatccaccaaaaaatccaaaaccaagaagatcgaccgtgtcgaaaccagcctcaaagaatccagccgtgacctttccttattcaagttcaaatctggggctgtcgtcgccctcgttttgatcgtcgtttttggcttcttgaattctctnttcgaaggcaaagttgtcgccaaattgccctttaagcccatcgggatcgtgatg

SEQ ID NO: 204388 - DNA, 429 bp, Gossypium hirsutum
cctttttcagtgaaactggtgctggaaagcacgtccctggtgctgtctttgtggatcttgagcctactgttattgatgaagtgaggactggtacttaccgtcagcttttccaccctgagcaactcatcagcggcaaggaagacgctgccaacaacttcgctcgtggccactacactattggcaaagagatcgttgacttgtgcttggaccgtatcaggaagcttgctgataactgtaccggccttcaaggtttccttgttttcaacgctgttggtggaggcactggatctggtcttggctccctccttttggagcgtttgtctgttgattatggcaagaaatccaagttgggtttcactgtcttcccatcaccccaggtctccacatctgttgttgagccctacaacagtgtcctctcaactcactccc

SEQ ID NO: 204389 - DNA, 430 bp, Gossypium hirsutum
gccatggcttcctcaccaaaactcttctctatgtctatggtcttcctttttgccctcttgtccatgcaaatccatgctagagagtacttcagcaaattcccaagagttaacatcaatgagaaagagacaacaaccagagagcaaaagcacgagaccttcgttccccagaccacccaaaagccagaagaacaagagccaaggttcattcctgaaacccaaaatggttatggcctttacggccacgagtcaggctcaggctcaggctcaggctcaggctcaagccggcccagtttcaccaccaaagaaacctatgaaccctatgtcacccctgttagattccaccctgatgagccctataacagcatccccgaatcctccaacaataaagacacttactactacaacaagaatgcctacgagtccactaagc

SEQ ID NO: 204390 - DNA, 430 bp, Gossypium hirsutum
ctttggccttctttggaatttgtaattttccgaaagcttgagtggccggaactgtggcctaacctcagtaggaatatataaaagggtgaagatgggaagaggaaagatagagataaagaggatcgagaacaccacgaatcgtcaggttacgttttgcaagcgcaggaatgggctgctgaagaaagcatacgagctgtcagtcctttgtgatgcataagttgctcttatcgtcttctccacccgtggccgactctacgagtactccaacaacaacataagatcaacaatatagaggtacaagaaggcatgttccggtaccttaaacacaaataccgtcacggaaatcaatgctcagtattatcaacaagaatcagccaagttgaggcagcagattcaaatgctacagaattctatcaggcatctaatggga

SEQ ID NO: 204391 - DNA, 357 bp, Gossypium hirsutum
  unsure (1)..(357): unsure at all n locations
cgagttttgtttttttagaacgggtaaaatctgcagactaagantatttcaaaggatgtaaacaccaatgaaatatgtatagttcatagcattgtttatgaaaattacacactgctaagaataaaatgggtacaaactgttcaaaacttagtcaatagacatgtttcagtccacttacttgcaatgatttcaattctaagaaacacataatatcatcaacaatcaatggaaatgcagctctgtgacacggtagtgctatcggcggtgctgacaaacgggttgatccgaacccaaacaatacagaatacataaaccaacaacactgaccaaaggacaacaattgttggagtcctgttt

SEQ ID NO: 204392 - DNA, 390 bp, Gossypium hirsutum
cttctacactcttctctggtaagttcatcgaaagatcagagcaagatccctgccaaaatgaacgacgctgatgtatccaagcagatccagcagatggtgagattcatccgccaggaagcggaggaaaaggctaacgagatctctgtttccgctgaagaggagttcaacatcgaaaagcttcaattggtggaagcggagaagaagaagattaggcaggagtacgagaagaaggagaagcaagttgaaatccgaaagaaaattgagtattcgatgcagcttaatgcatctaggatcaaggtccttcaggctcaagatgatgtggttaatgctatgaaagaatcagcatccaaggaccttctcaatgtgagccatgatcaccatgtttacaaa

SEQ ID NO: 204393 - DNA, 424 bp, Gossypium hirsutum
  unsure (1)..(424): unsure at all n locations
cttgctaagaaatatcatgcatttttggcctctgaatctggcatcaaacagatcccccgtctcttgggtcctggtctcaacaaagcagggaaattcccaacccttgttactcaccaggaatctttggagtccaaagtgaatgagacaaaggcaatggtgaagttccaattgaagaaagttctttgcatgggagtcgccgttgggaatgtagcaatggaggaaaagcagatcttccaaaacgtgcaaatgagcgtcaatttccttgtttcattgttgaagaaaaactggcaaaatgtgaggtgcctttacttgaagagtaccatgggaccttcaaacaggatcttttgaattatgcatggagtgaaatcatttttttaattgagaatgtttcaaaaaattaattnggttatttgattgttggaaa

SEQ ID NO: 204394 - DNA, 398 bp, Gossypium hirsutum
gttggctatatgtggtatgaatgtatttacaagctggacaaggtggcttacaacaaatatcacccatacacatcttggattcctataactgtctacatttgcttgcggaattgtactcagcagcttcgaagttacagtttgactctctttgcgtggcttggcaagataactctggagacttacatttcacaatttcatatctggttgagatcagacatgcctaatggacagcccaagtggcttctttcttttatcccggaatatcccctactcaacttcatgctcacaacagctatttatgtcttgatatctcatcgtctgttcgacttgaccaataaacttaagtcagttttcattcccacaaaagacaaccgacggctgctatataatttcattgc

SEQ ID NO: 204395 - DNA, 389 bp, Gossypium hirsutum
gtggagtcaattcgtggttgcggtgactattctggcggtgggcctgctttcggcatcagccaccgctagaccctgcaagacattcttcgtcgcctcctattctttctcttttgaaaaccctaacgacccttcttcctccaccggattcgtcaccgtcttcaccgagatcggtcaattgaacgtcgtaccaccaagacccaagccctccgatgtcttgagctctctccgtgagcgcagtaaggacatccttagcgtggtcgtcgctcttctcttcggcgtccgtagcggcgctctcacgggggctaccctctacttggtctggaccctcttctcggccccgtctgattatcatcgtgctttgttggaagatgatgagagcgacggagaac

SEQ ID NO: 204396 - DNA, 400 bp, Gossypium hirsutum
ggttgctacaaatgaagagggtgatgctacagacgaacttctaatgtactggaacgaggatgaatatgaagaattcaacttacgaattgttcataggaaaaacaggaccggattcgaagaaaacaaggacctgcctattgtgctaaatagtgtcattgctggaagatattacgtaacagaatacctaggttcagctgcttttagtaaggtcgttcaagcgcatgatcttcttacgggaatcgacgtttgtttgaagatcattaaaaatgacaaagattttttcgaccaaagtttggatgaaatcaaacttttaaagcttgttaataagcacgaccccggagatgagtaccacattttgcgcctctatgactacttctatcatcaggagcatcttttcatc

SEQ ID NO: 204397 - DNA, 403 bp, Gossypium hirsutum
actggtgtgaacccaaagtagcattatgccggatactgataaaagagctatttacagaagagctgaaatctctccggagaagaaaccaatctccatgtatatatatgatatgatatgatcctatatcaaaggcctcagtatacaggcttcaacttattacaaagacttttcactaagaaacaaaagaagaccaaaacccagtatacaatattaaaattttctgtgtgtataatgtgtaaaagcagctacctctataatttcctatcagttgaagcgatgatcttgataacaaggccggggaaaacatcgtcagggtcatggatatgcgggttccgctcgacgataaacggatcgccacacttgtcgctgatggagtgaagggtttcaccttcgccaacgacat

SEQ ID NO: 204398 - DNA, 370 bp, Gossypium hirsutum
tcacgactggaggaccgtcgacccacgcgtacagtgcagacaactggggccaaggatccgaacatggctgcgctaaaactggctctaaaagccatggactgactcgcgattgcataaagcatacgctagaaccaaaaggccattgatagatacctgaactcctggaatgagaccctgacctgcaggttgcctgctatacctgagaatacaccagctatcgactgcgcttactacgaagccaatgtatccaacgctgtctcgatggatagaccttgacaagaagcctagatgcgctgaacgttaccgtgccataggataaacatactgggcatgaggatgccgctcaagaagaagatgcgaaatcatgtgc

SEQ ID NO: 204399 - DNA, 430 bp, Gossypium hirsutum
gtttcaataaaaaattgcagagcaagttgctgaagcatgcggaagcggaagaagacttggctttgaagcaacagttggagttatacgtagagagaatttatgatgttgatcctgaagtccataaagtagctcttgaaagcatgaggcaagaagtccgcacctcaatcagctccatgacttatgttccaaagctattgaagtttctccgaccccattacggaaccctaaaggcattttatgagactatgcttgattcagatttgaaggtattacttgttttgctttaatgatctttcattatatcttttgtaaatgtaatttggctaagcaatgcagggaaggatgattatgatggagccattatttaatattgggactttgttggtaatatacatgaaaattatttggcttttataatattgaaaatttt

SEQ ID NO: 204400 - DNA, 411 bp, Gossypium hirsutum
gtgaaacactggcgtcctccgatcttattggcaagctcgggactgatgtcgagatcgatatttctcccgaaaagttccaccatatgtggtgccacaggccgcaccatgtccaccacactagctctgaaaaagtacaaggatgcgatttacatgaaggtgaatttggaactcccggcgtcgttatctgctggagatatgtgcatgatggaaaggctaaaactgctaagcaggtagttgaagttatggaccatgagaaaaagtcaataactttcaaaatgcttgaaagagatctgatcgatgaatacataagcttcgtgattacaatccaaacttcccccaagagcgacggtaaaagcaagttagtgcactggactctggattatgaaaagctgcacgaagggtatttgggac

SEQ ID NO: 204401 - DNA, 407 bp, Gossypium hirsutum
ttgcgacccccaggaccctccgtcaccgtacaggcctcgaggccgtcgacccagcgtgggaaattataagggtagagctcacatgttactgattcatctctcactttaactcatactatacattcttaaagtacttgttatatgataatattattactgttcctctcatacccagtgatcagtcctcagacagcccttctgttccaccattcagtgcacttaccttatatccttcctcaattacccttagtcatcatccccacactatattcctgaccttaaggactctattgtacattgctctaaattatctaacttgttgatatgtcctatactgactaaattgaacaccttaatattggtgcaatctattaatatctgccttaatatcagtatcttactcttat

SEQ ID NO: 204402 - DNA, 380 bp, Gossypium hirsutum
gtctcctactcatggtaagggcattgaatggggaggtgagcatgggtataatcaaacaactataattgaagatccaaactattgggattcgaatagtaggaaaagcataatgaaggtgattgcagaagagttcagtaaattcaagcttcccatcacatttgtcaacatcactcaactctcaagttatcgaatagacgcacacacatcgatttataagaagcaatggagtccattaacagcggagcagctagccaacccagttagctatgctgattgcgtacattggtgtttgccatgcctttaagacaacttggatgaacttctctttttcaaagttgactatcccttgaaaatatatattcattttctatcatgaaatt

SEQ ID NO: 204403 - DNA, 398 bp, Gossypium hirsutum
aaaaaaaatctttacagactctatcttctaaaaacaaaactgaaggtgtcttgctgcggaggaaactgtggctgcagctctggttgcaagcgtggcaatggctgtggaggatgcaagatgttccctgacataatagagaagactacaactgagactatcggtcttggtgtgacaactcagaaaatgcactttgagggatctgagatgggagtcggggttgagaatggatgcaagtgttgagacaactgcacttgcaacccttgcaatcgcaaataagaaggggggaaaatgaacaacagagagaagcagagaggcctttgtctttttaactaaataaattctattactttaggatgtatcagcaaatcttcatgaggatttggttcttaattatgtgt

SEQ ID NO: 204404 - DNA, 373 bp, Gossypium hirsutum
tttttatttttttacttaaatgaaactgcgccatattatgggtattgcattttactaaagttcccctaacaaagtaaatgagctcaatataacacctgtaatatatgataaagtgatgtaaaaggtccaattctttcttcccctgcctctcgggttaccgatttacatcttcaatccagctttacggaagagaacaagtaatgcacaaaccagaaagatgaaaggaacccgatcgtgccagtggccaacatgattgcgaggaccatgaagagagaataccccaagtagagagttgcagagaccggtccactcaaactcttgagatcgaatatgaggtagtttacggagtataagaagatgtagatggctactg

SEQ ID NO: 204405 - DNA, 395 bp, Gossypium hirsutum
caacatttgatcccgcttttcgctatctcatttctctggttttcccagctgcattgctcaacaacttcagcccaagctccggctcagtctcccgcaccacctggtccaccagacgtcgccaaaatcctgcaaaaagccggccaatactccgtcttcgttcgtcttctcaaatccacccaagtctccgaccgtctcattggcgagctcaaagatacagatgatgggaagaccatttttgcccccactgataaggctttctccgccctcaaatctgttgccttgaattcactcaacgatgaacaaagggttcagctggtgctatttcacgtcgtcccagattatatcccattttcccaattccaaacagttagcaaccctatgagaacacaaagccg

SEQ ID NO: 204406 - DNA, 394 bp, Gossypium hirsutum
atgcacgcagtaagaagtccgttacactatacattgtagtcgctgtcctgggaggattgcacgagccagatcgttatgttttgatggggaatcatagagatgcttggacatatggtgctgtcgaccccaatagtgggactgcaacactccttgatattgctcgaagatatgcccttttgatgcgaaagggttggaaccctcggaggacaatcattttttgcagctgggatgctgaagaattcggaatgatcggttccacggagtgggttgagcagaaccttgtaaatcttggtgctaaagctgtggcatatcttaacgtacattgtgctgtgcaagggcctggtctttttgctggcccaacatcctagctagataatcttattcttgaggtcac

SEQ ID NO: 204407 - DNA, 405 bp, Gossypium hirsutum
tttcagccggctttttgccaagaaggagatgcgaattttgatggtgggccttggtgcagccggtaagactaccattttgtacaagctcaagcttggagagattgtcaccactattcccaccatcggatttaatgtggaaactgtcgaatataagaacatcagtttcactgtctgggatgttggtggtcaggacaagattcgtcctttgtggaggcattacttccaaaatacacagggtctcatcttcgtggttgacagcaatgacagagaccgtgttgttgaggccagggatgaattgcatagaatgttgaatgaagatgaactgcgagatgctgtgttgcttgtttttgcaaacaagcaggatcttccaaatgcaatgaatgctgctgaaataactgacaagct

SEQ ID NO: 204408 - DNA, 371 bp, Gossypium hirsutum
  unsure (1)..(371): unsure at all n locations
tgtgatgcgaatgaatgaagggtatatcaaggaaggaagcgcgggtagtgtaatgggagttgttcacagaaatgacaatgtgcttatgattgttgcttcgcctgagccaattacaactggatgccagtgggccaaatgtatcttaccagcaagtctcgagggtattgtattgagatgtgaagacacatcgaatactgatgccataactgtttagtagtatgtgcatcgtaagctcttttcataaacacaaatttattctattttttcccctttctattaaatatctggcgatgatggtggctgtggtaaggtcgactgatgagcatgagcccctctggtcgttattatcctttntaactgtgtatagcttt

SEQ ID NO: 204409 - DNA, 376 bp, Gossypium hirsutum
tccaatcgaacgaaataagacaacagggggatagttcatttagggttcttgtacacttgagggcaacaagatttgtattggaatcaatttcgagcgaatggtaaaaaagaaatgaattcaaaacactatgcagcattcgtagtctccatgggaaaaggcagatcaccagcaaaacttatttttccgcaatttggcttcctcttgtctgtctaggtaagcaagcagttcttcttgcctcatcaaagcatcatgaagagccttcttggcaacaattaactctgcttcaagggcatcaactcgacatacagcagcattcaacaattcctctttatcataaagcatcacagatggctttgcttgtagtgtatcaactttc

SEQ ID NO: 204410 - DNA, 374 bp, Gossypium hirsutum
cttcatcactgtaagaggtctaaaatttcacgttgcagaggtcggtgaaggttctaacgtggtactcttcttacatggattccctgagatatggtattcatggcgacaccaaatggtagctttagcgaatgctgggttccgtactcttgcacccgattacagaggttacggactctccgacataccacccgaacccgaaaagacaacctttgccgacctcgttgccgaccttgttgctatcttagatcacctgggaattaataaggttttcgttgttgcaaaggattttggggtcaggcctgcttatctgttaactctgcttcatccccatcgagtgtcgtgtgttgtaacattgggtgtcccacatgttcctt

SEQ ID NO: 204411 - DNA, 347 bp, Gossypium hirsutum
gcctacgttgcgaccgccagggacccttcgtcagccggatcacgcctccagggccgtctacccacgcgtcctactagagattgtgcgagcaccttcttacgtaatagatgttctcgtccgacgcgcatctgtcgctgaccaacatgttcaacacaccacatatgcacctgatgcacgatggtctaatgcacatcagcatcatctacgcaaggcccacgtgccaaccgcatcgccctcgcaaactaacattcgacatcctggaacactacacttgtcaattcacgctacacgaaatataacacactgtctcactttaatcatcactttaattcatttctaacacacaa

SEQ ID NO: 204412 - DNA, 373 bp, Gossypium hirsutum
actacgtggctacccccaggtaccctaattcagcccgatcacgcctcgagggccgttgacccacgcttcctatcagtggttgagggatcgccttcttaggtaatagatcgcctcctccgtagcgcatctcgcgcggtctaacatgttcaacactccacatatgcttttgatgcacaacggtctctgggacttttacatcagctccacaaataccacttgccagcccttgatccctcgcaactctgcttacgacaacgtcgaatagtacctttgtgaatacagcttcgcgaagtattacacactgaccatctttgatggggtcttaaaatgtcttcttactcacactagctatgaatgcatggatttattgaaa

SEQ ID NO: 204413 - DNA, 350 bp, Gossypium hirsutum
cgcaagcactaaatttaaagctcgataatactttattttgagaaagataaaatgccgatttctcgaatcgcagtcggctctcctgccgaagccggccaagctgatgcactcaaggctgctttagccgagttcatttcagtgcttattgttgatttccacggtgaaggctcggccatggctttcaacaagttgaccgactattgctcctcaacaccggcggctttagaagctgcagcattgactcacgccttggcgttaccagtggccgtatctatcggggctaacatttcctgcggacacgtaaaccccgtcagaacgttcggtgcattaatgggtggccacattacatt

SEQ ID NO: 204414 - DNA, 419 bp, Gossypium hirsutum
gagaagtgcgatgaggtagcaacagttcaccactcagagacgccgggaaagaagggtttcatggataagatcaaagacaaactcccaggacagcataagaaagatgaagaggacaccacccaaccaccagctgctgctgccccaattgagaacgaccaccatgaaggagagacaaaagagaagaagggatttttggtgaaaatcaaggagaaaattcctggttaccactccaaaacagaggacgagaaggaaaaagagaccactgctcccaattaatgaatcaatataatgcatttcaagtaaaagatgtgtagagattgtgtggcttatcaatttgttggaactgtctgttctctggttttctttttggggttgcatacatcatataaatttctgcgtctggttttcccctgctttgt

SEQ ID NO: 204415 - DNA, 468 bp, Gossypium hirsutum
gaaactaagaaatggcacgcaagaagatcagagagtacgattccaacgcattgttggagcagcacttgaaaaggttttccgcctacaatttgcccatcaaatctgcacaagtgacggagtcaactgatttcaatgagctagtagagaaggagccatggcttttgtcgcagaaactggttgtcaagcctgatatgttgtttggaaagcgtgcgaagagtggtttggttggcttgaatcttgattacgctcaagttactgcatttgtgaaagatcgccttagcaaagaggtggaaatgagtggatgtaaaggacctgatacaacattcattgttgaacctttcattcctcacaatgaatagtactaccttaacattatcttcgagcgtcttggttgtagcattagcttttcacagtgtggatgaaattgaaattggattagaacttgtgacaagggttaaaacccttatt

SEQ ID NO: 204416 - DNA, 427 bp, Gossypium hirsutum
caagctttgatgaagccccttggccttctttatcccctggggcgatggagtttgtaaagagattgttgaacacggactaccgtaagagagtaactgctgctcaggctctgagtcatccatggttggcaaattgtcatgacataaagataccatcagatatgataatatggatgctcgttaaaacttatataggctcctctacactacgaagagcaacactgggtgctcttgcaaagacgttgactattccacagcttgcttatctccggtaacaattctcattgttagggcctaataaaagtggatttattctgatgcagaattttaagatggtgatgttggagaactctactgatgctatgaatgattctcgggtccttgattatgtcaacatgattagttctattcagtatagaaaattggactt

SEQ ID NO: 204417 - DNA, 455 bp, Gossypium hirsutum
  unsure (1)..(455): unsure at all n locations
cctgaacccaaaccacccgtatatgaacctccaaagaaggagaagccgtagccaaagccaccggtttatacacctccaaagaaagagaaacctgaacccaaaccaccagtgtatgaacctccaaaaaaacctccaatgtacgaacctaagccaccaaaaccaccggtttatacacctccaaagaaagagaaacctgaacccaaaccaccaatgtatgaacctccaaaaaaacctccaatgtatgaacctaagccaccgaaaccaccggtttatacacctccaaagaaagaaaaaccagaacccaagccaccaatgtatcaacctcccaacaacccaccaatatatgagccaaaaccacctaagccaccagtttatgcaccaccaaaggaagaaaagccaaaacctaaaccaccagtttatgagcctncggcacatgagccaccatacggtcacta

SEQ ID NO: 204418 - DNA, 449 bp, Gossypium hirsutum
gaaactaagaaatggcacgcaagaagatcagagagtacgattccaatggattgtggaagcagcacttcaaaaggttttccgcctacgatttgcccatcaaatctgcacaagtgacggagtcaactgatttcaatgagctagtagagaaggagccatggcttttgtcgcagaaactggttgtcaagcctgatatgttgtttggaaagcgtgggaagagtggtttggttggcttgaatcttgatttcgctcaagttactgcatttgtgaaagagcgcctcggcaaagaggtggaaatgagtggatgtaaaggacctgttacaacattcattgttgaacctttcatccctcacaatgaagagtactaccttaacatcgtctccgagcgtcttggttgtagcattagcttttcacagtgtggatgaattgaaattgaagagaactgggacaag

SEQ ID NO: 204419 - DNA, 418 bp, Gossypium hirsutum
aagcagtttcctcttatcaaagcccgtgatgctacagacgacatgctgtcttgggggctcaagagaaaggttgatggttccattactatgatcgataatgtgaactgtatgactgacgaaccttcgcaagatggtaatgaatatgtgaatgacgtcataatatatttggaaactttggtttctaccgcacaacagatattgcctcctcaagttcttaaaagagttttacaagatgtactttctcacatatcatacaagatcctaggtgctatatttggagattcagtgaacaagtttaatgtaaatgctattatggggatagatgtcgatattctgttgttagaattttttgcagataacctatcacctgtattttctgaaagcgattcatttcaattgataaatgcacttgcttagt

SEQ ID NO: 204420 - DNA, 411 bp, Gossypium hirsutum
gttctacaaaaattatttccggagcctggacagcttcaattcgtttgtgctgacgtgggggatgcaaaagcagtaaacaaaatattttcagaaaatgcatttgacgctgtaatgcactttgcagctgttgcatatgttggggaaagcacacttgatcctctcaagtattatcacaacattacttcaaacaccttggtgatcttagagtcaatggctgcacatgatgttaggactttgatatattctagtacatgtgccacatatggagagcctgaaaagatgccaatcactgaagaaaccccacaggttccaatcaatccatatggaaaagctaagaagatggcagaggatatcatcctggattactctaagaactcagacatggcagtaatgatcctaagatacttcaat

SEQ ID NO: 204421 - DNA, 445 bp, Gossypium hirsutum
aggcaatggaggtcgataaaaacgaagaccagtctagctctggtttggaagttccgaacaaaggcaatggacttgatctggataagtactcttggacacagtcccttcaagaggtcactgtcaatgttccagttcccaatggaacaaaatcaaggtttgttgtatgcgagataaagaagaatcatctaaaagttggacttaagggccagcctcctattattgatggggagcttttccaaactgtcaaacctgatgactgttactggagcatagaggatagttgtgcactgtcgatccttttgaccaagcacaaccaaatggagtggtggaaatcattggtgaaaggagatcctgaaattgacactcagaaagtcgaaccagagaacagcaaactatctgacttggatcctgaaacacggcaaactgtatagaagatgatgtttga

SEQ ID NO: 204422 - DNA, 397 bp, Gossypium hirsutum
ctctgagggtgtcttaataaacgccttcgatttactttcggtttccagttacttggttatttctacgttgttgaatttttagtaagcgaaaatgatagagtgcatttcagttcacatcggtcaggctggtatccaagtcggaaatgcctgctgggagctttactgccttgaacatggaatccagcctgatggccatatgccaagtgacaagactgtcggaggaggtgatgatgcttttaacacctttttcagtgaaactggtgcttgaaagcacgttcctcgtgctgtctttgtggatcttgagcctactgttattgatgaactgaggactggtacttaccgtcagctttttcaccctgagcaactcatcagcggcaaggaagacgcttgcaacaac

SEQ ID NO: 204423 - DNA, 439 bp, Gossypium hirsutum
agtttccttacaagtctgtctgtcttgcgattaatccatatggctaggtcaatggtccttaagcttgcatgtctgctgcagttgtgcatggtgatggctgcacccctggctcaaggggccataacccgtgccgatggcttatacggacttccacgctgacttgcttttacgtcacggaatggtgatggtgctgatgccacaggttgctcagccatcgctatgaatgccttgggatcgctctgtggtgatacatatgaaccgatctaacttgaaatcggggtcggatttcggtggaacttcaaattggagtgttatggaatcccaactcaatcgtgagtaatggctgcatcccattgtgtgatacattacagagcatgattgtggattgtattctcataagtcacgattgacttgcgtgctacattgcatgacttgataa

SEQ ID NO: 204424 - DNA, 473 bp, Gossypium hirsutum
aaacaatagaaactatatcttgttaatagaacataaatagagaatttcaaatccaacatctcagaacattaaaacttaattgtaatgttaccttaatcaaaactgaaaacagcaacctataaataaaacctgacatgcaaaaaggtaccagaaatataaaaaggtaaaattaagaacatattccatcacttaaagcacttggcatccaagagaggctctccctcaaatggctcgcagtcttcaatcatctgattcacccgttccttctgggctgcatctgagaggtcgaccttcttccactcgtagagttccatgtcatagcactcgtcaatcacaaattgaggaatctcttgcccacggaaaagccatagtcctttcaccttgaatggagggttagcaccgatcaccaacatcttcccaaatgcatacttgcgggccaaatccattctctgcaggaatcctccaaccttgtt

SEQ ID NO: 204425 - DNA, 354 bp, Gossypium hirsutum
cgcttggtcgcctgggataagaagccgacgccgtcatggttcacgtcagtttctaccgcaattatgggaagacatttaagaagccaaggcgtccatacgagaaggaacgtttggatgctgaatttaggcttgtaggagaatatggtctccgatgtaagagggagttgtggagggttcaatatgctttgagtcgaatcataaatgctgctcaggatcttcttactcttgatgagaagaaccctcgttgtattttccaaggtgaaacttttcttcctaggatgaacaggtatggacttttggatgaaaatcagaacaagctcgaatatgacttggcttttaccgttgagaacttcc

SEQ ID NO: 204426 - DNA, 467 bp, Gossypium hirsutum
  unsure (1)..(467): unsure at all n locations
ttatacaccataccggtgatttatatgacttagatttatcggaccttgatgttaaagacgatgaagctttagccatcaactgtgttggcacattacattcgatcatggatactagtcgggacatcgttatatcgagcttccggcgattaaaaccgagggtaatcaccgtcgtagaagaagaagccgacctcgatatcggtgtcgatggggtcgatttcattaaaggtttccatgaatgtttaagatggttcagggtttattttgaagctttagatgaaagtttcaatagaacaagcaacgaaaagttgatgcttgaacgagccgncggccgggccatcgttgacttagtggcttgttcgccgtcagagtcgatagagcggcgtgaaccagccgcgcgttggtcaaggcggttccatgcaagtgggttcagtcctgtgggtttgagtgatgaagtgtgtgatgatgtg

SEQ ID NO: 204427 - DNA, 402 bp, Gossypium hirsutum
caggaatgcatgggaaaccatggatgcggattgtgagcgtgtcgatggatattgcgttggccctagggaaagcctggcgtgaagctgttaatgcagtcatcaatcttctaggcatgcaaccttgtgagggcacagaggttgtccctaacaattcaagatcacacacttgtcttctatctggagtatacatcggcaatgtcaaggtgcttgtgccgctgcagtttggacttgacggtccaaaagatgtggcaatgaaactcgctgttagatcagaagatgaagctgctagtgatgcgattcatgagatcgtacctagtggctaagtttgtatccatcggctgttttttgcctccaatctggcttctatatataaattttcttgtgattttatatgatattgga

SEQ ID NO: 204428 - DNA, 371 bp, Gossypium hirsutum
gctttctattttgtaaaccatggctcataacattcgtcaccctttctgccttttggaactttttctcatttgtgtctcaccaatgatcggtagccacactgtctcggcaacggctcgacgtttattcgagacacaaacaaccttatcggagctgccacaattggcttcaaaatacgaaaagcacgaagagtttgaatatgaaaagtcagaatacaaacagccaaagtatcacgaagagtaccccaaacatgagaagcctgaaatgcacaaggaggaaaaaaaaaaaccctgcaaacaacatgaagagtacgagaaagaaaaacctgagttccccaaacaggaaaagcctaaagagcacgagaaacacgaag

SEQ ID NO: 204429 - DNA, 410 bp, Gossypium hirsutum
ggaagatgttcaattcaggttcatcatcattgggaatgaagccattcgaggacaggcaagctcttacattcctggtgccatgaacaacataatgaactcgctggcctcatttgggctaggcacgacgaaggttacgaccgtggtcccgatgaatgccctaagtacctcgtaccctccttcagacggcgcttttggaagcgatataacatcgatcatgactagtatcatggccattctggttcgacaggattcgcccctcctgatcaatgtgtacccttattttgcctatgcctcagaccccactcatatttccctcaactacgccttgttcacctcgaccgcaccggtggtggtcgaccaaggcttggaatactacaacctctttgacggcatggtcgatgctttcaatg

SEQ ID NO: 204430 - DNA, 349 bp, Gossypium hirsutum
cggcaacatgtgcttatagggctttcaatgatatgatgattggtccagattacgcgctaaacattgaactatgtgacattataaacatggacccaagtcaggctaaggatgcgttgaaaatcatcaagaagcggctgggcagtaaaaatccaaaaatacagctattagctctttttgtattggattctctcagcaaaaattgaggcgagcatgtttttcagcagattgttgagcgcgatatcttgcgtgaaatggttaatatagtaaagaagaagcctgacttgaatgttagggaaacaatactcattttgatagacacatggcaagaaaccctttgaggatctagtgg

SEQ ID NO: 204431 - DNA, 392 bp, Gossypium hirsutum
ccgctatgttcaggaggaaagctttcttgcattggtacaccggtgaagatatgggcgagatggagtgcaccgaggctgagagcaacatgaacgatctcgtgtccgagtatcaacaataccaggacgctaccgctgacgaggaaggcgaatatgaggatgaggaagatttggatgaagaacacatgtgatgaaagcgaaaaccaaacgaagttgtcggtaatgcagcatatacaggtatgtgattcgagtggatttgtatgtaatgagtaatgaaagtgtcttttccctatatttcccttttacgagtttgctttttttggtttctatttgagagagtaatgtataatatatccgaaaatagtaatgtaatacctatatctatggttgtattc

SEQ ID NO: 204432 - DNA, 278 bp, Gossypium hirsutum
gagccttgttgggttttagttatccgacaccctcgaactccttataaatacacggtttacacggttctctgctaacctatatttgtaaccaaacatccatttaacgcataccaaataattaaaaccagcattaatgactccttcaactctcacataactttcatgtaaggaaaccttacaggcaagctttgttcgtgatgaatatgatcagtctaaagttgcttacaaccaatttatcgatgaaattcctgagatctctattgccggtatcaattatg

SEQ ID NO: 204433 - DNA, 473 bp, Gossypium hirsutum
gtttatacatcattttatttccaaaatgcaaacttccaagggtctgaggtcccatttatactttgatttaaaacccaccatctaaccgttacaacaaaatgagcaacaatatccaatttgcaaacaaataatacagatttgttaaaaaaagggctagcctttacaatagaaaataacccaccaaatactgacgtaatcatattaacacaaactccactattaaggcaaaaacaaaatgcctaataattaatgaaagcataactgtagcttcatctttaaggaaggaaatccgaactcgtgctagttaatatttacattctctcatacaatctatgagtatccatcccatgatttctagcacctgatctcatatgaaccatactttgtaatatagcgaacccattcaactgtgttatacccactgttattccagaccttaagaaaccggacacttaaaccataagctgtaaaca

SEQ ID NO: 204434 - DNA, 447 bp, Gossypium hirsutum
gagccttacaacagtgttctgtctactcattcccttcttgagcacacgcatggggctgtgctcttggataatgaagcaatttatgacatatgccgtcgttcccttgatattgagaggccaacttacactaacttgaaccgtttgatatctcaaatcatatcatccttgacaacttctttaaggtttgatggagctatcaatgtggatgttactgagttccaaaccaatttggttccatatccccgtatccatttcatgctctcttcatatgcacctgtcatctcagctgagaaagcataccatgaacaattgtcggttcccgagattacaaatgctgtgtttgagccttcaagcatgatggcaaaatgtgaccctatgcatgggaagtacatggcatgttgcttgatgtatcggggagatgttgtccccaaagatgttaatgctgct

SEQ ID NO: 204435 - DNA, 414 bp, Gossypium hirsutum
cgaagagatttgcatagcccaactcttacggaagcatgacgaagattgtagacaggcttgattctgatgtgcaaaaggcggctaaccttcaaataactgtgcaggacctgaagaagaaggtacagataattgagacaggcaaaaaggggaaaggaattgaatatggtacagctaatgagcagatagaagaagctgaagaagccatcacgaagctatttgatgtcaatcacaaattgatgacacacgttgaagatggcttctggacgattgatggcaaatatgcactataaccatatgagaatggtaacatgaggatacgaaaagtatcagaacacgcaagaagagggttcgaaaagattgaacggttgcagttgtacgtgcataatatacagattttcttactgaatcatgatg

SEQ ID NO: 204436 - DNA, 224 bp, Gossypium hirsutum
gtacaataacatgtatatgatcatttttgatacgaggttcgaaagtcgcgatcatgctttatttgttaagctcaatggtctaaatggataaagaagtatattaccacaaagctttgactacaactatggtgatcttatccccattctgacgccattcttgagagggtatttgaagttatgcaatgaagtcaaggaaatcacattgcatcttttcaaggaccaat

SEQ ID NO: 204437 - DNA, 417 bp, Gossypium hirsutum
tcaatatcaaggctctttttcggaagatcgcagccgctttacctggagtggaaacgctttcatcaacaaaacaagaagacatggtcgacgtcaatcttaagtctacaaacgcaaattcatctcagtcgcagcaagaagccggaggatgtgcctgctgaggatacatacatacattacactcactcacacacatcatttgatccgaggtatgtatggttttctcaacatttagtgttttctgtaaaaaggaaaaaaagaaatctgttctctcccaccccctttttggtagcattgggcatatttggatttgatggaatgttttgaagcataaaagttgcttgagagagaaggttcttaaattttaccaatggtagttaggctcgtcctaacctgtcctatatgtgtacgggtcttgac

SEQ ID NO: 204438 - DNA, 308 bp, Gossypium hirsutum
ggatcaaatgataaacatactttatccgatacagaggctaagcagttgatcgggaggctcatctatgctgaactgtcatagactgagctcgaattcactattgtgaggccttttaacttgattgcacccaacattgatttcattcctagtattgattgtcctagtgaatgatttcccagagatactgcatgctctattaattatctcctacatcctgaaccacttaagctcaacaattgtggccaaatctagaaaactcttatattcataaaggaatctcttgaagctcaactcttgaccattgaaaa

SEQ ID NO: 204439 - DNA, 435 bp, Gossypium hirsutum
aaataatggccctctgcaagccgtattctaggttggtcctagcactagccatggcattggtggcagctacggtgcctgtttatgggcagagaactatcaacactccatgcaccccatcggcacttaacatcttcactccttgtatgaacttgcttaccaatagcagtgccaatggtacttcgcccactgcagattgttgcaactcgcttaaaacgctcacatcgagcggcatggactgtttgtgcctcattgtcaccgggagtgtcccgttccgtttacctatcaatagaactctagctatttctcttccccgagcttgtagcatgcctggtgtccccctccaatgcaaagcctctgttggtgcacctgttcctgctccaggtccaatttcacttgcaccaaccctttcttcaggaacatcaccaactttaagcc

SEQ ID NO: 204440 - DNA, 394 bp, Gossypium hirsutum
gaaaagccctaatttgacagctctctcagtctctcattttgcctgaaggccatgtgtaggagaaaggttagggagcccaaggaggagaatactacccttgggccggctgtacgagacggcgaacatgttttcggggtggctcacatttttgcttcatttaatgacacatttattcatgtaacagatttgtctggaagggaaacaatggttcgcattacgggtggtatgaaggtgaaagctgatagggatgagtcttccccttatgccgccatgcttgcagcacaagatgtttctcaacgctgcaaggagttgggtattacagcccttcatataaagcttctagctactggagggaacaaaaccaagacacctggtcctggtgcccagtcagcac

SEQ ID NO: 204441 - DNA, 311 bp, Gossypium hirsutum
taatactactactccaagcattcatattccttacatgtaaggttttcgtgtcattaatcgatatggctagctcaaattcccttaatctagcatgtgtcactctattatgcatacatttaattacacccctatctcacagctccgaaacctgttgtcaattcacaaactacctcacaccctgcattggttacttttcaagataatgaaactggtaccattcccccaatttgctgcggcgacattaaatctttcaactccgtctcccatacaacaccagacctattagcaatttgcatatgcataaaatatgc

SEQ ID NO: 204442 - DNA, 276 bp, Gossypium hirsutum
aacctaaggcccaagagcacctttttatacaacttccaacaatgacaaacctttacccaaaccaccaatgtatgaacctcctaaaaaacctcctatgtatgaacctaagccaccgaaaccacccttttatacaccttcaaagaaagaaaaaccatatcccaatccatcaatgtatcaacctcccaactacccaccaatatatgagccaaaaccacctaagccaccaatttatgcaccaccaaaagaagaaaagccaatacctaaaccaccatttta

SEQ ID NO: 204443 - DNA, 371 bp, Gossypium hirsutum
gatggtaggattttcttcccaaacagaatcttgggttgccgccataagctcaatctaccaatcccagaaagaggcagatagcttcgaattggatctaaaacgtctagatctgataaagatagatcaagaagactaggataataatattaacagccaagataagattagcaccaccaagaagaacaagaagaaaaatcaggtgttgctggagggatacgtggaagcggttgatgaggaggatgaactgaagatgacaaagagcttgacccgtgatgatctacaccaacttaaagggtgtttagatctggggcttggcttcaacttctaggagattactgaccttttgaacaccttcactgcactataactat

SEQ ID NO: 204444 - DNA, 366 bp, Gossypium hirsutum
aaaatacaaagttcgataatactttattttgataaaaataaaatgccggtttctgggatcgcactctggtctccagccgaaaccggccaagctgatgcactcaaggctgctttagcctatttcatttcaacgcttatttttgatttcgccgatgaaggctctgccatagctttcaacaagttgaccgacgatggctcctctacaccagcctgattagtagctgctgtattggctaacaccttgaccttattatgccgctgtttcaatcctggctaacaatttctgcggacacctaaactccgtcgtcacgttctgagactttcggggtggccacattacattggtgaggagtattatgtattggat

SEQ ID NO: 204445 - DNA, 453 bp, Gossypium hirsutum
gaactttaaagcaactccaatgccaagcttctatcaggagcctccacgccctaaggtggaattaaagaagataccaccaacaagagctaaatctccaaagcttggtagaagaaaaagctcaactcctttggactctgatggtaacagcaatagtggtcaccaatcagtccagctaagtctggatgagaaagcatttcagagcacctcttctaaagtaatttctcctgtcaatgcaaagaagccacagcggaaatcacttcccaaactgccttctcagaagactagtctgtctggttcaacaaatgacgaaaagacatctaatacgcccagtcagaaaaaggtaaatgcacctaaagcatctaccgagggaaagatagccttgcctaaggcaacaaatgaggagaataacactttatctgatgtaacaaatgaagaattatcttcaacccaact

SEQ ID NO: 204446 - DNA, 156 bp, Gossypium hirsutum
attatgccggaacttatagtgaccagaaatgccgaactaactgcagagagcctgctcaaagatggtaccatgtaccacgttcatggctgaagccaagtggaaactttttggtggcgtatgaagaatggggaggtgatcccaacgctgattgctttg

SEQ ID NO: 204447 - DNA, 484 bp, Gossypium hirsutum
aagcattgcagatattacaggctcacactgatgaagtatgggttttgcgattctcacataacggaaaatacttagcttcatcgtctaatgatcagtcagcaatcatttgggaggtttatgaaactggagtatctttaaaacataagctctctggtcaccagaaacctctctcttctgtttcatggagtcctgatgaccgtcaacttctgacatgtggtgcagaagaggttgtaaggcgctgggatgtctcttctggtgaatgtcttcatgtttatgaaaaaactggtcttggtatggtttcatgtggatggtctccggatggcaagtggatcttttcaggtctgaatgataagagtatctgcatgtgggaattggatgggaaagagctagagtgctggaaagggcaacgaacactaaaaatttctgatttggaaataacaggggatggaaagcagattataagtatttgtcgggaacagcaata

SEQ ID NO: 204448 - DNA, 376 bp, Gossypium hirsutum
cttattcctttattgctttttagaatctttcttaatcgaagatgatggagtgcatttcgatccacatcggtcaagccggtatccaggtcggaaacgcttgctgggagctttactgtctcgagcatgtaatccatcctgatggtcatatgccaagtgacaaaactgtcggacgaagtgatgatgcttttaacacctttttcagtgaaactggtgctgggaagcacgtccctcgtgccgcattcgtggatcttgaacccactgttatcgatgaagtgaaaactggtgcttaccgccagctcttccacccagaacaactgatcaacggcaaggaatacgcagctaacatcattgcccgtggtcactacaccattggcat

SEQ ID NO: 204449 - DNA, 370 bp, Gossypium hirsutum
accaaaagattaataactttcatatgaactaaaagtactttagaaattgagaactctttaattcaaatgacaatcccaaccagacatgcaacaactaaatgctcttttatttaaaaccacatataatggtactacatgcctgaagcttgaattcccataattgaattactcaattccaaagagtttcttcaactgcataacaaattcatatactttttcttggtcatgaaaactcttggctacactctccttttgcaggcaccttttaacccaagcaatcatcttgggacactctacttaaatgcttaaatccccacacttctcataaacataaaaccatgtataaaattgaactaatgcaacatccaca

SEQ ID NO: 204450 - DNA, 371 bp, Gossypium hirsutum
cgagcacgagtgatgtttacggttatccccttcagcatcctcataaagaaacctagtggggatatgttaatccgatcggtgagaggagttgctacgatgaaggaaaaaggactgctgaaaccttaaccatggattatcatcgaggtgaccgtgttgaggtgcgaattgctcgtattttcaatacttatggccctcgcatgtgctttgatgatggacgtgttgttagcaattttgttgctcaagccattcggaagcaaccgatgactgtttatggtgatggaaaacaaacacgaagcttccaatatgtttctgatttggttgattgactcgttgctttaatggaaggtgagcacatatgaccttttaatctt

SEQ ID NO: 204451 - DNA, 429 bp, Gossypium hirsutum
  unsure (1)..(429): unsure at all n locations
gatatatcaaaatggcagtgccatcatttcaaatccagcttccaatggtgaggggcctgatgatggaaacctggtctcagaatatgaatcaaaacaaacgagcaaattctcttctgaagagttcaaggaattaaagttggaaaacgaaaacatggcaagggatctttctcaatgcaccgaaaatctggagatgaccaagtctcagttacacgaaactgagcagcttctagcagaagctaaatctcaattggcttatgctcaaaggtcaaacagcttggctgagacacagctcaagtgcatgacagaatcttatagatcacttgaaacacgtgctgaggagttagagaccgaagtgaaccgtctncaggtaaaaataaaagctcttgaaaatgagcttcaagatgaaaagagaagtcatcaagatgcttt

SEQ ID NO: 204452 - DNA, 463 bp, Gossypium hirsutum
  unsure (1)..(463): unsure at all n locations
ccgctgtcgatctttaacctttcataccgcaaacaatggttctccaagactacggggatttgttgaaccctccggccgagctcgagaagaagaagcacaagctcaagcgtcttgttcaatctcccaattccttcttcatggatgtcaaatgtcaaggctgcttcaacataacaaccgtatttagccactctcaaactgtggtggtgtgtggaaactgccagacggttctgtgccagccgaccggcggtagagctagactcaccgagggctgctctttcaggaaaaagggtgactaaatccgatccagcggcaacgattcgaggaaaaagttttttttgtatgatcccactctggttatctttttgatgtggtaaaatttgtctcaaatcttcgaagtagaattaaggattttagaatgactattatgtgctaatgntcttgatttagtgtggatgggttttgg

SEQ ID NO: 204453 - DNA, 383 bp, Gossypium hirsutum
gttgaagccatttgtcagttcttcaatattattggtaagcgagcttggtagagtccaaaatcacggcgcataaatgatgtgtacttcaacagactgaaggagttgactacaaatcctcagcttgcaccaagactgagatttatggatcgtgatgttcttgatctgcatgcaaacaactgggttcccaagcgtgaggaggtgaaagccaaaacaattactgaaatccattcggaggctgaaaagaatcttgggctgcgtccaagtgctactgcaagtatcagaaatactcgcgttgattctgctagtccaatgagtcctggtcctggtggttttactatcaatcgttctgatactggtggtatgatgcctgcaatgccaggaac

SEQ ID NO: 204454 - DNA, 421 bp, Gossypium hirsutum
  unsure (1)..(421): unsure at all n locations
gaaagagaagaagattaaaaattaatggacngttggtttttaagatggggaatagtggcaattaccatgtcaataaatttgctgaagaatggatttaaagtcactgtttggaatagaaccctttctaagtgtaatgaattagtggctcatggtgcatcaattggaaaaaccccagctgaagtgattaacaagtgtacgatcaccattgctatgctatctgatcctgctgctgctctttcggctgttctcgacaaagacggtgttcttgaacaaatttgcggcggtaaaggttacatcgacatgtccaccgtcgatcccgaaacttcttgcaagatcaatgaggcgattacatcgaaaggtggacgattcctttaggcccctgttccggtagtaaacagcctgcagaaaccggtcaactggt

SEQ ID NO: 204455 - DNA, 483 bp, Gossypium hirsutum
cttcgccgccgccaatttgcattctaaaggaacgctagatttgaaaaatggacagagtagcactaattctggaggagacaccaccgttaagaagaaaaatatccatgggatactgaatactgtgagttggggaattttgtttccacttggagctatgattgctaggtacataagaagctttgagtcagcagatccagcttggttttatcttcatgttttctgtcaaatatcagcttatgccataggagttgctggctggggaactggtcttaagcttggaagtgaatcctctggtatcacatattcgggtcatagatacattgggattgcccttttcgtcctcgctactgtccagatctttgctttgtttttaaggcctaaaaaggatcacaagctccgtttctactggaacatttaccaccacagttttggatacgcgatacttgtcctcggcatcatcaatgtgttcaagggcttcaatat

SEQ ID NO: 204456 - DNA, 358 bp, Gossypium hirsutum
ggcccgaggctcaaatcattctctgactggcttctgaagactatggggtcctacagtgtagaagccattttttcagctgctactcgtgaatatgctccattagttgaggagctgtggaagcatgcattcattcaggaaacctacatcaggagaaatgaattggaaatgttacccagtgttgctagttattacctcgagcgggttgatgagactattgaaaacagactatgaaccttctgatttagatatcctttatgctgaatgtgttacttcttccaatggtcttgcctgtgtcgacttttctattccccaatcttcacccgatgaaaatatcggcactgccgaacagcatgattca

SEQ ID NO: 204457 - DNA, 345 bp, Gossypium hirsutum
caaaaccatgatacggagaactaagtccgatcaggaagaggagaacagaaagaggatggaggagttaaggatccagcgccagaagaggatagctgagaggagtgctgccggtggtcttaatccggttacttcccggaggagctctaccgaaagtaaaacttcagcagcttcaacgaagagccagccatcaactcaagacactaagaaatatcggaagccagtccttagaagttccaccatagaacgccttgcaaccgcacggaatacttcaaaggtctcatcggctgaattgaaatcgagccagccgaaaaagccgacattgaaggaaaacaggtattcaacaac

SEQ ID NO: 204458 - DNA, 338 bp, Gossypium hirsutum
aaaaccctaattttccctctcactcatactcacagcagacgctaaaaggggaacggtgttcaaaagaagaaagatttgtgatcaagatattcagccatggatgaagagtacgatgtgatagtgctacggacaagccttaaggaatgcattctcagtggtcttctattcgttgatggactcaaagctttgcacatggataggaatgactattatggtggagaatcgacttctcttaatcttgtgcagcttttgaaacattttacgggagatgaaaagccttccgaaaagctgggggcaagcagagaatataatggtgatatgatacctctagtcatgat

SEQ ID NO: 204459 - DNA, 445 bp, Gossypium hirsutum
caaaacttgaattctctccaacatgttttgaggaaggcagaggagtagcttgttgcgctgccagctgagacttcttatgccgatttcgaacacaagttccaggagattggtttggagagagggtggggtgatacagctgagcgtgtgctcgagatgatccaactccttttggatcttctcgaggcacccgatccttgcacccttgagaagttcctcgggagaattcccatggtgttcaatgtcgtgattcttacacctcacggttactttgctcaggacaatgttttggggtatcccgacaccggtggccaggttgtttacatcttggatcaagtccgtgccttggagaacgaaatgctcaaccgtatcaagcaacaaggacttaacattacccctcgtattctcataattactcgactttttcctgatgccgtgggaacaactt

SEQ ID NO: 204460 - DNA, 441 bp, Gossypium hirsutum
tgagccctcatctatgatggctaagtgcgatccacgccatggaaagtagatggcttgctgtttgatgtaccgtggtgatgttgttcccaaggacgtcaatgctgcagtcgccaccattaagaccaagcgcaccattcagtttgtcgattggtgtcctactggattcaagtgcggtatcaactaccaaccacccactgttgtccctggtggtgatctcgccaaggtccagagagctgtttgcatgatttctaactccaccagtgttgctgaagtcttctctcgcattgaccataagtttgatcttatgtactccaaacgtgccttcgatcactggtatgttggtgagggtatggaagaaggagaattctcacaggcttctgaggatcttgctgcattggagaaggattattaagaaagtggtgctgagtcatctgacggtga

SEQ ID NO: 204461 - DNA, 422 bp, Gossypium hirsutum
gggaatcctctcttctctagaaaccaccgtcgagccatgggtctaaggacccgaaccactgccaatcgcctccctcacctcctctccctacagcgtgccctcgctattcacaccaccgtcccttctctctcctcttctgccaccccaaccacatacgcccggccttctccgccgtccacctccggcactccctccagtctctctaagcctgctgagtacgtgatctccaaggtcgatgacctcttgaactgggcccgtcgtgggtccatctggcccatgactttcggcctcgcttgctgcgccgtcgaaatgatgcacaccggtgcttctcgctacgacttcgatcgctttggtgtcatttttaggcctagccctcgccaatccgattgcatgattgttgctggcactctcaccaacaaaat

SEQ ID NO: 204462 - DNA, 460 bp, Gossypium hirsutum
  unsure (1)..(460): unsure at all n locations
tttccttcccttcttccttctttttcatacatattaggtgtagcattgttcactgttcctttgaatcccttcttcatccaaaatcttggcttagagatttcaaagggccttaagatcatgtccatcttaagcaagagtccaagcagcaacatgggttcttctcctttcttccatgaattcaagaaacaagcttctttcttcctcaaggagaagatcaaaacagctcgtttagctttaactgatgtcacccctgctcagctgttgactgaagaagctacgaatgggaatccatgggcaccaaacacccagtctcttggttccatctcaagggctgcttttgaattagatgattattggaggatcgtggagattttacataacanattggacaaatttgaaagaaagacatggagaacctcttacaattctctgatagtgcttgaaccattgttgactcatg

SEQ ID NO: 204463 - DNA, 540 bp, Gossypium hirsutum
  unsure (1)..(540): unsure at all n locations
ccgagttcaggnnntctatctatgtatagtgccccggtgcacctnntgatgtgggatggcaatagggagctgtcnnntcgactgtgtcttatgtggtctctcagtgacgaaaaccgacncnntggttattcaagnncatcnnataatgaaacagcccccggtgctttgagatatgcctttctggttcnngagtcttcttttgcagtgctttacctannatgtcacctncttcatannttgatatcttggattgtgaatcatttaccatttcaacaatnnagcaagtgcccatgatgggaaagccgaaatgtgccattttnttaatggaatccctnncagtttggataagaaagctnnttgttatgttcaaatttccaccagagaaatttgattggtattgatcccgtcatgatccgatattgcctaatcgaaaccgtcgtcttctttcgatatcaacatgnttgggattnagatggaccttcaaggctcctgtatatgtaggcacaagggtgttgttttcaacaggcaaggcatttgtat

SEQ ID NO: 204464 - DNA, 320 bp, Gossypium hirsutum
ccggagatgattggaaaagaaatcgagaaggcaacatctagcatctagccattgcagaatgtgttcatccgcaaagtcaaaattttgaaggctccaaagtttgatcttgtgaagttaatggaggttcatggtgattactctgaagatgttggtgtgaaaatagagaggcctgcagatgaaaccatggctgaacctacccctgaggttattggagcttaaatcaagatttcttgaattttatctctttgttttttcgtactaaaaatttctgttggtcattttcattttgttggaagcttgagttgaatttgttcttggtt

SEQ ID NO: 204465 - DNA, 432 bp, Gossypium hirsutum
gtcatttgaaaatttttcgtcctggtattaacggtacagggtttcgagtttcatagagaaacctcgaaacttctacgtagtgagaggaaagtttgagtacgtgcgatggctcgctcgtggagagcaagcggctctttggtggctctagctatagtcttgtccggatgcttctttgcaatctcaattgccaaggaggaagccgcgaaattgggaacagtcatcggaattgatcttggtacaacttattcttgtgttggtgtgtacaaaaacggtcatgttgaaattatagccaatgaccaaggtaaccgtattactccatcgtgggtggctttcactgacagcgagaggctcatcggtgaggctgcaaagaatcaggcagctgttaacgcttaaagaaccatctttgacgtcaagatacttattggaagaaag

SEQ ID NO: 204466 - DNA, 445 bp, Gossypium hirsutum
  unsure (1)..(445): unsure at all n locations
gagttttggaagactttgtttccggttgctgtggcgcatgccattgtgcatgtatcagcaactgtgagtatgtctaaggttgcagtttcattcactcacataatcaagagtggtgagccagctttcagtgtcctggtttctagtctcttgcttggagagagcttccctcctgcggtttacctctcccttgttcccatcattggtggttgcgctcttgctgccgtaactgagctcaactttaatatgaccggttttatgggagctatgatatcgaacttggcatttgtcttccgtaacatattctccaagaagggcatgaaaggaaactccgttagtgggatgaactactatgctngtctatctatgttgtctcttgtaatactcacacctttcgcgattgctgtagaaagaccgcagatgtgggcagcaagatgggaaaaggcct

SEQ ID NO: 204467 - DNA, 470 bp, Gossypium hirsutum
  unsure (1)..(470): unsure at all n locations
gtcaacactcccaccaagactcgggggctcggagctggggaagctgcggaccttacatattgggaaagtgctgcccgcatgatcgcggacgtatcgaaatctgacaagattgttgttgagaaatcaacagtccctgtcaaaactgctgaggcaattgaaaagattctcacccacaacagcaagggaatcaaattccaaattctttcgaacccagaatttcttgctgagggaactgcaattcaagatccttttaatcctgatcgtgttcttatcggaggccgggaaaccccagaaggcaataaggctgtccaagcattgaaggaggtttatgctcattgggttcctgaggagagaattcttaccaccaatctttggtctgcagagctttccaagcttgctgncaatgctttcttggctcaaaggatctcatncgtgaatgccatgtctgctctttgtgaggcaacccgggc

SEQ ID NO: 204468 - DNA, 421 bp, Gossypium hirsutum
agaagatgtcctggcaagcgtatgtagatgatcacttggggtgtgaggttgagggcaaccatctctctgccgccgctatcattggccaagacggcagcgtttgggcccagagctccaatttccctcagttcaagccagaagaaatcactggcatcatgaatgacttttctgaacctggatcgcttgctccgactggattgtaccttggtggcacaaaatacatggtgatccaaggtgaacccggagctgttattcgagggaaaaagggccccggaggtgttactgttaaaaagaccaacctgtccttgatcattgggatctatgacgagccaatgactccaggtcagtgcaacatgattgtggaaaggcttggtgattatctcatagaccagggtctttgatcactttggtgtaaccttaa

SEQ ID NO: 204469 - DNA, 376 bp, Gossypium hirsutum
ctttgcccgtggtttctacactattggcaaggagattggggacctcgggttggaccgcatcaggaaacttgctgataactgcactggtcttcaagggttccttgttttcaacgctgttggtggaggtaccgtgtccggtcttggttctctccttttggagcgtttgtctgtcgattatggcaagaaatccaagttgggtttcactgtctacccatctcctcaggtctccacttctgttgttgagccttacaacagtgttctctcaactcactcccttttggagcacactgatgtggctgttctccttgacaatgaagctatctacgacatttgcaagcgttctcttgacattgagcgtgccacctacaccaatctt

SEQ ID NO: 204470 - DNA, 395 bp, Gossypium hirsutum
attatggtcactcttactgccttcaggctattctctctggtgctcaaggtagccctgttgctgtttcatggggatatgcacgttttgtgaatataagagatgccaagggagctactcccttgcacttagcagctcgtcaaaggcggcctgattgcgtacatatcctgttagacaatggtgctcttgtttgtgcttcaactggtggatatggttgtccaggaagcacacctcttcatttagctgctagaggtggatctcttgattgcatccgcaagttgttggcatggggtgcggaccgtcttcaaagagatgcatccgggagaataccttatgtagttgctctaaagcacatacatggagcatgtgcagctctgctaaatccttcatcagcagaa

SEQ ID NO: 204471 - DNA, 383 bp, Gossypium hirsutum
agacgaaacatatggtaggggagcgaacaactaagagtgaggaaaaggagtactttgatcgccagccctagaagctcatgcaccagctgcttgcataaaaagctctagattttgcaaaagaagggatttcagcacgaaattgaagttgattttaaaaaccatggttgctactgctgtgacatcggcgtttttcccagtcacttcttcacctgactcctctgactcgaaaaacaagaagctcggaagcatcaagtcgaagccatcggtttcttctggaagtttgcaagtcaaggcaaatgctcaagcaccttcgaaaataaacggcactgaggcgtcgacgacttccgtggaaggttccaagaacgatgacggtgcaagttccc

SEQ ID NO: 204472 - DNA, 472 bp, Gossypium hirsutum
aaggaggtgtcgcactagtggtctttggtgaacaaacaggggcccatcgggatgaggaagcctgaggagattaccaaggaggaatatgctgctttctacaagagccttacaaatgactgggaagagcatttggccgtcaagcacttctcagttgaggggcaacttgagttcaaggctgtcctctttgtccccaagagggctccttttgatctctttgacacaaggaagaagcccaacaacattaagctctatgtgagacgtgtctttatcatggacaactgcgaggagttgattcctgaattcctcagctttgttaagggtattgtcgactcagaggaccttcctttgaacatctcaagagaaatgttgcagcaaaacaagatcttgaaagttatccgcaagaacttggtaaagaagtgcattgagctcttctttaaatagcagagaacaaggaagattacaacaagtttta

SEQ ID NO: 204473 - DNA, 225 bp, Gossypium hirsutum
cttaagcctgaaaattggcttcgggattccaattttaagtgaagaagggcgaatttggggttataccacacatatgagagataggcacattctcttaacacaggttggcaacccacactatgctgtccctgagatagtgtccgcggaactatacactctgcctcaaaaggatgcacgtagatgtggagttatatagtatgcgcttctcagaggcacactttcttt

SEQ ID NO: 204474 - DNA, 432 bp, Gossypium hirsutum
tctagaactacggatgccccggctgaggagattcgcacgagtgatgccctaactttgggctcagtcctagtgctgattggtctgccggtgttgctgctattacttatctccggtcattgttgcagcaaggcccaaaaggtattcaggaagtggttcaaaacttctagaaggtaatgaaactgtttttccagcacttggatgatccccaccataaagttgcacaggctgccctttcaacccttgctgatattattccatcatgccgaaagccctttgagagttacatggaaaggatcttaccccatgttttctcacggttaattgatccaaaggagttggataggcagccttgctcaatgacgttggaaattgtcagcaaaacctatagcatagattccctgttacctgctttgcttcgttcacttgatgaac

SEQ ID NO: 204475 - DNA, 436 bp, Gossypium hirsutum
  unsure (1)..(436): unsure at all n locations
aaaatacctctttgctggagttgtcgatggaaggaacatttgggccaatgatcttgcttcttctcttagcaccttgcagcagctcgaagctattgtgggcaaagacaagcttgtggcgtctacctcctgctcgcttctccacactgccgttgatctagtaaacgagactaagctagatgatgaaatcaaatcctggctcgcatttgctgcccagaaagttgttgaagtcaatgcacttgccaaggcgttggctggtcagaaggatgaggccttcttcgcagccaatgctgctgctcaggcttctaggaaatcctccccgagagtgactaatgaggctgttcaaaaggctgctgctgctttgaagggctctgaccaccgtcgtgcaacaaatgttagtgctagactcgatgcccagcanaaaaaagcttaacttacc

SEQ ID NO: 204476 - DNA, 491 bp, Gossypium hirsutum
ccttggccgactacttcatccagaaggagtcaactctcgagcttgtcgttcgtttgcgcggcgggatgcaaatcttcgttaagacgcttaccggaaagacgatcactctcgaggtcgagagctctgacacgatcgacaacgtgaaagccaaaatccaagacaaggaaggcatcccgccagaccagcaacgtctcatcttcgccggaaagcaactcgaggacgggcggactttagccgattacaatatccagaaggaatcgactcttcatctggttctacgtcttcgaggtgggatgcagatcttcgtcaagactttgaccggtaagaccattactttagaagtggagagctcggatacgattgataacgtgaaagcgaagattcaggacaaagaaggaattccaccagatcagcaaaggttgatttttgctgggaaacagctggaagatggaaggactttggctgattacaatattcaaaagagttcactc

SEQ ID NO: 204477 - DNA, 444 bp, Gossypium hirsutum
  unsure (1)..(444): unsure at all n locations
gtgaaagtggagttggaaaagacccaactaatgaggagttaaagaagcgggcaaagcaaattgatttaaagaagttggaacaggaaccacgtgaagcccaagtttctaaggctcttgtagaggctaaggacctcgtttctgccattgaagatagaaggttgaagcttgggaatgcaatgtatagagaacttaccggattaaggaagccggttttggataaaaatggaattcttcattggcctgttttgctactctatgcggagtttatgtccagtgattttatagaggacttctgcgaaaccgacatgttttcagctcaccttgatatcatgttttcagaaagttgcccacctttaccatgggataaggaaaaccattattcccgtgacgcgattgaactctactatgaggctggttctgngatttgcctgtctaagagaaaaa

SEQ ID NO: 204478 - DNA, 465 bp, Gossypium hirsutum
  unsure (1)..(465): unsure at all n locations
ccgatatgagatgttgggtggtggagctaatgttgtgaaccatggctgcactaanggtgatggtcttggtgctgagataattgggacttttgtgcttgtttacactgttttctctgctactgatgctaagagaaatgccagagactcccatgttcctatcttggctccacttccgattgggtttgcagtgttcttggttcatttggccaccattcccatcactggaactggtattaacccagcaaggagtcttggagctgccatcatatacaacaaagaccatgcttgggatgaccattgggtgttctgggttggacccttcattggagctgcacttgctgcagtttaccaccagataatcattagagctattccattcaagaccagagattgaaatgattaaatctgtgtgtgtgtgtgtgtggggatcttcatctactttntggttcctactagtccctttgt

SEQ ID NO: 204479 - DNA, 470 bp, Gossypium hirsutum
gaaaaaaaaaatgttttcaaatggaactgacaactcaacttctaagagtcctccaagtccttctcctttgagattttccaagttttttcagtccaacatgagaattcttgttactggtggagctggattcattggctcccatttagtggataaattgatggagaatgaaaagaatgaggttattgtcgtcgataactactttaccggcacaaaggacaatctcaagaaatggatcggacatccgagatttgagctcattcgtcatgatgtcactgagccgttgctcattgaggttgatcagatctaccatcttgcttgcccggcttcgccaatcttttacaaatacaatcctgttaagacaataaagacgaatgtgatcggtacattgaacatgttgggtctggcaaaacgtgtcggaaccaaggatttacttaccttaacttcaaaagtttatggagatcccttgaaca

SEQ ID NO: 204480 - DNA, 473 bp, Gossypium hirsutum
aaagttgaaaagggcatatggtaaaatcgtgcacaaactcagagagcaaccatatcagccatctaaacgaatcaagtcatactagattcaacatgtagccaatttacaatggcaaagcatcacattgcctctctgctaacacactcagaaaccaaacacctaatctgaatctgattcagatttatgatcatccgcatttgctttctcttttccttcagcttccttaacagccttcccaaaggcatcaacgggaatcgatggtagatacccaaccacaggataaccttttccactcttctcctttaaccaactgttgtatttctcacacaaattagctgctttgggaacaaccttttctgtcactgagttgaaagtcgagttgcggttcagtttaacccacaacttggtcgagcttaccagcaccaagttcttgtactcagctgcagcgtaatgcaaagcccctcgtgctccat

SEQ ID NO: 204481 - DNA, 443 bp, Gossypium hirsutum
  unsure (1)..(443): unsure at all n locations
gatcatgctgatcgtcttttcaattgcataagagacacttggttgaggtctgctgggaagggtaatacatcagatgtgaaagaactgattccagaattcttttacatgcctgaatttttggaaaatcgcttcaaccttgacttgggggagaagcagtcaggggaaaaggttggagatgttgtcctacctccttgggccaaaggcagtgctagggagtcatcaggaagcatagagaggccctagaatctgattntgtctcagaaaatctgcaccattggatagacctcatttttggatataaacaaaggggaaaggcggctgaagaaactgttaatggtttctaccattacacatatgaaagaagtgtatacatagactcggttacagatcctttaaatgaaagccatcattttagctcagatcaatcattttggacagacacc

SEQ ID NO: 204482 - DNA, 498 bp, Gossypium hirsutum
ccacaattggcttcttaatacgaaaagcacgaagagtctgaatacaaggagccaaaatatcatgaagagtacccaaaacatgagaagcctgaaatgtacaaggaggaaaaacaaaaaccctgcaaacatcatgaagagtaccacgagtcacgcgaatcgaaggagcacgaagagtacgataaagaaaaacccgatttccccaaatgggaaaagcctaaagagcacgagaaacacgaagtcgaatatccgaaaatacccgagtacaaggacaaacaagatgaggataaggaacataaaaatgaagagtaccacgaatcacgtgaatcgaaggagcacgaagaatacgagaaagaaaaacccgagttccccaaacgggaaaagcctaaagagcacgagaaacacgaagtcgaatattctgaaatacccgagtacaatgaaaaggaagataagagtaagaaacataaagatgaatagtgccaggagtcacacgaatcgaaa

SEQ ID NO: 204483 - DNA, 437 bp, Gossypium hirsutum
  unsure (1)..(437): unsure at all n locations
cagtgataatgctgtaggcattgctgagatggctggcatgagccacggaattctagagagaactgatgctcttgatgctgcaggaaacaccactgctgctattggaaagggtttcgccattggttcagcagcccttgtgtcccttgccctctttggtgcctttgtgagccgtgctgctatttcaacagttgatgtattgacccctaaagtttttattgggttgcttgtcggggcaatgcttccttactggttctctgctatgaccatgaagagtgtgggaagtgctgctttgaagatggttgaggaagtgcgtcggcaatttaacacgatcccaggtctcatggaaggcactgctaagccagactatgctacctgtgttaaaatctctactgatgcttncatcaaagaaatgatcccacctggtgcgctaggtatgc

SEQ ID NO: 204484 - DNA, 423 bp, Gossypium hirsutum
aaaaaacagatatgattgaggtgattactatccatattggccaagctgcaattcatgtcaaaaattcctgctgggagctttattgtcttgaacatggaattcaacccgatgggatgatgcctagtgacaccacagtaggtgcttgccacgatgcttttaataccttctttagtgagactgggtcaggcaagcatgtgccaagggctatatttgttgatctaaagcccactgtcattgatgaagttagaaccggtacctatagacaactgtttcatccggagcaacttatttacggaaaggaagatgctgctaataactttgctagaggacattatactgttggtagggagattgtggatctttgccttgaccgagcgagaaaattggctgataactgcacttgactacaatgatttttggtat

SEQ ID NO: 204485 - DNA, 372 bp, Gossypium hirsutum
cactgaatgttccgtacacgccctcaagaacggatggatcgagaatgtttccaacgagatggtcatcaactcctggtccaaggttgtatatgtggtgagtgacaacatcgagggacttgtttgtcttatcaatatattccgtgaaccaatccgagtcatagaaccctcccggtgtgataattaacggcttcaaatcaacattctggtatatcttctgcactatactttgcagagctgctgtgtcagccgcatactggtctgcagagacccgagttccgaccccgcttccgcacaattcattttctaactcccaaccgtgaatggtatagttcttgtcaacagtgtattgcataaaagattcggcattggtgt

SEQ ID NO: 204486 - DNA, 365 bp, Gossypium hirsutum
  unsure (1)..(365): unsure at all n locations
ctctttccgattgtcaaggagtatgttcttggtctggagatgtagcgtaanctaanaaaaattaaaaacaatccantacnccaccangagcttgctgcctacttcactcactgcaaccttcaattaccacacctaaaacttgccctgctgaatgcaatgactgtctgctacaaagcaaaaaacatggctacagcaggtaactttgcccggcgactgctagaaacaaaccccacaaatgagaatcaagcgaagacagccaggcaagtgcttcaagctgctgagaagaacatgacagatgcttctcagctgaactatgatttcaaaaatccatttgtgacatgtggggcaacttatgtgcctattta

SEQ ID NO: 204487 - DNA, 406 bp, Gossypium hirsutum
  unsure (1)..(406): unsure at all n locations
actgtatgaaagattgttggaccggnntgagtgtgggtgtggtctgcgggctttttataatttcaaaataccgtnattgcccnatgaaagtatatgttcctgatcgtgacgcgtggcagtacgtaagtggtgataaattcccacgtgaggcaatgcagaggccattctctgtgagtggagtggaagggagaatctacgtggtgtcaagtgggctaaacgtggcaatagggacaccaatcgagggacaaaacgcggagttaatggcgaagtgggaggtggtggctgccccaaagggtttccacgacttctcccctttgagttgccaagtgctttatgcctagaaatccctctttcatacaaaatgctacctataactgtaaggcagtgggaatttacactttttaca

SEQ ID NO: 204488 - DNA, 386 bp, Gossypium hirsutum
tctaattgtgctgatggtcttgttgatgctgtcatgggctcaactggcattaccatctccaacaaccacatgacccaccacaatgaggtgatgttgctagggcacagtgactcctacacaagggacaagcaaatgcaagtgaccattgcctacaaccatttcggagagggactaatccagagaatgccaaggtgtaggcatggatatttccatgtggtgaacaatgactacactcactgggaaatgtatgctattggtggaagtgcaaaccccaccatcaacagccagggtaacagatatgcagctccaaccaacccatttgcaaaggaggttaccaagagagtggatacagctgaagggcaatggaagagctggaattggaagtc

SEQ ID NO: 204489 - DNA, 305 bp, Gossypium hirsutum
  unsure (1)..(305): unsure at all n locations
cnccacattacctttctcgccgatcctcgcactcacccgaagctttggcctccctggtaagctcatgaacgccncccaaagccccaatgaacaagtgttttgaacagaatatgtgtcgctgcatgtgaggaagagtaacagggcagctgttaatttgtatactcagacgttgggatataagattcatgatgtggaggccaagtattatgcagatggggaggatgcatatgacatgaagaagcagtttaaggaaagactaaccatcatcatggtcatcatcatcaccaccaccaccaccaccatca

SEQ ID NO: 204490 - DNA, 390 bp, Gossypium hirsutum
  unsure (1)..(390): unsure at all n locations
cgcatgttcaagccttatttcaaggcaattaaaaagcgggtagaggagctgattactcgagattatcttgagagagacaagganaaccccaacgtattcaggtacttggcatgattttgcctagtcattatgctgacgaagtggtgaatattgcttggagcaaatagagctcaaaaggatgggatgcgattggtcagtggtgaaagtggcgtaagcacaatgagatgccacctgatgagtgcttgagcaggagctaagatacttgtacagtaggagccaggtatggcaaatttcaataacttatgaaatcaacccggacaaatcatgattgatctcataatatggtccggtgtggcatgaaaaaccatagggtatctggtttcttattac

SEQ ID NO: 204491 - DNA, 418 bp, Gossypium hirsutum
gtcaattgtttgagctagctagctcttactcaaatggcgaaccaaaacgatgatgttgcaaatattttcacttttcttctttttgttcagtatctgcaactccattttccttggtgctaatggagatgacaatggtggttggcaaactgcccatgccaccttctacggtggtgctgatgctaccggcacaatggggggagcttgtggttatggaaacctgtacagtcaagggtatggaacgagcacagcagctttgagcactgcacttttcaacaatggcttgagctgcggtgcctgctacgagctccggtgcaacaatgatcctcaatggtgcattagtcgaaccataaccgtgacagccaccaacttttgtccccctaacctatgcttatctagtgacaatggcgggtggtgcaat

SEQ ID NO: 204492 - DNA, 393 bp, Gossypium hirsutum
gctctctctgtcttaacgctataatcattgaagaaaaatgggtttgaaggaggaattctaggagtatgcggagaaagctaagacccttccccagaacactaccaacgacgacaagctcattctctatggactctacaagcaagctactgttggaccagtgaacaccagccgtcctggaatgttcaacatgaaggaaaagtacaagtgggatgcatggaaggctgttgaagtttttgatagggaaatcgaaggaggaagcaatgaacgattatatcactaatgtaaaacagctgcaagaggctgctgctgcatcttcttgacgtgtgtgtgagaatagaaaatggtgtaaattttcaagccctttgatacctatgggtttgaaaaggtctaaac

SEQ ID NO: 204493 - DNA, 349 bp, Gossypium hirsutum
tagttacaaaaaagaaggtccaaaccctacaaaaatggcggagaaattggctcctgaaaaacgacacagttttctccacaacggtgaaaaggtatttgaatgggatcaaaccttggaagaggtgaatatttacataaacttaccgccgaatgttcactccaaacagttttactgtaagattcagtccaaacatgtcgaagttggcatcaaaggcaaccctccttatctcaatcatgatttgttctccccagtgaagacggattcatctttttggacgctagaggatgatataatgcacataactttgcaaaagagggacaagggtcagacatggtcgtcaccgatacta

SEQ ID NO: 204494 - DNA, 309 bp, Gossypium hirsutum
gtaaaaagtaggtttggtaagcaacgataatgggggaaatgatcctcctgaagaagatgattatctcttggctgaagctcgccagcctctatggcgaaaagtgccaatttcgtcaagtctgataagcccttaccggatagtcatcgtcctccgattcttcatcctcgcatttttcctccggttccgtattctaacacccgcctacgacgcttacccgttatggctaatctctgtcatctgcgaagtttggttcgccttctcctggattctcgatcagttccctaaatggttccctattactcgcgaaac

SEQ ID NO: 204495 - DNA, 275 bp, Gossypium hirsutum
acaaggcctaccgatgcgtgtttgaagaagaagacaaagacggcaaagttgggatatcattatctaaagatctcatggctatagctggagaggctttaaaatccaacattaccacaatagggcctttggtgcttccagggtcggaacaactcctatttcttctcactctgatcgggcgtaaagtcttcaaccccaagtggaagccttatatcccagacttcaagctggcgtttgagcacttctgcatccatgctggagggcgagcagtgatagat

SEQ ID NO: 204496 - DNA, 350 bp, Gossypium hirsutum
  unsure (1)..(350): unsure at all n locations
ccctgttcacaagaaggtaagggagatgttgagggcggcggatagagaagtgcttgggtccgaccggaaagacggcggagccttcttggccggtttcgcaatgccacatgatccgccggaggcgctcgggaagcgcgggtatcatatggtttccggtgccgttgatgttgggttgttcagaaatgcggtggtggaggatgttaggaagtttaagattagtctcaatgctgattctgattattccgatgatgataaagattccgatgagaagtattggagtgaataaaaaatatagattgaaaatttcattttggttgctgtttgcgttatcgtttggntgcaatcctttt

SEQ ID NO: 204497 - DNA, 394 bp, Gossypium hirsutum
aaacactatatgttgaaatcaaaagatgggctgctgggaaagagggaaatttgcgtgctctgctgtcaactctgcaatatgttctttggcctgaatgtggctggcagcctgtttctttgacagatttaatcaccgctgccgcagttaaaaaggtttacagaaaggcaactctttgcatccatcctgataaagtccagcaaaaaggtgccaatcttcagcagaaatatgttgcagagaaggtgtttgacttgctcaaggaagcatggaataagttcaattcagaggagcttttctgagttcaaatcgttgattatatagctaaagaaattcgtcgtttgacaaactaggcattggagttgaatgaaaacacgactgtccagcagctataattcgc

SEQ ID NO: 204498 - DNA, 410 bp, Gossypium hirsutum
gacccttgtagattacaacatccagaaggagtcgaccctccacctggtccttcgggtccgcggcgggatgcaaattttcgtgaagaccctgactggaaagaccatcaccctggaagttgagagctcagacacgattgataatgttaaggccaagatccaggataaggaaggaatcccaccagaccagcagaggctgatttttgctgggaagcaacttgaagatgggaggacccttgcagattacaacatccagaaggaatccactttgcacctggtccttcgcctccgcggtggcttttaagtgtggtgccgaacacctgtccagttattgttgatgtgttaagtttgtatgtgtgtgggtcgtatgctaatgtgagctggccactaggctggggaagcttacgagtaaa

SEQ ID NO: 204499 - DNA, 381 bp, Gossypium hirsutum
tgttagattagttagcgaaaggagaagaattcgggaagaatgcaaagaaaaagctgaatggttggggcttgtttagttctaaatacgaagacgccgccgatttatttgataaagctgctaattgcttcaagcttgccaaatcatgggacaaagctggatcaacttatgtaaagttggcgaattgccatttgaaatcagacagcaagcatgaaacagctcaagcttatgttgatgctgctcattgttataagaaaacagctacaaaggaggctatatcttgcttgcagcaagcagtgaacttgttttgtgatattggaaggctaagcatggctgcaaggtattataaggaaattgctgaattatacgagtctgaacagaaca

SEQ ID NO: 204500 - DNA, 347 bp, Gossypium hirsutum
attaacgaagttctaccgccatggggagaagacgtgcgtgttgttatcgtgggatgaaaaacaaaccttacccgaagtcacgttattgtcgtggtgttcctgatcccaagattaggatttatgatgtgggaatgaaaaagaagggtgtggatgagttccctttctgtgttcacttggtctcttgggagaaggaaaatgtctctagtgaagctctggaagctgctcgtattgcttgcaacaagtatatggctaagtatgctggaaaggatgccttccacttgcgagtccgtgttcacccattccatgtcttgcgtatcaacaaaatgctttcatgtgctggagctgat

SEQ ID NO: 204501 - DNA, 338 bp, Gossypium hirsutum
  unsure (1)..(338): unsure at all n locations
tgataaattaaaagaagggatgggagttttaggcgagggggtttattggatggtatggctaacattcntgtccatgtcngtggtgccagcgtgcttggacgcccaggtacttttgcctaaagcgcttttccccgatgtgctgggtcgtgtatattcatggtatacgaccacataccaagattatttgctgttggatgagcctcattttttcatggcacttatgaaattggagcttgttttagtattgccgcttgctatacttaacacttatggcttgttgaccttcaagccctggttcaacaccacctgcctcatcttcggttctgctcttgttacct

SEQ ID NO: 204502 - DNA, 394 bp, Gossypium hirsutum
  unsure (1)..(394): unsure at all n locations
ctcttgcctctttggcaagcctactgcagatgtggcttgtattcacctcccttggagcaagcttganaaagcagaaattgtcgttgatgtcctcataaagaacccaaaccctgttccaatccccctcgtcgacattgactacctcattgaaagtgatggtagaaaactcctttcaggcttgattccagatgctggaaccatccatgctcatggtgaggagactgtcaaaataccagttactttgatatatgatgatatcaaaagtacatatgatgacattaagcctggcagcatcattccatataggctgaaagttgatctcattgttgatgttcctgtttttgggaggttaactttacctcttgagaaaactggaaagatccctataccttac

SEQ ID NO: 204503 - DNA, 378 bp, Gossypium hirsutum
gccacatcatttggagattcattggttttcgatgatcaggtcttgcgtcacagttcgccttttgactggtttccttgcaacgattctcctgcgggttttgaagaatgatttcatcaagtatggtcaagatgaagaagcagctgatgaccaagaagaaactggatggaaatatattcacggagatgtattccggttcccaaagtacaaatctttgtttgctgctgctcttggatctggaactcagctgtttactttaacggttttcatttttatgcttgcattggttggtgtcttttatccgtacaatcgaggagctctattcactgcccttgtggtcatatatgcacttacatcaagaattgcaagatatactgcaac

SEQ ID NO: 204504 - DNA, 258 bp, Gossypium hirsutum
  unsure (1)..(258): unsure at all n locations
cctcanaattcncaccaggagtcacttctgaagctgatgacaggtgaatgcgctccgatatatagaatggtcgcgcgacataaccatctncnaattgcacaattccatcancatttggcagagaaactggatatggaaatgtcagctctgcagtacatgataagagaataccctggaaatgaggaagagaagatgagaggtgcaattgggaagtttggattgtcagggaaagcgcaagttatgccaatgaagaactta

SEQ ID NO: 204505 - DNA, 379 bp, Gossypium hirsutum
gtgatactttttatataaataaacacacaaataaggaaagtttacaatccaaatttggcatacaatcaatcacatattttcaatcaaaattcttcacaaaatgcatcaaattcacaacacaaatcacacatggctcgttaagcatcaaatgacaaatcaccaagtagtccccaaaaacaccattggctttttttttcttttttcttttaagttgaattttaaaaaaaataataatcaccttaattttccattgcctcatcttcataatcttcatcattgtcatctgcaacagcatcttgatattgctgatactccgaaaccagatcattcatgttactttccccttccctaaactccatttcatccattccttccctgt

SEQ ID NO: 204506 - DNA, 323 bp, Gossypium hirsutum
  unsure (1)..(323): unsure at all n locations
ccaaatcgtgaggcaaattctgggaagttgttagcgacggacatggcattgatcccggggggaactacntcggtacttctcgtgttcagcttgagagggttaatgtttactacaacgaagctagtggtggtcgttacgtacccagagctgttttaatggaccttgaaccaggaaccatggatagcttgcgtactggtccgcacggacaactttttagacctgataacttcatttttggccaaaatggagctgggaataactgggctaagggtcattacactgaaggagctgaattgattgattcngttcttgatgttgttcga

SEQ ID NO: 204507 - DNA, 321 bp, Gossypium hirsutum
ttccttccaaacacacactctaatctgggccgggaaacaattcgaaaacggccggaccttgcccgattacaacatccaaaaggagtcaactctccacctcgtcctccgtctgcgcggtgggatgcaaatcttcgtgaaaaccttgactggcaagacaatcactctcgaggtcgagagctccgacacgatcgacaacgttaaagcgaagatccaagacaaggaaggcattctcccagaccagcaacgtctcatctttgccggaaaacaactcgaaaacggccgtaccttggccgactacaacatccagaaggagtcaactct

SEQ ID NO: 204508 - DNA, 367 bp, Gossypium hirsutum
cttctgtttagtgatcgttgttacagcaagttgtaattctcgttgaggttgagctcacttgttcatggataacatctctatcactaatcttttgtgcatgatcctctaatttcgaagttaattcagcttctcttacagaggcggctgtcttaacactttcaacctcttctttcaattgagcttcaaccgtcaccaactgttcttcaagttttttgacatgagtttgcagtaaggaactctccgcaatctcagccttgagattgttaatctctgattttagagattcttcattttctttttcgttttcaattgttcttcaagctgtgatattacagattgaagttctttctttggttctgatgggttt

SEQ ID NO: 204509 - DNA, 297 bp, Gossypium hirsutum
  unsure (1)..(297): unsure at all n locations
ccaaaggtgttaacttcaattaacccaatgttggctgggcgggactatcatacaatgggatctttcatgttggcggtgacatgttccatgccattccaaatgctaatgcggtgattatgaagtgggtattgcatgattggngtgatgaagattgcataaaaatattaaggaactgcaggaaagcaattccaagagaaaatgggaaagtgataattgttgaagttgttgtgaaagcaaaagggagtggagtgttcgatgacatgggattcatattcgacctcctaatgattgcacact

SEQ ID NO: 204510 - DNA, 271 bp, Gossypium hirsutum
cttactgctcatatcaccatccacccaatctggggcgggcggtggcagaaatcgcggaagaaaatcatccgtgagttcatcaactcgatctccgccgttgattccaaacacccttcggtggctgggtggtggaagaccgtacagctttacaccgaccaaacgggagccaacatttcccgtacggtgctattaggtgaagagaaaaacgatcgtttttactcccacgggaaatccttcacgcgcttatcgatacagtccggtatcaaaagcg

SEQ ID NO: 204511 - DNA, 380 bp, Gossypium hirsutum
  unsure (1)..(380): unsure at all n locations
gaattcttttgtctggttggcctttgaagccatggccttgttattggcatcggcgagagcggatgacntcgttgtactaacggaagatatcttcgagaaggaagtcggtcaagatcgaggagctctcgtcgagttctatgctccttggtgtggtcactgtaagaagcttgctcctgagtacgagaagcttgggtcaagttttaagaaggctaaatccgtcttgattggaaaggtggactgtgatgagcataagagtgtctgcagcaaatacggtgttcagggctacccaactattcagtggttcccaaaaggctctttggaacctaaaaaatatgaaggaccacgaaccggagaagcccttgctgagtttgtcaacactg

SEQ ID NO: 204512 - DNA, 416 bp, Gossypium hirsutum
  unsure (1)..(416): unsure at all n locations
cgtgtaatgcctgctgggagctttactgccttgaacatggaatccagcctgatggccagatgccaagtgacaagactgtcggaggaggtgatgatgcttttaacacctttttcagtgaaactggtgctggaaagcacgtccctcgtgctgtctttgtggatcttgagcctactgttattgatgaagtgaggactggtacttaccgtcagcttttccaccctgagcaactcatcagcggcaaggaagacgctgccaacaacttcgcccgtggccactacactattggcaaagagatcgttgacttgtgcttggaccgtatcangaagcttgctgataactgtaccggtcttcaaggttttcttgttttcaacgctgttggtggaggcactggatctggtcttggttccctccttttg

SEQ ID NO: 204513 - DNA, 294 bp, Gossypium hirsutum
gaaaatccaaaaacataaaaaatgaaaaaggggaaattcccaaattagttggactctctctgtctcatttgcttgctaccctctgcatcttagataagtaagagaaaagatcagatttttctattttaaatagggattttttttgcgtgtgtggtttttgagaggatccatggctgcaccaccggcaagagctcgggctgattatgattacctcattaagcttcttttgattggcgatagtggtgtggggaagagttgtctgcttttacgtttttctgatgggtccttactact

SEQ ID NO: 204514 - DNA, 423 bp, Gossypium hirsutum
atatgcttattacacatttcattgaatctgaaagcttccatgcgttacgacataataggaagtgttggcagagttaaacagacatagcggaaactgtttaaaataaatcaagttactgaaatcaattgtctcagctgcataagtttggtatgcatacaccagtatctggattttgttgttccttccataccttccctgtaaccctcagcttcagctccttcctatccccaccagagaagaaaagtgccatgttacgttggataattagaccatcatgactgtccctgactttccggtgactatcacggatgctacgtggggtgccttcaaatataagttttcggccatttgctccaacctcaaggctatagctatagttcctagcctatgtttcatcacccatgaaactgagaaatgccatgt

SEQ ID NO: 204515 - DNA, 184 bp, Gossypium hirsutum
aaatttcttatctctttatttggttaaccatggctcagaacttttagcatcctttctttcttttccaacttttactcattactgtctcactaatgatcggtagtcacaccttctattcatcggctagacctatattccagtctcaaacctgctaattatagcttctcccatatcattcataata

SEQ ID NO: 204516 - DNA, 285 bp, Gossypium hirsutum
ctgacctcaaggagcatgtcatcaagcctgtcatccctgagaagtaccttgatgagaagacaatcttccaccttaacccatctggccgctttgtaatcggtggtcctcatggtgatgcaggtctcaccggacgtaagatcattattgacacttatggtggctggggagcccatggtggtggtgctttctccggaaaggacccaaccaaggtggacaggagtggtgcttacattgttaggcaggctgccaagagcattgtagcaaacggacttgcccgcagatgca

SEQ ID NO: 204517 - DNA, 247 bp, Gossypium hirsutum
tttaaatcgggattttgtaaatggtttattatgagaatgactttcaggccgatatgctgaaatctactgctatctatcattctaacacatctgtcacatttataatcggaggtcctcatggtgatgcatgtctcaccggacgtaagatcattattgacacttatggtggctggggagcccatggtggtggtgctttctccggaaaggacccaaccaaggtggacaggagtggtgcttacattgttag

SEQ ID NO: 204518 - DNA, 226 bp, Gossypium hirsutum
agttaaatatgcaaattccattcaaagagaaaccgtacatagatgcaaccggtaaacaaagactagaaattatttaaaaggccatcaaagggcacaatccttcacgtaaaaccagaaaacccacattaaggaagaccttaaggcttagaacccaccacgaagacgaagaacaaggtgaagagtgtactccttttgaatattgtaatcagccaaagtccttccatct

SEQ ID NO: 204519 - DNA, 401 bp, Gossypium hirsutum
gttcatgctgggtttgctcgcacagggagccatttctggggatttgagaaccatggagttgttcccgatatagtaacaatggcaaagggcattggaaatggcatccctctcggtgccgtagtaaccacccctgaaattgcagaggtcttgacccgcagaagttacttcaatacctttggtgggaatcctgtatgtactgctgcagggttagctgtcctgaaagtgatcgaaaaagaaaagcttcaggagaatgcacatgttgtgggatctcatttgaaggagaggctaactgcattaaaagataaatatgatcttattggggatgttagaggaagaggattgacgcttggagttgaacttgtcactgatcacaagctcaaaactcctgcaaagcttgaaac

SEQ ID NO: 204520 - DNA, 288 bp, Gossypium hirsutum
ggaagttatctgccttgaagtgaagaggatccagccggagagagaggggaactgcaaatattgctcttaggcaaaataccactgtagataaacctgaagaagcaacaattatagagatgaatgagccagtatcattgacatttgcattgaggtacatgaattcatttacaaaggctactccattgtcaaacatagtgacaatcagcttgtcatcagagctgcctgttgtggtcgagtataacatagctgagatgggttatattagggtctacttggcacccaagattg

SEQ ID NO: 204521 - DNA, 380 bp, Gossypium hirsutum
ggaattttcattttttctatatacctcctctccaatgtgtcctcagtttccctatacaatgagagaaatccttcacatccaaggcggtcaatgcggcaatcacatacgatccaagttctagaaagcactatgttccaaacatgccatcaattcaacggctctatatggtgctgactccgagctatagcttgaccgaatcaatgtttactacaacgaacccagtttttgccccttcgttccccgcacagcttcaatctatcttgaacccttaaccatctatagagtaacatccggtccttacggacaaattttcctacccgataacttcgttttcagacagtccgttgcgcaaaacaattgtgctaatgcacattacactt

SEQ ID NO: 204522 - DNA, 300 bp, Gossypium hirsutum
aagcatatagggtgcgcaggataaagcgaggttttaagcttgtttaaaaattggcttgaaccccttcctgatggaagcttaccaaatataaatatccgtgcagctgttttgcagattttaactgattttccaattgatttagagcagcatgatagacgggagcagctaaagaaaagtggtcttggaaaggtcattatgttcttatcaaaatctgatgaggaaacgacatccaacaggaaacttgctaaggaattggttgataaatggagtagaccaatctttaataagagcactaggttt

SEQ ID NO: 204523 - DNA, 242 bp, Gossypium hirsutum
aacttttcaaatatttgcccaaagacagcctaaccgggcacaaaaggtaggctatagagactcgattagttctaaatacgaagacgcccccgatttatttgataaagctgctaattgcttcaagcttgccaaatcatgggacaaagctggatcaacttatgtaaagttggcgaattgccatttgaaatcagacagcaagcatgaaacagctcaagcttatgttgatgctgctcattgttata

SEQ ID NO: 204524 - DNA, 424 bp, Gossypium hirsutum
  unsure (1)..(424): unsure at all n locations
cttgaggcccgtaaaccaggaggtgccaatttgtttatttgttatgggggtgttcgacatcgggagtccgttgcagcaaaagctaattggctggtgtttagcttcacagatcttataactgccttggagtaacttgctttcattctgatttttatgccatttttgggggttttctatgttctgttataagtttcctgcanatactaattaggcattcattcatgctgatcttataacatctatggctggtatatggattggtgagatattaagctcaaagaaggtcaccaccttttcaaacctcggttttaaccgttgatattaatatggggtccacctttatatggtaaaatggttggaaggttttctattgaatttaaaagggtttggagggatcctattttcatacctgcacaaaatattt

SEQ ID NO: 204525 - DNA, 440 bp, Gossypium hirsutum
  unsure (1)..(440): unsure at all n locations
gaaaaatccccttgtaccaagtatctgagtgccattgtagtttccaaaatcaagaacctagaagcaaactcaaatggcgacggtcgctatcgagaggaagcaacaggcatctgcggaagagatgtgcaccgccaagagcggtgccaagcaaggggagggcctncgacaatactatcttcaacacatccacgagctccagctcaatctccgccaaaaaacccacaatttgaaccgactcgaagcccaacgcaacgagctcaattctcgagttagaatgcttagagaggaactgcagctgcttcaggagcctggatcctatgttggtgaggttgtgaaaagtatgggtaaaaacaaggttttagtcaaggtccatccagatggaaaatatgtngtcgatattgacaagaatattgatatcacanaaatcacaccatcaacaa

SEQ ID NO: 204526 - DNA, 284 bp, Gossypium hirsutum
aaatgggagatcagttagcgaaaggagaagaattcgtgaagaaagcagagaaaaagcgaaatggttggggcttgtttagttctaaatacgaagacgccgccgatttatttgataaagctgctaattgcttcaagcttgccaaatcatgggacaaagctggatcaacttatgtaaagttggcgaattgccatttgaaatcagacagcaagcatgaaacagctcaagcttatgttgatgctgctcattgttataagaaaacagctacaaaggaggctatatcttgc

SEQ ID NO: 204527 - DNA, 324 bp, Gossypium hirsutum
ggatggtgaagaatataattttgcaattgtgtttgcggctatgggggtaaacatggagactgcacagtttttcaaacgtgactttgaggaaaatggctcaatggaaagggtgacccttttcctaaacctggctaatgatcccacaattgaacgtattattactcctcgtatagctctcactactgcagaatacttggcatatgaatgcgggaagcatgttcttgagatccttacagacatgagttcttatgctgatgctctccgagaggggtctttttcccgaaaaaaaatacctggaacacgtggatatcctgggcacatgta

SEQ ID NO: 204528 - DNA, 313 bp, Gossypium hirsutum
acaaaaaaaatagagagcgagttaaagagaccgagggatctctttgtgtactcagatggtctctttccatctctcaattctcaaaaccctaatttctctgctttcccttttgcttaatcaatcgatccttgtcaatggccaacagtaatctccctcgaagaatcatcaaggaaactcagcgtctcctcagtgaacctgcacctggaattagtgcttcaccatcagacgataacatgcgatatttcaatgtgatgatccttggtccaacacagtcaccatatgaaagtggggttttcaagttggaacctatttt

SEQ ID NO: 204529 - DNA, 304 bp, Gossypium hirsutum
cttgattgcaacctatggttgaaccttgcctcttttgtgactacatggatggatcctgaatgtgataagcttataatggactccattaacaagaactacgttgacatggatgaatactctgtcaccactgagcttcataatcgatgtgtgaacatgattgcacatcttttcaacgcaccatttggagagtcagaggcagcatttgatgtgagaacagttaggtcatcggaggcaatcatgttggctgaccttgctttcaagagaaaatggcacaacatgcgtaaggcttaaggcataccttatg

SEQ ID NO: 204530 - DNA, 285 bp, Gossypium hirsutum
atgttttcgactattctacactctcagcaattatagatggcacttggctttgtttacatggtggccttgctcctgacattcgaacagtctatcagataagggtaattgaccgtaactgtgaaatccctcatgaaggcccattctgcgatctcatgtggagtgatcctgaagatattgaaacatgggcagtcattccacgtggagcatgttggctatttgggtccagggtcacatctgagttcaaccacataaacaagcttgatcttgttttgctagctcaccaac

SEQ ID NO: 204531 - DNA, 367 bp, Gossypium hirsutum
aaaattctttgctttgatttcgttaaccatggctcataacactcggcgccctttggtccttttccaacttttactcattagtgtctcactaatgatcggtagccacaccgtctcgacagcggctcgacgtttattcgagacacaaacaacctcatcggagttgccacaattagcttcaaaatacgaaaagcacgaagagtctgaatatgaaaagccggaatacaaacggccaaagtatgacgaaaagtccccaaaaaatgaaagccctgaatttccaaggggggaaaacaaaaacccggccagctaccttaaaaagtcccccaggtaccccaattgaatgagcaccgatagttcccgaaaggaaaac

SEQ ID NO: 204532 - DNA, 301 bp, Gossypium hirsutum
gaaacataaagatttttagtgccaggagtcacactaagcgaaagagggcgaattgtacgagaaagaaaaacccgatttccccaaatgggaaaagcctaaagggcacgagaaacataaagccgaatatcccaaaatacctgagtgcaaggaaaaactagatgaggatacggaacataaacatgagttcccaaagcatgaaaaagatgaggagaagaaacctgacaacggcatattaccctgagtgggttaaaatgcctgaatggccgaagtccatgtttactcagtctggctcgagcactaa

SEQ ID NO: 204533 - DNA, 363 bp, Gossypium hirsutum
gtatctttaaacttgctgataactgtactgggctccagggcttcttggttttctatgctggtggtggtggtactggttctggtcttggatctcttctcttggagcgtctctctgttgactatggaaagaagtcgaagcttggtttcactgtctatccttcacctcaggtttctacatcagttgtagagccttacaacagtgtgctgtccactcattcgctccttgagcacactgatgtcgctgttcttctggataactaagcaatatatgacatctgcaggcgttctttggacattgaacgacccacttataccaatcttaaccgtcttgtctttcaggttatctcatcttttaccgcatctt

SEQ ID NO: 204534 - DNA, 188 bp, Gossypium hirsutum
catgacggacttgatttcccccttcattgccaacatccctctcctcctctaccctcatgactgcccccgcagcaagccccatccataggataatgtagacgtttgccatgactgcattcaaatggtgactgacatccatactgctgtacggaccaactccacctttgtccattccttatttgaacatg

SEQ ID NO: 204535 - DNA, 406 bp, Gossypium hirsutum
  unsure (1)..(406): unsure at all n locations
gacaactgcaagcctgcttccaacgacgtttgctctccggtaaacgggaccgtttccaccattcaaggttccgtttcccccgccgttgtcaactgctctgaagccactctaggccgccacctggctaggcggcttgttcagatcggagtgaacgatgttttctctgttcccggngatttcaacttgactttgcttgaccatttgattgccgagcctgggcttaacctcatcggctgctgtaatgaactcaacgcttggtccccccttaatggttttcctcaaccacttgccgttgttccctgcgtggccccattaacggttgtgggcttaaccttttgaaatgcattggccgtgcctaccaggagaagcttccttttaatctgcttggtggaagaccccactttta

SEQ ID NO: 204536 - DNA, 398 bp, Gossypium hirsutum
  unsure (1)..(398): unsure at all n locations
catttttggctggtgttatgatatggtcacaaatcactgacctaccgttttctctgtattcaacttttgtaatcgaggcccgccatggtttcaataaacaaacaatatggttattctttagggaccttatcaaaggaatatgtcttgctattgtacttggtccaccgattgtttctgctattattgtcatagtacagaatggaggtccatatctggctatctatctntgggcattaatgtttgtactttctcttgaaatgataacaattaaccctgttctgatagcttcaatttttaaataagtcaaccctttttcttaaagaaaacctaaacctaagaatgggaaacctggtttcttccttaaaatttcttttaaaaaactatttggtggtgaatga

SEQ ID NO: 204537 - DNA, 453 bp, Gossypium hirsutum
tagaacttgcgcaacaactagtgcgtagtacgagattctgcacgcgggattatgcaaacagttttacagcttattatgctaatattcatgccggggaaaacaacgcttctatttgttatacgtgctaaaacaaataccccccttgaatatttggagcctatactaagggaagatattcaaaagatatggaatgtagttagtaaacctgcggcccataaagatacacccctcagtgaattctttaatgtggaggtcactgctttatcaagctatgaagaaaaagaggagttattcaaagagcaggttgctcaactaatgcagcgttttttcaattctatttctccaggaggacttgctggtgacagacggggtgttgtccctgcctattgattttcttttagcgcacaacagatattgcgagttataaaaaaaaacaaggatctggatctttct

SEQ ID NO: 204538 - DNA, 344 bp, Gossypium hirsutum
catttttggaacttttcacccaagctcaatgacacgggcgaacaatgcgcttatacagcacacccagttaccaacccattccattaataccacacagatgctaccactagggcaggtctatcgctatccaccaaggcgtggtctacctgatgtttcaatgcctaacattgctggaggcatgctttctgttccatatgatatgggtggcatgccaatgcgtgatgcatcaaatttctaacccaattccaatagaacccttgccttaaccctaacaaaatctacacccaatcaacagaaaaccaatcttggaaaaaaactttattctctaattgaacaacttgaac

SEQ ID NO: 204539 - DNA, 375 bp, Gossypium hirsutum
tttctttgtaccaatggttcaacaaggccaacagggtcagcgtcccggtggtagaagggctggtgctggtcagcaaaggcagcaaccagttccattaatgcagcatccgatgctaccgctagggcaggtctatcgctatacaccaaggcgtggtctacctgatgtttcaatgcctaacattgctggaggcatgctttctgttacatatgacatgggtggcatgccaatgcgtgatgcattaatttctcaaccaatccccataagagccttggtcataaccctaaccaaagcttcacccgaatatctcaagaccgatcttggagaacatctttaatcttaaatttaacaagtgggcccctattcctcaacttaaat

SEQ ID NO: 204540 - DNA, 281 bp, Gossypium hirsutum
caagactttctcgacatcatttcaatgtttattaaaaaggcaagttgcaaatctatctgcatggtagtatccgtttaatgctgctggtgtaaatatcacattcatgatcattcaaattcttgaccttgatgccttcaaacctatgacatttatccgatcagttttcttacatatatcatcagacaatgtatccacattctacttgctatactgcgtttcattcgcatttatgcacactcaatggctttataaaaatgccacgtacatggagtccaattaat

SEQ ID NO: 204541 - DNA, 278 bp, Gossypium hirsutum
aagaatttatggatttatacagggagatgctaacatacgtcaaatcgtcagtgtcacgaaattacagtgaaaaatgtataaacaatattatggactttgtttctggatcagctagtcaaaattttgatctcctgcaagaattctatcagaccactcttaaggcccttgaagaggcaaagaatgagagactttggtttaagacaaatctaatgctttgcaagatcttttttgatatgggcgagtatggtcgaatgagcaagatttttaacgaacttcac

SEQ ID NO: 204542 - DNA, 331 bp, Gossypium hirsutum
cttcatgtggtcgctttgttcctcgtgctgtgctcatggacttggagcctggtacgagggacagtgtccgaactggtccttacggccagattttcaggccagacaactttgtttttggacaatccggtgctggaaacaattgggccaaaggccattacactgaaagagccgagcttatcgatgcccgtcttgatgttgtgaggaaagaagctgagaactgtgacttgctgcaaggttttcaggtatgccactcattgggtgggggaactggttccggtatgggtacattgcttatctcgaagatcagagaggagtaccccgataggatgat

SEQ ID NO: 204543 - DNA, 346 bp, Gossypium hirsutum
caacataatgaaagttcccgtttcggttcttaacattgcgcagcttgcagagtacaggatcgatgcccactcatccatttataccgaaactgggggacggcttttgaacgacgaggaaaaagcagatccaggccgtcatgccgattgcatccattggtgcttgcctggtgttcccgatacttggaatcaaatatttttagcacatttgtagattactattttcattttttcactccacagaaaccgataagggaattaatctgcttgttatgcgttaattcaaagatcttttgatttgtatattgcacgctgtattcttaagcacatcttgtgcatacaagatgtt

SEQ ID NO: 204544 - DNA, 338 bp, Gossypium hirsutum
  unsure (1)..(338): unsure at all n locations
cttcatgtggtcgctttgntcctttttctgtgctcatggacttggaggctggtacggtggacattgtccgaactggtccttacggccagattttcaggccagacaactttgtttttggacaatacggtgctggaaacaatttggccaactgacattacactgtactatcccactcaattgatgccgttcttgatattgtaaggaaagaagcttctaactgggactggctgctacgattttatgcatgactaataatgcttgacctaatctaatcatgaagctggtcatcaaaacttataatgatgagatcatgccatttttattggcactggttgtgt

SEQ ID NO: 204545 - DNA, 314 bp, Gossypium hirsutum
  unsure (1)..(314): unsure at all n locations
ctttgtatcaaaaattaaccttctggtttcaacaatcggatggcaccgggtgcatgcatcgagaccatttatgtgctggtcttcatcttctacgcaccaaaaacggagaaagctagaatccttgggctcttcgcttgtgtactcaccgttttctctgctgttgccctcatctccctctttgccctccatggtaatggcagaaaactctnttgtggccttgctgctaccattttctccattatcatgtatgcttcacctctttcaatcatgaggctggtgatcaaaactaagagtgtggagttcatgccattttt

SEQ ID NO: 204546 - DNA, 326 bp, Gossypium hirsutum
taagaccctgaccgtcaagaccatcaccctcgaagtcgagagttcggacacgatcgacaacgttaaggcgaaaatccaagacaaggaatggatcccaccagaccaacaacgtctcatcttcgccggaaaacagctcgaagatggccggaccttggccgattacaacatccagaaggagtccaccctccatctcgtcctccgtctacgtggtggcatgcagatcttcgtcaaaaccctgaccggcaagaccataactttggaagtcgaaagctctgacacaatggaccacgtaaaggcaaaaatccagaccagggaaggattccaac

SEQ ID NO: 204547 - DNA, 279 bp, Gossypium hirsutum
tatgggcttccctttgtatcaaaaatcaaccttatggcttcaacaatgagatccaaccggtgcaatcgacgagaccttgctgatcttattaagaatgcccgaggtatgcactaccccgaggagaaaatctgcaaatggatgactcaattactcttacccgtggactacctacactcgaaccgcgttcttcatagggatctgaaatgttcaaatatattccttacaaaggacaatgacatccggcttggtgactttggacttgcgaaaatacttaacacg

SEQ ID NO: 204548 - DNA, 326 bp, Gossypium hirsutum
tgcaggggttctgcacgagctcgtaccgttaatgtcggacccgtctgctccacccaatatcgaccatgaccaaaggcgatcattgtctagaatatacctgcgacgctggactgtcttattaatgataggtagtcacaccttctcgtctgcggctggacatttattccagacacaaacatcctgatcagagctgtcacaattggcttcaaaatacgaaaagctcgaatagtctgaatacaaacagtcaaaatatcacgaagagtacccaaaacatgagaagcctgaaatgcacaagggggaaaaacaaaaaccctgcaaacatcatg

SEQ ID NO: 204549 - DNA, 202 bp, Gossypium hirsutum
ttaccttcagctcttccacccagaacaactcatcagcggcaaggaagacgcatttaacaagtgtgcccgtcatcactacaccattggcaaggagattgtcgacctctatttgcaccgcatcacgaaacttgctgataactgcactggtcttcaaggataccttgttttcaacgctgtttttcgatgtactcggatcatgtct

SEQ ID NO: 204550 - DNA, 258 bp, Gossypium hirsutum
tttgcactgtattctctgaaatgccgacacgcaaaggtcagtcttctgcccaacagacaagttgctgatgaagcggtctctacatataaacttgagcacccttcagagaaaaggagcagctcaagagtaaaagtgtaccttgagaagcataaggtcttgcacactgctttattaatcttggttctcctaggaacttgtatggtgattggagatggcgttctcactccagcaatttcagttttctctgctgtctctggc

SEQ ID NO: 204551 - DNA, 414 bp, Gossypium hirsutum
tgaagatatagcacgacagtcactttccaataactggctgaagtatggagctaaaggacatcttctaaatgctggcatttgtcaactgtgcaaaggtgatgttgcaatcaccaatgcattacagcggtatcaggaactggatccaactttttctggaacacgagaatataaatttttagctgacattgcttcttccattgatgaggaagatgtcacgaaatttacagatgttgtcaagggaattgacagcatgtctccattggattcttggaagactacccttctactccgtgtgaaggaaaagctgaaagctaaagaaatggaagaagatgatcttacctaaaagaggttcatgtaataacagctttgttttttctttttctttttatctttttcaaaattgatgattgcttt

SEQ ID NO: 204552 - DNA, 317 bp, Gossypium hirsutum
  unsure (1)..(317): unsure at all n locations
caccatctatccttctcctcaggtctcaactgcacgtgtggagccttacaatagtgttctgtccactcattcccttcttgagcacacagatgtggccgtgctcttggacaatgaagcaatttacgacatatgccggagatccctcgatatcgagaggccaacttacaccaatttgaacaggctgatttctcaaaccatatcgtccttgacgacttctttaaggtttgatggagccattaatgtagacattacagagttccaaaccaatcttgtgccatatnnctcgatccatttcatgctctcttcttatgcgcctg

SEQ ID NO: 204553 - DNA, 335 bp, Gossypium hirsutum
  unsure (1)..(335): unsure at all n locations
cgaaaacacatcaaatcgtcaggttaccttttgcaaacggaggaatggcctgctgaagaaagcttacgaactgtcaatcctctgtgatgcttaagttgctctcattgccttctccagtccaagccgtctgtatgagtactccaacaacaacataagatcaacaatagacaggtacacgaaagcttgctcagatacttctaacacaaacactgttacttgaatcaatgctcactattatcaacaagaatcagccaagttgagacagcagattcaaatgttacagaaatctaacangcacctaatgggagattccttgagttccttaactgtgaaag

SEQ ID NO: 204554 - DNA, 398 bp, Gossypium hirsutum
cgtcttcaagcgtcgcaatgacggaatctacatcagcaaccttggcaagacctgagagaaacttcaacttgctgctcgtgttattgttgccatcgagaaccctcaggacatcattgtccaatctgcaaggccatatggccagagagctgtactgaagtttgcacaatacactggttgtcatgcaattgctggaaggcacactcctggcaccttcactaaccagctccagacatcgttcattgagcctcgtctctttatgctcacagatcccaggactgaccaccagcccatcaaggaagcagctctcggaaacattccaaccattgctttttgtgatactgactcaccaatgcgatatgttgacattggtatccctgccaatcacaagggaaagcaca

SEQ ID NO: 204555 - DNA, 423 bp, Gossypium hirsutum
caacatttctcatggctcttgtggtaacctttgttggcagataagtgttttacttgctgctatgttccttgtgttcttctggtttagtgaaggggtctacttatcatcagcactcatgaaagtgcctcaaggaggatgggtgcctcttgtgctgtctgtcatctctatgttggttatgtacatatggcactatgggactcgcaagaagtacaactttgacctgcacaacaaagtatcactgaaatggttgcttggcttgggtcctagcctcggtattgtgcgtgtgcctgggataggcctcatttactccgaactggcaacaggagtccctgcaatatttttccactttgtcacatacctgccagcgttccataaggtgctgcgttttgtttgtgtgaaatcagttccagttccatatgtttc

SEQ ID NO: 204556 - DNA, 393 bp, Gossypium hirsutum
ttagagttgcattaagcactgaagctaacaaagggggatattcatgttctttagaggtttttcttggtgatgttaaggtatggaattctggtcattactccaagttttatacctctgatgtatgcttccttgaacttactgaagatggagatttacagttgaagggtcctaaaaaccggatgggttggcgaactggtacttctggacaaggtgtagagagattacaaatattgaggactggtaatttggtacttcttgatgttttgaaccagataaaatggcaaagtttcaatttcccaactgatgtaatgttatggggacaaagattagatgtatctacttggttaacttctttcccaaggaacacaacatcattctacacatttgaaatct

SEQ ID NO: 204557 - DNA, 331 bp, Gossypium hirsutum
ctgaaccacattctaagagaatcaaggtcaagcttggtgttcaaaaagaggttcttaatggagcgattttggagcaatcttatgttgttgagtatgttcaacaagataacatgtgtgactcttgtacgaagtttcaggcgaatcctgaccagtggttggcttctgtgcaacttagacagcgtgtatcccacagacgaaccttcttttatttggaacagctcatcctgaaacatgatgctgcttgccatgccattaaaatcaagcaaatggatcaaggaattgattttttctttgctaacaagaatcatgctgtgaagtttgtcgaaatttt

SEQ ID NO: 204558 - DNA, 359 bp, Gossypium hirsutum
catcactagggaatccacatgtagatctatatacagttaccataaattatgaaattagcttgatcgaattatttactgttgctgacattgaatcacttacaaattctattgttacaattactactgatatgacatcatcttataccggtatgaataaaaaacaattgaacaatagtcaaacaaaattgacaccacctctcaaagtttgataactttctaccactatcaccccatcacatacaaccaaaatggatatctttaagatgaagcacatgacatattcttactgctatgaccataccacatacaaagttccacctgtataatgtgtgatcaatccccatgaatccaaaagactg

SEQ ID NO: 204559 - DNA, 423 bp, Gossypium hirsutum
aatgggtggggactttccctctaagccgatgtcgttgtatgctacaatatgggatgggtctgattgggctactaatggtggcaaatatagagtcaattacaaatacgctccttacgtagccgaattttctgacctgatcctccacggctgcgcagtggatcccattgaattttcgtcgaagaagtgtgacaccacctctcaaagtttggaactttctgccactatcaccccatcacaaagaagcaaaatggatagctttaggaggaagcacatgacatattcttactgctatgaccagaccagatacaaagttccacctgtagagtgtgtgatcaatccccgtgaagccgaaagactgaaaaggttcgatccagtcacgtttggaggcaggcgtcaccatgggaagcgacaccaccgcagcag

SEQ ID NO: 204560 - DNA, 295 bp, Gossypium hirsutum
gaaatatatgcagcttttggtccgagttcagtctcgtattcagtcacgccggatccaaatgttagaaaatcaagcacgacgtcaagctcagtttaagaaagacaaggaggccgagagcggcttcggcaaatggacctttggccagtccgagacagggaatgaaaactgggatgatagcttgctgacaaaggaagaaatggaggcaagaatgcagagaaaggtggaggcagtcatcaaaagagaaagggccatggcgtatgcatattctcaccagctatggaaagatgcaatgaaa

SEQ ID NO: 204561 - DNA, 258 bp, Gossypium hirsutum
  unsure (1)..(258): unsure at all n locations
acaacacangctctttgtgatctggcccttcgattgggggaaagaaatgaataatccatgtcccggacctttggggtatcacttctcattgctggtcatgatgagaacgggcctagcttatactatactgatccatctggcacattntggcaatgcaatgcaaaagctataagctctggctctgaaagtgcatatagctctttgcaagagcaatacaacaaggacctaactcttcaagaagctgaaacaattgctctg

SEQ ID NO: 204562 - DNA, 423 bp, Gossypium hirsutum
gtgaaagcggtgccaccggcggatctgaaccggaagaccgagtggttcatgtacccaggagtatggactacttatattctaatcctattcttctcctggctccttgttctctccatcttcggttgctctcctggcatggcttggaccgtcgtcaatctcgctcacttcctcgttacataccacttctttcactggaagaaaggaaccccatttgctgaagatcaagggatttacaatggcttgacttggtgggagcagatagacaatggaaagcagcttacacgcaataggaagtttctaactgtcgtacctgttgtgctgtacttgatagcctcgcatacaaccgactatcaacatcctatgctcttttttaacacacttgcagtgcttgtgcttgtcatcgccaagttccccaacatgcac

SEQ ID NO: 204563 - DNA, 275 bp, Gossypium hirsutum
ctcaggtttaatcgttatcatcaaccttttggcattacggtactttcctgttctttgtctctcacaagatttttatttcttctactttgttctacagtggcctggatcatactgctacacgaaacatatatgttggtacccgaatacggtaaagccttccgcggattttaggatccatggactttggcctaatttcaacaatggttgctaccctttcaacttggaccctaatcaatcgttcgacaaatctcagatatcaagccttattgggaatc

SEQ ID NO: 204564 - DNA, 414 bp, Gossypium hirsutum
agcaggacctcagtctgcatggcaaggacagagagtcaggagctttgaggactccaaaaggcattcctttcttgaagaactgaaatccagcaatgcccgaaaatttgagctctctgatatatttggtcgtatagttgaattcagtgttgatcaacatgggagtcgatttatccagcagaagctggagcattgctgcattgatgacaacgagtctgtttacaaagaagtccttccgcatgcttcaagattaatgactgatgtttttggtaattacgtcattcaaaagttctttgagcatgggagttgccagcagcgaaatgaacttgctgatcaactggttggaaatatgttaaactttagtctgcatatgtatggttgtcgcgtgatacagaatgcgttggaagtgattgatct

SEQ ID NO: 204565 - DNA, 318 bp, Gossypium hirsutum
  unsure (1)..(318): unsure at all n locations
gatgttttgacaagatttctaggcacaactccaatggggggatgaagacgccatagcattattttggagcactctttcggtgggataccctttaacttgccctcatcttccattacaatttgtttcacaaatttcagtgagttctgtgaagtgccttggaccgatgtgagacgtccncatctctcaaggtcccaaaggattgaactgttaaatgcaaaacttgatatatgaataggaggtttcgtatcagcatctgtttctgcatctgtctggttattcatcttacttaggtgccatcctataacttgtgatgaatca

SEQ ID NO: 204566 - DNA, 375 bp, Gossypium hirsutum
taggtaagatctgttgatacctatctctacgttgaacgaatgagcacattattttattccctgttttatacgattcttttataactatttaaggtacaaattatatctgcaacaaccttaatgactactgaaaaagctactaaacctacttcacttccttcatacccacaactcattatgaacgccattgaatcattttaccacaagaattattctaactagacattattatccaaattcattcaatccaagtatgcatatttgaatgctgctcacacttctctgctttctcaccagcttattggtattaaacataccagggaactagtcttattgtataacaattacattagaactcaccctaattcgccacct

SEQ ID NO: 204567 - DNA, 411 bp, Gossypium hirsutum
cgaatcgtcaggttacgttttgcaagcgcaggaatggggtgctgaagaaagcatacgagctgtcagtcctttgtgatgcagaagttgctcttatcgtcttctccacccgtggccgcctctacgagtactccaacaacaacataagatcaacaatagagaggtacaagaaggcatgttccggtacctcaaacacaaataccgtcacggaaatcaatgctcagtattatcaacaagaatcagccaagttgaggcagcagattcaaatgctacagaattctagcaggcatctaatgggagattcgttgagttccttgacagtgaaggagttaaagcagctagagaatagacttgaacgagggattactagaatcagatcaaagaagcacgaaatgctgctagctgaaattgata

SEQ ID NO: 204568 - DNA, 228 bp, Gossypium hirsutum
ctaatacttatcgaacgttttgcaagcgcaggaatggggtgctgaacaaagcatactatctggaattcctttgtcatgcacaaattgctcttatcaacttctacacccgtgaccgcctctacgagtactacaacaacaacataatatcaacaatacttaggtacaatatggcatgttacgagtcctgaaacacaaataccgtaacagaaatcaatgctcagtattatc

SEQ ID NO: 204569 - DNA, 303 bp, Gossypium hirsutum
ttttgatctctctgaaaaatttctaaaattttgaagcttcgttgaacgaatggtcgtcttttttttttcccttttttctttgattcttttggggttttttgaggtgcaaattgcaaaggcagcaaaattaatggctactgaagaggtcaataagccttcttcactttcttcatacccacagctgattatgaacgccattgaagcattgaacgacaagaatgggtttaacaagacatcaatcttcaaatacattgaatcccagtattgatatttgcctgctgggcacactactttccttttaca

SEQ ID NO: 204570 - DNA, 427 bp, Gossypium hirsutum
ttgatatttgcacgactcagtcagtaataagaagcttataattcatctatggcagccgacggtaacaagagaaagaggcccaacatattggtgacgggcacgcctggaactggcaagacgacgacctcttctgctttggcggaagccaacaatctgcgccacatcaatattggtgatttggtcaaagagaagaacttgcacgacggctgggacgatgatctccagtgccacattatcaatgaagacctcgtgtgtgatgagcttgaggatgtgatggaagaaggtggaaacattgtagattatcatggttgtgatttctttcccgaaagatggtttgatcttgttgtagtacttcaaactgacaacaccgtgttgtatgatcggttgagtaaaagaggttatgaaggtgctaaggctttcaacaaca

SEQ ID NO: 204571 - DNA, 331 bp, Gossypium hirsutum
gtttgatggagccctgaatgtggatgtgactgagttccggactaacctggtcccatatcccaggatccactttatgctttcttcttatgcccctgtcatttcagctgagaaggcttaccatgagcagctatcggtggctgagataaccaacagtgcttttgaaccctcttcaatgatggccaaatgtgacccacgccatgggaagtacatggcttgctgccttatgtaccgaggagatgttgtgcccaaagatgtgaatgccgctgtggccaccatcaagaccaaacgcacaatccaatttgtggattggtgccctactggattcaagtgc

SEQ ID NO: 204572 - DNA, 382 bp, Gossypium hirsutum
ctacgtgcaccccccggaccctccgggaggcgggtcaagccttcaaggccctctttccagccctcttagctcttcaacttttcggactacttataatcttatttttcattccattcccgagtatgtctctgattccaagcttctttggcagccgtcgcagcagcatctttgatccattctctcttgacgtttgggatcctttcaaggatttccctttctcttctccttcttcatcactctccacgcgctcttctgaaacctcggcttttgtcaacacccgaatcgactggaaggaaaccccagaagctcacgtgttcaaggctgatgttccaggacttaagaaagaagaagtgaaagtggacgttgaagatgacagagtgct

SEQ ID NO: 204573 - DNA, 427 bp, Gossypium hirsutum
ccgaaatcgcggttttgcttttgtcttgtactacaacgaggcctgcgctgattattcaaggcagaaaatggcaagtgcaaattttaagctggatggcaacaaccctactgtcacatgggctgatccaaagagttcacctgatcattctgctgcttcgcaggtgaaggctctatatgtcaaaaacattcccgataacacttctacagagaagctaaaggaagtatttcagcgccatggggaagtaacaaaagtggttatgccacctggcaaagctggtaagcgggattttgggtttatacattatgccgaaagatcaagtgctttgaaagctgtcaaagatacagagaagtatgaaatagatggccaagtcttggaagttgtccttgccaaacctcaggctgataagaaaactgatgcaacataccct

SEQ ID NO: 204574 - DNA, 327 bp, Gossypium hirsutum
ccgagatggctcgaacccagaaaaataaggccacagaggaccatctcggtcagctcaaagcaaagattgctaagctaaggacacaattactcgagccaccgaaaggttctagtggaggtggagacggttttgaagttacaaaatttggtcatggacgtgttgcactaataggatttccgagtgtggggaaatctacccttttgactatgttaactggaactcattcagaagctgcatcttatgagtttacaacacttacatgcattcctggtatcatacattacaatgatactaagattcaactgctcgatcttcctggaattattg

SEQ ID NO: 204575 - DNA, 356 bp, Gossypium hirsutum
gatgcatctaattatgtcaccgaaaggaaatgggctacggcttcagatggcactcaaattcccatatcaattgtgtaccaaaagaatcttgtcaagcttgatggatctgatccaatgttgctttatggatatggttcatatgagatatgtatagatcctgactttaaggcatcaaggctgtctttattagatcgtgggtttatctttgcaatagctcatattcgtggaggtggtgaaatggggaggcaatggtatgagaatgggaaatttttaaagaagaagaatactttcactgattttatctcttgtgccgagtatttaattgaacagaagtactgttcaaaggaaaaattgtg

SEQ ID NO: 204576 - DNA, 315 bp, Gossypium hirsutum
ctggtttaaacatgggtatgggtttaaggaatggattgcttttgattttatcttgtgttgttacactttccctctcagttttggggcgacctgccactttccttgaagattttagaatcacttggtctgattctcatattaggcaaatcgatggagggagagccatccaacttgttctcgaccaaaattcaggctgtggatttgcttctaaaaggcagtatttgttcggacgtgtcagcatgaaaatcaagctcatccccggcgactccgccggaacagtcaccgccttttatatgaattctgttacagatgctg

SEQ ID NO: 204577 - DNA, 362 bp, Gossypium hirsutum
cgttatgtccttctacccactctttcttccgcaatgatcggggccatgtcttatcataaagagctggctgctgcaaaaaaagcagcttctcttgctgctcctctctgtcaaaatgtacaaaaggctttgctgcaatcacatgttcaatccaaaactgataaaactcctgtaacagtagctgattatggctcacaggcactggttagttttgtgcctgagcacgaacttcatgctgaattctcattagttgccgacgaggattctaaacatcttcgcaaagatggtgcccagcaaatagtcgagcgcattacaaaacttgtgaacgattctttaactagtgatggatcatacaatgttacttt

SEQ ID NO: 204578 - DNA, 377 bp, Gossypium hirsutum
gctagatgcattcttggttcagcatgatatggagaacgggtatatgtgggttttcaaggaaaggcccgaaaatgcacttggtaagatgcagttgaggagttacatgaatggtcactcccggcaaggggagcgcccgtttccgtttagtgttggtaagggttttgttagatctcatagaatgcagaggaaacactacaggggtctttctaatcctcaatgtttacatgggattgaagttgtgccatcaccaaacctctcgaatctcgatgatgaagagaagaggatgtggagagaacttaccggcagggatataaacttctctattcctcctgaagcaagtgattttgcagcttggagaaaccttacgagcacagaat

SEQ ID NO: 204579 - DNA, 331 bp, Gossypium hirsutum
acaaaggaaagcttggagagagacccaaaaacaatgtcgaaggaagtgagtgaagaaggacagggtcgtaaggactatgtggaccctccaccggcacctctgattgatatggctgaactcaagtcatggtctttttacagagccctcatagctgagttcatagccactctcctcttcctctatgtcactgttgctaccgtaattggtcacaagaaacaacaagatgcatgtgatggtgttggtctcttgggtattgcatgggctttcggtggcatgatctttatcctttgttactgcactgccggtatctcaggtggacacattaaccctg

SEQ ID NO: 204580 - DNA, 307 bp, Gossypium hirsutum
ccaacctactccaagcaggcattttccttacaggttggtttttgtggggataaatcgatatggctagctcaatgtcccttaagcttgcatgtgtggcggtgttgtgcatggtggtgggtgcacccctggctcaaggggccgtaacctgtggtcaagtcacaagctccctcgcaccctgcattggttacttgacagggaatggtgctggtggcgttcccccaggttgctgcggcggcataaaatctctcaactccgccgcccaaacaacaccagaccggcaagcagcttgcaaatgcatcaaaagtgc

SEQ ID NO: 204581 - DNA, 325 bp, Gossypium hirsutum
cacgagaacaatttgcttggtaagtttgagctttctggtattcctgcagctgctcgtggtgttcctcaaatcaatgtctgctttgacattgatgccaatggtattttgaatgtctctgccgaggataagaccactggacagaagaataagatcaccattactaatgataagggtagattatccaaggaagagattgagaagatggtgcaagaagcggagaaatacaagtcagaggatgaggaacacaagaagaaagttgaggccaagaatgctcttgaaaattacgcttataacatgagggacacgattaaggatgagaagatca

SEQ ID NO: 204582 - DNA, 347 bp, Gossypium hirsutum
  unsure (1)..(347): unsure at all n locations
cggcacgagcaagcaaccattttccttacaagtttgttggtcttgtgattaatccatatggctagctcaatgtcccttaagcttgcatgtctgttggtgttgtgcatggtgatgggtgcacccctggctcaaggggccataacccgtgctgatggcttagtcggcctcccacgctgccttccttttttgtcagggaatggtgatggtgctgatgccacaggttgctgtgccatcgtcatgaatgccttgggatcgctctgtggtgatacataggaaccgatctagcttgaaatcgggttcggatttgggtggaatttcaaatnggtgtgttatggaatcccaactta

SEQ ID NO: 204583 - DNA, 351 bp, Gossypium hirsutum
caaaaaaatatcttgaaacccggagatgtcggacgaggagcaccatttcgaatccaaggccgacgccggcgcctctaaaacctatcctcagcaggccggtactatccgcaagaacggctatatcgtcataaaaaaccgcccatgcaaggttgttgaagtttccacctccaagactgggaagcatggtcatgctaagtgtcactttgtcggaatcgacatcttcactggcaagaaactggaagatattgttccatcttcccacaactgtgatgttccacatgtcaatcgtactgattaccagttgattgacatttctgaggacggatttgtgagtttgctgactgacagtgg

SEQ ID NO: 204584 - DNA, 341 bp, Gossypium hirsutum
cggcacgagcctagatcgagttaggaagttagctgatagctgcactggtctgcaaggctttatggtgttcaatgctgtcggcggtggaaccggttctggtcttggatctttgttgttggagcgcttgtcggtggattatggaaagaaatcaaagctcgggttcaccatctatccttctcctcaggtctcaactgcagttgtggagccttacaatagtgttctgtccactcattcccttcttgagcacacagatgtggccgtgctcttggacaatgaagcaatttacgacatatgccggagatccctcgatatcgagaggccaacttacaccaatttgacag

SEQ ID NO: 204585 - DNA, 342 bp, Gossypium hirsutum
gaaattttctttctcgattttctctttagccagaaaaagaggcagatcttcgtcaagactctaaccggcaagacgatcactctcgaggtcgagagctccgacacgatcgacaacgtgaagaccaaaatccaagataaggaaggcatccctccagaccagcagcgtctgatcttcgccggaaaacagcttgaggacggccggaccttggccgattacaacatccaaaaggagtcaactctccacctcgtcctccgtttgcgcggtgggatgcaaatcttcgtgaaaaccttgaccggcaagacaatcactctcgaggtcgagagctccgacacgatcgacaac

SEQ ID NO: 204586 - DNA, 363 bp, Gossypium hirsutum
tctggatctgccctttctgttaccagcggaaggacttggcgcctcactatgctatgatctccgaaacgaacctcccgtgcgaactctacccgcaatacaccaccgtgcaatacacgctccagccggacccgaacaacccttccagtgctcctcaattgccgccggtgtttgtatttgtgttggacgcttgcatgatcgaggaagaacttgagtttgtgaaatcggcgatgaagcaggcaattgggttattgccggaaaatgcgcttgttggggtcgtttcgtttgcgactcaagctcatgtccatgaattggggttttccgatatgtcgaacgtctatgttttcaggggtaataagaaattac

SEQ ID NO: 204587 - DNA, 346 bp, Gossypium hirsutum
atttgggagctaatcaaaacgccattgatagttcccttgcgtgcaactgggcgtctacatttgcttggccatgtccctcatgctcttcatggagcgggtctacatgggcatagtcattatcctggttaagcttttctggaaaaaaccagagaagcgttacaaatttgagctcattcaagatgatgtggaactcggtagctctaatttccccgtcgttttaatccaaatcccaatgttcaatgaaaaagaagtttacaagatctccattggagcagcttgtggactttcatggccgtcggatcgtctcgtgatccaagtacttgatgattcaactgaccctgcaatc

SEQ ID NO: 204588 - DNA, 367 bp, Gossypium hirsutum
atactcttccctcactttctaaacttgaatctgttaatgatttaagtcaatggccgaagaagcagcagtaccatcgacgccgcctcaatcatctgtgccagcattgggatcttccgttataccgctagtgaacaagctacaagacatattcgctaaacttggtagccagtccactatagagttgtcgcaggtggcggtggttgaaagccagagcagtggcaagttccagtgtgctagagtcgctagttggccatgatttcttgcctcgtggttccgataaatgcacgcgtctccctcttttccttcagcttctccagaccaagcgtaaacctgatggttctgatgaagagtatggcgagtgtcttca

SEQ ID NO: 204589 - DNA, 418 bp, Gossypium hirsutum
tattagttcagtacaaagtcgatgttgtattttccggtggtgtccacgcctatgaacgatcggagcgtatatcgaacatcgcatacgatctcgtaaacggtaaatgcagtcctgtgaaggatctatctgctcctatttacataactatcggcgatggaggaaacattgaaggcatagcaaacaacatgaccgtccctcagccggagtattcagcttatcgagaagctagtttcggtcatgccattttcgatataaagaaccggactcatgcttattatagttggcaccgcaaccatgacgggtattccgttcaaggcgattcgacgtgggttttcaaccgattctggcatccaagtgacgagtctcaatgagaacaacatgtaagttcccttttgaacctcttatttttagaataaaa

SEQ ID NO: 204590 - DNA, 359 bp, Gossypium hirsutum
  unsure (1)..(359): unsure at all n locations
aagtaagtggccctttcaaagatgaccctgcgcccactggctttgttcctggtgctgcttaccatactttaatcgaagctttcgggggaaagggttaccttgtcgggacacctgatgaattaaaatctgccctttctgaatccttctctgcaaggaagccggctgtgataaatgtgataatcgatccctttgctggtgcagaaagtgggagaatgcagcacangaattgaggtagtttcagttttgtttcgttaaatttctttttccatcacttaccgagctggtctttctatgtcaatgaataatcggatttgtgctcacttgtgatagaacagatagagatcatgtgttttgacttt

SEQ ID NO: 204591 - DNA, 394 bp, Gossypium hirsutum
cagccagccagccagcgagggagcgagcgagcgagcgagcgctagagggtctgcaaattttagggttttggattgggaaggtcaggaagagaaagagccagagacagagtgtgagagatttttttaagagaggatttgtgagatcttttgttttgagtgaattagggatttcaacgcttttcatttctcagctcaatttatcctgtttactcgatggaacggaagcttgtggttttgggaatcccttgggaggtggatactgaaggtttgagggaatacatgagtaaatatggtgatttggaggattgtattgtcatgaaggagcgaactacgggtcgatcccgtggttttggttatgtaacgtttgcatcggctgatgatgcgaagaatgtgc

SEQ ID NO: 204592 - DNA, 348 bp, Gossypium hirsutum
ctcgtgccgaataattaaaagacagaggagtcgataaaggtaaaagccgtccaaaacccaaaccaggaaaggcaaacgaaaagaaaaaatggctttgaattttaatgccatcgcctcgaaatctcagaagctcccttgctttgctcttccaccaaaggccacccttagatctcccaagttttccatgatctccaccattccttctggctccaaagaggttgggaatctgaaaaagcctttcacgcctccaaaggaggtgcctgttcagatcacccactccatgccgcctcacaagattgagatctttaaatctttggagggctgggctgagaacaacattctgactca

SEQ ID NO: 204593 - DNA, 311 bp, Gossypium hirsutum
gatactcacaagatgatttgctcggaagcaaacaaaggagaactcggttgttctgattcatgggcatcagccttgattgcagaacttgatcaattcaaaaacgaaaagaccgtcaaccgaagcctcccaggttcttccattgagattgatatcatggacgattttcttgagatggaacagcttgctgctttgcctgcaaccaagagtaaaaaccaatgtcttgaatcgaaagctactgccaaagtatctaataacgatggtgataactcgttgttgaaagctgagcttgaagccatgattcatcgaacaac

SEQ ID NO: 204594 - DNA, 315 bp, Gossypium hirsutum
tgcacagcgatgccagaagtactattgaactggtgcccgctttggaaatggcgtgctgtccttaagattagtgctaatgagccaaccgagcttgcaatccaagaaaatgccaacgggctagctatgtatgctgccatctgccagcaatgtggccttgtccccattgttgagcctgaaattcttgttgacggatcacatgacattaaaaagtgtgctgcggtgacagagcgtgttcttgctgcttgctacaaggctttgaatgatcaccatgtcatgctagaaggtactcttttgaagcctaacatggtgacccct

SEQ ID NO: 204595 - DNA, 379 bp, Gossypium hirsutum
gaaggatcgggcgtttggttgcgagagttgctggccagagcgatgatattgagctcgttgctgttaacgatcctttcatcaccactgaatacatgacgtacatgtttaagtacgacagtgttcacggtcaatggaagcatcatgagcttaaggtgaaggactcaaagacccttctctttggtgaaaagcctgtcacagttttcggtatcagaaaccctgaggaaatcccatgggctgaggctggagctgagtatgttgttgagtctactggtgtttttactgacaaggacaaggctgctgctcacttgaagggtggcgcgaagaaagttatcatttctgctcccagtaggatgctcccatgtttgtgtgggtgtcaatg

SEQ ID NO: 204596 - DNA, 316 bp, Gossypium hirsutum
tggcaaagagtgatgccgaagtgaaagttttgggcacgtgggcgagtccattcgtgatgagggtaaggattgccctgaacatcaagtctgtggcctatgaatttcttcaggagaggttatgggaaggcaaaagcgagcttctcctcaaatcaaacccagttcacagaaaggtccctgtcctcattcatggtgatgacaccatctgtgagtctctcattattgtccaatacatcgatgaggtttggccttctgctcccattcttccttctgatccccatgaacgtgccaccgctcgtttttgggctgcttatcttga

SEQ ID NO: 204597 - DNA, 309 bp, Gossypium hirsutum
cgagttttcttagttttcctttttgtcccttgtttatttgatattgcccccgcatggccgccgctgatgtcgagttccggtgcttcgtcggagggctcgcatgggccaccgacgaccgggccctcgaagaagccttcagtgcgtttggtgaaatcgtcgaatcgaagatcattaatgatcgtgagactggaagatcccgaggctttggattcgttactttccgtgacgagaaagctatgagggacgcgatcgaaggaatgaacggtcaaaatcttgatggaaggaacatcaccgtcaacgaagcccaat

SEQ ID NO: 204598 - DNA, 303 bp, Gossypium hirsutum
  unsure (1)..(303): unsure at all n locations
aaaaatttgtttctatcagcattgctttgcagtgctgtggcaggagttttgggtcaagctcctantaatcctcctacgtctacgccggcgccacccacaccaccggcttctactcctcctccgacgactcaagcaccgcctacaccaaccgccactccgccactggtttctactcctcctcccacttcatcaccgcccccagtgacagcttctccacccccagtttcaactcctccacccagttctcctcctcctgcaactccaccacctgcttctcctnctcctgcaactccacctccagct

SEQ ID NO: 204599 - DNA, 396 bp, Gossypium hirsutum
  unsure (1)..(396): unsure at all n locations
cgagctgaaggagaggttttcatctgtagtactgagggagaagtgggctcctgtcaacatcaggatgcattaattgaacttggttgttcttgcaaaagtgatcttgctctagtgcattatgcttgtgctctcaaatggtttgttagtcatggatctactgtttgtgagatctgtggaaatcctgcaaaaactatcaggacttctgattttaagaaagttgtagtttctttgaaagactatgaagcattgagagaaaggactgccagtggtgatcctaatcctgcccaaattcattcaagttcaggtgtaaaccctgatgctgttgctgctatttggaggcaacgactaagtgaagattcattngtggtcagtccacatggttataacaacaacaat

SEQ ID NO: 204600 - DNA, 403 bp, Gossypium hirsutum
ctgactctgaaatgaggacttcagcaagaggatattctgctgttgctgctgctgaggaactctctgtcatagaaaaggctgctgaccaagaagcactagatgatgatatgcttcttgaagatcttagggtgtcaaaggccatgtctaagaagtacttaaaggtgtcaatggctgctactgtaaaagaggcaatgaaatgcatgcatgacaaccatcagaaatttgcgcttgtggtcgatgaagatgaatttctggaggggattatcacacttggtgatattagacggtgtctgtctaagaagcagcctagtgatatctccatgggtgattcaacagctgatgtgaatccatgtctggtttcgtctgtttgcacgaaaagaataagctaccgtgggctggagcg

SEQ ID NO: 204601 - DNA, 332 bp, Gossypium hirsutum
cttctccctttcttggcgttggcgaatttttcttaagcgagaatgagagagtgcatttcgattcacatcggtcaggccggtatccaggtcggaaacgcctgctgggagctttactgcctcgagcatggaatccagcctgatggtcagatgccaagtgacaaaactgtcggaggaggtgatgatgcttttaacacctttttcagtgaaactggtgctgggaagcacgtccctcgtgccgtctttgtggatcttgaacccactgttattgatgaagtgagaactggtgcttaccgccagctcttccacccaaaacaactcatcagcggcaagga

SEQ ID NO: 204602 - DNA, 321 bp, Gossypium hirsutum
ccatggctttctcaccaaaactcttctctatggctatcgtcttcctttttgccctcttctccatgcaaatccatgctagagagtacttcagcaaattcccaagagttaacaccaatgagaaagagacaacaaccagagagcaagagcacgagaccttcgttccccagaccacccaaaagccagaagagcaagagccaaggttcatccctgaaacccaaaatggttatggcctttacggccacgagtcaggctcaggctcaggctcaggctcaagccggcccagtttcaccaccaaaaaaacctatgaaccctatgtcaccc

SEQ ID NO: 204603 - DNA, 384 bp, Gossypium hirsutum
ggtggataagactacctttcatggcaaagaggggcgaggctaccaaggaaggtcttggattgcacctcctaaggatgcaaaagcaacgaatgatcattgttatataccaaagagattagtacacacttggagtgggcacacaaaaggtgtttcagctattcggttcttccccaaatatgggcacttaattctctctgcagggatggatactaaagtgaagatatgggatgtgtttaattcaggaaagtgtatgaggacatacatgggtcattctaaggcagtaagagatatttcattttgtaatgatggcactaaatttttgactgctggatatgacaagaacatcaagtactgggatactgaaaacccggcaggtatttctac

SEQ ID NO: 204604 - DNA, 341 bp, Gossypium hirsutum
atgatatctgcttcataactcttaagctcacaaatcccggctttggtgacttgaaccatttgatttcaacaaccatgagtggagtcacatgctgccttcgcttccctggccaactcaattccgatcttcgaaaactagcagtaaacttgatcccattcccacgcctccattttttcatggttggttttgcacctttaacatcccggggttcacaacaataccgagctttaacgatccccgagctaactcaacaaatgtgggattccaaaaacatgatgtgcgcggctgatcctcgtcatggaaggtacttaacagcctcggcaatgtttcgaggcaaaatg

SEQ ID NO: 204605 - DNA, 284 bp, Gossypium hirsutum
aagcagctttgccgttgatgaaggatagaaaagacaagggaccagcctccattgctcttatgtcttcaatggccggccaggtgggtacatatggttttgcggcttattcagccactaaatttgggctaagaggattagcagaagcattgcaacaagaagttttggagaataacatccatctttctttaattttccctcccgtgactgaaactccgggatttgaaccagcaaggaaaacaatgccggaaatcaccaaaattatatcgagcacatctgcgggaatg

SEQ ID NO: 204606 - DNA, 355 bp, Gossypium hirsutum
gccacgtacaaatctcagggtgaaacagtacgtgtaagtggggatgacctctatgattcggctgggagatttcggatacctgatcttccagcttttgcattggagtgccttcctaatcgtaactcgttaacttatggggatctgtatgggatcggacatgaagcatccacaatattccgtggaactctccgctatgaaggttttagtgagataatggccacacttgtaagaattggtatattcaatgctgaaactcatccacttctcaaacatgaaggtcgaccaacatttagaaatttcctttgtgagcttctgaaaattgatactgaagacatgaatgaagttgtagttgggg

SEQ ID NO: 204607 - DNA, 265 bp, Gossypium hirsutum
  unsure (1)..(265): unsure at all n locations
gtgaattgtagcttgttcaatcctacaccatgtgtttgtgccatggttgtcaacagatacaagcttanaggcaacattttgagttataatcttggtggaatggggtgcagtgctgggctcatttctatagaccatgctaaacagctgctgcaggtgcaccccagctcttatgccttagtggtaagcatggagaacattacgctcaactggtacttcggcaacgaccgatctatgctcgtctcaaattgcctcttccgcatggggg

SEQ ID NO: 204608 - DNA, 330 bp, Gossypium hirsutum
cggaagcggggtcggaactcgtgtctctgcagaccagtgtgcgggtgacacagcggctctgcaaagtatagtgcaaaagatataccagaatgttgatttgaagccgttaattattacaccgggagggttctatgacttggattggttcacggaatacattgataagacaaccaagtccctagatgttgtcactcaccacatatacaaccttggaccaggagttgatgaccatcttgttgaaaagattctcgatccatccattcttgagggtgtgtcccgaacattcagtggccttcataacatcatcaagaattctacaacttcagcaac

SEQ ID NO: 204609 - DNA, 374 bp, Gossypium hirsutum
  unsure (1)..(374): unsure at all n locations
ggataaagtgtctggggtatcaagaaagggctaagatttgctagagtccaactgngaaaaagctgtttgagattatggttaagaaagagagtaatctctgtttggcggctgatgttgccactgctgctgagttgcttgatattgctgagaaggttggacctgaaatttgcctattgaagacccatgttgacatattccctgatttcactccagagttcggatctaagcttcgcgcgattgcagaaaaacataacttcatgatatttgaagaccgtaaatttgcagacatcggtaacacagtaacaatgcagtatgaagggggtatcttccgtattttggaatgggctgatatngntaatgctcatataatctct

SEQ ID NO: 204610 - DNA, 261 bp, Gossypium hirsutum
agcaacccccccacctgcaactcctcctgctaccccaccaccagctccattggcttctcctccagccacagtcccagctatctctccagtacaaacaccattgacctcgccaccagctccgccgaccgaggccccagcacctaccctcggggctgctacgccaggtccagctggaacagacacgagcggagcaaatcaaatgtggaccgtacaaaagatgatgggaaagctagccatgggatgggctctgctcaatctgat

SEQ ID NO: 204611 - DNA, 333 bp, Gossypium hirsutum
aaatgaataaaaagttcctgaaaatcctggatcatccagttttggctactttgtaccctgagtttgaaccttctaatttctcttgcatagttatggagtactgttcagggggtgacctgcattctcttagacataaacaacctcaaaaacgcttctctttgaactccgcaagattttatgcagctgaggttctggtagctctagagtaccttcacatgctgggtattatctacagagacctaaaaccggaaaacgttctagtcagatcagatggtcacatcatgctctcagatttcgacctttcactttgctcagacgcgatcccagccgttg

SEQ ID NO: 204612 - DNA, 321 bp, Gossypium hirsutum
gtcctggcatttgctgacatgatgaagaagaaaatcgcgatgccggctgagttcatctatgatggcagagattataacttatttgaccactactcagctgttgcccaaagaatcggggtttacactgctaaggactatgttgatatagtatagcacctggtggatcgatggaaggtgaaggagctagctgggctttcagccgaggggcgtacagctcaggactacttgtgttcacttccttcgagaattagaaagttagacgagagagcgcatgacaaggccatggaagcacccagcgtcccattcagttggatatttgat

SEQ ID NO: 204613 - DNA, 336 bp, Gossypium hirsutum
  unsure (1)..(336): unsure at all n locations
accaacttgttcccttacccaagaatacacttcatgctggcttcatacgctccagtcatctctgctgagaaggcttaccatgagcagctatcagttgctgaaatcaccaatagtgcctttgagccctcatctatgatggccaagtgtgatcctcgccatggcaagtatatggcttgctgtttgatgtaccgtggtgatgttgtgcccaaggatgtcaatgctgctgttgccaccatcaagaccaagagaactattcagttcgttgactggcgcccaactggattcaagtgtggtatcaactaccagccacccactgtcgntcctggtggtgatctt

SEQ ID NO: 204614 - DNA, 343 bp, Gossypium hirsutum
attatggtggaggtgccttttatactactaacgccgggggtgttcctcctgcaacatcaaggctttcaccccttcctcctgaaccatatgaccgtggtgcaactgtagatattcctcttgattctgccaaggatctaaaagcaagagaaaaggaacttaaagcaaaagaggctgaactgaataagcgtgaacaggaattgagaaggaaagaggatgcaatagcacgagctggaattgtaatagaggacaaaaattggccaccgtattttcctattatccatcatgatattgcaaatgaaataccagtccacctacaaaagattcagtatgttgctttcacaac

SEQ ID NO: 204615 - DNA, 333 bp, Gossypium hirsutum
ggaagggtaccctttcacccccgagaagatccgagaatggaaagatttagaagaaaaggccaagaaggaacagtccatcaaaacaatcttggtttcccgatctcgtgactttgtagttacttctgatggaagtaaggtgccggtgtccgaacttgaggggaagactgtaggtatatatttctcagcgtcttcaatcaagccatctgctgattttactcaaaaacttgctgaagtttatagtaagttgaaagaaaatggggagaaattcgaggtggttatgatatcgcttgatgatgatgaggaatccttcaggcaaagctttggggcaccatg

SEQ ID NO: 204616 - DNA, 425 bp, Gossypium hirsutum
  unsure (1)..(425): unsure at all n locations
agcagctcaaaaagggagctaatgaagctactaagacacggaatagagttatatcggagtttgttgtcatggctgccgatactgagcctcttgagattcttttgcatcttcctttgcttgctgaagataagaatgtcccatatgtatttgttccctcaaagcaagcacttggccgagcatgcggtgtcacaagacctgtaatcgcatgctccgtcacatcaaatgaaggaagccagttgaaatcgcaaatacaacagctcaaggatgccattgagaagctcctaatctaaagatattacgtaactcgtattcggtgtgatgggcctcttggaatgtggtggtcgctcctttagagaacttgacttgataagtcgtgccactatcgagccgctgtttagtattcganctaaaaaaatgtcggtgtg

SEQ ID NO: 204617 - DNA, 350 bp, Gossypium hirsutum
gagatctgagtatgggtgagagtagggtgactgggaaggtaaagtggttcactgaccaaaggggatttggtttcataacgccggatgacggcggcgaggagttgttcgttcaccaatcgtcaattcgttccgacggttttcgtatcctcgccgacggcgaagaagtcgagttcgttatcgattcttctgaaggaggtcgtaccaaggctgttgatgtcactggccctaatgggaaccctgttcgtggcaccacgagatctggacgcagtggtggcggaggtggattcggtggtagaagaagaaaaggaggttatggaggcggcggaggaggatgcttaagtgtggggaga

SEQ ID NO: 204618 - DNA, 365 bp, Gossypium hirsutum
  unsure (1)..(365): unsure at all n locations
caactaggttcnactagtttttatctctgatgaatttaatgagctgttgccaaagtatcttaacttcttgaagggtcttgttgattctgatactctgcctctcaatgtgtcacgagagatgctgcaagcccacagcagtttgaaaacaatcaagaaaaaactcatcaggaaagcccttgatatgattcgtaaaattgccgaggaggatcctgatgagtcgagtggcaaagatgagaaagaagtggaaacatctggtgatgatgatgagaaaaagggacaatacaccaagttctggaatgaatttggaaaatccattaaactcggcatcattgaggatgcaaccaatagaaatcgcttggcaaaac

SEQ ID NO: 204619 - DNA, 235 bp, Gossypium hirsutum
ctagcacacaatactattcgacgaacatgagtgattagctggtgcagatgagccctgttcacatgaaaatccctgaccttatccataatggtaaacccgtttgtgagtctgtcattcatgttcagtatattgatgaggtctggcatgataaagctcctttgatcccttctgatccttatcaaagagctgttgccagattctgggctgattatctcgacaagaagatatatgacct

SEQ ID NO: 204620 - DNA, 407 bp, Gossypium hirsutum
tctaagtccacggaggatatgtacacgagatcggaattggaatcctcggcggctaataaggagagcttttttgcgaggaaaatggcggagaacgaatccaggcctgaaggtttaccaccttctcaaggagggaaatatgttgggtttggatcgactcccatgcctacccaaaggattaataatagttctcagggtgatgtgttctctgttgtttctcaggggattgggaggttatctttggtagctgcatccgctgcaaatgttgtccaagcagggacgaaggagttcacctccaaggttaaggagggtggctatgatgccagggttaatgaaacggttggtgttgtcactgcaaagacgagtgaaattggccacaagacttggggcatgatgaaaggagtcatggc

SEQ ID NO: 204621 - DNA, 421 bp, Gossypium hirsutum
  unsure (1)..(421): unsure at all n locations
tgacggctcaaactctgataaacaaaaggaaagatcgggggatccagacgctgtagccaaggcttttgtcgatcactactactcgacattcgatgcgaaccgggccggtttagccaatctctaccaggaaggttccatgttgacctttgaaggtcaaaagatccaaggatctcagagcattgtcgctaagctaaccagccttcctttccagcagtgcaagcacaatatttccaccgttgattgccagccatctggcgccggcggcgtcctcgtcttcgtctctggaacactacaactcgccggcgaacaacatgctctcaagtttagccagatgtttcatttgatgccaacaccacaaggaagcttttatgtgttgaatgacatattcangttaaactacgcgtgaagagacagaaatcac

SEQ ID NO: 204622 - DNA, 378 bp, Gossypium hirsutum
  unsure (1)..(378): unsure at all n locations
ctagtctctcgttctttttcctgttcaatcatgtcttgcttcattagcaaatatgctgatgagttggctaaaaacgctgcttacattggaacccctggaaagggtatccttgctgctgatgaatccactggcaccatcggcaagcgtctttcaagtattaatgtagagaatgttgaagacaacaggcgtgctctccgtgagctcctattcacaactcctggagctcttcagcacctcagtggtgttattctctttgaggaaaccctttatcaaaaaaccgcttcgggcaagcccttcgttgatgttttgaaggaaggtggtgtcctcccttgcatcaagggtgacaagggtacngntgagcttaatggaacccatggc

SEQ ID NO: 204623 - DNA, 359 bp, Gossypium hirsutum
taaatacatggtcaccttcgacgcatctgttgtctggggcctaatcggaccaaggagacttttcggaccaggagggatgtaccgtaacttagtgtggttgttcctcattggagcgttcttgcctgttcctgtttgggttttgagcaaaattttcccagaaaagaaatggattcccttgattaacataccggtcttatcttatggttttgccggaatgccacccgcaactcccaccaacattgcaagttggctcatcactggaaccatcttcaactattttgtgttcaagtaccacaagcggtggtggcagaaatataactatgttctatctgcaacattagatgcttgaactgcattca

SEQ ID NO: 204624 - DNA, 366 bp, Gossypium hirsutum
atccccggctgagaaatcgcccaatatggggctttgaattttgtctgatttcgaacccgagaggctgagcccggtttgcgccgtgattgggattgccttttcgctcgtacaatgggttctagtttccaaagtgaagctttctccgggccgggattcggtgaacaatggttcgggcgccaaagacgggtactccgattacctcattgaagaagaagaaggtcttaatgaccatagtgttgttcttaaatgtgctgaaattcaaagcgccatttctgaaggtgcaacttcgtttcttttcaccgagtatcagtaccgtggcattttcatggttgcttttgcaatcttgattttccttttccttggctc

SEQ ID NO: 204625 - DNA, 361 bp, Gossypium hirsutum
atcttaagtccaacaaaagaaatcactcctctcacaaagctcaaacaatggaagtggtgaagaacttggacatccaaagatacatgggaaagtggtacgagatagcttccttcccatctttctttcaacctaagaagggggagaacaccagcgctttttacactctgaaggaagatgggacggtgcatgtgcttaatgagacttttgttaatggcaagaaagattccatagaaggcaccgcctacaaggctgatcccaagagtgacgaagccaagctcaaagtcaaattctacgttcctcctttcttgcctatcattcctgttactggggattactgggttttatacattgatgagggata

SEQ ID NO: 204626 - DNA, 323 bp, Gossypium hirsutum
gttttatcttcttgtttcaatcattgttctcttatccggcattgttgtctcaggttcgggttcggtcgggattaactacggtcgtgtagcaaacaacttaccgtcaccggaaaaagtcgtggaactattgaaatcacaaggaataaacaaagtgaagctttacgacaccgacgcgacggttttgacggcgttagcggattccggtataaccgtggtcgtcgcacttcctaatgaactactttcatccaccgctgctgatcagtcgtttgcagacaactgggttgaagcaaacataacaaagttttacccaaagacaaaaatcg

SEQ ID NO: 204627 - DNA, 285 bp, Gossypium hirsutum
cacaactgttcacatctcccctgctggtagcaggcacagtgatattcctgcatccaaatttctactgtagcatgtggtaaatagaatagatttcaactcttatggaagtcggcgtggtaatgatgaaattattgccaggggtacttttgcaaatatcccacttgtgaacaaactattgaaaggagaagttgggccttaaacaattcatatccccactgtaaaaaactatctgtgtatgatgcttccattaagtacaagactgcacgacaggataccataattttt

SEQ ID NO: 204628 - DNA, 359 bp, Gossypium hirsutum
tacaacgcgacactctcagttcatcagcttgtggaaaatgctgatgagtgtatggttcttgataacgaagctctctacgatatctgtttccgtaccctcaagctcactactccaagttttggagatctcaaccatctaatttctgccaccatgagtggtgtaacatgctgccttcgcttccctggtcagcttaactcagatctccgcaaacttgctgtaaaccttattccattccctcgactacatttcttcatggtgggatttgcgcctctcacctcacgcggttcccaacagtacagagccctcactgtccctgaacttacacagcaaatgtgggatgccaagaacatgatgtgtgc

SEQ ID NO: 204629 - DNA, 327 bp, Gossypium hirsutum
gaacttgattggtgctttctaccaacctcaatgtgtgcgcatagacactgacacattgaacacattgccagatagggaactggcttcaggtctggcagaggttataaagtatgggctcatcagagatgctgagttttttgagtggcaggagaagaatatggagaaattgatggcaagggatcctgatgcgtttgcttatgctataaagcgatcatgtgaaaacaaggctgaggttgtgtcactagatgagaaggaaagtggattgagggctacactgaacttgggtcatacatttggtcatgcaatagaaactgggttttggatatg

SEQ ID NO: 204630 - DNA, 356 bp, Gossypium hirsutum
ctgatattcaaactcatgaaggcttatctgcgttcttcgtctcttcggaaggctgctttaagggccctgtctaaaactttgactgtggatgagctgttttacttgaaggagcagtttgcattattggaaccaaataaaaatggcactataagcttagaaaatatcaaagcggttctgatgaaaaatgcaacagatgctatgaaggatgctcgcatccctgagtttcttgcatcgctaaatgcacttcaatacagacggatggactttgatgagttctgtgcggctgcattaactgttcatcagctggaggctcttgatcggtgggaacagcatgcacgttgtgcttacgaaatctt

SEQ ID NO: 204631 - DNA, 458 bp, Gossypium hirsutum
ggtgattgggggttcttatgctttcatcatcccgaccatttccattgctttatccaggagatatagcatcttcgttgatccccaccggaggtttaaagcatccatgagagatgtacaaggatctctcattgttgcatcattcttcactatggttattgggttctttggtttctggagaattatttcgaggtttttcagccctcttgcagctattcctttggtgattctcaccggactcgggctctatgcacaaggttttccacaattggccagatgcatcgaaatcggactcccggcactggtagcagttgttttcttatctcagtatgttccacatttcctgaaatccaggagaggaatatttgaacgttttgcaatccttttttccgttgcgattatatgggcttttgcagaaattttgacagcagctggtgcttatgataacagagctcctcaaa

SEQ ID NO: 204632 - DNA, 364 bp, Gossypium hirsutum
gctctttctttctatagaattagtcactcctgtgctagatgaaggttctctccccaattcttgcttgcctagcgcttgctgtggtggtaagccatgctgctctctcacctgagcaatattggagctataagctgccaaatactccaatgccaaaggctgtcaaagaaattctacatccagaactgatggaggagaaaagcacctctgtaaatgtaggaggtggtggtgtaaacgtcaatacaggaaaagggaagcctgggggtgacacccatgtgaacgttggaggcaaaagagttggagtgaacacgggaaagccagggggtggcactcatgtgaatgttggagacccttttaattacctata

SEQ ID NO: 204633 - DNA, 326 bp, Gossypium hirsutum
ggcaaggggcacttgcaccacaaggctcgacctgcaaggagggcaacctggaagagaaacaacacactctcccttcgccgctaccgttgatcccctggaccgtacttggtgtttttgttactgctatcttggcttcattactattgtagggtttataagaattttgagacagttatattgtgtgtgggacatcttgaaaatcttctatgttagaggctattgagatttatgtgctcactgaaaatgtccaatgctattgtcatattgagattgtgttgtttgatttttttttattaaatactagaaatgggattttagtttttacc

SEQ ID NO: 204634 - DNA, 378 bp, Gossypium hirsutum
tttttcctctccaattttccgtcactttcccgagaaaatgagagaaatccttcacatccaaggtggccaatgcggcaatcagataggagccaagttctgggaagtcgtatgtgccgaacatggcatcgattcaacgggtcgatatggtggtgactcggagctccagcttgagcgaatcaatgtttactacaacgaagccagttgtggccgttttgttccccgcgcagttttaatggatctggaacccggaaccatggatagcgtaagatccggtccttacggacaaattttccgacccgataacttcgttttcggacagtccggtgcgggaaacaattgggctaagggacattacactgaaggagcggagcttatcga

SEQ ID NO: 204635 - DNA, 347 bp, Gossypium hirsutum
ccgccgcccgttatctcatcgcaatcatgatcatcccagaaaagaaccgcagggagatatcaaagtatctctttcaagagggtgtttgctacgccaaaaaagattacaacttggcaaaacacccagaaatcgatgttccaaatcttcaagtaataaagctgatgcaaagcttcaaatccaaggaatacgttcgtgaaacttttgcttggatgcattattactggtaccttaccaacgatggcattgaatttttaaggacataccttaatctcccctctgagattgttcctgctactttgaagaagcaaactaagcccggtggtggtcgtcccatgggtccttctgat

SEQ ID NO: 204636 - DNA, 341 bp, Gossypium hirsutum
aaagaaggaaaaaatggttctgctaaccaaattgtggacgatttatgggctggccctaaacctgaacgtggtcttggcaggcttaggaagatcaccacccagcctttgtccatcaaagatgaaggagaaaagaaaaagtcccagaggtcgttgtcgctgccgaatagtccagtgtcaggtccgacacccttgacaccgacaactccgacggcccgtaaggagaacgtttggtggagtgtgttcattccgggtagcaacctagccaccaaaagtttaggttctgatgttttttacaggccccaaccaaactttcttaccgtctttgactggctttacagtgg

SEQ ID NO: 204637 - DNA, 367 bp, Gossypium hirsutum
ggaacccacatcaagattagggtgccaacagctgataaacctagatatcgaacccgaaaaggtgacatagcaacaaatatgctaggtgtttgtacacctgagatgcaatttgtttatgttcttcctggttgggaaggttcagttgccgatggacgggtgctcggagatgccatcagtagaagacatggactaaaagttcctcatggttgttattatctagttgatgctggatacacaaattgtgagggatttcttgcaccatttagaggacagcgatatcatctgaacgagtggcgtcagggttatcagccaagttctccgcaagagttttttaatatgaaacatgcctcagcacgtaatgtcattg

SEQ ID NO: 204638 - DNA, 392 bp, Gossypium hirsutum
cttcttaattacatttctaatcattcattgcttacagggacaacatggagcttatggtccaagtgatttcagaagagattgtaaagccatcatctccgactgccgatagactgcgtcgataccaactatcgttcctagatcaactaaatgcctcgttctataatgctttggtctatttctacccaaaaatatgcgacactgaagccaacaaaatcacagtttccaatcggttgaaacactccatttccaatgccctcacctatttttacccactggctggtcggataacggatgaccagttgtttgttgattgcaacgatgaggggataccctttttggaagttggagtggagtgccaactttcagatgttttaaacaatccaattcccaaa

SEQ ID NO: 204639 - DNA, 359 bp, Gossypium hirsutum
agaacaactcatcagcggcaaggaagacgcagctaacaactttgcccgcggtcactacactattgccaaggagattgttgacctctgtttggaccgcatcaggaaacttgctgataactgcactggtcttgaagggttccttgttttcaacgctgttggcggaggtaccgtgtccgttcttggatctctccttttggagcgtatgtctgtcgatatatggcaagaaatgcaagttgggtttcactgtgtacccatctcctcaagtctccacttctgttgttgtgccttacagcagagttctgtcaactcactccgttgtggagcacactgatgtgagctgactccttgacaatgaagct

SEQ ID NO: 204640 - DNA, 354 bp, Gossypium hirsutum
ctctgttcgagaaattgaaaacattggcagatcagataaaggtgtatgaagaacaagttgctcaagcagctggacagtctgcgtcttcaaaagacgaaatggatcagagcttacagaaattggcttctctagaaagcacagatgaacaactcacaagcatgatatccgagttcgaaaataaagctcttcagtcttcctcagagaatgaacttttggatcagacaaacattcagttgaagggcagaattgatgagcttaaagaattgctcaattcagctctttctgagaaggaatcaactgatcaagagactgcttctcatatgagcacgattaaagaattatctgaccagcata

SEQ ID NO: 204641 - DNA, 367 bp, Gossypium hirsutum
gatgttgggaaattatggaatgacattggctgcaattgggggagtctatattggtgttgagcagctgttgcagaattataggatgaagagagactttgtcaatggtgccgttggtggtttcgtggctggggcttccattctcggtttcaaagggaggagcatctcaacagctatttctgccggatcagctctggcattcacctctgcggtgattgatgctggaggtcagactacaaggctggacacagggaaggagtattacccatacaccaccaagaaaaggcctgttgagtcataaatcttgcatgtctctgctgagaaggcacttgcagtgaaacgtgagataatcgatcctgttcgatgatct

SEQ ID NO: 204642 - DNA, 458 bp, Gossypium hirsutum
aagaaaatcgagagttaaaaaaatggggcttgaagaaaggctcaaatgagatgaacatcaacgaagaagagaacaagaaccctaaccctaacactaaagatgaagaagatggtgaacttgaagaaggggagatcgcaggtgaagaagatgatacgacgtcgtcttcgttaaagaaaggtgtcgtcgaacagcctcaccagttggagcattcatggaccttttggtttgataacgcttctgctaaatcaaaacaagctccttggggtagttctatgcgcgctatttacactttctccaccatcgaacaattctggagtctatacaataacatacatcatccaagcaaattggctgtgggagcggacttccattgtttcaaagataaaatcgagcccaagtgggaagaccctgtctgtgctaacggaagcaagtggactgtagttttccagaaggggaaa

SEQ ID NO: 204643 - DNA, 356 bp, Gossypium hirsutum
gaccagcttaccgatgaccagatctctgagttgaaggaggcctttagcctctttgacaaggatggcgatggttgcattactaccaaggaactgggaactgtgatgcggtcactcggacagaaccctactgaggcagaactccaagatatgattaatgaagttgacgccgatggaaatgggaccatcgatttccctgaatttctcaacctgatggcaaggaaaatgaaagatactgattctgaggaggaacttaaagaagctttcagggtgttcgataaggatcagaacggtttcatatctgctgccgagcttcgtcacgttatgacaaatcttggccagaagcttaccgacgagga

SEQ ID NO: 204644 - DNA, 456 bp, Gossypium hirsutum
gttaattcacgtttattaacccgaggatggtactgacggggaaaccggggatttcgaaccggaagacgacgacctcatggacgaggactccgacgacagggacgcctcacctcaagcctccatgcctaagctcaagtctgccatcactggcggcgcttacgactctctttctggccctaagaagactaaaggccgaggcttccggcaggacgacaccgatcgtcattcccatctcgcctgccgcgactatgactctatcggctctgacggtagccccggtccccagagatctattgaaggatggataattttggtcactggtgtacatgaagaagcacaagaagatgatttgcacaatacatttggtgaatttggtgagatcaagaatttgcatttaaatcttgatcgtcgcactggatttgtcaagggatatgcactgattgaatactaaaagtt

SEQ ID NO: 204645 - DNA, 356 bp, Gossypium hirsutum
  unsure (1)..(356): unsure at all n locations
ctaagatgtaccaaggtgccggcggtgacatgggtggtggcatggatgaggatgttccggctggtggaagtggtgctggtcctaagattgaggaagttgactaaatcattgattttcttcacctggtttctctattgttctcttatgttttttgggatttaaactgtttggttttgttgtttggtttctaatcggattgaaatgaacttttatagggtttgttccttttttgggatactctatcagtagcacctgtgattgttgtgttttggaaaacaggtcccttttgaacttattaaagatatcaagacttnttgttaaaaaaaaaaaaaaaaaacttccaggggggccccgta

SEQ ID NO: 204646 - DNA, 362 bp, Gossypium hirsutum
caaatttgtctcaatggtctttaggtctccactaaggaaaagaaataccaatttatccaataaacaaaaggcgcagcctttgatgaagtgctttagctttgaggagatctcaactgctacaaacaacttccatccagaaaatatagttggtcgaggcgggtattcagaagtttacaggggtgacctttctgatggaagagctgttgcagtgaagaggttgggcaaggacaacagggatgaaaacaaagagagagaattccttactgagttgggcacaatcggacatgtttgccaccccaatactgcaaccttagttggctgttgcgtggaaaatggactttatttgattttcaacttctccg

SEQ ID NO: 204647 - DNA, 371 bp, Gossypium hirsutum
gatccatctggcaaagacatcaatgcattggagcagcacatacagaacctactgagtccatccactccatttttctttaacactctttatgacccataccgatccggtgctgacttcgttcgtggctaccctttcagtctccgtgagggtgttcccactgccgtctcacacggtctctggctcaacatcccggattatgatgctcccacacagcttgtcaagccactcgagaggaacaccaggtatgtcgacgctataatgacgattccgaagggaaccttgttccccatgtgcggaatgaatctggcatttaaccgagaattgatcggccctgcaatgtactttggactcatgggagatggtcaaccaat

SEQ ID NO: 204648 - DNA, 308 bp, Gossypium hirsutum
cttaatttcagaggtttcgcacgataaagctattcaccggtgtttcagcatgaatgtttgctgtgaaatgtcgcttctaatcagcattgctttgcattgctgttgcatgatttttgggtcaagctcctactaaatctcctacgtctacgccctcgcctcccacaccaccttcttctactactgctacgactactcaagctacttctacaccaaccgtcactccgtcatctggttctatctctactgccactttattaccgttcccagtgacatcttctccacccccaattacaacttcttcacccatt

SEQ ID NO: 204649 - DNA, 450 bp, Gossypium hirsutum
tgtgaatcatccgattagccagaattagttgaaagggaggttaaggggaaagtggatgacaaagacgacaacagtggatttatagacaaggtcaagggtttcattcatgacattggtgagaagatcgaggaaacaatcggctttggcaagcctactgcagatgtagctgagattcacctaccttgtatcaatcttgagaaagcagaaattgtcgttgatgtcctcataaagaacccaaaccctgttccaatccccctcgtcgacattgactacctcattgaaagtgatggtagaaaactcctttcaggcttgattccagatgctggaaccatccatgctcatggtgaggagactgtcaaaataccagttactttgatatatgatgatatcaaaagtgcatatgatgacattaagcctggcagcatcaatccatataggctgaaagttgat

SEQ ID NO: 204650 - DNA, 364 bp, Gossypium hirsutum
ggcttgtgcaaatggagaactcggggttgattagtatgattgtcgatgaaaaatatgaggacttaggaaggatgtattgcttgtttcgtcgagtatccaatgggcttgttttaatcagagatgtcatgacttcatacattcgtgatactggtaagcagttactcactgatcccgaaaggctgaaggatcctgtcgattttgtgcaacatctgttggatttaaaggacaaatacgacaagattatcacttcagcatttagaaatgacaagacttttcaaaatgcattaaattcctcgtttgaatatttcatcaatctgaattctcggtctccagagttcatctctttgtttgttgatgataagct

SEQ ID NO: 204651 - DNA, 369 bp, Gossypium hirsutum
tttcgatcgaaaccaaagtggttatattgagagtgaggaactaagagatgccttatccgacgaagttgaaacaaacagtgaagaagtcattagtgccatcatgcatgatgtggacacagacaaggatgggagaataagttatgacgagtttgcagtgatgatgaaggctggtacggattggagaaaagcttcaaggcaatattctcgagagaggttcaacaatctgagtctgaaattgatgatggatggatcattgcaaatgaacagtgagcccagatgaccaaacaccattgacaaagttctactaatgaaaaatggctgttgatttcagtgttacttttagctgttatttgtttcttcttttgggtc

SEQ ID NO: 204652 - DNA, 373 bp, Gossypium hirsutum
tgaagacccaattagtcaagaaaagaggttattggagaccagaaagaatgctaaggtagagaaggcatctaaatccatctcccaagtcagcttggaagttgataggcttgctggccaggtgtcagcttttgaaacaataatcaccaaaggtgggaaagtagcggagaaagacttgattaattcgattgagctgctgatgagtcagttgcttaaattagatgcgattacagccgatggagatgtaaaattgcaaagaaaaatgcaggtgagaagagttcaaaaatatgttgaaacattggatatgttgaagattaaaaacgctatgccaagcaacaatggaagtcaaatggaaatccaaaatcaacacaagcat

SEQ ID NO: 204653 - DNA, 367 bp, Gossypium hirsutum
cgtgtagtcaagctacttaggcttcttagacatggcgacatagttgaaattaaacgtataatgttgccaccatcaaagagggagttcaaagacttatttgttgttttcgagctcatggaatcggatcttcaccaagtcatcaaagctaatgatgacttaacacgagagcatcaccagtttttcctttaccaaatgcttcgtgcaatgaaatatatgcatacagccaatgtgtaccatcgtgaccttaaaccgaagaatatactggcaaatgcaaattgcaagcttaaagtttgtgattttgggctagcaagagttgcatttaatgataccccaacgacagtcttctggacggattatgttgctacac

SEQ ID NO: 204654 - DNA, 372 bp, Gossypium hirsutum
gagcttgttgcagattgtcacctacttgcagcggttgcagtgggagagatggaagggaaagcaatcaaacattatgctttaacaaatgggaaaccaaccgcaactctagcctttttaggtaccagattgggtgttaggccatcaccagtggtggcagcattttcatctagaggaccaaatttcctcacacttgagattctcaaacctgatgtggttgcaccaggggtgaacatccttgcagcctggactggagaattgagtccatcaagtcttccaacagatcataggagagtgagattcaacatattatcagggacttcaatgtcatgccctcatgttagtggaattgctgccttgatcaaggccagacac

SEQ ID NO: 204655 - DNA, 366 bp, Gossypium hirsutum
tttatatttttcctctccaattttccgtcactttcccgagaaaatgagagaaatccttcacatccaaggtggccaatgcggcaatcagataggagccaagttctgggaagtcgtatgtgccgaacatggcatcgattcaacgggtcgatatggtggtgactcggagctccagcttgagcgaatcaatgtttactacaacgaagccagttgtggccgttttgttccccgcgcagttttaatggatctggaacccggaaccatggatagcgtaagatccggtccttacggacaaattttccgacccgataacttcgttttcggacagtccggtgcgggaaacaattgggctaaaggacattacactga

SEQ ID NO: 204656 - DNA, 245 bp, Gossypium hirsutum
agtttataagatctttgcaaagcgcgaatcttcatcacgggaaataggtcctatgataaaggggttaacattcctaactcgacgaccattctatatgagcttcttccgatttccatcgagatgggaaagaggaactcgactggaatttggaactttacaaacacgggagtggtcagtcacaatgagatattaaaaatgttccgtgactacattgaccctaacatcacctggaagaacttcaatct

SEQ ID NO: 204657 - DNA, 327 bp, Gossypium hirsutum
cagataaagctaagattgaatcagaggcattaatgtaccggaatttggcagggtagctggagtctgatctcaagagtctttcagatgcttacaatagtcttgaacagaccaatatccacctagacatagaggcgaattctctgaagagtgtagggacatcaacatcttccgatatcgacgcaataaaagctgatgctagggaagaagcccagaacgaaagcttagctgagctgtatgatttactcgtgtgcctctgacaagagcatatcatggtagactaacggaacgcaaggatttttcaattaggctaggatgtagacaaactgt

SEQ ID NO: 204658 - DNA, 377 bp, Gossypium hirsutum
ctccaaaccttattcccctttcaacaccaagctcatccggatctgtgcttctgttgttctcttcgtcttccttctcattaccaccacctcttccttttccaaatcccccatttcacaatcccatctctccaactccacacaccctgtcgacgacagtgaaccatccccactagattgcccatcccttcccttgaccccaacatgcaccaaaactccaccttctctagccaatgccctcatccactatgccaccaccaacatcaccccacaacaaaccctcaaggaaatctcggtttccgctagagttttagagaagaaagccccttgcaacttcttggtattcgggttaggacatgacagtctgatgtgggcaagtc

SEQ ID NO: 204659 - DNA, 372 bp, Gossypium hirsutum
attcctttctgttaatgataaatccaatgataagaattctgagagaatgttagctcatctggggatgagcaaatcgagtgatcctgataatgcaagtcaatgcagctcaatttaccatcacgagagaggttttagttctcattcaggagaagaagggagctccggaacggttcgaaagcagtcttcattgtcatatggaggactagtgacggcctctcccttagttggtctgccagaaatttcacatcttgggtggggtcactggtttactcttagggatctcgatcttgccacaaatcacttcgcagcagagaatgtgcttggagagggtggatatggggtggtttacaagggtagactgatcaatggaac

SEQ ID NO: 204660 - DNA, 364 bp, Gossypium hirsutum
catcatcccagtattgacatttttgaagcattcgactagctgctgcttgtgaaacgaggaggtcgggttatatacggagggaaacttggagtgcgctcgcagattttgatagactatttccagagcattgatggcattccctttattcctgatggatacaacccggccacctggatgcttgaggttacaaaccctgcaatagagcatagaactgatagagactttgcagatatataccaaaattctgaacaatatagggaagtggaaggttccattacacgtttgagtgttccaacacctgattcacaacctttaaaggtttcttccatctattcacaagaccaactgtctcagtttctgattt

SEQ ID NO: 204661 - DNA, 367 bp, Gossypium hirsutum
  unsure (1)..(367): unsure at all n locations
ctcatcatctttctttctccccctaagttctcacttcatatatactttatatcaacgatgtcggtaaaagagtgcggcaatcacgggaaataccgccggaaaatcttccggcgaatcatcgccggcatcctaatcttcattataatcgttctgataacaattcttctcatatgggccatcctccgtcccagcaaacccaggttcatcctccaagacaccaccgtctacgctttcaacgcctncacccctaacctcctcacctccaatttccaagtcactctatcttctcgaaaccccaacgacagaatcggcatttactacgaccggctcgacgtttacgccacctaccagaaccaacaaatcaccc

SEQ ID NO: 204662 - DNA, 351 bp, Gossypium hirsutum
agtttataaagaacgtgaaaaagggtccgtttgcagagcattcgccactgttaggatgatatcagtgcagttcctaattggaagaaggtgaatagtgcgatgcttaatatgtatcaagctgacgtgctcgaaaaggtccctagtatgcgatacttcctttttgcctgcctcattaattgggaatgatcttggctgcatcttaatggacacaggctggggcaccaaaagaatactattttccacctgatttcatcaacaggtgtggaattagaaaattatcctatgatgattctatcttaccatgaatttatttagatgcatctgcccattctaatcatctatacaagtgtt

SEQ ID NO: 204663 - DNA, 371 bp, Gossypium hirsutum
tatggcaccagctagggtgaacgatcaatacctgacaaagcttcttctgaagatcaatgctcagcttggaggtcttaattcaatgctaactattgagcaaacaccttcaatccctatgatttcaaaggttccaactatcatccttggaatggatgcatatcatggctctcctgggcagtctgatgtgccttcaatagctgcggtggctagctacaggcaatggccattgatttgccgatatagggcatcagatcgtacacagtcttcgaagcttgaaatgatagattctcttttcaaaccagttttctgaccaatgggatgagggtattatgacggaggctcttctagactttcatacaagttcaaggaaa

SEQ ID NO: 204664 - DNA, 364 bp, Gossypium hirsutum
aactcgcacccaaaaaatttgcagctttggtcaacctaacgatgtcgtacgacgacgtggagatagaggacatgcagtggaacgaggagttacaggcatacacatatccatgcccttgcggcgatctttttcagataacaaaagaagagctcaagatcggcgaggaaatcgctcgttgccccagctgttctctctacatcaccgtcatctacaacgccgaggatttcgccgacagaaaatcaaacaacaatcttgagcctccaaaacgacaagccgtcgccgttgcttgagacctttaagatggcaaatggcaaacattacacttgagtataactggttttatagcagattgcaagaatgtttt

SEQ ID NO: 204665 - DNA, 451 bp, Gossypium hirsutum
cgtgtatttagaaggtgaatatgggtccgtttgcagagcattcgccactgttggaggatatcggtgcagtgcctaattggaagaaggtgaatagtgggatgcttaaaatgtataaagctgaggtgctcgaaaaggtgcctattatgcagcactttctctttggctggctcattaagtgggaatgatcttggtttcatctttatggacacaggctgtggaaccaagagaatactattttccacctgatttcatcaacagttgtagaattagaaaattatcctattatcattctatagtaccatgaatgtatttagatgtttctgcccattctaattagctatacaggtgttgtcactgaacccccacctcttttccttttttttctcttttttggatgaaaagtcacaggttttatttaaatgcttaatgcatggaacttatgttttgccat

SEQ ID NO: 204666 - DNA, 369 bp, Gossypium hirsutum
gcccattccactacttctgccacctctcgtagcactaggaggagtagtgggtcaggattcaccttcaggttggaggaacgtgctgaaaagaggaaggagtttctttcaaagctagaagagaagatccatgctaaggaagtcgaaaagaataacctgcaggcaaaatcaaaggagaaccaggaggcggaaatcaagcaattaaagaagagcttgacttttaaagctacaccaatgccgaatttctacaaggaacctcctccaaaagttgaacttaagaagataccaactacgcgtgcaatatccccaaagctcggaaggaacaagaataatgttgctgcaacaaataacccttcggaagttgatggttct

SEQ ID NO: 204667 - DNA, 370 bp, Gossypium hirsutum
tttctctccaaagcaaaccgtctcttttgctctacaatcatcacaaatggcgtcttttactacgttatctcaatcgcctccaaagctattgtttcgtcagttgttcgagaaagaatcatctacttatacttacctgcttgctgattgttcccacccggataaaccagcgcttttgattgaccctgtagacaggactgttgatagagatttaaatttggttaaagaattggggttgaagcttatttatgctatgaacactcatggtcctgctgatcattgtactggaactggcctcatcaagggcaaggtgcctggggtcaaatcccgtattttaaaagccaattgttccaaagctgatgtttttggtgaa

SEQ ID NO: 204668 - DNA, 370 bp, Gossypium hirsutum
ccctttcataccaaaaccccttcaacaatggcgattacgaagcaacatttgatcccgcttttcgctatctcatttctcttgtttttccagctccattgctcaacaacttcagcccaggctcccgctcagtctcccgcaccacctggtccaccagacgtcaccaaaatcctgcaaaaagccggccaatactccgtcttcgttcgtcttctcaaatccacccaagtctccgaccgtctcattggcgagctcaaagacacagatgatggggagaccatttttgcccccactgataaggctttctccgccctcaaatctggtgccttgaattcactcaacgatgaacaaaaggttcagctggtgctattttacg

SEQ ID NO: 204669 - DNA, 260 bp, Gossypium hirsutum
tttattctggagagacccaatagccaccgctttatttgtaattgtctgtctggctgctgctatagtttggtatgtcacacctttccaggttgtggctcttctagcaggattttacattttgaggcatccaatgttccgccataagctttcttcagtgcctctcaatttcttcaggaggttgcctgcaagaactgattccatgctatgaacaagaatgatatcatgtgccagttcccagaagtgggatggagttcggattt

SEQ ID NO: 204670 - DNA, 147 bp, Gossypium hirsutum
tagctgatatctgttcatggtatgctttctcagctgagataacaggcgcataataagagagcatgaaatggatccgaggatatggcacaagattggtttggaactctgtaatgtctacattaatggctccatcaaaccttaaagaag

SEQ ID NO: 204671 - DNA, 326 bp, Gossypium hirsutum
aaattttcactaagcacgcattgccctctatggtatggctatgcaagcggtcgtcttaaatggcttcaaagactagcatatataaacaccacttgctatcctttcacatcccttccactcattgcctattgttcactaccagcaatctgtcttctcacacgaaaatttatcataccaacgctctcaaacctggcaagtgttctctttcttggccttttcctttccattatcgtgaccgctgttctcgagctccgatggagtggtgtcagcatcgaggacttatggcgtaacgagcagttttgggtcatcggtggcgtttcagcgca

SEQ ID NO: 204672 - DNA, 416 bp, Gossypium hirsutum
ctcgtgccgcgagttttttttttttttttttcctctctgtggaaagtacaagcttaaaagaggacatgagttttcattcacttacgcatataattcatcgacgttacattcgccgaggaaaacttttaagctatatggtgaaccacagtccccttcggcgattagtgctcggtcattggcggccatgtgttcgatgattttgtatatcatttcaatatcgtccggggcatggcaacggtcagcgatttcttgaagcgtcaatgattcggcagggtcttcacagctggcctcgttgagcaccgctaaaacccgcttttgtagagctaatacttcaccagcagcttttttcccagcttccacaccgggttgatgataagcattgatgttgacaagcgaggcgtaaattccaactgctc

SEQ ID NO: 204673 - DNA, 408 bp, Gossypium hirsutum
cctcgctctaagaaaaaaacaattatggcaagcaaagaacgcgaacacgagcacagagaagatgaagaagctcctgccgccgaggatgaagacactggagctcaagtcgcccctattgtcaagttagaggaagtcgctgtcagtacaggcgaggaaaatgaagatccgatcctcgatctgaagtcgaagctgtatcgatttgataaagaagggaatcaatggaaagagagaggtgctggtactgtgaagctgttgaagcacaaagagacaggaaaagttcgccttgttatgaggcaatctaagactctcaagatctgcgccaatcatctagtgttgccgacaatgacggtgcaggagcacgctgggaatgataaatcgtgcttatggcacgcctctgactatgcagat

SEQ ID NO: 204674 - DNA, 447 bp, Gossypium hirsutum
cgagaatccctcccgcctgcccactctatttgtcttgacgtcttgcggtcctggggttaaatcatgctgatgctctggtgactcgatcattcgccggttagtattacggctgcacatccaatgtggagactacgtatgttgcagtccgttctctggatgaaaaccaccttggtacatatcacacttgttttcgggatactcttttgcctacacatctatggtacccacttccccatttcttgcagacatggctactaaactaccttgctgggactttgctttacctcatctctggtttcctttggtgcttctatatttactacttgaaacgcaatgtctatgttcccatagatgctatccccacaaataaagccatgctcctgcaaatctatgttgctatgaatgccatgccatggtactgtgctcttccatctcttccgaatacat

SEQ ID NO: 204675 - DNA, 350 bp, Gossypium hirsutum
gtgaaatcatggataaagactagaatagacagactgaaggggtgggttgacaggaatctacaacaagaggtatgggatccgcaagcgaataaagaacgatttgctccctcttctgttgaagttttgcgaattgtagatgaagctttagaagcattctttttgttaccaatatctatacatgcagcattgcttcctgatttaaccaatggtatcgatagatgtcttcagcattatatatcaaaggcaaagtctgactgtgggacccggagtacttttgttccctcaatgcctgctttgactcgatgttcatcacggtcaaaaaggttcgggttgaatttaaaaaaaaggag

SEQ ID NO: 204676 - DNA, 305 bp, Gossypium hirsutum
gaaaaaagaattcagctataacaaaattcttaaggacctggggaaagcattttgttgtaatggcactgtagtccaagaccctgaattacggcaggttattcagcttcaatgcgatcaaaggaagaatgtttccaccttccttgctcaggccgctattgtgaacaaggataacatcaaaatccacggcttttaaagttgcaacggctataatttctttcacgactatcctattctgtaactcctatatatgcaatgttattattatgcttattgtgggtctgatactgatatatgcaccctgtgac

SEQ ID NO: 204677 - DNA, 419 bp, Gossypium hirsutum
aagggatcccaccagaccaacaacgtctcatcttcgccggggaacagggcgaagatggccggaccttggccgattacaacatccagaaggagtccaccctccatctcgtcctccgtctacgtggtggcatgcagatcttcgtcaaaaccctgaccggcaagaccataactttggaagtcgaaagctctgacaccattgacaacgtcaaggccaagatccaagacaaggaaggcatcccaccagaccagcaaaggctcatctttgccgggaaacaactcgaggactgtcgcaccttggccgattacaacatccagaaggagtcgaccctccatttggtattgaggcttcaaggtgggatgcagattttcgtcaagacgttgactgggaaaaccataactctggaggtggagagttccgat

SEQ ID NO: 204678 - DNA, 426 bp, Gossypium hirsutum
aactagtctcaagtttttttttttttaatcagttcatatggaagcagggagacaaagggagcagtgaaaatgtcgaaaaaaggtttgatggagcaagacttaagtaaactggatgtaactaagttgcatccactgtctcctgaagtcatatctcgccaggctactataaatattggcaccatagggcatgtcgcacatgggaagtcaacagttgtgaaagcaatatctggggttcagactgttcgtttcaagaatgagttggagagaaatattactatcaagcttggatatgcaaatgcaaagatatacaaatgtgaagatgaacgatgccctcgtcctatgtgctacaaggcatatggaagtggaaaggaggatagtcctctttgtgatgtgcccggctttgaaaactgtatgatgaagttgctg

SEQ ID NO: 204679 - DNA, 402 bp, Gossypium hirsutum
ggaaagaaaaaaatgaagctcttgtttctaactttgctgggttgttggcttcttctatgttcttcagtttttgcaccaacaatggctcagcctcgttcacctttttgtgaagggaaatgcaaagggaggtgcaataaagcggcggtttgggatcggtgcttcaaatattgcggcatatgttgcgaggagtgtcaatgcgttccgtccggtacttacgggaacaaacacgagtgtccttgctacagagataaggtgaacaacaagggcaaacccaaatgcccttgaaaatgaaatatattcgagttcgggatttaatcaagcttaaagatcgaggacgaagaggccatatatatatatatatgcatgttgatgatgatgttattataaaaataaacttgtttt

SEQ ID NO: 204680 - DNA, 400 bp, Gossypium hirsutum
catcattcagttcaggggctttcataaaactcaagacaatatttagaaagaaacttcaaagaaagaaaaatacaagtctgcaaatatccagaaatgcaacagcagttacagcaaaagtaaatgactaattctttcacatccaaaacaggaaaaaaaagcaccagcaactgggagttgagattttgaattgccaaaatggcaataactttccttctccttagtcctcatattcgggttcctcttcttcttcttcgtactcttcatcatcagctgttgcatcttggtactgctgatactctgagaccagatcattcatgttgctctcagcttcagtgaactccatctcatccatgccttcccctgtgtaccaatgcaagaaggccttcctcttaaacatagc

SEQ ID NO: 204681 - DNA, 356 bp, Gossypium hirsutum
ctaagaacatgatggcagtactgtttgtataggttggatgtatggtttttggaataattgttcttcgttttctctatcgtttcatagacaacaatggcctccctcgaaactggccatttgttgggatgattcccacgttacttctcaacatccatcgccctcatgacaaagttgcccaagtcctcagacgaagcaatggtaccttcttttatagaggactttggtttactaacaccagcttcttagccaccttcgatcctgagaatgtgcgttatatattgagttccaacagttctgtttatttgaaaggtcctgaatggctgaaacagtttgatatcttcggcgaagcacttttc

SEQ ID NO: 204682 - DNA, 408 bp, Gossypium hirsutum
gggatttgtcccttcaactttccagcaatgatgcccttatggatgttccctgtcgcagttacatgtggtaatacctttgttttaaagccatcagaaaaggatcctggtgagttcaacataataattgtatgatgtagtatcctggtgagttcacatatatggaggacaaaaggttgctataacttgttttattgtggctggtcgttaaagatcttatttggatgttgatgtgccatacatgggtgggacattataattactattgttactaccttaattttttcagttacataagaaaaagacaacttgggttgtctgtcctttgttcttacatgacttcactttactctccaactcttttcttaaaataccattttgttactttccaggggcatccataatgcttgc

SEQ ID NO: 204683 - DNA, 416 bp, Gossypium hirsutum
aggagatgcagccacttctgctggtaattccgcggcagaggaagaggatgaagcaggaaatgaggatgagtcaattgtacatcattgtgctagtgttggtgatgttgagggtctgaaaactgcactatcctctggtgctgacaaggatgaagaagattcagagggaaggacagcattacattttgcatgtgggtatggcgaggtgaaatgcactcaaatccttcttgaagctggggcaaaagtggatgctctggacaagaataagaacactgccctccattatgcagctggctatggaaggaaagactgtgtggcccttctactcgagaatggtgctgctgtcactctccaaaacatggacggcaagactcccatcgaaattgccaagctcaacaaccagcacgaggtactaaaat

SEQ ID NO: 204684 - DNA, 386 bp, Gossypium hirsutum
ttcatgccccactacatcacgggttttatggtgggactcgaaaagcatgctgtggagggggtgggccatataatttcaatatctcagcaaggtgtggtcatcctggatctgaagcatgtaaagatccttccgtttattcaaattgggatggaattcatctaactgaagcagcctatcgccatatagccttggctttgatcaatggctcctcttcccttccacccctcatatcctctcctctttcagattgaataacccccctaacatgaacagtcaatcaagggtctcatttagatgttcattagagatccaggaccaatgatacatgtatgcattgactgtacttgaagattttatttgctttataatttagcctcatgattttg

SEQ ID NO: 204685 - DNA, 364 bp, Gossypium hirsutum
gatttttcatggagtaccatccttctacatagggttcacgtatggttgttcatagatcacgcaaacttcaaagtctcattaaggatgcaaaaaaattatataaaaggactactcacttacaatcagaacccaatcagccgcagtataagcatgttggggtatttctgcacagggtcgatctggaggatcattatggaaagaaatcataacacataaaggagaatatgatattagagcgatctgaaacttcattggcgacacaagaagctcaagcagcttttggcgctttcaagtctcgtgattgcgcagtacatgcttttcacatgaaacaatgaatttacccaacatagtgggccacagaact

SEQ ID NO: 204686 - DNA, 405 bp, Gossypium hirsutum
cggaattgttgggaaatacggtacccgatatggtgccagggtgaggaagcaaattaagaagatggaggtcagtcaacacagcaagtacttctgcgagttctgtggaaagtatgcagtgaagagaaaggctgttggaatctggggctgcaaggattgcgggaaaatcaaagccgggggtgcttatactttgaacactgctagcgctgtgacggtgaggagtaccattagaaggttgagggagcaaactgagagctgagccaataacattagcatacccaactttcgtaggatgtttttgcatgtttaatctaaacgtattgaaatctttcttttgacaatgatgttattttgtatcaggatctggtgttgaaactttatatgagatattgagttgttggtttcttc

SEQ ID NO: 204687 - DNA, 429 bp, Gossypium hirsutum
gaaacaccaactgaaacataacaacaaaaatggcggccgggaagaagacgaagaagacccatgaaagcatcaacaacaggttggctctcgtcatgaagagtggaaaatacactcttggttataaaacagtgcttaagtctctaaggtcctccaaagggaaactgattattatttccaacaattgtccacctctgaggaaatctgagattgagtactatgccatgctttgtaaagttggggtgcatcattataatggaaacaataatgatctgggaactgcttgtgggaagtacttccgcgtatcctgcttgagtatagttgatccaggtgattctgacatcatcaagtctctacctggtgacaattgagtcgtttgacagcagaacaatgtttgtttcttattatattggtcctcgtagccttcttatc

SEQ ID NO: 204688 - DNA, 331 bp, Gossypium hirsutum
ctttgctgcaaattgtcctaatcttatcagaaagtctagggcaggggataacatgagagtgatccttcatgttcaaggtggacaatgtgggaaccaaatcggttccaagttttgggaggttgtttgcgatgagcacggcataaattcaactggtaggtacattggttgctcggatctgcagttggagcgtgttaatgtttactataacgaggcttcatgtggtcgctttgatactcgtgctgagctcatggacttggagcctggtacgatggacagtgttcgaactgggccttactgccacattttcatgcctgacaactttgtttttgga

SEQ ID NO: 204689 - DNA, 412 bp, Gossypium hirsutum
cccaacctggggaagtcgttaagcctgatcaatgcaaagggtaaacgatgaaggaatgccgatttatcagaggccatttatgagaggtaaactgtacattcagttcactgttgacttccctgactcgttgaccccggaccagtgcaaggcactagaggctgtgcttcctcccaaggcatcggttcagctgactgacatggagctggatgagtgcgaggaaacaaccctgcatgatgttaacattgaggaagtgatgcgtaggaaacagactcaagctcaacaagaagcttatgatgaagatgaggacatgcatggtggtgcgcatagagtacaatgcgctcagcaatgataaaaaaaagccgaatgtccgagacacaaacggtggtttttggcgatggaatgtactgtggtt

SEQ ID NO: 204690 - DNA, 408 bp, Gossypium hirsutum
ggattttgacgttttcaatgcgcttgatgtcatgcatagggagtcattcctcaaagaattgaaattcggaccaggcgatgggcaacattactactacctctataattatcggatactaaatgctttgagaccatcagaacttgggcttgtactcttatagttcaatatgttccaactttgttcgggcagttttgttcccaatttgttgcatcatattaattgctccgctgccatccacagccaaggattcggtgtgcagtgcaagcaaaagtagcctttgctgcgtatctgagcttgaattgcctacgcagaatacaatattgcctgtgacaatgcacattgatcaatggacatcaatattgtttagctttttaataaaaaacagtgttcttaaaaaactctaggggg

SEQ ID NO: 204691 - DNA, 414 bp, Gossypium hirsutum
attatcaacaaaagttctttgattgagtatcagtaggtaatgttcttttcaaggtaaaaacaacaacaacatgatgaacatgaagacaaggattctattgcatccccatggaaatatttacaggtactcaaagaaactacgcagaaagtccagatattttacactatgcttattcccattataaaggccaacaagatttgattctagcactgaagtaatggaactcacatctcggcaaccagtttctctgaatcactggcgtcagatagtgtacccttggtccaccttttcagcatctccaatgctgccttgggctggtccataggaaccatatgacccgcatcatgaaccttaaggaaaccaagagctccatgagttttcaagactccggcttctgcaccatctactatgaaa

SEQ ID NO: 204692 - DNA, 424 bp, Gossypium hirsutum
ggattcccgacccgaccctacttcatggaccggcgtcacgggcgacgcgaattctgattctatcgtttccctcaacttagatcgtctcggccttgtcggagacctcaagttccacactctcactcccctcaagaacctccaaaacctctccttgtcaggtaacgctttcacgggtcgggtcgcacccgcattggggtcgataacctctctgcaacatttggatctgtccaataatcagttcatcggcacgatccctggccggatcatggacctttacgagttaaattacttgaatttgtcgggtaacaagttcgacggtgggttaccggctgggttccgaaatttacagcaattaagagtgttagatttacacaacaatgcgcttcgaggcgatataggccagttattcactgagttaaggaat

SEQ ID NO: 204693 - DNA, 423 bp, Gossypium hirsutum
gtgatcatccatgggttcaggaaactggcttagatcattgatttgtttaaagaaatataaaccaaacagatccaaacaagcaaaggtacactcgagtaatgaaaaatcaaatggtgatgaaagggtagaagaacatgagggtcctgaagtggcagcggctgggagttcacaaagcagtcctggaattgccgttgaacaaagagcggctgctaaaattcagaaggcatttcggtcttacagggcaagaaaagcagtccgccggctgagagatgcggggagattcaagaacatattgatacagggacatacagtgaagaaacaaacaacaagcacgctaagctatttacattcatggtgcaatgtccagtctcaaatccgagctcggagaatatgtatggttacagaaggcaggcttaaacaaaa

SEQ ID NO: 204694 - DNA, 415 bp, Gossypium hirsutum
ctcctattcttttctctataatgtctccaaaggtcctcgggtcctctcctactctttcttctttcttttcaggtgggctttgagtttcttgcgctcatatttgctagcagttgtgtgatatcttggtgcattctacttaggaagcttgatgggttccagattcccatctcatcaactcatcaatgggctttatgtgtcaagcaggaaagagcagcctaaagaaaggactcctaccatgagctcattaccaatgccctatactggtggagatattaaaaagtctgaagaactggggaaaatgttcgatatccctgtagatggttctaagtcaaggaaatctgggcctataagcagcgctccttcaaggactgactcttttgtggttgctgcttcgcattctggaccgatcatacct

SEQ ID NO: 204695 - DNA, 427 bp, Gossypium hirsutum
tatggtttcatccctcgtactctttgtgaagacaatgatgccttggatgtcctgattattatgcaggaaccagttcttccagggtgctttcttcgggctaaagctataggtctgatgcctatgattgatcagggtgagaaagatgacaagattattgccgtatgtgctgatgatcctgagtatcgtcactacaatgacatcaaggaactcccacctcaccgtttggctgagattcgccgcttctttgaggactataagaagaatgagaacaaggaagttgctgtcaatgacttcctgcccgcctcaactgcttatgaggcaatccagcattccatgaatttgtacgcggactacattgtggagagcttaaggcggtagttgttcatagcattccgtctttatagtatattacatagttatgaatatg

SEQ ID NO: 204696 - DNA, 195 bp, Gossypium hirsutum
cttagtaggcttcctgatgatgaacccatccttgacaaggggcctaacgttctgcctggagttggccatggagatttcgttgatttcattaggatcgagccagaccttgccgcgaccgcacttgaggacgctagcggcaagccgcttctgcagcttcaaagacaccattgctgttttccggcttctgtgaaatgg

SEQ ID NO: 204697 - DNA, 380 bp, Gossypium hirsutum
cttcaatgtacctgctatgtatgttgccatccaggctgggctctctttgtatgccagtggtcgtacaacaggtattgtgctggattccggtgatggtgtttctcacaccgtgccaatctatgaaggatatgcccttccacatgccatcctccgtcttgaccttgcaggtcgtgatctaaccgatgccttgatgaagattcttaccgagagaggttacatgttcaccaccactgctgaacgggaaattgtccgtgacatgaaggagaagcttgcttatgttgccctggactatgagcaggaactggagactgcgaagagcagctcatctgttgagaagaactatgagttggctgacggacaagtcattactattggagctg

SEQ ID NO: 204698 - DNA, 366 bp, Gossypium hirsutum
catggtttttgcgatttgcgtttctttttgggcggtgcagaaagtgattttcttggacaattggaagactggatatgggattcatggattctggcctttcagttggaactgaaggcatcatctattgtgcttgtttttttaggctgctataattcgaactatggtttcgattcagctgggaatttgatatcaattttagatgttgtaatgtactttgggcaaaatactgagcttatagaacgttaatctgctataagttgacatccatgaaagatccatttgctaaagactaactgaccgactaaactgcttatgaggcaatccaagcattccatgaataaatctgcggggggggcccgggaccga

SEQ ID NO: 204699 - DNA, 430 bp, Gossypium hirsutum
tcgagttctcgagttttttttttttctgttctctttcttcccccctccccctgtcacatgaaccctaaccctacctcaccaatcaggatacaacatgaagggaggtaaatccaagtcagatactaagggctctaggctcgccgtgaacaagaaatctagcgccaaagctggaaagaaatcggggaaggcggctaaggatccaaacaagccaaagaggcctgctagtgccttcttcgttttcatgtaatcattcaaaattctatcctgtatatgtaggttttttttctttatatatttttggtttcaaggaaagctctggcgtttctattcttcgtaaaaacgccgatcgacgagggaggagttccgtgagcaatacaagaaggaacacccaaaaaacaaatctgtcgctgctgtgggcaaagctggtgga

SEQ ID NO: 204700 - DNA, 411 bp, Gossypium hirsutum
atattgccgaagctcttgcaaaattgggtgctacagaaagtgaaggtttacatttttcacccgatagacaaagggagctggggtttacgttctcatttcctgttcggcaaacatcgatatcgtctgggactcttataaaatggacaaagggcttctcgattgaagatgcagttggtcaagatgttgttggagaattgactaaagccatggaaaggattggcctcgacatgcgtgtgacagctttggtcaatgacacaattggcacattggctggtggaagatataacaacccagatgttgttgctgctgtgatattgggtacaggcaccaatgcagcttatgtagagcgtgctcatgcaattcccaaatggcacggtcttctacctaagtctggggacatggttatcaaca

SEQ ID NO: 204701 - DNA, 414 bp, Gossypium hirsutum
acgatatcgatttgttgaatcctccagcaggggttgaggggaagaagcacaagctcaagcgtctcgttcagtcccccaattctttcttcatggatgtcaaatgccaaggctgcttcaacataacaactgtgtttagccactctcaaactgtggtggtatgtggtaactgtcagactgtcctttgccagccgactggaggtcgagctagactcactgagggatgctctttcaggaagaagggtgattgatttgctacacaattgctttgaatatgggttcttttttttttttatctttgagatattggtctgaatttcatctttttttttctttttcttttttgtctttgtgcttcaagatgagttggtttttcttgtaagtttaaggatttgatgctaagcttgttacttaatg

SEQ ID NO: 204702 - DNA, 416 bp, Gossypium hirsutum
acaaggtccagagacaacaacttgctcgctaggttcgaggtctctggcatccctcctgctcctagaggtgtcccacagatcactgtctgctttgatatctatgctaatggtatcttaaacgtctctgccgaagacaaaaccactggacaaaagaacaaaatcaccatcacaaacgacaagggccagactctccaaagatgaaattgaaaagatggttcatgaagcatagaaatacaaatccgaatatgaagaacatacatagaaggtcgaggcaaataatgcattgcaaaactatgcatacaatatgaggaacacagttaaggacgatacgattgctgccaaactcccatcaactgataaaaagaacatcgaatatgctattgaacaagccattcaatggctatacagcaaccaac

SEQ ID NO: 204703 - DNA, 365 bp, Gossypium hirsutum
caacaacccaccaatatatgagccaaaaccacctaagccgccagtttatgcaccaccaaaggaagaaaagccaaaacctaaaccaccagtttatgagcctacggcacatgagccaccatacggtcactatccaggacattcacctttggggaagcctcaatagaatgctcccatcgactagccattcccaacaattgagctactataaaaattagtatttataataagaggaactgccggctgatgttctgatttattcttgtatggaacgcactaatgttttctttcatgtttgaagaaataccagttgctcatggctgtactcattcgaatgcttattctatatcttatttctttcttaaaaa

SEQ ID NO: 204704 - DNA, 405 bp, Gossypium hirsutum
cttagtttccctttttgtcccttgtttatttgatactccggcctcatggctgccgctgatgtcgagttccggtgcttcgtcggagggctcgcatgggccaccgacgaccgggcccttgaagaagccttcagtgcgtttggtgaaatcgtcgaatcgaagatcattaatgatcgtgagactggaagatcccgaggctttggattcgttactttccgtgacgagaaagctatgagggacgcgatcgaaggaatgaacggtcaaaatcttgatggaaggaacataactgtcaacgaagcccaatcgcgcaaaagtggatgcggtggctgaggatttggaggaggaaacggtgggtacagccgcggtggaggcggcggcggatatggtgggcgcccaggatgatattgt

SEQ ID NO: 204705 - DNA, 384 bp, Gossypium hirsutum
aggtcatcagggtcatcttctccagagtcaacaggatcaggtgaaacttccatatcgtctcactttggtggaatgaactatccttcactcttcagttcacgaccaactacttatggggcttcacaaccttcagagagatcaggtggaagtagatttaaccatccttcatcaatgcacgagggttatggttctccaattagagaagaacctccaccctatacatcacctgaacggtatgagtcttttgaaaatcccttagctggccgcgggtcccatagttttgaatccaaggatgatgatcgcatgtcttctggaaatccccaatttgggactgccctgcatgattttactggcagtggagatgatgagttgagcttaacaact

SEQ ID NO: 204706 - DNA, 424 bp, Gossypium hirsutum
cttcagtccagtattctaaggtgcattttttttcccttcgactttccgtcactttcccgagaaaatgagagaaatcgttcacgttcaaggtggtcaatgcggcaaccaaattggagccaagttttgggaagttatctgcaccgaacatggaatcgactcaacgggtcgatacaacggcgactcggagcttcagctggagcgtatcaacgtttactataacgaaacaagttccagccgctttgttccccgcgccatcttaatggatctggaacccggtactatggacggcgtaagatccggcccgtttggacaaattttccgacccgataacttcgttttcgggcaatccggtgctggaaataattgggccaagggtcattacaccgaaggagccgagcttattgattctgttctagacgtcgtc

SEQ ID NO: 204707 - DNA, 230 bp, Gossypium hirsutum
attctggtgatggtgtatctaacactgtcccaatctgtgaagggtgtgcccttccacatgccatcctccgtctagaccttgctggtcgtgatctcactgattctttgatgaagattcttactgagagaggttacatgttcaccaccactgctgaacgggaaattgtccgtgacatgaaggagaagcttgcttatgttgccttggactatgaccaggacctgaaaactgcc

SEQ ID NO: 204708 - DNA, 420 bp, Gossypium hirsutum
aaaaaaggtattccattaaagagacaaatcgggtatgagggttcaacattctacaaatgacacaagttctgatcgaactcaatataagtttcctaacagacgacaagaattaaaggcacaacgcagagccttttaaatcttcattatgatggtaaaattccaattatgctgtggctgggggaaaaacaaggtacaacacaactcttcatcaaaaacaaaaatcaataggtatgaatcaaactgacccggactccatctgtaatcgattgacatttatgctactgcgggcatgtccttgagccatggatccagtggcttaccaattgagtacactatgaaaccaatctccctcagctcatccgcgttcacgatgttccttccatcgaaaacaaaagccggcttttgcatgttgtcgtatat

SEQ ID NO: 204709 - DNA, 420 bp, Gossypium hirsutum
gttctatcaagccctgaggttattgaaactagagacgcggttttgcagaagctgcaaaagaataagaatgtacaggttgaaaacagtagtcctgatgcatctcaacagagtggcaattttagtgagacaaaacgagaaacttttgtatctgaggaaaaggtcagtgaaatcgtaaatgcggcagaaggattagagattacctccagcgaggacaacactgagcaatggttagaagaagcagaattttccagtggaagttccctgagcatcaagaaaaacctggaacatgaagaagatgtttcattcagtgatctggaagacgatgataccgatacttctaatagagcatcagtgcgtaagtcaacacagcatgacaaagctctttcatccagtggatccaatgactgggttcagctgaac

SEQ ID NO: 204710 - DNA, 288 bp, Gossypium hirsutum
cttcgatccaaatataacaagtccgagctgatttcatcgggctgttcttcattctcacctcaatctggctgaaccagttctactacatctttggattcctgttcttggtattcattatcctccttatcacttgtgctgaaataaccattgtgctttgctacttccaattatgcagtgaagattatctgtggtagaggagatcatatcatacatccggctcctcacctctgtacctcttccgctacgctacattctatttcttcacaaagcttgagatcactaagcttg

SEQ ID NO: 204711 - DNA, 412 bp, Gossypium hirsutum
cggcacgagcttctttggaatttgtaattttccgaaagctgaagtggccggaactgtggcctaacctcaggaatatataaaagggtgaagatgggaagaggaaagatagagataaagaggatcgagaacaccacgaatcgtcaggttacgttttgcaagcgcaggaatgggctgctgaagaaagcatacgagctgtcagtcctttgtgatgcagaagttgctcttatcgtcttctccacccgtggccgcctctacgagtactccaacaacaacataagatcaacaatagagaggtacaagaaggcatgttccggtacctcaaacacaaataccgtcacggaaatcaatgctcagtattatcaacaagaatcagccaagttgaggcagcagattcaaatgctacagaattcta

SEQ ID NO: 204712 - DNA, 391 bp, Gossypium hirsutum
tatctatccatgcatcatagagtgtttctagaggcatctgcgtggtgacgagttcaaccactgtttagctttgttcctcaatgaaaagggaaacaaccgaaggcgaatttcatctttgaaacgccattgatcttaaatgtgtcgcaaaactccagaaaattcgtcaaatgagtatttggatcctcatcctgcaaaccatcaaactgaacaaactgttgtatcatttgaatcgtgttaagtttcagttcaaaattatttgcaataatagcaggtctaactatactcgattcggctcctgttaaagtaagtttagcataatcatacatagtacggggagcaagattatgattaattggatctgcagcaaccatattaggaagttgattattct

SEQ ID NO: 204713 - DNA, 339 bp, Gossypium hirsutum
aagaggagaagaaacctgagaaaggcagagtacggtgagtgggttaaaatgcctgaatggccgaagtccatgtttactcagtctggctcgagcactaagccttaagccatatgacactggtgcatgtgccatcatcatgcagtaatttcatgggatatcataattatattgttaataaaaaagatggtgagtgggagatgtgtgtgtgcattcatccatgtagcattgctgaatctctttgatgcatagaagatcttaattgttataggttatgttatatcagttgttctagtgaaattaattttgaatggtgtatgtaatgtttaaaaaaaatatagt

SEQ ID NO: 204714 - DNA, 310 bp, Gossypium hirsutum
gttggcccttgcgaacagcttgatgctcttgcggagtgagcccagatgggggaacctaggggagccgccgactccaactaccgtccatgtacgatccatactagatctgaccaaccgcccatcctacctcttctacgttcttgacagcccatctttgtctcagtagagtctttcagtggcatgtttcggtcctcttccccattacttagaaaaagtgagccaccggttcaggtacatgatactatcattaccggctggacaattatacacccaaaccgtattttcaacgacccaattgcaagagcggagc

SEQ ID NO: 204715 - DNA, 426 bp, Gossypium hirsutum
tgggcattgagaatgtggtagatgagagcatcggcaaatggtctggaattcttcatagtgctatgtgccctgcttgctagatggcagttgtgtggatgcagaaccaactgattgagaatcatactcaagaccgcatattggactatgccaatcagctttgtgatcgggtgccaaacccaatgggagaatctactgtcgactgtggaagtctatcttccatgccaaccatttacttcactattggtggcaaagcttttgatcttacaccagacgagtacattctgaaggagggtgaccgtgctgaagctcaatgcatcagtggctttactgctttggatgtccctactactcgtggacctgtctggattttgggagatgccttcatgggtcgctaccacactgcgatcgattctggtaagcatagag

SEQ ID NO: 204716 - DNA, 390 bp, Gossypium hirsutum
ggaagaccattcaatctgatggcattgctggtctttaccgggggttgaatatctcatgtgctggaattattgtttaccgtggactttactttggaatgtatgattatttgaatcctgttgatttggttggcggattgcaggatagttccttggcaaggttcttgctgggtcggggtatcacaataggcgctggactggcatcttatccaattgatacggttcgtataagaatgatgatgacttctggagatgcaatgaattacaagagctcgatggctgcattttctcaaatcatcaagaatgatggtgccaaatctctgttcaaggttgctggtgcaaacattctgcttgcagttgcaggcgctagtatgcttgctggctatgacaagc

SEQ ID NO: 204717 - DNA, 410 bp, Gossypium hirsutum
aacagcgatagatcgggggagttcccatcggggtcgtctgggaaccggcgattactactcgcctgtgctaattccgagaattcggatgatttgatacggcagctcgtatcggatctcgattcctgttcgattgacgagcaaaagcaagcggctttggagcttaggcttctggcgaagaacaagccggagaatcgaatcaagatcgctaaagctggcgcgattaggcctctgatttcgttaatttcatcctctgatccctatcttcaagaaaacggcgtgacagcgattttgaatctctctttatgcgatgagaacaaagaacttatagcctcctccggagcaattaagccactggttagagctttgagaacaggaacttcaacggctaaagaaaacgcagcttgtgcttt

SEQ ID NO: 204718 - DNA, 411 bp, Gossypium hirsutum
tatatgttcaagattatgatgcaaaggattctaaaactcacgagggaatggacttgacaagggtgtcaactagggcactaattgcgaaatatgggcttgatgataacactgtggacttcattggtcatgcattggcacttcacagagatgaccgctacctggatgaacctgcattggatactgtaaaaaggatgaagctttatgcggagtctcttgcccgttttcaaggtggatctccatacatatatccactgtatggattaggcgagctgcctcaggcttttgcacggcttagtgctgtttatggtggaacatatatgttgaataaacccgagtgcaaggtggagtatgacgatgaaggcaaagtttgtggtgtcacatctgaaggtgaaactgccaagtgtaagaaag

SEQ ID NO: 204719 - DNA, 423 bp, Gossypium hirsutum
gagatcaaagatttcaatggtaaggaaaaggttaatcaattagcccctgcccttaagtcgagtttctttaagggtattgaattaaaacgctagatctaagcaatggcgacagattcatcaaatggggaacaaatgacaacctcaaagccaccacctttgacatctccattgagcttttctaagttttatcagtccaacatgaggatcctggttactggaggagctggttttattggttctcacttagttgacaaattgatggaaaatgagaaaaatgaggtgattgctgccgataattacttcaccggatccaaggacaatcttagaaagtggattggccatcctagatttgagcttattcgtcatgatgttactcagccgtgagtggttgaggttgatcagatttaccaccttgcgtgtcca

SEQ ID NO: 204720 - DNA, 418 bp, Gossypium hirsutum
cctcaatctgctgtctctgctttccaaattagggttggaggagccggtacttcaaacaagactgtcaaacttcccaagaacttcactttacttggtccgggaccaggttacacttgtggtcctgcaaaggtcgtgccatcgaccacttttctcaccccagatcgccgacgaaaaactcaggccctaatgacatggaatgtgacctgcacttattcgcaatttctagctcggaaaaacccgaattgttgtgtctctttctcgtctttctacaatgaaaccatcactccttgcccaacttgtgcatgtggatgccagaacaagaacaactgtgtcaagagtgattccaagtttcttaaaatggtaggattgaacacaccaaggaaagataatgctccactgcttcaatgcacgcaccaca

SEQ ID NO: 204721 - DNA, 409 bp, Gossypium hirsutum
tggactatgagcaggaactggagactgccaagagcagctgttctgttgagaagaactatgaattgcctgatggacaagtaattactatcggagctgagagattccgttgtccagaagtcctcttccagccatctctcattggaatggaagctgctggaatccatgaaactacctacaactctatcatgaagtgtgatgtggatatcaggaaggatctctacggtaacattgtgctcagtggtggttcaaccatgttccctggtattgcagaccgtatgagcaaggagatcactgctcttgccccaagcagcatgaagatcaaggttgttgcaccaccagagagaaagtacagtgtctggatcggaggatctatcttggcatcactcagcaccttccagcagatgtggat

SEQ ID NO: 204722 - DNA, 418 bp, Gossypium hirsutum
gagagagagagagatataattgaaagaaaagagaaatggggctgctagagaaactttgggatgatgtagtggccggtcctcaaccggaacgtggccttggccggctgaggaagatcaccaccaccccacccttgtccaccaaagatgaggcttcatcaatggcgatgccgacgagtccgacgacacctgggacaccatcgacgccggtgtcggctcgtagggacaacgtgtggaggagcgtgttcaatccaggtagcaaccttgcaaccaaaggtattggcgctgaagttttcgacaagcctcaacttaactctcctactggttatgactggctttacagcggggagacccggagcaagcatcaccgttgattatgcggtggctgacggcggcggatggtagcaaaaccactagcaga

SEQ ID NO: 204723 - DNA, 416 bp, Gossypium hirsutum
caatggtggcctaatggactatgccttccaattcattatcgacaatggtggcattgacactgaaaaggattatccttaccttggcttcaataaccaatgtgatccaacaaaaaaaaacgctaaggttgttagcattgatgggtacgaggatgttccaaataacgagaatgctttaaaaaaggccgtcgcacatcagcctgtgagtatcgccattgaagctggtggtagagctttccaactctatgaatcaggagtttttaatggtgaatgcgggttagctttagaccatggcgtggttgcgggcggatatggctccgatgattacggtcaagactactggattgtgaagaattcatggggcagcaattggggtgaaaatggatttataagaatggagcgtaatattaatgctaata

SEQ ID NO: 204724 - DNA, 354 bp, Gossypium hirsutum
ctaaaatgcttattgatggtgctgtagagtatgaagatggcacccctgcaactgaagctcagatggggaaagatgtggtgacatttttgtcatgggcggcagaaccagaaatggaagaaaggaagctgatgggttttaaatggatatttgtattgtcattggctttgcttcaagctgcttactaccgacgcttgaggtggtcggttctcaaatctcgcaggctggtacttgatgttgtgaactagcctcctccccctcaagtttctcgctttttgtggatttgattcggcaataattgcttatcaagatgttctaggttctgccatgaccaaagtggtgaagtagtcttttttt

SEQ ID NO: 204725 - DNA, 375 bp, Gossypium hirsutum
gttatcgtcagataaaaaacaaaccttacccgaagtggcgttattgtcgtggtgttcctgatcccaagattaggatttatgatgtgggaatgaaaaagaagggtgtggatgagttccctttctgtgttcacttggtctcttgggagaaggaaaatgtctctagtgaagctctggaagctgctcgtattgcttgcaacaagtatatggctaagtatgctggaaaggatgccttccacttgcgagtccgtgttcacccattccatgtcttgcgtatcaacaaaatgctttcatgtgctggagctgataggctccaaactggtatgcgaggtgcttttggcaagcctcaaggaacatgtgctagagtagccattggtc

SEQ ID NO: 204726 - DNA, 397 bp, Gossypium hirsutum
ttctgcctttgctttttgcttcttactctcaaccaaaaatgactgctcagggcggcaaagagatcgaagagatcctggcagctcatctcgaccaacaaaaaatcgattccgagataccagagcaacctgttgttgaagatgacgacgaggaagatgacgatgacgatgatgatgaagatgatgccgaaggtcatcatgagggagaaggagatggaactggtaggtcaaagcaaagccgaagtgaaaagaagagtcgcaaagctatgttgaagcttgggatgaaaccgatcccttgtgttagccgggtcactgtgaagaaaagcaagaatattttatttgtcatcttaaaaccagacgtgttcaagagcccaacatcagatacttatgtaatatttgg

SEQ ID NO: 204727 - DNA, 431 bp, Gossypium hirsutum
aaaaagggctgctcttggactttaatggtggaggagctggggaatctcaagcatgggagtgagtatatagacttattctcttttaataatattccttctttaatctacttattgtgtttgaggccatgagttcaaagaaatcaattcagaatctgggggaaaccattcattcactgctgggatttaagtcacatctaacttcaacttgggtgaagtcagtttgtgagatagtaaagaaattaccaagtgggaacgaaaaggatgatgaatcagctgcaaaagaaatttccaagataaaagaagaaatggctgccttaacccactgcataaaccaatcgaacatacagaggaggcagttgttgcatgatttgttggacttgaaagggaacatccgtgtattttgccgagtgcgaccattcacgttggaggaa

SEQ ID NO: 204728 - DNA, 314 bp, Gossypium hirsutum
tcttaatgacattcatattgatatcatggattatatgggggctgccgtttgtaccgatgctgcattcaaaactatgtgggcagaatttgagtgggaaaacaaggttgctgttaacactgtaatccaagatgagaaggaattccttaatcatattatcaagtcaaccaatatgaagtgtctcacaccagtatctgcgctagatgatgagtgcggattcctggcagctaacctttacgcgaaaagtgtgtttggggaggatgccttggtaaatttgagcgttgaaaaacaagcagatgggaaacttagtgggtaca

SEQ ID NO: 204729 - DNA, 335 bp, Gossypium hirsutum
  unsure (1)..(335): unsure at all n locations
ctcgtgccgcaaatctaagatttctatgttttgcagagggctagggtttttgtatctcataatttgaccacataaatactcaaacccccacactcaattctcccctcttttcagctttgcttcaaatttcgatctcatttcccctaaattccgtcttttttcttcaaattccccacaaatggccgtcactttctcagatctccacaccgaatctggccttaaatcccttaacgacttcctcaccggcaaatcttacatctctggggataagctgactaaggatgacatanaagtttatgctgctgttttgaaaaatcctggtgattcatttccca

SEQ ID NO: 204730 - DNA, 348 bp, Gossypium hirsutum
gcaacccttaaagttccagctcatgtacctgccccttctgaggatgctgagcaacttcgtaaagcttttgaaggatggggtacaaatgagcaattgattatcgacattttggctcacaggaatgcagctcagcgcaatttgattcgtaaaacttatcgtgaagcttatggggaagatctccttaagtctttggatgaggaactttcaagtgactttgagcgagctgtggtgctgtttactttggaccctgcagagcgtgatgcatttctggctcatgaagctacaaagaggttcacatcaagccattgggttctcatggaaattgcttgcactaggtcttcacatgaa

SEQ ID NO: 204731 - DNA, 418 bp, Gossypium hirsutum
gaaacttggtgtgaaacaatggcgtcctcggatcttatgggcaagcttgagactgatgtcgagatcgatatttctcccgaaaagttccaccatatgtggtgccacaggccgcaccatgtccaccacactagctccgaaaaagtacaaggatgcgatttacatgaaggtgaatttggaactcccggcgtcgttatctgctggagatatgtgcatgatggaaaggctaaaactgcaaagcaggtagttgaagttatggaccatgagaaaaagtcaataactttcaaaatgcttgaaggagatctgatggaggaatacaaaagcttcgtgattacaatccaaacttcccccaagagcgacggtaaaagcagtatagtgcactgggactctgattatgaaagctgcacgagggtattggaca

SEQ ID NO: 204732 - DNA, 372 bp, Gossypium hirsutum
aagaaggagatacagtgaaaggcttttgttcttcacatgtgagcacttcatggggtcctgcctcttctctcccaactcccattaggtcaaggtaagaaaggtaatgagagatgatgttgttcatggtgtcaacatcacctcgcccacaaacttgatctccatagagcacattcatggtggctccaaaccccgggacccgcttggccaacgtgtcgttcttggtcggtttccagctgccgacaaacacgtcgtgggccgacggttggtgtttcttcaccggtgtcatccatctccagagtgctgcctggaaagctaaggttgcattgttttctatgtattcagggtggttcaataagtccaccttcaatgcgt

SEQ ID NO: 204733 - DNA, 400 bp, Gossypium hirsutum
aaaaccagaaaaatggcgaaaccccaacttttatttctaggggccttttcccttctctgtctcatttctttttccgccgccgattcctccatcacagccgacttacgtctcaccgattccagtttcccgtcggttcatgcgaagaagctgattagggagttgaatttgtttcctaaaggggaagtcaatgtcgttgacgaacaccgggtttcgttgccggagggtcccaaactggtggagaagcggttcaagttcccaactttggaagtgcccggtggagtttcctttgaggatttgggtcaccatgctgggtattacaagcttcctaattctcatgatgccagaatgttctacttcttcttcgaatcacgcaaatagcaaaagggacccctgtgtaatc

SEQ ID NO: 204734 - DNA, 356 bp, Gossypium hirsutum
gttacaatgtactcacagggtgattcaaaatttgtatgataaagttaaaaaagaaagaggaagaaaaaaagagcataactctctcaaacctttagcatttcaaagcaaaggaaactatatataattagaaaataaaaaaaaagatcatcacaagaaattaaccgcaaggctcaataaataaaattttagcttcattgttgtttttgccaattaattaattaccataatacttatcatcatattaaagccagtgcttgttttgtttgatgttcttcacaaatcacacatcaaatgtagaaatactgtacgacaggtgatcagggttcgaactcttcctcgctttcctcgaactcctc

SEQ ID NO: 204735 - DNA, 406 bp, Gossypium hirsutum
agggaatcctctcttctctagaaaccaccgtcgagccgttgctctaatcacccgaaccactgccaatcgcctccctcacctcctctccctacagcgtgccctcgctattcacaccaccgtcccttctctctcctcttctgccaccccaaccacatacgcccggccttctccgccgtccacctccggcactccctccagtctctctaagcctgctgagtacgtgatctccaaggtcgatgacctcttgaactgggcccgtcgtgggtccatctggcccatgactttccgcctcccttgctgcgccgtcgaaatgatgcacacccgtgcttctcgctccactttcaacgctttgtgtcattttaagcctacccctccccaatccaatgcatgattgttgctggcactc

SEQ ID NO: 204736 - DNA, 418 bp, Gossypium hirsutum
ggagacctaattagcctttcagaacaagaacttgtagattgtgataccagcaactatgggtgtgaaggaggatacatggactatgctttcgaatgggttataaacaatggcgggatcgatagcgaaagcgactacccctacactggtgtggatggcacatgtaacaccaccaaggaggaaaccaaggttgtatctattgatggctatcaagatgtagagcaatcagatagtgctcttttatgtgccgttgctcagcaacctgttagtgtgggaattgatggttccgccattgattttcaactttacactggtggaatttatgatgggagctgctcggatgatccagatgacattgatcatgcttgtttaatagttggttatggttcagaagacagtgaagagtattggatagtgaaaa

SEQ ID NO: 204737 - DNA, 397 bp, Gossypium hirsutum
  unsure (1)..(397): unsure at all n locations
caaaaggtcatttaagtatgcatgggtgcttgacaagcggagggccgaacgtgaacgtggtattaccatcgatattgccctctggaagtttgaaactaccaaatactactgcactgtcattgatgcccctggacaccgtgacttcatcaagaacatgattactggtacctcacaggctgactgtgctgttctcattatcgactcgaccactggtggtttcgaagctggtatctcaaaggatggtcagacacgtgagcatgctttgcttgcgtttacccttggtgtcaagcagatgatttgctgctgcaacaagatggatgcaacaactccaaaatactccaaggcaaggtatgatgaanatgtgaaggaagtcttctcatatcttaagaaagttggt

SEQ ID NO: 204738 - DNA, 427 bp, Gossypium hirsutum
  unsure (1)..(427): unsure at all n locations
tgcattctcgcggttttcttcatcgagacataaagcccnagaactttttgatgggtctagggcgcaaagcaaatcaggtatacataattgattatggtcttgcaaaaaagtatagggatcttcaaacacacaagcacataccatacagggaaaataagaatcttacaggaacagctcgatatgcaagtgttaacactcaccttggagttgagcaaagcaggagggatgatcttgaatctcttggttatgtgcttatgtacttcctcagggggagccttccatggcagggattgaaagctggcaccaaaaagcagaagtatgacaaaattagtgaaaagaagatgcttactcccatagaggtcctttgcaaatcatatccttctgagttcacatcatacttccattattgtcgatcactacgatttga

SEQ ID NO: 204739 - DNA, 420 bp, Gossypium hirsutum
accgatccaatagcagctccagctctcctagtgacgagggagaaggtgaaggtgaaggcggagagaagaagaagaagaaaaaggagaagaagggaaagaaagaagaggacagtgcagtcccagtggagaagtgcgatgaggcggcaacagttcaccactcagagacgccggaaaagaagggtttcatggagaagatcaaagacaaactcccaggacagcataagaaagatgaagaggtcaccaccccaccaccagctgctgctgccccaactgagaacgaccaccatgagggagagacaaaagagaagaagggatttttggagaaaatcaaggagaaaattcctggttaccactccaaaacagaggacgagaaggaaaaagagaccactgctccccattaatgaatcaatataatgcatt

SEQ ID NO: 204740 - DNA, 424 bp, Gossypium hirsutum
agaggagctacaagatctgttagcagcccaagaagccgggactgcattcatactagggcactcacatgttcgagcaaagcaaggatcatctgtttttaagagattggccattaactttgggtacaatttcttgagaaggaattgccgaggaccagatgtggcacttaaggtgccaccagtatctttgctagaggttggcatggtttatgtggtgtaagcctctgatgtaagtagttttggtagttttgcgtgttgcatatggccgacctgtaaagaaatatatataactggtccaagagaggttcacctgctttcgtcacggtccgcacacggctaaagttcctacatccgatgtaatagagaaatgaaattagttttatcacgaaattctcaaattgcacgtcggactcttttaacaagatgc

SEQ ID NO: 204741 - DNA, 397 bp, Gossypium hirsutum
aggatatgcccttccacatgccatcctccgtcttgagcgggcaggtcgtgatctaaccgatgccttgatgaagattcttaccgagagaggttacatgttcaccaccactgctgaacgggaaattgtccgtgacatgaaggagaagcttgcttatgttgccctggactatgagcaggaactggagactgcgaagagcagctcatctgttgagaagaactatgagttgcctgacggacaagtcattactattggagctgagagattccgttgcccggaagtcctcttccagccatctttcatcgggatggaagctgctggaatccatgaaactacctacaactctatcatgaagtgtgatgtggatatcaggaaggatctctacggtaacattgtgctc

SEQ ID NO: 204742 - DNA, 307 bp, Gossypium hirsutum
cggaccctccgcgaccgtggaccgtacccggctgaccaggggcttaatgatctcgaccgcagctatcgatctgtggtgtatgatagcaaagctggaagtgtattcgctgcactgggtgcagatgaacgggttaaactctatcggggtgtaacatctgatggatcatctgctgattcaaataactagacgcttataaaagaaagctgcgctaaatcatttgcaccattcccacctgggtgtatgctacacagacagcaaggattgacgacacttgagcattccccgagcagaacgaaggcgatgccaa

SEQ ID NO: 204743 - DNA, 406 bp, Gossypium hirsutum
atcagaggcaaagattggaggattcagaccaatatttacgggaatggaagcaccagtgttggcagagaagaaagatacaatctttggttcgaccctgctgatgatttccatcagtacactattctctggactgattctcaaatcatattttatatagacaacatccccattagagagtttaaaagaacagctgcaatgggtggggactttccctctaagccgatgtcgttgtatgctacaatatgggatgggtctgattgggctactaatggtggcaaatatagagtcaattacaaatacgctccttacgtagcagaattttccgacctgatcctccacggctgcgcagtggatcccattgaattttcgtcgaagaagtgtgataccacctctcaaaagttggaac

SEQ ID NO: 204744 - DNA, 435 bp, Gossypium hirsutum
gagagattaccaccaaagccaacgtagactatgagaagagtgttcgtgatacatgccgctccattggatttgtttctgatgatgttggtcttgatgctgacaattgcaaggtcttggttaacattgagcagcagagccctgatattgcccaaggtgtccacggacactttacaaagcgtccagaagagattggagccggtgaccagggtcatatgtttggttatgccactgatgaaacccctgaattcatgcctcttagccatgtccttgcaactaagctcggtgcacgtcttactgatgttaggaagaatggcacctgcccctggctaaggcctgatggtaaaacccaggtcactgttgagtactacaatgacaatggtgccatggttccagttcgtgtgcacactgtcctcatctccacccaacatgatgaga

SEQ ID NO: 204745 - DNA, 374 bp, Gossypium hirsutum
gaaaaaagaggcagaaatttagagaagttgattcagacgcaaagggtgatggaactgagcattcataaaatagaagccttgattaggctaagtacgatagtgatgttggttttaacagcttgtttaattgggttggattctcaaacaaaggtcatcttctacgttcaaaagaaagcttctttcaaggatttgcgtgctcttgttggattgctgtatatcacttcattggctgctgcttataatctacttcaactatgctgttcttcattctcagcttcttacaaaggaacctcgctgcaatcttacgcatatctggcttggcttcgttatattttggatcaagcaatagtgtacgcagtgtttgcgggaaacct

SEQ ID NO: 204746 - DNA, 360 bp, Gossypium hirsutum
ccagtttgaggacctttttgcgaagcgtaacacgcgtgtggctcatgcggttgggttctgggattaccattctttcattacggctgctgctcagtatcaacctcatggatttggtaccactggggaaaagctccagaatatgaaggaagtccctgcttttcttggacatgtcggcagcaaaactttatgtggctacggagtcgctaccgggggaccattggcttggggtctttgctacaacaaagaaatgagccctagcataatatattgcgatgattactacaaatacacctatccttgcacaccaggagtctcatatcatggccgaggtgccttgcctatctactggaactacaacta

SEQ ID NO: 204747 - DNA, 397 bp, Gossypium hirsutum
  unsure (1)..(397): unsure at all n locations
gaaaataatggtgggaaagaagagttatttggcaatgaggagtgagcgagaagcaactgatctcatcgcatctgacttccaagatctaatctttgctactaagaagcttgctaaccatgctatcaaattgggttcttggggatttgggaccacccttcttgaatggatcgcttccttcgctgcaatttatctattgatattggaccgtacaaactggaaaaccaatattcttacagcactgttaatcccatacatcttcttgagcctgccttccttcctgttcaacatcttgaggggagaagttgggaaatggattgcttttattgcagtcgttntgcgcttgttcttccctacacgtttccccagattgggctggaacttncttgggagcattgat

SEQ ID NO: 204748 - DNA, 322 bp, Gossypium hirsutum
accgtgcactgggtgcatagaaaataccaaaaactagtacattatccgaggtattcaaccctgaaaacacccatccaaaatcaacaagaaaatacatcacagtagcaaacggataacggtacatccctcaatactcctcctcatccccttcgtctccttcaccagactcagcgccaactttttaataatttttttccagggcagcgagatcttcacgtgcctgggaaaacttttctttctccatgccctcaccaacataccagtgcacaaatgcacgcttggcatacatgagatcaaatttatgatcaatgcgggaaaacac

SEQ ID NO: 204749 - DNA, 374 bp, Gossypium hirsutum
gaaacccaaaatggttatggcctttacggccacgagtcaggctcaggctcaggctcaggctcaagccggcccagtttcaccaccaaagaaacctatgaaccctatgtcacccctgttagattccaccctgatgaaccctataacagcatccccgaatcctccaacaataaagacacttactactacaacaagaatgcctacaagtccactaagcagcaaaaacttgggcgaggccattttcaccgagaaaggatggagcaccaaggaaaaccagaacaacaactactacaacggcaacattaatggcgagaagcaaggcatgagcgatactatgtacttggagaatggaaagtactactatgacgtcaagagtg

SEQ ID NO: 204750 - DNA, 392 bp, Gossypium hirsutum
accaaggggaaaaaaagcaatagaaaagagcaagcaagggtgaaatcccagatctctctttgttttctctttgaaacccaaattttcccatataagaaaagattctgagaaaatggtgcccaaatcattgatctatgcatttgtatctcgtggaggagttatattagctgagtatactgaatacagtgggaatttcaattccatagctcttcaatgcctccaaaagcttccttcttcaaacaacaagttcacttacaactgtgatggccataccttcaattatcttgttgacaatggatacacttattgcgttgttgcagatgaatcagctggaaggcaagtgccgattgcttttttggagcgtatcaaggatgatttcgtgtcgaaatatg

SEQ ID NO: 204751 - DNA, 377 bp, Gossypium hirsutum
ataaagagcaagttgttactcgaatgaaagctgctggggctagtaaacaacatggacaggaagacatattatgttcccttatagctgatgcatgcatccaagtctgccccaagaaccctgcaaattttgatgttgataatgtccgtgtgtcaaagcttgttggagggggtttgcataattgtacaattgttagagggatggttttaaaaggtgatgctgtgggaagtataaagcgtatggagaaggcaaaggtggctgtgtttgccagtggcgttgattcatctgccactgaaacaaaaggaactgtattgattcactcagctgagcagctagagaattattctaaaactgaaaaagctaaggttgaggaactcatc

SEQ ID NO: 204752 - DNA, 436 bp, Gossypium hirsutum
ctgatatctgcggctatagcactaagaaagtgcatgctgttctcacctacaatgggacaaaccacttgatcaaaaaggaagttccttgtgagactgaccaactcactcatgtttatacgttcattctccgtccggatgctacctacagtatccttgttgacaatgttgagaaacaaactggtagcttgtacactgattgggatcttctcccacctaagaaaataaaggatcctgaggccaagaagcctgaagattgggatgacaaggaatacatccctgatcccgaagacaagaagcctgagggttatgatgacattccaaaagaaattccagatcctgatgctaaaaagcctgaagattgggatgatgaagaggatggtgaatgaatactttcaactattcccaatccttgatacaagggcccatgggaatcaaa

SEQ ID NO: 204753 - DNA, 384 bp, Gossypium hirsutum
tcgagttttttttttttttttttttttttggcataattccttttctgggggggaaattgtttgaaccaacctttagtcacttgtccaaaattcatatccaaacatgcagcaacctcacaaaatcatctgtcttttgatttgataggaactcctttgtacatttctacacgatccttcaatgcgtctcgccttgggcgtgctatcttattattaggatcgaaaagcaatacttcttcaaatgctttcagtgcagacttgtagtcttttttcttctcatatgcatcgccaagattgttccaagctgtgacatatcctggttgaatcttcacagcagtttcaaattgattgattcctttctcaagcttcccatcccgaacgtaactg

SEQ ID NO: 204754 - DNA, 330 bp, Gossypium hirsutum
ggcaaattcatcatcccaactctaagcaaccttacaagtgtgtggttcttggcacttttcctctccatcattgcaactggagtgcttgaacttcgatggagcggggttagcatccaagactggtggcgcaatgaacaattctgggtgatcggaggtgtctccgcccatcttttcgccgtcttccaaggcctcctcaaagtcctagctggagtagacaccaacttcaccgtaacagcaaaagcagcagaggatacagaattcggtgaactttatctcttcaaatggacaactctcttaatccctcccacaactctgataatactgaaacat

SEQ ID NO: 204755 - DNA, 437 bp, Gossypium hirsutum
  unsure (1)..(437): unsure at all n locations
gtgaacgttttgaaagcttgtgccaaagcaaaaacagggggcgagtcgtcttgacatcatctgccgcagctgtgtctatcaacacactggatgggacagatctcgtcatgacagagaaagactggaccgatatcgagttcttatcatcagcaaagccaccaacttgggggtaccctgcatccaagacgttggctgaaaaggcagcttggaaatttgctgaagaaaacaacattgatctcattacagttatcccttctctcatgactggtccttccctcaccccaattgtccccagcagcataggccttgctacatctttgatttcaggcaatgaattcctcataaatgctntgaaaggaatgcagatgctgtcaggttcgatctctatcacacatgtggaagacgtatgccgagcccatgtttttctggctgaaaaa

SEQ ID NO: 204756 - DNA, 402 bp, Gossypium hirsutum
agaacccgagtttgcctcaggtttttataaagggaaagtgtggtggtggtgctgatgtgattaaaagcatgtttgaagttggggaattggctaagattcttgaggattttccaaggatacaacagcctgggcttgtttgtgattgttgtggggatgtcaggtttgtgccttgtgggaattgtagtgggagtcgaaaagtgttcgacgaggacgaagggttgcttaagagatgcttggaatgcaatgaaaacggcttgatccggtgccccaattgctgttcttaacactttgattgctgctgcctgcaggatgttaaggtatatatacataatgagcttggtttttttttcgattgtcgaggtatatgaaagatggtctgatgtgttttgtatgaaccctttc

SEQ ID NO: 204757 - DNA, 378 bp, Gossypium hirsutum
  unsure (1)..(378): unsure at all n locations
cttaatgctaccgtggaagagaataaatcccttaacgggaaactttctgaggtttcaaatgagtttcagcaggcacagggcagaatacaacagctcatggctgaattgagtcagtcaaaggaggaactagttgagaaagaaagggaacttttgacactcaaagagttgcatgatatgcatgggagtcaatcatctgctcagataaaagaattagaggcacatgtaacaagcttggaacttgagttggaatcattgcaagcaactaacagagatatggcggagcagctagagaacaaagcangtgaagcagaacagctgggagaacaaaatataagactccaatcccgcatttcagaactcgagatgatgttagaaaag

SEQ ID NO: 204758 - DNA, 323 bp, Gossypium hirsutum
cttgaatccaaggaggaaaaggcatctgaagcttttgtgagaaagtatcgtcttcatgggaacttgggggaatcagaggacattgatattgtggcactaaagaactacatggatgctcagtactttggtgagattggtattggcactcctacacagaacttcactgtgatatttgacactgggagttctaatttgtgggttccttcatctaaatgttatttctcgatagcatgctatttccatcgaaaatataaatcaagccgttcacgtacctacaaggctaatggtaaaccagcggatatccaatatggcactggagctat

SEQ ID NO: 204759 - DNA, 335 bp, Gossypium hirsutum
gtccactgcaagctcggctctcgattcccccaaaagggggctcttcctttcgtgaatcaaagattctcaaagatgactcaagatgtggagatgaaagagcaaccagctccgtccaattccgttccttcctcttctccatccactttgcaccatttgaaggaaattgcgtctctgattgagaccggtgcttatgaccgtgaagctcgccgtattttgagggctatacgacttacaatggctttaagacggaagttgaaggcatccgtgcctttctctttcctaagtttcgctcttacccctggatccgaggccttcactcgtctttcttctaatct

SEQ ID NO: 204760 - DNA, 328 bp, Gossypium hirsutum
gttaaggaaattgagccatcattgaagaggcaacttatcgggtccactgatctcatgactatcggaattgggattgctagttgggtagctcttccatcttcctttaccattttcaattttggagatcagaaagctgtgaagaattggcagctattcttatgtgtcgctgttggtctttgggctggcctaatgatcggttttgtaaccgagtactacactagcaatgcatacagccctgtacaagacgacgctgattcctgcaggactggagcagcgactaatgttattcacggccttgctttgacttataagtcttgcattattccta

SEQ ID NO: 204761 - DNA, 370 bp, Gossypium hirsutum
cttctatcaagatgcttctgaccttcgcgagaaattcggggccaacaagcatgtggaagatcttgatacaatcgacaaaatgatagatgcaggtgaagcaacttataataagtggcggcatcccgatccttatatcgttccttgggctcctggtggttccaagtttactcgaaaccctgtcccaccttctgggatcgagatcgtgtatgattatggtcgagaagaaaatgactaagacatccatcttttcaacttccccagaaataaagttgatgcaggtctaaaagatcgttgagtgtgtaacgagtggtctagggacagcaactaatttgcattacctcaattgaaacgagatagggttttaataaca

SEQ ID NO: 204762 - DNA, 361 bp, Gossypium hirsutum
tgggaagagaggaaagagtctgtagttgtcgaggggggggacttgagccttaattttgttatggggcttatgaagaaacatccctcaattataccattcatgatatatattacaaatgaagacaaacacttggaaagatttgcagttcgtgcgaagtacatgactttggaccctgcaaaaaataagtatgtaaagtatataaggaatattaggacgatacaagattatctatgtaaacgagctgacaagcatttggtccccacagtaaacaacacaaatgtcgacagaagtgtggcagccatacatgcaacagttttcagttgccttcgcaggcgtgaaagctgggagtcactttatgatc

SEQ ID NO: 204763 - DNA, 394 bp, Gossypium hirsutum
  unsure (1)..(394): unsure at all n locations
cgagcggagtaaggaagaagatgnnaagcttcagctttgcttcaccgtggtcctcctattgattttcgccccccttttcatggcctcatctcaacatcgctgcgtttttgtggggaatataccatatgatgctactgaagaacagcttatagaaatctgcagggaggttggccctgttgtttccttcagactggtgattgatagagaaactggcaaaccaaaaggctacgggttctttgaatacaaggatgaggagacagctttaagtgctcgacggaatcttcaaggttatgagatcaatggccggcaattacgagttgtttttgctgaaaatgacaggctctgaacgaaatcgggaacagactgtagaatttgttcaaaagaaacatgactg

SEQ ID NO: 204764 - DNA, 326 bp, Gossypium hirsutum
gtggctatgacatgaattgcttccttgattagtgtggaagggttggcagattcagccactcctccattctccattagtgtagattcaatgaagcaattcatgtcatcagctgtggctatgaagagaagactgcatgggggaaagagattggatggatatatggttcagtcactgaggatatcttaacccggcttcaaaatgcactgccgaggatggagatcgatttactgcatgcccttaaggccagcattcaaaggatctgcacccatcaatctgtctgatcgggtgcaccaggttcttcgatgggctcttggatctgttgaaat

SEQ ID NO: 204765 - DNA, 376 bp, Gossypium hirsutum
  unsure (1)..(376): unsure at all n locations
gagaaatccaatgcagatattaatgcggagttgggtgtgtgagatgctgaggaagatggttgtgatggtttaaactataaggaattcgacaagggattcaataataaacgtgtgacagtgccaccaccatcacatttttggcgtattgatagtaacaaatttttgcaccgtggctgtaaaactcaaaccattgatgagataatgatttgccattgcaaacgacctcctgatggtaaccttggttgcggggatgaatgtctaaatcgaatgctgaacattgaatgtgttcaggacacctgtccctgcggggagctttgctcaaatcaacagttccagaagcgaaaatatgcanagatgatgtgggacagatttggta

SEQ ID NO: 204766 - DNA, 381 bp, Gossypium hirsutum
gttcaagacgattacaatgacggagaagtttaattgtagaggtaggatatatatgagattttgatggatgagaatagatggaaagggtttactcagagtaatgctaggataagtaaagaagtcggtggtcaatttagtattttcgatggatcggttactggtattaacttggagttgcaagaagggaagtttattgctcagagatggagatttgggagctggcccgacgggattgattctactgtaagacttgttttcaatgagcctgagcctggggttactataatcaaactcacgcattcagatgttcccgaggaggacagatatgggaatgcgactgtggtggagaacactgagaggggttggaaagaccttattttc

SEQ ID NO: 204767 - DNA, 385 bp, Gossypium hirsutum
  unsure (1)..(385): unsure at all n locations
gtaaaatcgagatctgaaatatgggtttcttagtaacagccctaattttttctgtgattgcggtaattgcatcactttgtaccagaatctgttgtaacagaggtccctctgctaatctgttacatctaacattggtcattacagcaaccgtctgttgttggatgatgtgggcaattgtatacctagcacaaatgaaaccactcattgtccccattttaagtgaaggagagtgaagagtgtgtgtgtgtgtatatatatattgcacaaaaatcatttggaagattatcagtaaatcagcaattatggattntggccattgagggaatacctgaattccattgtttaatggaatggatgattcagtgtgttctcatatgttgatttt

SEQ ID NO: 204768 - DNA, 326 bp, Gossypium hirsutum
gccgtcggatctttggtggggcattttgattcaatcaggattgcttcgttttgaacccaggcgacgatgaagaaggctatcggtcaaactgttagagagcttaagagagaggttaataagaaagttctcaaagttcctggaatagagcagaaggttcttgatgctaccagtaatgagccatggggtcctcatggatcacttcttgcagatattgcaatggctacaagaaactatcatgagtatcagatgatcatgacagtgatctggaaacgtctaagtgacactggaaagaattggcgtcatgtctacaagcttcaggctctgac

SEQ ID NO: 204769 - DNA, 353 bp, Gossypium hirsutum
tgccgccgcaacaatgaagtacaacccgcgtgtctcgtgctctcgccgcaagagccgcaaggctcatttcacagcaccttcttccgtccgccgcgtcttaatgagcgcacccctctcatccgatctgaagtccaagtacaacgtccggtctatgccggtgcgcaaggatgacgaggtccaagtggttcgtgggacctacaagggacgcgaagggaaagtggttcaagtgtaccgccgcaaatgggtgatccacatcgagcgcatcacgcgcgagaaagtgaacggttccaccgtcaacgttgggatcaacccatccaaggttgtcatcaccaagctgaggctggacaaggata

SEQ ID NO: 204770 - DNA, 360 bp, Gossypium hirsutum
ccacggatggtgagaagtgctatacagcttatttcctcaagctggccttactggaatagaacagagggtgctgatcatttctttgttgtaccccatgattttggagcatgctttcattatcaggaagagaaagcaattgagagggggatccttccaatcctgcagcgtgctaccttggttcagacatttggacaacggaaccatgtgtgcttgaacgagggttcaatcacaattcctccttatgctccccctcaaaagatgcaggcccgccagattccactagatactccacggtctatttttgtctacttccgtggattgttttatgatgtgaataatgaccctgaaggtggctactac

SEQ ID NO: 204771 - DNA, 435 bp, Gossypium hirsutum
  unsure (1)..(435): unsure at all n locations
gccaactgagttccgtgtagataaggttctccagcccttggatgggaacaaattcaacttcaccaaagtcggacaagaagaggtgctcttccagtttgaagcaagtgaagatggcgaagttcagttcttcccaaatgctcccattgatgttgagaatcacccaagtgttgttgccataaacgttagtcctattgaatacggacatgtgctgttgatccctcgaattcttgaatgcttgcctcagaggatcgaccgtgagagctttttgcttgcgctctatatggcagctgaagctgggaatccgtactttagattgggttacaacagcttgngtgcatttgctacaatcaatcacctgcacttccaggcttactacttggctgtggcctttcccattgagaaagctcctaccaagaagataacccttttgaatga

SEQ ID NO: 204772 - DNA, 317 bp, Gossypium hirsutum
agaaaaggcaaaggcattagaagtaattcaatttctaaaggagggagtccacgagggaacgtgcaatgttgcaataattgatgatgggaaattggacacggagtccgactcaggtgagttctgggtcctctttggtggttttgctccaataggcaagaaagtcaccagtgaagatgatgttattcctgagacaactcctgctaaactttatagcataactgatggtgaagtgaagattgtagaaggtgaactatcggaaggtctcttggaaaacaacaaatgctatctactagactgtggtgtggagatttttgttt

SEQ ID NO: 204773 - DNA, 370 bp, Gossypium hirsutum
gaacgaggtgagcttgaagttgaagaagcttatgagcaggtcaaggaattcgaggatcagatggtaatggaatacggaaagatgatggaagctgagggcccaccaaaatttgatgagacggctgtaccggacttaaaaaagaacttggatgatccacctggtgagggaccaatccttaggtggcaaactcgggcggtgtttgctcctggtggtgatgcgtggcatcccaaaaacagaaaagtaaagatgtctgttacagtgaaggagctcgggctttcaaagcatcaattccgccggttacgagagcttgttggaaagagataccatccaggcaaaggtgaacttacaattactagtgagaggtttgaca

SEQ ID NO: 204774 - DNA, 331 bp, Gossypium hirsutum
tgacaatgaagctatatacgatatctgcaggagatggttggacatcgaaaggccaacttataccaacttgaatcgcttgatatcccaaattatctcttctttgaccacttcattgaggtttgatggcgccataaatgtggacattacggagtttcagactaaccttgtgccttatcctcgtatccatttcatgctttcatcttatgccccagtaatctcagctgcaaaagcttaccatgagcagatatctgttcctgagatcacaagtgccgtctttgaaccctcaagcatgatggccaaatgcgatccgagacatgggaaatacatggca

SEQ ID NO: 204775 - DNA, 358 bp, Gossypium hirsutum
ctcccaccccgaccgcttgattttgatcagacgggggtcatgccgatcagaaacatagccgttggccggcctgaagaagctactcatccagatgctcttaaagcagctttagctgagttcatatcaacgttaatcttcgtttttgctggatctggttcaggcatggcttttaataagctgaccgacggcggtgcaacaactccggctggtctcgttgccgcctctctagctcacggatttgcgcttttcgtcgctgtctcagtcggtgctaacatctccggtggccatgtgaatcccgccgttacattcggtgctttcggtggccggaacattaactctttacgtgggattccttaat

SEQ ID NO: 204776 - DNA, 257 bp, Gossypium hirsutum
tggaattggaaagggtggtggacttggaggtggtgggggcaaaggaggaggccttggaggtggaattggaaagggtggtggacttggaggaggacatggtggtggacttggaagtggtattggcaaaggaggaggccttggaggtggaattggaaagggtggtggacttggtggaggaattggaaagggtggtggcattggaggtggcggcggctttggtaaaggtggtggcttcagtgacgctgctggaagtggtg

SEQ ID NO: 204777 - DNA, 324 bp, Gossypium hirsutum
caccgtctatccttcacctcaggtttctacatcaggggtagagccttacaacagtgtgctgtccactcattcactccttgagcacactgatgtcgctgttcttctggataacgaagcaatatatgacatctgcaggcgttctttggacattgaacgacccacttatacgaatcttaaccgccttgtctctcaggttatctcatctcttaccgcatctttgaggtttgatggagccctgaatgtggatgtgactgagttccagactaacctgggcccatatcccaggatccactctatgctttcttcttatgcccctgtcatttc

SEQ ID NO: 204778 - DNA, 352 bp, Gossypium hirsutum
tcaatgctaaggttggggggagaaatactgtgctgagcgatgctgttttaaggagaattccgcttgtgactgatgtccctacaatcatttttggggcagatgtcactcatccgccgcctggcgaagactctagttcttctatagctgcagtcgttgcttcaatggattggcctgaggtaaccaagtatcgtggaattgtctctgcacagactcaccgggtggaaataatcgaggatctttataaacaaactagggatccacagaagggtttagttgaaggtggaatggttagggaattggttcttgctttctacaggtcaacgaaacaaaagccttctaaaattatcctcta

SEQ ID NO: 204779 - DNA, 342 bp, Gossypium hirsutum
aggccagtgaagctctcaagtctggcatttaatcagattttggcgattaaccatctccatatgtttacggacgaggaactagagcgtttactctgtggagaatgtgatatctgggctttcaatgaacttctggaacatatcaagtttgatcatggatatacggctagcagtccaccaatcgttaatctgctggaaattatacaagagtctgaatattcacaaaggcgagcatttctgcagtttgtgactggtgctccccggctacctccaggaggtttggcgtctttaattccaaaattgacaattgttcgcaagcatagtagcaattgtgctgatacggag

SEQ ID NO: 204780 - DNA, 385 bp, Gossypium hirsutum
attgatattgccctgtggaagtttgagaccaccaaggactattgcaccgttattgatgcacctggacaccgtgactttatcaagaacatgattaccggtacctcacaggctgactgtgctgttctcattattgactcaaccactggtggttttgaagctggtatctctaaagatggtcagactcgtgagcatgctttgcttgcttttaccctcggtgttaggcagatgatttgctgctgcaacaagatggatgcaacaaccccaaagtactcaaaggcaaggtttgatgaaattgtcaaggaagtctcttcttatcttaagaaaagtgggtacaaccctgagaagatcccggttggtccaatcttcgggtttgaaggtgaccacc

SEQ ID NO: 204781 - DNA, 396 bp, Gossypium hirsutum
ccgatcaccaagcagtggtgaactccgactgcagcagattgtgaatagccacattccaaaacccagcacccgatgcaacagtgtatccactgaagataagagaaggagagaaacctatacttgaggagcccatcacatttgctgagatgtacaggaggaagatgagcaaggatcttgagcttgccatgctaaagaaactggccaaggagcagcagatggagacgaccaagaagcccgaactggaaaccaagcctcttgagcaaatccttgcataaataaacttcattttacttctgtattagtatcaattaaatgcatttggactcttcttatggctactgcctacattttatgcttgttttctatgctcaaacctacgtacgtaaataaatgaaa

SEQ ID NO: 204782 - DNA, 346 bp, Gossypium hirsutum
agaagattgattatttgaaggacaaggtccatcctagctttggtaaagaacggagagccatgaagagggaatatgaagaatttaaagtaaggatcaatgcattagtagcaaaagctcataagaaaccagaagaaggatgggtgatgcaagatggcaccccgtggcccggaaataacactcgtgatcatcctggaatgattcaagtctatctaggaagtgccggtgcacttgatgtggatggcaaatagcttcctcgacttgtctatgtttcttgtgagaaacgaccctgttatcagtaccattaagaaagccggtgctttaaaaatgctttttgttttgagttttt

SEQ ID NO: 204783 - DNA, 308 bp, Gossypium hirsutum
ctccaaggagcttgttttagaagctcataatgctggggtcatggttgttcctcaagttgggagtgttgaggaagcaaaaaaagtaattgatgcgggtgtagatgcgattatcgttcaaggccatgaagctggagggcacgtacttggacaggatggtctaatttcattattgccacgagtggttgacgcagtggctgatcatgatattccggtaattgctgctgggggcattgtagatgctcgtggttacgttgctgtcttggctcttggtgctaaaggcattatgcttggtaactaggtttctttgc

SEQ ID NO: 204784 - DNA, 406 bp, Gossypium hirsutum
tttctctttgatatctccaggatttcttcatctttattcataacatcaaacatacgcaaacacaacgataactgtaacccccctacccctatcaacattttattgaactgtaactaacataggatacctagttggcctcttaaaacagacaaagaccagaccccaaaccaaaccaaactgctaaacaacaaagcagacagtattgaaaagatcccatccccagattgcatcattttcatttcttagaaaggaggagcatagagctggagaaccttctgccaggacggtctgctgctaatatcatcccaccaagcactcacatgcttcctgctggttatcatgtattcctttcccatttgacccaccaagtactgagttaatggcaggtgggcttatgtcagcaagg

SEQ ID NO: 204785 - DNA, 388 bp, Gossypium hirsutum
gaatggggcagtcaacccacatgcaatctcaaagtgggatgcctggcggttacaaccctatgatgggtttcagcggctactctgaacagctacatggtggtggcggtggttaccgacttgaattgattgagcaggggagtaacggtagttacatccttgcttgtgacgcaagtgtaaaagggggtgatgttgcttgacacacgtgtttcaatgaaattgcagactttaatgacgtccctctggccatgcgatccatatcttattaccgactgttattgatgatacgagaactggcgcttactgtgagctgttccacccagaacagcttatttgctggatggaggacgcagttttcagctttgtgcgtggtcactacagccttggcaag

SEQ ID NO: 204786 - DNA, 302 bp, Gossypium hirsutum
caggagttcaatctgccatgggggcttacaagtacgtgtcagagctatggaggaagaagcaatccgatgtgatgaggttcttgcagagggtgaggtgctgggagtaccgtcagcacccttccatcgtgcgagttaaccacccaactcgccccgacaaggctcgtcgattggggtacaaagccaagcagggttatgtcgtctatcgtgtccgtgtaaggcgtggtgggaggaagagaccagttcctaagggtattgtatatggaaagcccacaaaccagggtgttacccagctgaaatttcaa

SEQ ID NO: 204787 - DNA, 292 bp, Gossypium hirsutum
tcaaaaatcaatttgctcatttgctacagtcagaacaagagcagaaactggagatgcaacaatatgattcaacgattcaaacattgcatgcaaaagtaaaaagtcttgaattgcaactcaatgaagccatgtgttctggtgaagctaagtctgttagctcagaaaaggtgtcttgagtttcaacaatattaaaaacagcagcggatggtattgattctttagttgagactaataaacttgatgatgaactcaagaaacttgatgctcttattgagaggttgcttgaagaaaa

SEQ ID NO: 204788 - DNA, 413 bp, Gossypium hirsutum
aaaacattgagaaggttctggaccgtggtgaaaaaattgagcttttggtggataaatcagaaaatcttcgctcccaggcacaagatttcaggcagcaggggacccagatgaggagaaagatgtggttacagaacatgaaaataaagctgatcgtgctcgggattctgatcgccttgattctcatcatcgtactgtctgtctgtcatggcttcaactgttgatgaatcactcagttgctatattctattcatttgcccactcattgatcggtgttgtagctgtcaccagtaatattgatgctcctcatagttagtagttacagttttctttaattccacgtccttttctgctgtagcctaatatcagaagactctctgcatatatactgagattcgaacttatgaattggattt

SEQ ID NO: 204789 - DNA, 387 bp, Gossypium hirsutum
tgatgaacttgcaaaggaggtattcgaagcttcagagatcagtggtgagaaattttggaggatgccactagaggaaagctattgggagtctatgaaatcaggagttgctgatatggtaaataccggtggtcgtccaggtggtgctatcacagctgctctgttcttgaaacagttcgttgatgaaaaagtacaatggatgcacattgacttggctggccctgtctggaatgaaaagaagcgcgtagcaaccggctttggcgtctcaactttggtggaatgggtgctgaaaaactcctcttaaatgaagaacttgagaaggattgaaaacctttgtttgttgggtaccgtgagatccatttcatgaataaaacatttgtaattaaaggg

SEQ ID NO: 204790 - DNA, 159 bp, Gossypium hirsutum
  unsure (1)..(159): unsure at all n locations
ttaccaacttcactaaaaggcttttgcngaaaaggcttagaagagggcgtctgcaaatcttacaaaggctcccgtcatccccaatattgattgtgaccactatgttaacaatagcacgtcctttaggaaggcaatgtgcttcctgatggacccacaaat

SEQ ID NO: 204791 - DNA, 369 bp, Gossypium hirsutum
ctattttgtaatccatggctcataacattcgtcaccctttcttccttttccaactttttctcatttgtgtctcaccaatgatcggtagccacactgtctcggcaacggctcgacgtttattcgagacacaaacaaccttatcggagctgccacaattggcttcaaaatacgaaaagcacgaagagtttgaatatgaaaagtcagaatacaaacagccaaagtatcacgaagagtaccccaaacatgagaagcctgaaatgcacaaggaggaaaaaaaaaaaccctgcaaacaacatgaagagtacgagaaagaaaaacctgagttccccaaacaggaaaagcctaaagagcacgagatacacgaagtcg

SEQ ID NO: 204792 - DNA, 305 bp, Gossypium hirsutum
atgacaacaatacaccaccacggggcttttgcttcttcgaattctcctccatctcacggtaaaaagatctcccttcccctctctttctctccggcggcgatctcaaatcaccggtaaatcgcaccggaacgcccgattacttcgcacctttgggatcttctctgacacctcggggtttcagcttattctaactcgtcgccatcatgaatcccgaatatgattatctggttaagcttttgcttattggtgattctggtgttgggaaacatgtctacttttgagggtttgttgatgattcatatttg

SEQ ID NO: 204793 - DNA, 397 bp, Gossypium hirsutum
gcatcgcgtattgaactcgggaatcatccttaccaatgaaactccattgaaagatgacaaggaagaggaaatggccaaatccgcattggctttgtttcgagccaaagaagaagagattgagaggaagaagatggaggtgagagacaaggttcaggcttatatgggacgcgtcgaagaagctactcgccgcttgtctgacattcgagaagagcttgatgccctgatagatccaatgagaaaggacattgcatttctgcgtaagaagatagacaccgttaaccgggagctgaaaccattgggacagagctgccagaagaaagaaagagagttcaaagaagctcttgaagcctttaatgacaagaacaaggagaaaacacatcttgtcagcaaattaatg

SEQ ID NO: 204794 - DNA, 369 bp, Gossypium hirsutum
gggaattcccccagaccaacagaggctgatttttgctggtaagcaactggaggatggccgtaccctggctgactataacatccagaaggagtccaccctccacttggtgctccgtcttcgtggtggtatgcagatttttgtgaagacacttactgggaagaccatcaccctggaagttgagagctctgacacaatcgataatgttaaggccaaaattcaagataaggaaggtatccctccagaccagcagaggctgatatttgctggaaagcagctagaggatgggaggacccttgcagattacaacatccagaaggagtccaccctccacttggttttcgtctccgtggcgggatgcaaattttcgtg

SEQ ID NO: 204795 - DNA, 199 bp, Gossypium hirsutum
ggtttttcctttttaccaacagaggctgatttttggtgttaagcaactggaggatgggcgtaccctgtcttactataacattcataatgagtccaccctccacttggtgctccgtcttcgtggtggtatgcatatttttgagaagacacttactgggaagaccattaccctgtaatgtgagagctctgtcacaatcatt

SEQ ID NO: 204796 - DNA, 270 bp, Gossypium hirsutum
ttttattccttttttgctttttagaatttttcttaatcgagggtgagagagtgcgtggcgatccacatcggtcaggccggtatccaggtcggaaacgcttgctgggtactttactgtcttgagcatggaatccagcctgatggttagatgccaagttgacaaaactgtccgaggaggtgatgatgctttttacacctttttcagtgaaactggtgctgggaagcacgttcctcgtgccgtctttgtggatcttgaacccactgttatttg

SEQ ID NO: 204797 - DNA, 386 bp, Gossypium hirsutum
cttattccttttttgctttttagaatttttcttaatcgaaaatgagagagtgcatggcgatccacatcggtcaggccggtatccaggtcggaaacgcttgctgggagctttactgtctcgagcatggaatccagcctgatggtcagatgccaagtgacaaaactgtcggaggaggtgatgatgcttttaacacctttttcagtgaaactggtgctgggaagcacgtccctcgtgccgtcttcgtggatcttgaacccactgttattgatgaagtgagaactggtgcttaccgccagctcttccacccagaacaactcatcagcggcaaggaagacgcagctaacaacttttgcccgtggtcactacaccatttggcaggagattgt

SEQ ID NO: 204798 - DNA, 407 bp, Gossypium hirsutum
ctacaaaaaaacccaaatcacagacaaaagttcacaaagaacccaaaagttgattacttttttgataacccaaaacacgaaaatgggtgcttctgaatcagttcctcaaaaatcaatccatgaatttacagtcaaggattacaaaaaccaagatgttgaccttagtatgtacaacggaaaagctcttcttgttgttaatgttgcctctaaatgtggactcactgattcaaattatacccagttgactgatctttacaacaaatacaaggaccaaggactggagattttggcattcccatgcaatcagtttttgagccaagaacctggtaccagtcaagatgcacaagaatttgcttgtacaagatacaaggctgaataccctattttccaaaaagttcatgtcaatg

SEQ ID NO: 204799 - DNA, 408 bp, Gossypium hirsutum
ttttcgtgcttttttttttttagccgaactactcgtcaaatctattgcaggccatatagtcttgaacaaagcttacaagagtcgaagttcacacaatagaataagcaaaaacacacgataaaaggaaacaaatcattgggtagcaaaatgcaagccctccactcaaacattacttatttagtactcatcttcaccttcctcatcaccctcgcctgactcagcaccgacttcttcataatccttctcaagtgcagcaaggtcctcacgagcttccgagaattctccttcttccataccctcacccacgtaccagtgaacaaaggcacgcttggcatacatgagatcaaacttgtggtcaatgcgggagaacacctcagcaacgctggttgagttggaaatcatgcaaac

SEQ ID NO: 204800 - DNA, 417 bp, Gossypium hirsutum
caagcttgcacatttcgctgttatagtttctcagcagtactcagagaaagaggctgctattagtttccttgaaggggtgattgaaaagcttcaggctactaaagagcagcgcatagaagagccaattctttatattaagatgcagatttccaaattcaagcttgagcaaggtgatcaaaaggagtgcaagaaacttcttgaagatgggaagagtacccttgacagtatgaccgacatagatccatctgtatatgctacctattactgggtttcatctcaataccataaatttcgccaagaatttgctgagttctacagaagtgctctcctttatcttgcgtacacatcagtggagtctctctcagaatcttttaagctggatttagcatttgatctgtccctttctgctcttttggg

SEQ ID NO: 204801 - DNA, 414 bp, Gossypium hirsutum
cgaaagcgcttgagttaattttaagtgtaggtcagccttaacaaaaaaatgtctcggagatatgatagccgcacaacaatcttttcccctgaaggccgtctctaccaagtagagtatgcaatggaagccattgggaatgctggctctgcgattggaatactatcgaaggatggtgttgtcttggttggtgaaaagaaagttacttccaagcttcttcaaacctccacatctacggaaaagatgtacaagattgatgatcatgttgcttgtgccgtggcgggaataatgtctgatgcaaatatcctaatcaacactgctagggtgcaagctcaacgatacacatatgcttaccaagagccaatgcccgttgaacagttggttcaatctctctgtgatacaaagcatggttatacc

SEQ ID NO: 204802 - DNA, 407 bp, Gossypium hirsutum
ctcgtgccgcataaagcaaaaatggagaaatctcagatctgggtggcctttggagtcttggccttgctattggcatcggcaacggcggatgacgtcgttgtactaacggaagataacttcgagaaggaagtcggtcaagatcgaggagctctcgtcgagttctatgctccttggtgtggtcactgtaagaagcttgctcctgagtacgagaagcttgggtcaagttttaagaaggctaaatccgtcttgattggaaaggtggactgtgatgagcataagagtgtctgcagcaaatacggtgttcagggctacccaactattcagtggttcccaaaaggctctttggaacctaaaaaatatgaaggaccacgaactgcagaggcccttgctgagtttgtcaacactga

SEQ ID NO: 204803 - DNA, 375 bp, Gossypium hirsutum
ttcgtagtcgacgttgttgttctttgtgggttttcattttatttgaatttttattggacaaagaaagaagttgtagcaagatgatgctcaggattaagagggttccgactgttgtttcgaattaccagaaggatgagactgaagagactgctcgccgcagcagtgggtgtggaaagaattgccttagaagctgctgcatcccaggagcgaagcttcctttatatgctttcaggaaactgaacaatattgagagtgaaaaagtggtgcttggaattgagaacaaagaaccccctgttgcttttcttgactcgctcattcttggggagtgggaagatcggatgcaaagagggctctttcgctatgatgttacctgct

SEQ ID NO: 204804 - DNA, 396 bp, Gossypium hirsutum
cttcttcccatttcttcattacattgttcaagaaaaaagaagcaaaaaaacatggccaaagttctgttgttcattgcactatgtgtgcttccagctttggttagtgctacacgcattctgaataatcaattggtggtagaaggctatgtgtactgtgatacttgccgtgctggttttgaaacccctaagactagaagcctagctgatgccatggttaggttggtatgctccgacaggaagagcggccaagttgtcttcaaaaaggagggatacaccgacaaaaccggaaaataccagattcgtgtatccgaggatcacttgggatcagatctgtgatgcaagttcttgtgaagagcttccagcttgggtgtgccacaatggcccccccgtcgtgaa

SEQ ID NO: 204805 - DNA, 403 bp, Gossypium hirsutum
gtcaatataaaatttagacccagaaaaactgcaaccccaattgtttgaactgaaattattgtaggataatgttgataacggtcagggaagcttcttcttggcctctcaccttcaacctctcctctttctcttctcctaagccttcgccaatactcaaaaactctgtttgcagagccagtttaagtgttcatccaaaacccacctccaattcccaatcatggaaccttggtcttctttctaacagccaaaaaggatctgtttttgatcctttgggtatcaaccctgacgagtcttcatgtttaaatggtgtttgggatagttttctatccttgttaacacctacatttgagagtacctcaggtactagaaaggagaaaatcttttcagctagaggagtggcagc

SEQ ID NO: 204806 - DNA, 407 bp, Gossypium hirsutum
atgacatctgctggcgttctttggacattgaacgacccactgagacgaatcttaaccgccttggggctcaggttatctcatctcttaccgcatctttgaggtttgatggagccctgaatgtggatgtgactgagttccagactaacctggtcccatatcccaggatccactttatgctttcttcttatgcccctgtcatttcagctgagaaggcttaccatgagcagctatcggtggctgagataaccaacagtgcttttgaaccctcttcaatgatggccaaatgtgacccacgccatgggaagtacatggcttgctgccttatgtaccgaggagatgttgtgcccaaagatgtgaatgcgggtgtggcccccatcaagaccaaacgcacaatccaatttgtggat

SEQ ID NO: 204807 - DNA, 373 bp, Gossypium hirsutum
cggactgtctatacggcaatgttttagcagctaagtcctttgcgcgtttcggcgtcacccacatgtttggcgtcgtgggtatccccgtcactggcctcgccaaccgtgcagtccaattgggtatccgttttattgcttttcacaacgaacaatccgctggttatgcggcttctgcttatggctacctcacgggccgacccggtcttctcttgactgtttccgggcccggttgtgtccacggtctggccggtttgtccaatgctatgatcaacacctggcccatggtcatgatctctggctcccccgatcagaaggattccggtcgtggagatttcaggagcttgatcagatcgaagcagtgaaacccttttcg

SEQ ID NO: 204808 - DNA, 354 bp, Gossypium hirsutum
agcagttatggcttgttgggatcttgagcaatcacttcaaagtttaacaggtgtatctccaggtgaaggcactggtgcaaccatgtctgatgatgaagatgaagttgtagatagtgataccagcttgtttgatggaagttttgatgggattgacagcatggggtttggccccctcgtcccatccgagactgagagatcactaatggagcgtgttaggcaagaactgaagcacgagctgaaacagggttacaaagagaaaattgtggacattagagaggaaattctacgtaagagacgagctggaaagctaccaggcgatacgacctcgtttttaaaagcttggtggcagtcaca

SEQ ID NO: 204809 - DNA, 361 bp, Gossypium hirsutum
cacaaggcaatcctaatatggtaatggcactggccgggaacaaagctgacttactggatgcaaggaaggtggcagcagaggaagcacaaacttatgctcaggagaatggtcttttcttcatggaaacttctgcaaagaccgcatccaatgtcaatgaacttttctatgaaatagctaaaagattacctcgagtgcagccagcacaaaatcctgctggaatggttctcatgaatagaccttcagaacggactgcaactgcatcttgttgctcttaggcgatggtcgttgttttcccacctgtatcatctaaatagctcttgtaatgctccctggctctgcaaccaaagttttatctttcctt

SEQ ID NO: 204810 - DNA, 358 bp, Gossypium hirsutum
gagagagagagagagagagagagagagagagagatcccatctgagatatttgtggcaatgaataagaaaattgcaggatcgtcctcgagaccaagaaagcccacaggtacggttttaccataccaaacacagagaataagggaccactatttcttgggcaagaagcttgggcaaggccaatttggcaccacctacctatgtaccgacaaggttactggtatccgttacgcttgcaaatctatcccaaagcgcaagctcgtctgccgtgaagattacgatgacgtctggagggagatccagatcatgcatcatttgtctgagaacccattcgtggttcagatcaagggaacttacgaag

SEQ ID NO: 204811 - DNA, 325 bp, Gossypium hirsutum
  unsure (1)..(325): unsure at all n locations
tgtcgggaaagctcaaaaaaaatctgaaagggaggctgaactgaaacatcgatttgagcaaacaatgaaagaggcaccagataaatttcagggagcaaacttgtatgtcaagaatttggatgatagcataagtgacgaaaagcttanagagctattctctcaatatggtaccataacatcatgcaaggttatgcgggaccctagtggaataagtaaaggatcagggtttgttgcgttttcgaccccagaagaagcttctagagctcttgcagagatgaatggcaaaatggttgtcaacaaacctctctatgttgcacaagctcaa

SEQ ID NO: 204812 - DNA, 361 bp, Gossypium hirsutum
ctgaaatccgagtcctaggaaagatgcgtgagattcttcatattcaggcagggcagtgcggcaaccagatcggtgccaagttttgggaggtggtttgcgccgagcacggcatatattcaacgggacgctatcaaggggacaatgatttgcaactggagcgcgttaacgtttactacaatgaagcgagttgcgggaggttcgttccacgagccgtccttatggacttggagcctggcactatggatagtgttagatccgggccgtacgggcagattttcaggcctgacaactttgttttcggccagtccggtgcagggaataactgggccaagggtcattacacggaaggggccgagttgat

SEQ ID NO: 204813 - DNA, 336 bp, Gossypium hirsutum
  unsure (1)..(336): unsure at all n locations
tattaaacctcaaaacttacttgtgaatccacatacacatcagctgaaaatttgtgattttgggagtgctaaaatgctggtaaagggagagccgaatgtttcttacatctgctcgagatattatcgtgctcctgaactcatatttggtgctactgagtacacaactgctatagatatatggtccactggttgtgtgatggctgagttgcttcttggacagccactgtttcctggtgagagcggngtcgaccaattagttgaaatcattaaggttttggggactccaacaagggaggagatcaagtgcatgaacccaaactacaccgaattcaagtt

SEQ ID NO: 204814 - DNA, 350 bp, Gossypium hirsutum
gaaaaaactaaaataaaagtcggtattggcttcgaagcagagccataaaatcacctgtattaagcaatctcttccttaaatccaaccattaaaaaccctcgtttcttaaacatcagatcggatccttgaagcctccatcgattcatttttggtacggttttcgtagtatcgatcaaacatgagtttcctctttgggaagagaaaaactcccgcagagcttctgcgggagaataagaggatgctggacaaatctattagagagatagagagggagagggcaggtctttagaaccaagagaagaaactgattgcagagataaagaaaacttgcaagcaggggcagatgggag

SEQ ID NO: 204815 - DNA, 354 bp, Gossypium hirsutum
agcatcattaacaacatatactggctggaccagagatctataccgtgcatgaactggctgagcttatgtatgagacggtccgtgaatggccacgctatgtaaacgtacctttaccggttgcaaaggcaattgccatgcctagagaggtattactcaagaaagtgccattcccactaccaaatcccgacatcttcaatctggatcagatacatgcatttgcaaccgatactgttgtctcagaaaatgcgttaacttttatggatttgggtattgtgccccataagttgaagggttacccagtcgagtatcttattcaataccgtaagggcggtccacaatttggttctacagtca

SEQ ID NO: 204816 - DNA, 354 bp, Gossypium hirsutum
tgattttaaggaaaaatggcagaagaattgacgttggatttggaagagcttaggcagcttcaaagcatcgcaaagagaccacgcactctatctcttatttcctctgagattcgcaacttggagaagaccttgaaagagaatgaaaatggggcttctcctgttactgctccacaaattccaactcccatttcaacctcagttaagactccagttaaccctgcactgagttatgttacacttgcctccttcagctgggatcaagataacgataaagtcaagatatatgtctctctggaaggagttgaacaggaaaaaattcagacagagttcaagccaatgtcattcgatgttaaa

SEQ ID NO: 204817 - DNA, 331 bp, Gossypium hirsutum
agcgaatagccaagtctaaagaacaattatatttggttctcctcaaaatccgggaaaattattcagagttcagagaaatatcaactggctgcagttgcaattattccagttacaaaaacaacactaacaatgccctcaaagtccaaggcaaggaaaagcaaaattctgtaacaaaccttcggcattatctaataaaattataaaacttacgaaaacccaaaggaacgctaccaattcttaaccgataagcagtttgctctcatccaagaaggtgtaagtgggtacttccaggttgtatggtgctggacccttgcgaatcctgccagagaca

SEQ ID NO: 204818 - DNA, 361 bp, Gossypium hirsutum
gttttgagactcaaggtgtcattcctgacatagttaccatggcaaagggtatcggcaatggattaccattaggtgcagtggtcactacaccagaaattgcacatgtgatggctcaaaaaattcagtttaacacttttggaggaaatcctgtatgttctgcaggtggacttgcagtgctcagagttatagacaaggagaagcgtcaagcacattgtgctgatgttggttctcacttgatcggacgcttgagatctttacaggacaaacatgatatcattggagatgtcagaggtagaggcttaatggtgggtgtggaacttgttaccgacaggaaggagaagacaccggccaaggcagaaac

SEQ ID NO: 204819 - DNA, 358 bp, Gossypium hirsutum
tttatggctccttccaaagacacggagtcttgatttggatacgctctaacatttgtccgtacagataattcatactaaagatttaaccggaaaccaaagccatggaaatgtccaacgatctcgataggttgctctttttcgagcaagctcgtaaaatttccgaggctacttacgcttccaatcctctcgatgccgataatttgaccagatgggccggagctttactggagttgtctcagtttcaaagcgttccagattctcagaaaatgattcaagatgctatttcgaaactagaggaggctttatcgattaaccctagaaagcatgatgctttatggtgcttgggaaatgctcagac

SEQ ID NO: 204820 - DNA, 292 bp, Gossypium hirsutum
acataaaagaatcctccattaataaaagctgaatacagcacaactctagggataatttacacacattaacaccataattcaaaatgcagttcaacacaacaaaggactagtaggaacacaaaaagtagatgaagatcccaacacacacacacacacagatttaatcatttcaatctctgggcttgaatggaataactctaatgattatttggtgggaaactggaacaagggcaacttcaatggaagggcccacccagaacacccaatggtcattccaagcatggtctttggt

SEQ ID NO: 204821 - DNA, 357 bp, Gossypium hirsutum
taatatcgaacgaagaagaatttgttaagcgatcgatctgtggattacgatggaagtgcctgtctcatgggatgctctacgcaaacaggcaaggaaactcgaagctcagttggatgagcaaatgaattcatatcgtaagttggtctccagtaaggcttcgataaaaaatgacttggaagagaatggtattgaatctggtatcgaccgactactaaaacagctacaagaagtaaatatgaaaatgcaagactgggtctcatctggtggatctgaaatggtttctcataccttgactaggcatcaagaaattcttcaagatctcactcaggagttctatcggcttcgctctaaccttaa

SEQ ID NO: 204822 - DNA, 360 bp, Gossypium hirsutum
gagaaacaggcagcaaaggcagaggccgctgaggaggaggaggcaccaaagcccaaaccaaagaatcctcttgatttgctgcctccaagtaagatggtactggatgactggaaaaggctttactctaacacgaagaccaatttccgagaggttgcgattaaaggattctgggacatgtatgatcccgagggatactcactgtggttttgtgactacaagtacaatgaggagaatacagtttcatttgtcacaatgaacaaggttggaggattcctgcagagaatggatttggcccgcaagtatgcatttgggaagatgttggtgatcggtgctaaccctccattcaaggtgaaaggacta

SEQ ID NO: 204823 - DNA, 362 bp, Gossypium hirsutum
tcaaagacaaagaaagcggccatggagaaggaaagagagcaacaagtttacttggcaaggctcgctgagcaagctgaaagatacgatgagatggttgaggccatgaagagtgttgctaagttggatgttgagctgactgtggaggagaggaatctgttatctgtgggatataagaatgtgattggagcaagaagggcatcctggcggatactgtcttcaattgaacagaaggaggaggccaaaggtaatgaacaaaatgtgaagaggataaaggattataggcaaagggttgaagatgagctctcaaaaatatgcaatgacattctctcagtcattgataagcacctcattccatcttcctt

SEQ ID NO: 204824 - DNA, 352 bp, Gossypium hirsutum
aaaaggatgtcatcccttgatgaagttaataccatcgtgaagggggcccgatcagatgtgtcaaaagttgtcaacgctgatgagtttgaatacaaggatcccgttgatggttcagtttcaaagcatcaaggtattcggtttttgttcgaggacggatcacgattggtcttccgtctctctggaactggttcagaaggtgcaactatccgtctgtacatcgagcaatacgaaaaggatccatcaaaaataggaagagattcccaagaagctcttgctcctcttgtggaagttgctctgaaactttcgaagatgcaggagttcaccggccgatccgcaccaactgttatcacat

SEQ ID NO: 204825 - DNA, 354 bp, Gossypium hirsutum
tgttccttctgccaccccatgtgactcatgtccaccgccagcctgaacacagtccatcgaactactctccaccaccagcatctgtttcaaatgtttcccatgaaagtagccaaggaagggttgatgaccatccttcttttagaccccatttgccacctgaattctacaagaaacctactgtgaaagtctattgcaaagctgatcctaattttcatctcaccatcagagacggtaaagttattcttgctccatctgatccctctaatgaattccagcactggtacaaagatgagaagttcaacacaagtgtgaaagatgaagtgggtttcccaagcttttctctgggtaataaag

SEQ ID NO: 204826 - DNA, 356 bp, Gossypium hirsutum
  unsure (1)..(356): unsure at all n locations
gaggatcttgctgctcttgagaaggattatgaagaagttggtgctgaaggtggagatgatgaanaggaaggtgaagaatattgatgctactatcgcaatatcatttattttgaagatgatgggttcaccctgtgagggtatcctgttctttcttattcgtgtgaggtttctcaaattatgcctatggaataaatttagtcatgtttgcttgtcatttttttgttgttagaaatgcttgtcttttacttatgatgctccataagaacatgaatagccttacaagctattgttctgtttttcatgttgtaagatttgtctaatgcctttttatgctatcaacggagtgatatttatat

SEQ ID NO: 204827 - DNA, 351 bp, Gossypium hirsutum
acgagtcgtatcgaccacgctcttcctgtaccttctgttctcagaagccccttcaaaattgtcgatggtcccgctagttccgccgccggcaaccctgatgagatcgcaaagctgtttccgaatatgttcgggcaaccctcgtctatgctggtgccgaacggagtagacaatattggatctgatcagaagctaaagatcggcgtcgttttgtctggagggcaggcacctggaggtcacaatgtgatttgcggaattttcgattacttgcaggagcgtgctccaggtagcactttgtatggttttaagggtggtcctgctgggatcatgaagggaaaatacgtagaattgact

SEQ ID NO: 204828 - DNA, 359 bp, Gossypium hirsutum
ttctatacagccaccccatgtgactcatgtgcaccgccagcctgaacacagtccatcgaactactctccaccaccagcatctgtttcaaatgtttcccatgaaagtagccaaggaagggttgatgaccatccttcttttagaccccatttgccacctgaattctacaagaaacctactgtgaaagtctattgcaaagctgatcctaattttcatctcaccatcagagacggtaaagttattcttgctccatctgatccctctaatgaattccagcactggtacaaagatgagaagttcagcacaagtgtgaaagatgaagtgggtttcccaagcttttctctggttaataaagccactg

SEQ ID NO: 204829 - DNA, 354 bp, Gossypium hirsutum
gagtttataatgtggacatggtccctaagtttatgatggcaaatggcactcttgtgcgtgttcttattcatacggatgttacaaagtatctttacttcaaagctgtggatggtagctatgttttcaataaagggaaggttcataaggtgccagcgactgacatggaggcactcaagtctccacttatgggaatatttgagaagcgtcgtgcacggaagttcttcatatatgttcaagattatgatgaaaaggatcctaaaactcacgagggaatggacttgacaagggtgtcaactagggcactaattgcgaaatatgggcttgatgataacactgtggatttcattggtcatg

SEQ ID NO: 204830 - DNA, 355 bp, Gossypium hirsutum
atggagagttcgaaaccaacggtggagatcaacggattgagcttcacgtatcctggaatcgacggtcatccaccgccgggatccaagcctcttatcgacggtttctctctcaccctaaacgctggcgatcggtgtctcctcgtcggatccaatggcgccgggaaaacaacgatattgaagattctgggagggaagcatatggtggagccgcacatggttcgagtattgggaagatccgctttccacgacaccgttttggcttcctccggtgatctttgttatcttggaagagagtggagacgtgatgttgcttttgcaggattcgaggttccaattcaaatggacatttcagctg

SEQ ID NO: 204831 - DNA, 360 bp, Gossypium hirsutum
attttacttgagccacaacaattttgcaggagatataccatattttactcttccgaacttgcagcgattaaatctcgagtataatcaatttactggcagcgtcccttttgccatcagtcagatgccttctcttcagtacctaaatcttgctcataatcagttgcagaatgcgctgaacgacatgtttggaccactttcttccctctccacactggatctctctttcaattctctgaacggtggtctgcccgagagttttaagaatcttaccagtataagctctatgtacttgcaaaacaaccagttttcaggcactattgatgtccttgcaaatcttcccctcgatactctagatgtttc

SEQ ID NO: 204832 - DNA, 360 bp, Gossypium hirsutum
tgttctttcagccaccccatgtgactcatgtccaccgccagcctgaacacagtccatcgaactactctccaccaccagcatctgtttcaaatgtttcccatgaaagtagccaaggaagggttgatgaccatccttcttttagaccccatttgccacctgaattctacaagaaacctactgtgaaagtctattgcaaagctgatcctaattttcatctcaccatcagagacggtaaagttattcttgctccatctgatccctctaatgaattccagcactggtacaaagatgagaagttcagcacaagtgtgaaagatgaagtgggtttcccaagcttttctctggttaataaagccactg

SEQ ID NO: 204833 - DNA, 363 bp, Gossypium hirsutum
ggaagcgcatctctcaaaatggttgaagaggttcgtcggcaattcaatacaattccaggactaatggaaggcagggtaaaaccagactacgcaaactgcgtcaagatatcaaccgatgcctcactccgcgaaatgatcccacccggtgcactcgttatgcttactccacttatagtaggaatccttttcggggtcgaaactctcgctggtgtcctagctggtgcactagtttctggtgtccaggttgccatctcagcttcaaacacaggaggagcatgggataatgccaagaaatacattgaggcgggagttagcgaacatgcaaagtcattgggaccaaaaggttcagaatgtcacaaggca

SEQ ID NO: 204834 - DNA, 356 bp, Gossypium hirsutum
agagaatttattgacttgcatgataactttgatcagattggccttgcacaaaagatcgagaaacatgagctgctggagatgaggcgagttgctgcatacatttacaagaaggctggcagatggaagcagtccattgcattgtcaaagaaagacaaccattacaaagatgcaatggaaacagcttcacagtctggtgaacgtgaacttgccgaggagttacttgtttactttattgaacagggtaagaaggaatgctttgcatcatgcctctttgtttgttatgacttacttcgagcagatgtcgttctcgagctagcctggattcacaatatgatcgactttgcattcccgtatct

SEQ ID NO: 204835 - DNA, 308 bp, Gossypium hirsutum
  unsure (1)..(308): unsure at all n locations
tagcatttttggcttgnngggatcttgagcaatgacttcaaagtttaacaggtgtatctccaggtgaaggcactggtgcaaccatgtctgatgatgaagatgaagttgtagatagtgataccagcttgtttgatggaagttctgatgggattgacagcatggggtttggccccctcgtctcatccgagactgatagatcactaatggagcgtgttaggcaagaactgaagcacgagctgaaacagggttacaaagagaaaattgtggacattagataggtaaatctacgtaagagacaagctggaatg

SEQ ID NO: 204836 - DNA, 360 bp, Gossypium hirsutum
gacatgcacaaggatctagctgaaaagtatggagttagtgggtatccaacactgaaattcttcccaaaaaacaacaaagctggtgaagactacaatggtggcaggggtctagatgactttgtttctttcatcaatgagaagtgtggcaccagccgtgatggaaaagggcaactgacttcaaaggctggtattttgtctagtttagatgcactggtgaaggattttgtggctgccaacaatgatgagaagaagacggtcttctctaagatcgaacaggaagttgagaaactcaaggggtccagtgagaggtatggaaagatatacttgaaagctgctaaaagctgtttggagaaaggtgct

SEQ ID NO: 204837 - DNA, 114 bp, Gossypium hirsutum
gcattttaatgcatctaagatcaaggaccttcaggctcaagatgatggggttaaagccatgaacgaatcagcatacaaggaccttctcaatgtgagccatgatctctatgttta

SEQ ID NO: 204838 - DNA, 349 bp, Gossypium hirsutum
ctttgctgctaattctcctaattgtttcagaaaatctaacacatgggaaaaaatgagagagatccttcatgttcaaggaggacaatgtgggaaccaaatcggttccaagttttgggaggttgtttgcgatgagcacggcatagatccaactggaaggtacattggttcctcggatctgcagatggagcgtgttaatgtttactataacgaggcttcatgtggacgctttgttcctcgtgctgtgctcatggacttggagcctggtacgatggacagtgtccgaactggtccttacagccagattttcaggccagacaactttgtttttggacaatccggtgctggaaac

SEQ ID NO: 204839 - DNA, 365 bp, Gossypium hirsutum
  unsure (1)..(365): unsure at all n locations
gggggggnggntctagaactagggggatccccccggccggaaggattccggcccggggccatatggtttttccgatctataccaaaagaccacagggatggatctatggatttcctttttcagcagggtattttctttttcctttttcagtttggttcgatttttttaactaatttcctttctctctccactgtttcaaaccaagctttttttttgtcaaagccatcggagctcggtaattgttctcagcttcaagtgattcaccttcgttcgaatcgattgatcgataatgtaacgacggatttctctcggttgtctcatttaaaagagcttgatttgggttctaacaagttaaatggtgaaat

SEQ ID NO: 204840 - DNA, 344 bp, Gossypium hirsutum
gcattttaatgcatctaggatcaaggtccttcaggctcaagatgatgtggttaatgcaatgaaagaatcagcatccaaggaccttctcaatgtgagccatgatcaccatgtttacaaaaggcttttgaaagatctaattgttcagagtttagttagactgaaagagcctggagtcctactccgttgtcgcaaagaagatttgcatttggtggagtctgttctggattcagcaaaggaggaatatgcttctaaagtgaatgttcatccaccagagataatcgttgatgatgtccatcttccccctggcccttctcatcatcatgggtttttccatcatcatgctg

SEQ ID NO: 204841 - DNA, 342 bp, Gossypium hirsutum
aagctcgattagaagtcatcaccatcaagaaaggttgtcatccgtaatattaattacatttcttcgaagaggaatggggataagggcagtgattccgaagataattctgatgaggatgagttcattgatggagattctctcaaacagcatgtagaggaggctgttggatcactagggaaacggcacaagtttacctcacaccatcataagaaacacaatggaagcaagcttctaaactgtgtgttctactaatattatttacttgtaacctaatatttctcatggtgtaaaacctatattaatccttttgattcttatcaatattttttttttgctagacat

SEQ ID NO: 204842 - DNA, 354 bp, Gossypium hirsutum
atgtattacagcgtaagacaaaagtaaagaggcgaacagagagcagatctcaaaccatttcattcatgtcttaacatcccaaataatatggatcgattacttaaagctgcaagagcttccggttctctcaacttatccaatcgatctctcagagatgttccagaagagatctacagaagcttggatgctgttggggagggtgaaaaatggtgggaggctgtggagctacaaaagctaattttggctcataacaatatcgagtcattgaaggaagaagtgaggaatttacctttattgactgtgttgaatgttagtcacaataagcttacagatcttccggctggaatcggacag

SEQ ID NO: 204843 - DNA, 349 bp, Gossypium hirsutum
taattgttaagattgaccccagggaaggattcttgaagaatggaaaatctcctgttctcactatcttttcagccggccatgctttgcatgtttttgtcaatggtcaactatcaggaagttcctatggaagtctagaattccccaaactaacattcaaccaaggcgttaatctgagagctggtgtcaatacaatttcgcttctaagcattgctgttggtctccccaatgttggtccacattttgagacatggaatgctggtattcttggccctgttacattgaatggtctgaatgagggaaggagagatctctcatggcagaaatggtcttacaagatttgccttaaggg

SEQ ID NO: 204844 - DNA, 358 bp, Gossypium hirsutum
ccatgttggattttttgaaacaaaccgggtcttacttaatggttaatgcgtacccgttttttgcttattcggctaattcggatcagatctcacttgattatgctttgtttaaggataacccgggtgtagtagattcgggtaacgggttgaaatattctagccttttggaagctcaaatcgacgccgtttttgcagctatgtcggctattaaatacgacgacgtaaagatggttgtgaccgaaacgggttggccatcaatgggcgatgaagatgaaataggtgctagtgaatccaatgcggcgtcgtataatggtaatttagtacggaaagttttgaccggtaatgggacccctttaag

SEQ ID NO: 204845 - DNA, 352 bp, Gossypium hirsutum
  unsure (1)..(352): unsure at all n locations
taggtttggaacaagcgaggaacgagtgaccagaagctccgcttaagcgctcgacatgcagttagctcaaaacatgttcatcatgtggccgagcgaagcgcacctgtgtgaagcagcctagcatcactttagatagaagcagaatggataacttacaactgaaagtaagttcttcggatcgatatctcgtacgacgtaatggagatcttggtctagatccggtggttcgcagaattcgggacctaacgatgtttggttcgtcccatgaacgggagcggacaattcccttttcggagaatggctgcaatcacaagcaagtgattgaatgagtggngggctccgaaagcacatg

SEQ ID NO: 204846 - DNA, 288 bp, Gossypium hirsutum
  unsure (1)..(288): unsure at all n locations
aagatgacagaagcgagtaagaaaagcatgagtgcggaaccagttcatgttcaatgcacagcctcgtcaaacgaaacaagatcaaacaacaatctccccaattntcttctntcagtgaggctaaaatacgtgaagctcggctaccattatttaatctccaacgccatgtatttaatgctggtgccgttgttagccattgcttcagctcatctctcaacactcacggtccttgatttcgttcaactatgggaccaactcaagttcaatcttgtctctgttactttatgt

SEQ ID NO: 204847 - DNA, 210 bp, Gossypium hirsutum
  unsure (1)..(210): unsure at all n locations
gtcgntacctcacagcatcagccatgttccgaggcaagatgagcaccaaagaagtggatgaacaggtgatcaatgtccaaaacaggagctcttcctacttcgtcgaatggatcccaaacaacgtgaaatccagtgtctgcgacatcccacctagaggctataatggcataaccttgaggaaactcgactcatccggaatgtcagcagtac

SEQ ID NO: 204848 - DNA, 283 bp, Gossypium hirsutum
  unsure (1)..(283): unsure at all n locations
gttgattggaatcaactatccaggcacanaggctgaactgaaatgctgcataaacgatgtgaagagaatgtacaaatgccttatagagcgctatggattctctgaagaagacatcacggtattgatagacaccgataattcttatgatcagcccacagggaagaacatcagaagggctntgaatgatcttgtgagaatcggctgagcctgggattntctgtttgtgcactacagtggccatgggactaggcttcctgctgagactggngacgatgatgatact

SEQ ID NO: 204849 - DNA, 358 bp, Gossypium hirsutum
  unsure (1)..(358): unsure at all n locations
acaccgncaccctcaccagcaccggcaccgacaccggcatacacaaatatcaaagacttactctcggtggcaggtccatatcacacgggcctgngctacctcgagtcgactaaattaatcgacaccgttccaaatccaagccaacaacacggttgaaggcattacgattttcgtaccgaaagacagcgcattcaaggctcttacgaagccttcattgtcaaatctaactgatgatcagttcaaatcagtgctcctttaccatgccttgccacgatactatgcccttgcggacttcaatgacctaagtgagaaaggccctattagtacacttgctggtggccaatacactgtgcaattc

SEQ ID NO: 204850 - DNA, 321 bp, Gossypium hirsutum
cgaggaaaagctaaacagctggagcttttttggctcgaaatatgaatattccgtcgatctctttgataaagctgccaatttcttcaagctggggaaatcctgtgacagagctggatcaatttatgtaaagttagcaaattgtcatttgaaattagaaagcacccatgaagccgctcaagcttttgttagtgctgctcattgctataagaaaacatcgacaaaggaggcgatatcgtgcttgcagcaagcagtgaacatgttttgtgatattggaaggctcagtatggctgcaaggtattataaggaaattgctgaattata

SEQ ID NO: 204851 - DNA, 319 bp, Gossypium hirsutum
  unsure (1)..(319): unsure at all n locations
ctcgtgccgccacaaaatgttgtccgctggatcttcggttaaggctaggtgatcaacctccactacctcgcccattcaaatntaaaaaggcctgaatttgtttgaattttctggcgatactatggatgaatctttcttcgatctaatggaattcttgaagaaacctaccataaccgaaacattcgtcgacattttgttatgtgcggtgcccatatggttagcagtgatgatcgggctcttcatcggttgggcttggcgtcctaagtggaccagctnggtttttctaggtctccgatctaagttccggttcgtctggact

SEQ ID NO: 204852 - DNA, 323 bp, Gossypium hirsutum
  unsure (1)..(323): unsure at all n locations
tgcggcaatcagatacgagccaagttctgtgaagtcgtatgtgcttaacatggcatcgattcaacgggtcgatatggtggtgactcggagctccagcttgagcgaatcaatgtttactacaacgaagccagttgtggccgttttgttccccgcgcagttttaatggatctggaacccggaaccatggatagcgtaagatccggtccttacggacaaattttccgacccgataacttcgttttcggacagtccggtgcgggaaacaattgggctaatggacattacactgaangagcggagcttatcgattccgttctcgacgt

SEQ ID NO: 204853 - DNA, 275 bp, Gossypium hirsutum
  unsure (1)..(275): unsure at all n locations
tgaagatagcgcatcanatcttgcagaggcaaaggctgcaattcaagcagggttgaggaaagcaaatgctagggacaggtcttcaaggagcaagcttaatagtcctggccatgaaaacagaaganaagacctaacaagtaactgttctgattcgtctagcggttcttcgtgaatatttgatgcacccaaattactttcgagatcaagccaagctagtaatgatgaagaaaatgctaagatagcatcagcatctgtaccactatcaatgttactta

SEQ ID NO: 204854 - DNA, 181 bp, Gossypium hirsutum
ctccaagcaagtattttccttacacgtttgtttttcttgtgattaaatcgatatggcttagctcaagtgtgcccttaaaacttgcatgtggtggtggtgttgtgcatggtagtgggtgcacccctggctcaaggggccgtaacctgtggcaagtcaaaactcctccacctgataatactga

SEQ ID NO: 204855 - DNA, 387 bp, Gossypium hirsutum
  unsure (1)..(387): unsure at all n locations
ccacagctactattccgccgaagcccactgaagaggctntaacagtctggattgagcacacttctgcaaatggacgaaggtattattgcggtgggaagacacggcaatctagttgggagaagccattggaattgatgacaccgattgagagggcggatgcatcgactaactggaaagaatatactagtcctgatggaagaaagtattactacaacaaggttacaaatctatcaacatggtcactccctgaagagctgaagttggctcgtgaacaagtagaaatggcgtctgccaaaggaccacagtcagaagtttcttctcattttccagctcctgtacctactgcaagtaaagcacaatctggtgctgatacatcgtctacaataa

SEQ ID NO: 204856 - DNA, 131 bp, Gossypium hirsutum
  unsure (1)..(131): unsure at all n locations
tcactctggngatctgggtgtgaaaaatccagatggatacattgaaataaaagataggtcgaacgacataatcatatcgggaggcgaaaacataagcagcgtggaagtggaaaacaatctttatttgcacc

SEQ ID NO: 204857 - DNA, 263 bp, Gossypium hirsutum
caccgatgattacgagcgatgaagtcgcggactgaaagtactgcattaacgttcactgagaccgcgagggcaaggatcgagaaggccgatggggaatgtttaacgtttgaccagcttgctcttcgagcacctcttgggcagaacacggttctacttcgaggtacaaagaatgctcgtgaagctgtgaagcactttggaccaactcctggtgtgccacatagccacaccaagccgtatgtgcggtcaaatggaacgaaattcga

SEQ ID NO: 204858 - DNA, 360 bp, Gossypium hirsutum
  unsure (1)..(360): unsure at all n locations
cgagtgcatcagatatntaccatggagatgagatatgccaggagaaatccaagtttttgttggaggaagtaggcatgccaagggggcgtgggccacttagagacatcgaagaatgtgggtacgtgaaggacacaggtttcgtgtggctcaaacaaaagaagagcatcacccacggttcgaaagatgggagctggttctatgcaactgagtacggtgcgtgaaaagagacaaaactgctggtgaaacaaactttggtgatacactgtgttcatgtatctcatggaatattagatctaggttagattctgtacttgatgagacatagttagtagtaaaaatatgcttatagagtatcttatc

SEQ ID NO: 204859 - DNA, 517 bp, Gossypium hirsutum
  unsure (1)..(517): unsure at all n locations
ggaactngaacaataagttacttggttngaccgttttacaaacaatacaagatgtttnttgatgggtgcggttatcatgggacatgggggagcagagttaccggtgttacccggcatctttcatcgagaagccgcaaatcgaaagtggtgataaaattataatgcctccgtcggcccttgatcgcttagcatctctgcatattgattatccaatgttatttgagcttcggaatgatgctgccgagcgtgtctctcattgtggagtactggagtttattgcagaagaaggcatgatctatatgccatattggatgatggagaatttggtcctacaagagggagatatcgtgagggtgaaaaatgtaactcttacaaagggaacctatgttaaattacaacctcacacgaaggactttttggatatctcaaacccaaaagctatcttggagacaacactgangacatatcctgttaaccaccggggatagatatggtgcatatataataaaaagataca

SEQ ID NO: 204860 - DNA, 392 bp, Gossypium hirsutum
  unsure (1)..(392): unsure at all n locations
cccgagtaaaacgccaaagaaaacaaaaaatatgagaganatcttgctcatccaatgtggtcaatgtgggaaccagatcggngctaagttgtgggaagtcatatgcgacgagcatggagttgacaacactggaaaatataacggtgactccgaccttcagttggatcgcatcaatgtctactacaatgaagccagtggtggaaggtatgtcccacgcgctgttctcatggatctggagccgggcactatggattccgtcagatactggtcctttggacaaatctttcgccccgataacttcgtcttcggacagtctggtgctggcaacaactgggccaagggtcattacacggagggagctgagctcattgattctgttcttgatgttgtca

SEQ ID NO: 204861 - DNA, 425 bp, Gossypium hirsutum
  unsure (1)..(425): unsure at all n locations
gctaggaccaatccatattgtttccgatactacgtaatgagggtattatctggtaaaacggatcttgtgctgggtatcagaccaggctcgtccgttatttctctatgattacaatgtcaggcttctttatggtatttatagggctacctcttctggtgctatgaaactagagcccaatgctattggtggggctttccctgctcacgtgcggttcaccgtccattctgattgttttactctggcagagaacaatttcaagaaggctatcaaggaaaattatgatgaaaagaacaaattcaaaactgaacttactgctagacaagttcggaagctcacagaactttntcgaccagttccagttcattcaactgcactaccttttcactccccatcaanggcagcagctcgaatcactgaacaccctg

SEQ ID NO: 204862 - DNA, 264 bp, Gossypium hirsutum
  unsure (1)..(264): unsure at all n locations
gaaacattaccgtcttggtttctatcagcccataatccagatcattatggtggngaacctggaggtctagttgccatgctgagcggcgtgggcacttgcatactatgtagtgctntgtggtaccttggtgtggggtgtggattcctcctcaccgacatcaaaacggcgaccaaaggtccttgnggcgcatttggaatttcttgcgagcgcaatagatggcaaaatatcactnggatgtgagcatgccacttggcatgcgtatgt

SEQ ID NO: 204863 - DNA, 302 bp, Gossypium hirsutum
  unsure (1)..(302): unsure at all n locations
acatgcaactaaatcaaataaaggtccttttctgatgaggtgaactaanatatccgagtgaagacgtactggaatgttgcacgacaccaaaaaataagggttcacagttggaatccccttaactcatgctgcatgggatgatagtttataacaaagcatttctctcatagccgactgatgactgcttccacctctgaaggggtgtacagatggtatgtcggtgctactttggcaatatcaacattgttgggagtcaccttttcttccattacttgctntaaaatggacagagcaattgtttc

SEQ ID NO: 204864 - DNA, 241 bp, Gossypium hirsutum
  unsure (1)..(241): unsure at all n locations
gngagattgagatcgaacgattataactcggccaacatcctgtttttagaactgtaactgttaaatcaatccccggatgtgcagcggggtggttcctaagatagtcctcaaagctagcttggttttccctcgccaatgtcagatctgtgaccatgccttccatctntgaggtgaactgtccaccacattgctgacttatgttagtcagaatactcctttcatgatcatcattagcactacg

SEQ ID NO: 204865 - DNA, 403 bp, Gossypium hirsutum
  unsure (1)..(403): unsure at all n locations
aatgggttgtacaaatcttgngtcatccaacatggcaaagcttactattggcatcggtgaagaagagaaaaggttcgaaatctntaagcggcacttgagattcattgatgaacataactctaacaacaacactacatataagctngggttgaacaagtttgctgatttaaccaaccaagagtaccgagccaagttcttgggcaccaggactgaccctagacgtcgactcatgaagtccaagatccccagctcacgttacgctcaccgtgccggcgataacttgccggattcagtagactggagagatcatggagctgttagtccggtcaaggatcaaggatcttgtggaagttgttgggcattctcaacaatngcaacagtggaaggcataaacaaaatcgtg

SEQ ID NO: 204866 - DNA, 219 bp, Gossypium hirsutum
  unsure (1)..(219): unsure at all n locations
aatactntattngatttcatcaaanaacaatcccatcatgagagatatcctccacgttcaagccggtcagtgtggaaaccaaatcggaggcgaattctgggaagttgttagcgacgaacatggcattgatcccaaagggaactacgtcggtacttctcgtgttcagcttgagagggttaatggttactacaacgaagctagtggtggtcgtacctaccc

SEQ ID NO: 204867 - DNA, 368 bp, Gossypium hirsutum
  unsure (1)..(368): unsure at all n locations
cggatctgtgcaaatggcttatgccatctccaaggaagctgcttcaaatgctccaagtgtaccagcaggacaggacaattatgtaaatgaaatgtatctgaagggatcaaaatattacctctatgttcacagttatttgtgctatggcctattggcagctcgagcagaaattttgaaggcatctgatgattctggcaaccctngcatcttggagggttttgatggtacttatacatatggaggaaatcagtataaagcatcagctccttcatcgggtgcaagcatggaagaatgcaggagggtgactcacaaggctcttaaaataaatgacacatgcatgcatatgaagtgcacatttggtggtatat

SEQ ID NO: 204868 - DNA, 327 bp, Gossypium hirsutum
  unsure (1)..(327): unsure at all n locations
taaacatggacttcgaccattcatgcattntagcctggctcggccactaagccttgaatcatatgacgctggtgcatgtgccatcatcatgcagtaatttcatggtatatcgtaatatatagttaataaaaaagatggtgattgggaaatgtgtgtgtgcattcctccatgcactaatggtgaatctctntgcatacatagaaattctaaatggttatagtttatgttatagtgtatgttggagtgaaaataaatttaaatgttgtatctaatggtaacatcactnggcttggattaaatgtatgtatgtnatttactttaatgata

SEQ ID NO: 204869 - DNA, 198 bp, Gossypium hirsutum
gagaaagacacacctgagttctccaaacaggagatgcctaaagagcttgatacacacgaagtcgaatatccgaaaataccctaatacaaggcgaaaacatgatgaggataagacacataaacatgaagagtaccacgagtcatactaatcgaacgagcacgaagagtacgagaaagaacaacccgagttccctaaatg

SEQ ID NO: 204870 - DNA, 256 bp, Gossypium hirsutum
ccagtctttgatctcgaagaaatcgaagaagggcttgaaggatacgaagaactggagaaatcgtcgttaatgtcgcagaagaatttcgagaaacgattcgggcaatcaccggttttcattgcctcaactttgatggaaaatggtggccttcctgaaggaactaattccacatcactgattaaagaagccattcacgtaattagctgtggttatgaagaaaaaactgagtggggcaaagagatcggatggatttatg

SEQ ID NO: 204871 - DNA, 256 bp, Gossypium hirsutum
gatcattatgcgattgatcatgctcggtcttttcttccattatcgagtaacaaaccccgttgacagtgcttttggactgtggctcacttcagtcatatgtgaaatctggtttgctttttcctgggtgttggatcagttccctaagtggtatcctgttaacagggaaacatacattgacagactatctgcaagatatgaaagagaaggtgaacctaatgaacttgctgcagttgacttctttgtgagtacagtggat

SEQ ID NO: 204872 - DNA, 256 bp, Gossypium hirsutum
ctctgatagaaaaatggagggagcaatcaacagacaacaagttttgcttaatcatttacaaccctcttctcagtctcatcaatcacctgctgctattctatttccttccaactgcgcggcgggggatagcgctgcttatcaccggacggctgcttttggggatgatgttgtgattgttgcggcatgtcgcactgcaatttgcaaagcaaagcgtggaggcttcaaagatacacttgcagatgatttgcttgcccct

SEQ ID NO: 204873 - DNA, 258 bp, Gossypium hirsutum
aaagaattcgctcaagccgaggggtccgggaagctatctctgcgttcaatgtctcgtctgatgggaagttccttgcagttggaacagtcggaggagacctttttatcatagattctgccaatatgcgggttcagatgatggttaaaaaagctcaccttggtttggttacagcattgacgttctcccctgattcaagggctttggtttctgcatcactggactcaagtgctaggttgaccccaatcaaggacaagacga

SEQ ID NO: 204874 - DNA, 266 bp, Gossypium hirsutum
tggggtgggcttacatgcaaaaatcaaggtacttgacagcagaggtggtgtatcgaaaagcccagatgatcgacccagatgccaacaaggcctgcagcttgggaatttgcttgatcaaacaaggcagatacgatgatgcacggttggtgcttgaagaaatatcgcaacggaaaatcccaggttcggaagaaattagagccaggaatagagctgcggaattgttaatggaaatcaataccttcgagccgccaccatcggacgtatca

SEQ ID NO: 204875 - DNA, 257 bp, Gossypium hirsutum
ccaaaacccagctgttgattggttatgcacctcacatcctccagtttttggatggcatatacatggagaaagacatggatgatgtggtgatgaagactgccattggagtccttggtgatctggctgatacattaggaagtcatgctggttctatgatacagcaatctgtctcgagcaaagactttttgaatgaatgcttgtcttcagaagaccttatgattaaagaatctgctgaatgggccaagttggccattagt

SEQ ID NO: 204876 - DNA, 259 bp, Gossypium hirsutum
ctgagataaccaacagtggtggggaaccctcttcaatgatggccaaatgtgacccacgacacgggaagtacatggcttgctgccttatgtaccgaggagatgttgtgcccaaagatgtgaatgcggctgtggccaccattaagaccaaacgcacaatccaatttgtggattggtgccctactggattcaagtgcggtatcaactaccagccaccaactgttgttccaggaggggaccttgccaaggttcagagagctgt

SEQ ID NO: 204877 - DNA, 256 bp, Gossypium hirsutum
cgccctaaatgagaggagtggcatatcccacagcattctcactgttcatgttcgtggcacggacataaaaactaatgctgttttgcgcggtagtctacatttggtggatcttgctggcagtgaacgggtagatcgttctgaagcaactggagataggcttagggaggcacaacatataaacaaatccctgtcagctctaggagatgtaatctttgctctggcacaaaagaattctcatgtcccttatagaaacagc

SEQ ID NO: 204878 - DNA, 255 bp, Gossypium hirsutum
cacttgttgaacatgcacgagttgtgactcagaagcacagattctcatatggcgagccaatgactgttgagtccacaacacaagctctttgtgacctggcccttcgatttggtgaaggagatgaagaatccatgtcccgtccatttggggtgtctcttctcattgctggtcatgatgagaatgggcctagcttgtaagtatcagatgagttctcgttatgttgattttcatgtagaaaaatctctttcaacatat

SEQ ID NO: 204879 - DNA, 256 bp, Gossypium hirsutum
caaaactctgcattcagggggaacttcaatctgcaaaatcttcttattctgacagctattaaggcagatccatctagagttatggattatatcaataggctagataattttgatggacctgcagttggagaagtggccgtcgaagctcaactgtatgaagaagcatttgcaattttcaaaaagttcaaccttaatgttcaggctgtcaatgttttattggataacataagaagcatcgatcgggctgtggaatttg

SEQ ID NO: 204880 - DNA, 260 bp, Gossypium hirsutum
tgaacttttggtcaaattggggtccaaaaccctcttctcctgcgcacagtaaacaaaatccatggatcttgaaaacggaactgttcgatacgaagatgaatatataacgaattctcgaggactaaagctatttacatgcagatggttaccagtaaacgaagaacccaaagctttaatctttctctgccatggttatgccatggaatgcagtatcaccatgaacagtactgcaatccgattggtgaaagcaggatatgcag

SEQ ID NO: 204881 - DNA, 258 bp, Gossypium hirsutum
gcgaagctactataagtgggggcatccgaattgtcctgtaaagaagaaagtcgaaagatcacttgatggccaaatagctgaaatcgtttacaagggtgaacacaatcatccaaagcctcagcctccaaaacgaaactcgtcccaaggattaggatttactagtgatggaaccggtcaagatgccaacaactccttgtggagtaataatcataatgagaggggcgaaggttctgaaactagagctgaaaatcatagtga

SEQ ID NO: 204882 - DNA, 251 bp, Gossypium hirsutum
tttctctaggcgaatctactataagggggcgctttcaaattgtcctgtcaagaataaagtcgaaagatcacttgatggccaaatagctgaaatcgtttacaagggtgaacacaatcatccaaagcctcagcctccaaaacgaaactcgtcccaaggattaggatttactagtgatggaaccggtcaagatgcctacaactccttgtggagtaattatcattatgagaggggcgaaggttctgaaactatga

SEQ ID NO: 204883 - DNA, 254 bp, Gossypium hirsutum
ttcttattcctttattgcgttttagaatttttcttaatcgaaaatgagagagtgcatttcgatccacatcggtcaggccggtatccaggtcggaaacgcttgctgggagctttactgtctcgagcatggaatccagcctgatggtcagatgccaagtgacaaaactgtcggaggaggtgatgatgcttttaacacctttttcagtgaaactggtgctgggaagcacgtccctcgtgccgtcttcgtggatcttg

SEQ ID NO: 204884 - DNA, 257 bp, Gossypium hirsutum
cggagaatatgtatggggagagaaggcaggcttaagcaaaagaaaatggaaaaccagatgaagcttgaggctaaactccatgaactggaggtagaatggtgtggtgggtctgaaactatggaggaaattctttccagaattcaacagagagaagaggcagcggttaaacgtgaacgagccatggcatatgccttctcccatcagtggagggcaaatgcgagccaatatcttggacaagcatcctatggtgcaggcaa

SEQ ID NO: 204885 - DNA, 258 bp, Gossypium hirsutum
caacagtggaaagaaaagcagcggaaagtgtaccggcacgccgaggaggctgagaaaaggtttgaaaatttcaaggggaatttgaagtatatcctagagaggaatgcaaagagaaaagcaaacaaatgggaacatcatgtgggattgaacaagtttgctgatatgagcaatgaggagttcagaaaagcttacttgtcaaaggtgaaaaagcccatcaacaaagggataaccctgtcaaggaacatgaggagaaaggtg

SEQ ID NO: 204886 - DNA, 258 bp, Gossypium hirsutum
gttttgcaatccttttctgcggtgcgattgtatgggcttttgcagaaattttgacagcagctggtgcttatgataacagagctcctcaaactcagttcagctgccgtactgatcgttctgggctcatcagtgctgctccttggataaggtttccgtatccatttcaatggggaagaccacgttttaatgctggagatgctgttgcagtcatagctgcgtcctttgttgccatcattgagtctacaggtacgtttatta

SEQ ID NO: 204887 - DNA, 254 bp, Gossypium hirsutum
gttgtggttgcaccaactggtgccgctgtgggtttagcattctttagttatggctttccacaagctggtagttgtatagaagtcagtgttcccttgttgttgctggttcttatatgtaccctgtaccttcgaggaatatccatttttgggcaccgattgtttcgaatatatgcagttcctcttagtgttacaatcacttggatatatgcattctttctgacagccggaggagcttatgattataaaggatgcag

SEQ ID NO: 204888 - DNA, 259 bp, Gossypium hirsutum
gttacagagcagaagatgactatgattaccttttcaaagtagtattaatcggtgattcaggtgtgggaaaatctaatttactctcaagattcacaaggaacgagttcagcttagaatccaaatccaccattggtgttgagttcgcaactcgaagcttaaatgttgatggcaaagtcatcaaagctcagatttgggatactgctggtcaagaaaggtaccgagccataacaagtgcttattaccgaggagccgttggtgc

SEQ ID NO: 204889 - DNA, 254 bp, Gossypium hirsutum
gttgagttcatgcctttcgccttatcatttttcctcacattgagtgcagtaatgtggtttgcttatggactatttattaaggacctctgtgtagctctccctaacgtactaggcttcatcttggggatgctccagatgcttctctacgccatttacagacacagtgaaaaggttaacatagaggaaaagaagctaccagctgaacaaatgaaaagcatcaatgtcgtccttaccacattaggtgcctctgaagt

SEQ ID NO: 204890 - DNA, 240 bp, Gossypium hirsutum
tttctagatcagtctctgatactgggagattattcacttatgggtggagcaagtatggtcaactaggacatggggactttgaggatcaccttgttccgcataaggtggaatctttagccgacatttttattaagcagatagcaggtggatggagacatacaatggctctcacatctgatggaaaactctatggctggggatggaacaagtttggacatggtttagttggtgtcaacgctt

SEQ ID NO: 204891 - DNA, 257 bp, Gossypium hirsutum
cagaatgaaggagggtcagagtgatatctactacatcactggtgagagtaaaaaggcagttgagaactctcccttccttgagaagctgaagaagaagggttatgaggtcctttacatggttgatgctattgatgagtatgctgtcggacagctcaaagaatttgagggcaaaaagcttgtgtcagctaccaaggaaggtcttaaacttgatgagagtgaggatgagaagaagaagaaggaagctttgaaggaaaagt

SEQ ID NO: 204892 - DNA, 248 bp, Gossypium hirsutum
ataactacaggaaactttcactctaattttattctgtcttgtgcatctccattcttgtttgttcatacatcacataccataatctaaaagaaccacgcaagatgatttttttcaacagttaatgccacacattgtagtgtctggtcctttggttttcatcacaaatggatcaattcggacccaaagcaaggagaagattgaagccaatagcactgaccatataacaacaatggttggtgtcctgtttt

SEQ ID NO: 204893 - DNA, 255 bp, Gossypium hirsutum
cttggaagaggaagaaagggggcggagcatttggcgtcgatatttgggactgaaaaggacagagtgaactgccccttctatttcaagataggcgcgtgccgtcatggggatcgctgctcgcgtctccacaccaagcccagcatcagccctactatccttctctccaacatgtaccaacggccggacatgatcaccccgggcgtcgacgcccagggtaaccccatcgatccccgcaagatccaacaacattttgag

SEQ ID NO: 204894 - DNA, 254 bp, Gossypium hirsutum
tcccgccgttcctgaagcgaaatctgtcggaaaatgagctcctaactggcgttacgttcgcgtcagctggatcaggatatgattatttaactactaggttatccaatgccatcccagtttcaaaacaagttgagatgttcaagagttacataaacaagcttaagggaattgttggaaaagataagggcaacaacatcattggcgaagctgtggtaatcattagtgcagggactaatgatttcgttttcaatttc

SEQ ID NO: 204895 - DNA, 253 bp, Gossypium hirsutum
cttgtttctaactttgggggtttgttctcttcttctatgttcttcagtttttgaaccaacaatggctcagcctcgttcacctttttgtgaagggaaatgcaaagggaggtgcaataaagcggcggtttgggatcgatgcttcaaatattgcggcatatgttgcgaggagtgtaaatgtgttccttccggtacttttgggaacaaacacgagtgtccttgctacagagacatggtgaataacaagggcaaaccc

SEQ ID NO: 204896 - DNA, 259 bp, Gossypium hirsutum
tcgaaagatcaaatcaagatgcctgccaaaatgaacgacgctgatgtatccaagcagatccagcagatggtgagattcatccgccaggaagcggaggaaaaggctaacgagatctctgtttccgctgaagaggagttcaacatcgagaagcttcaattggtggaagcggagaagaagaagattaggcaggagtacgagaagaaggagaagcaagttgaaatccgaaagaaaattgagtattcgatgcagcttaatgcat

SEQ ID NO: 204897 - DNA, 255 bp, Gossypium hirsutum
ctgaaatcctggcgaatgtggaattcatacaggagaagcgcttaatagggaaatactttgaggagatcagtcaagatactgggaagtatgtttttggagtggatgacacactgaaggcgttggagatgggagcagttgagacacttatagtgtgggaaaatctggacataaatcggtatcagctgaagaatagcactactggtgaaattaccataaaacatttaaacaaggagcaggaagccaatgagagcaact

SEQ ID NO: 204898 - DNA, 257 bp, Gossypium hirsutum
gcgagaaaagctcataggagggtgattcagaacgtaattttgtcaatcattactaaggcggctattcttgcactggcatttgctggtcatccacttgtatgggcagctgttcttgccgatgttggcacatgcttgttggtgatcttcaatagcatgctccttttacacggaacacacaagcatgctggaaaatgttgcaaatcttcagctgcatcacataaagacaagcaaggatgtaaaaccagtcattgccatac

SEQ ID NO: 204899 - DNA, 257 bp, Gossypium hirsutum
gtttcactgtctacccatcagcccaggtctccacatctgttgttgagccctacaacagtgtcctctcaactcactcccttttggagcacactgatgtggctgttcttcttgacaatgaggctatctatgacatttgcaggcgctctcttgacattgagcgacccacttacaccaatcttaaccgtcttgtctcccaggtgatctcctctttgactgcttcacttaggttcgatggtgccttgaacgtggatgtaaca

SEQ ID NO: 204900 - DNA, 255 bp, Gossypium hirsutum
tctctgagggtgtcttaggagacgccttcgatttactttcggtttccatttacttctttatttctacgtttttgaatttttagtaagcgaaaatgagagagtgcatttcagttcacatcggtcaggctggtatccaagtcggaaatgcctgctgggagctttactgccttgaacatggaatccagcctgatggccagatgccaagtgacaagactgtcggaggaggtgatgatgcttttaacacctttttcagtg

SEQ ID NO: 204901 - DNA, 256 bp, Gossypium hirsutum
aaaaatgatagcttgaaagtctaaaaggaatttttttttcttttttagttgaagatagaaaagaaaagaacaatggggtgttcattttcagggttgaatgctttatacgacgccgtaaatggtggaggggacgtttggatcaatgacaacaggttcaggatcgtgaggcagttgggtgaaggtggattcgcttatgtctatttggtgaaggaagtcatatccgacgcctcttcagcttcatctgttggcttagcca

SEQ ID NO: 204902 - DNA, 252 bp, Gossypium hirsutum
  unsure (1)..(252): unsure at all n locations
gaaaagtttaaagagtgagctcaagcttatgaggtgctgagtgacccanagaagcgtgagatatatgatcagtatggtgaggacgcccttaaagaaggaatgggtggaggtggtggtgcccatgatccatttgatatcttccaatccttctttggtggcaatccttttggtggtggtggtagcagccgaggccgaaggcaaagaaggggagaggatgtaattcatcccctaaaggtttctttggaagatctc

SEQ ID NO: 204903 - DNA, 257 bp, Gossypium hirsutum
agaagggcaggatgtgctgcgcttcattgacaacattttccgttttactcaagcaaactctgaagtgtctgccttgctaggtcgtattccatctgctgtcggttaccaaccaaccttggctactgatcttggaggtcttcaggaacgtattaccaccaccaagaaaggttctatcacttctgttcaagccatatatgtgcctgctgatgacttgacagatccagctcctgcaacaacctttgctcacttggatgcca

SEQ ID NO: 204904 - DNA, 257 bp, Gossypium hirsutum
cgggcatacatgcaagccgagttaccaacattccgagtacgggactgcaatcacatgggatgatgcattacggtcgagcgcacgtaactttgagcacaagagctacaacctcttcacgtgcaactctcacttgttcgtagccaattgtctcaaccgactttgctacgacggatcgatggattggaacatgataaccgtggtggctttagtaattatcaaggggcattgggtcaataacatgtcgataataagatcat

SEQ ID NO: 204905 - DNA, 256 bp, Gossypium hirsutum
agccaacaaagatttcggggatggtagacatgctgaatgaagggtcagtggagacaaagatcaattgtacgcgatttatagagaagttaatggatgagaaggaatttcgggctgagagcatctccagccatcggctattggttggtctaatgcgcttagtgaaggataagaggcacacgaatggaatcatgcctggtcttagcttgctcagatctatatgcttacataaacaagtcatgggtttgattgtgagtat

SEQ ID NO: 204906 - DNA, 267 bp, Gossypium hirsutum
gatccgccttttcccaattcgccctttttttagtcgcattacaattcactgggacgttttttacaacgtggtcactcttaaaaccctgtcttttcccaacttaatctccttgcatcacatccccctttctcctgctgtctttatatctaataggccctcacctatctcccttcccaacattatctcatcctttatttctaatgtcatattgtaagcatttatattttgttaaaattcactttaaattatttttaaatcaatctcatt

SEQ ID NO: 204907 - DNA, 266 bp, Gossypium hirsutum
tttttattcacttcaagctctttacacaggtggcagccatagaagcaacaacaatgtggagatcaatcataactttcattctcttcgcctttcttttcttccctatttcagcgacgaagataacactctacaacaaatgctcacatccagtatggccagggattcaacccagcgccggcaagccaattttagcccgcggtgggttcaaactcccaccaaacaaagcctactccatgaatctacctccgttatggtccggtcggttc

SEQ ID NO: 204908 - DNA, 264 bp, Gossypium hirsutum
ttcgagaaaaaacaattatggcaatcgaagttctccgaacacgagcacatataatatgaagaagctcctgccgccgaggatgaagacactggagctcaagtcgcccctattgtcaagttagaggaagtcgctgtcagtacaggcgaggaaaatgaagatccgatcctcgatctgaagtcgaagctgtatcgatttgataaagaagggaatcaatggaaagagagaggtgctggtactgtgaagctgttgaagcacaaagagaca

SEQ ID NO: 204909 - DNA, 250 bp, Gossypium hirsutum
ccggtcagcaaagcacaagggcaggaattgaagctcgaataggggtgatgttttacattcttgggaggtatgatgagtcaaggaactcttttgagagtgcagtaacaaagcttagagcaagtggggagaggaagtcagccttctttggggttgtcttgaaccagatgggcttggcttgtgtccaattattcaagattgacgaggctgccgagttgtttgaagaagcacgagcaatactcgaacaagaatg

SEQ ID NO: 204910 - DNA, 261 bp, Gossypium hirsutum
agacaaactcccaggacgggataagaaagatgaagaggacaccacccaaccaccagctgctgctgccccaattgagaacgaccaccatgaaggagagacaaaagagaagaagggatttttggtgaaaatcaaggagaaaattcctggttaccactccaaaacagaggacgagaaggaaaaagagaccactgctcccaattaatgaatcaatataatgcatttcaagtaaaagatgtgtagagattgtgtggtttatcaatt

SEQ ID NO: 204911 - DNA, 246 bp, Gossypium hirsutum
atcggtgaaacacgcacccaaaaaataaaaccctttgaaaaccaaagaaggaagaagaagatgtcgtggcaagcttacgtagatgatcacttgatgtgtgaaatcgaaggaaaccatctctctgccgccgctatcatcgcccacgacggcagcgtttgggcccaaagcgccaatttccctcagttcaagcccgaagaaattaatgccatcatgaatgactttaatgaaccgggtacgctcgctcct

SEQ ID NO: 204912 - DNA, 363 bp, Gossypium hirsutum
gagatatggaacttcagggaacctccaaatatatggaaaacttagaaaaattgtacatacttgtgttgggcacatctttgtttctgacattcgcatcttagtataggtttttgtagttattttatgttttgttttcttttttcctcttaatctgctatttttatttatttatttttgaatatttctcatttggcaggatgttcattattatgcttcattctttgagatgttggaagccgagagtcttgcaaaggtccttcctggagttaaaaccataaatgaaagtgttcaagtttacaggaagttttacacagaagagaaggaaaagacaaatggtgtagctgcaatttgcgttgcaaaaat

SEQ ID NO: 204913 - DNA, 394 bp, Gossypium hirsutum
  unsure (1)..(394): unsure at all n locations
tttgggagtatcgaaaaacgcttcttaagatgatctaaagaaagcttgtggaggggccgctattaagaatcatcccgataaaggcggcgatcctgaaaagtttaaagagttggctcaagcttatgaggtgctgagtgacccggagaagcgtgagatttatgatcagtatggtgaggacgcccttaaagaagggatgggcagcggtggcggtggccatgaccctttcgatatcttccagtcattctttggtggcaatccttttggtgctggtggaagcagccgaggcagaagacaaagaaagggggaggatgtaatccatcccctcaaggtatcattggaagatctctacaatggaacatcgaanaagctttctctttcacgaaacgtaatatgc

SEQ ID NO: 204914 - DNA, 392 bp, Gossypium hirsutum
caggttttggagcaattaggcctccctgctgctgggcggcggtcaacggctggatatccgaaaggacttcaaaatggatttacgaatacagttgttaaccggtttttattgcccccttctgattgtgaattcacgctcaattcactcttggatgagttgcaaacggatcaatggcccgtacaagcgggacacagggcgtctaggtgcactggagtggccttaagtgttgcagcacgattgcttggggcctgcttgcctggtactggtgctaggattattgctttggttggtgggccatgtactgaaggaccaagcacgattgtatccaaagacttgtcagaacctgtacgttcacataaagatctttttaaagatgctgcaccatattttaa

SEQ ID NO: 204915 - DNA, 306 bp, Gossypium hirsutum
atacatctaagcaatcgattaaaccagacgggctgttttaaaaatccctttattttccctgtataatacttgtttcttgtttaacgcataaaaatggcggccaaatctgaaggcaaggcaattgggattgatctcgggacgacatacacttgtgttgctgtatgtcagaatgatccagtggtgattattgccaacgaccaatgtaaccgaacgacaccgtcttacgttgctttcaccgacaccgagcgtctcatcggtgatgctgctaaaaaccaagtcgctattaacccacacaacactgttttc

SEQ ID NO: 204916 - DNA, 364 bp, Gossypium hirsutum
tcgctctcgcgctttcccttaatcaatcatgttgggtaccatgaagattatagattttttcctgatctcgtcacttctcttctcaatctctagggctgaatctattggatcagttttcttcatcgacagtcctactcatcaattccttcgcgctccatcctctaacgatgcctttcagtcagagccaatgttgttacctgaagttggtgcgactgcatcagtcttgcttggttttccaccacccattacactttcagctgctggctcatctaagctgaatgaggttctcatttctaatccatttgatagacctcgtgccgtttttatgcttgaagatagtggagctgatgatcctcttgttgtt

SEQ ID NO: 204917 - DNA, 388 bp, Gossypium hirsutum
attttatccccattttgaggccattcttgagagggtgtttgaagctatgcaaggaagtgaaggaaatcagattgcagcttttcagggaccaattccttgaggagaggaagaagcttgcaaccacaaaaagaattgacaacaatgctttgaaatgtgccattgatcacattcttgatgctcaacgaaagggagagatcaatgaaaacaatgttctttacattgttgagaatatcaatgttgctgctattgaaacaaccttatggtcaattgaatggggcattgctgagcttgtgaaccatcccgagatccaacaaaaactccgcaacgaaatcgacaccgtactatgacccggcgtgcaggttaccgaacccgacacccataagctttc

SEQ ID NO: 204918 - DNA, 381 bp, Gossypium hirsutum
  unsure (1)..(381): unsure at all n locations
catcgaagaaaatctcanatgtggagttcgggtgcggatttgaaagagaatttgcataagatcgcgcttgatgtatacgacgatgaggacgaagaacgcgagatctacggttcagggaatggagatcattcgccattctttgatagaaggaactctcataggtttgcccattcaaagcccgtttcagtctctccgatcgctaatggaaccgattcgccgattaattctgagattgaaagatacagagcagaaattaagaagcttcaggaatccgaggcagaaattaaggctttatcattcaattatgctgctttattaaaagaaaaagaggagcaaatttcgaggctgaaccaagagaatggctcattgaaacaaaatttg

SEQ ID NO: 204919 - DNA, 341 bp, Gossypium hirsutum
tctcgctctgaaaacccgtacggattctcgaatgggcaacaaatctgcttggtacctggaaaaaccaaagaaaatgaaaagaaatgcatgttgattgacgggaaatttttgttcctctaggctcgactttctgcatcatcaaaaggggagaaattagtcaggaaatgggggtatatctcagcaccccaaaaactgagaagttatcagaagatggtgaaaatgacaagcttcgatttggattgtcgtccatgcaaggatggcgtgcatctatggaagatgctcatgcagcatatctggatctggacgactcaacatcattttttggtgtttatgatggtcat

SEQ ID NO: 204920 - DNA, 363 bp, Gossypium hirsutum
ggaaagttgaggatgttgatgaggagaaagagagggaagagaagaaaaagaagaagattaaggaggtgtcgcacgagtggtctttggtgaacaaacagaagcccatctggatgaggaagcctgaggagattaccaaggaggaatatgctgctttctacaagagccttacaaatgactgggaagagcatttggccgtcaagcacttctcagttgaggggcaacttgagttcaaggctgtcctctttgtccccaagagggctccttttgatctctttgacacaaggaagaagcccaacaacattaagctctatgtgagacgtgtctttatcatggacaactgcgaggagttgattcctgaattcc

SEQ ID NO: 204921 - DNA, 343 bp, Gossypium hirsutum
gaggcacggtcgatacctcacagcatcagccatgtgccgaggcaagatgagcaccaaagaagtggatgaacaaatgatcaatgtccaaaacaagaactcttcctacttcgtcgaatggatcccgaacaacgtgaaatccagtgtctgcgacatcccacctagagggctatcaatggcatcaaccttcgtaggaaactcgacctcgatccaggaaatgttcaggcgagttagtgaacaatttaccgctatgttcaagaagaaagctttcttgcattggtacaccggtgaaagtatggacgagatggagttcaccgaagctgagagcaacatgaacgatctcgtg

SEQ ID NO: 204922 - DNA, 376 bp, Gossypium hirsutum
aggaaatggggaacagcataggaggaagaaacagggcaaaggtaatgaaaatcgatggtgaaaccatcaaattaaagacaccaattcgggtttgggatgttctaaaagattatccaacaggtcatgttttattagattcacaaactgtgaagcattatgggatccgtgctaagccattagagccacaagagagcttgaaacccaagaaaatatacttcttggtggagctgccgaagcttgccgatgatgaagttcataaggcgccgaggagggtgcggtcaggggggattcatatgagtgctaaagataggttagagtgtttgatgttgtcgagaaagacggtgtcggacctttctatggttcgaccgtcgtcgac

SEQ ID NO: 204923 - DNA, 388 bp, Gossypium hirsutum
aataccctttcgcctttatgttggcatgtgctgggtgtgggttgactatgctagctgattgtgtgatctcttatgtgtacgggaaagggaagaattcatgtaacaatggtgatttggagcttcaaggggctgagcagagcaaaacgaatcctcatggtcaaggcgatccgccagttggtaatggcactgatacaaaatgtgcgcagtcttcatctctcacatctgcaagttctttcggggatagtgttctgttgatcattgcattgtgcttccattcagtctttgagggcatagcagttggagttgcaaaaactgaaactgatgcttggaaagccttgtggacaatctccttgcacaagatatttgcggcgatcgcaatggggatagc

SEQ ID NO: 204924 - DNA, 381 bp, Gossypium hirsutum
gcctcctgtcactgccccgaattacgacattcttggggaggcttcggctactcattccatgccaatttggcagcctcctcctcctcctgatgcttcaacaagagatgagagtgtgattggtagggtcgaagaaccaccagctagtaaggaaggcgttcaatcgaagaaaaggcaggttgggggtgaccctaagactcccaaggccaaaaagcctaggaagcccaaggataataccaattctagtgtgaagccagcaaagaagagtatggatattacaataaacgggtatgacatggatatttccagcatttcgattccagtttgctcgtgcactggaaccgctcagcaatgttatcgatgggggtgtgggggttggcaatc

SEQ ID NO: 204925 - DNA, 371 bp, Gossypium hirsutum
ctggctttcgaacctctgggttttgggcagaaacaggatgctactgtggatatacctctggattcaatgaatgattctaagaaaagagaaaaggagctcgcagcttgggaagctgatcttaaaagaagggaaaagtatataaagagaagagaagatgctgtttcccaagctggtgtttctgtagatgataaaaattggccaccaattttcccgattatacatcatgatatagctaatgagataccggttcatgctcagaggctgcaatatcttgcatttgcaagttggcttggcataattctttgccttgtttttaatgttattgcagtgattgtctgttggattcacggtggtggtgttaagattttttt

SEQ ID NO: 204926 - DNA, 384 bp, Gossypium hirsutum
gaattttcttgtcataattttctgaggaaggcatcgatggcaaccaaagtgtatattgtatactattccatgtatggacatgtggaaaaactagcagaggagataaagaaaggggcggcatctgttgaaggtgttgaagcgaaactatggcaggtccctgagactctgtcagatgagattcttggaaagatgagtgcaccaccaaaaagtgatgtaccgatcattacaccacatgaccttcctgaggctgatgggtttatttttggcttcccaacaagatttggcatgatgtctgcccaattcaaagcatttatggatgcaactggtggtctatggagaactcagcaacttgctggaaaacctgctgggatattctatagcact

SEQ ID NO: 204927 - DNA, 374 bp, Gossypium hirsutum
ctgattctcgtcatggaaggtacttaacaggctgggcgatgtttccaggcaaaatgagcaccaaggaagttgatgaacaaatgatcaatgtccaaaacaagaactcttcgtattttgtggagtggattccgaacaatgttaaatcaagtgtttgcgacatcccaccaaccgggttgacgatgtcatcgacgtttatggggaactcgacgtcgatacaagagatgtttccacgtgtttcggaacagttcacagtgatgtttacgaggaaagcatttttgcattggtatacaggggaagggatggatgaaatggagtttactgaagcttgaagtaatatgaatgatttggtttctgaatatcaacaatatcaaaat

SEQ ID NO: 204928 - DNA, 309 bp, Gossypium hirsutum
ttaatttcaccctaaagagacaatgagagggctgcgtgcctttgcctttatttacttcttcttttgggataaaacattagctcaaatagctccggccccgccgttaaaggtggacaacatcacttccatcctcgaaaaacgtggccaattcaccactttcatcaatctattgaaagccacacacgttgctgatcaactaaacaaccacctaatcacaccggaccctaacaacgggataacggtttttgcaccgagtgacaacgcgttctccggactcaaacccggtacgttaaactcactttccgacca

SEQ ID NO: 204929 - DNA, 318 bp, Gossypium hirsutum
aaggcaaaggtccggtaaaattgaaatggtaattataacacaaccatattcttaacacacaataacattctttttataataacacacagtaacatatatatgaaagaaaatggggtctaaaaatcacagaaaattgagaaccccatatgtgcccccctttcaacataaaattataacgtctcagaaaaagagaaccagccatccacctaagaatgccaaaaccagctgagtccaaatgcccgagttcatcatgatcctaggagatgatgaacccgaaaacgaaggctttgatgaagaaccaagttcttcggattttgc

SEQ ID NO: 204930 - DNA, 378 bp, Gossypium hirsutum
caaggaccttttcaagttatatgatcctggcgggggtgagcacttcaatatctttgcagcaggactaaagactgcagacagagtggtcacagttagccatggatatgcttgggagattagaactttggaaggtggttggggtttgcatgggatcataaatgaatgtgactggaaattgcaaggtatagtgaacggaatcgatatggaggactggaatccacaacatgatgttcacctcaaatcagatggttatactaactactccatcgaaacactgcagcctggcaaggctcaatgcaaggcagccttgcagaaggagctcgggctacctgttcgtgaagatgtcccactgattggttttattgggagactggatca

SEQ ID NO: 204931 - DNA, 376 bp, Gossypium hirsutum
atttatcattgtttgtgacatcccacccggcggtgttacaatgtcatcaacattcatggggaattcgacgtcgattcaagagatgttccggcgtgtttcggaacaattcaccgttatgttccgtaggaaggcgtttttgcactggtatacaggggaaggaatggatgaaatggagtttacagaagcggaaagtaacatgaatgatctggtttcggagtatcagcaatatcaagatgctgttgcagatgacaatgatgaagattatgaagatgaggcaatggaaaattaatgtgatttttttaaaaaaattcaacttcaaaaaaaaaaaaaagccaatggtgtttttggggactacttggtgatttgtcatttgatg

SEQ ID NO: 204932 - DNA, 379 bp, Gossypium hirsutum
ttaaaaaacaaattccgttttttcgttaatgtccttccaacgctgatccgatcacagttgccgacatgtcttgttcttcatcatcgggctcggaggaagatgacgagggaatcgactcttacaggaaaggaggatatcatgccgtccggatcggcgatccattcgcctctggtcgttacatcgctcaaaggaagctgggttggggtcagttctccactgtttggctcgcttatgatacccaatcctctaaatatgttgctctaaagatccagaaaagcgcacaacaatttgcacaagctgcacttcatgaaattgatgtcctttcatctattgctgacggagacccctcaaactcgaaatgtgtggtgcgcctgattga

SEQ ID NO: 204933 - DNA, 278 bp, Gossypium hirsutum
gccatgttccgtaggaaagctttcttgcattggtgtactggagaagggatggatgagatggagttcacagaagcggagagtaacatgaatgacttggtttctgagtaccaacaataccaggatgcaactgcagatgatgaagagtacgaggaagaggaggaatacgaggcagaggcttaaaatctaatggaataatttggatgtttttcgttgtgttttggattgggcttgtggagtgtgttgatgcaatttctcactgcctgtttttgtcttttgat

SEQ ID NO: 204934 - DNA, 433 bp, Gossypium hirsutum
  unsure (1)..(433): unsure at all n locations
gacaaatctaagatntctacgtcttgcagaaatctanggtttttgtatctcataaattgaccacgtggatactcaacccccacactgagtgctcctctcttttcagctntgcttcaaaattcgatcacatttcccctaaattccgtcttttttcttcaaattccccacaaatggccatcactttctcagatctccacacggaatctggccttaaatcccttaatgacttcctcaccggcaaatcttacatctctggggataagctgactaaggatgacataaaagtttatgctgctgttttgaaaaatcctggtggttcatttcccaatgtgagccaatggtataattgtgtgtcttcccatctcgcttctagcttccctgggaaagctgttggcgtntcacttggtggcaaagctgatccagctcaatctgc

SEQ ID NO: 204935 - DNA, 307 bp, Gossypium hirsutum
gcaaaccgcatgtcattgcctccacaactgtcgcgacctgcaacggtggacaataatctcggctggaccaccgttgcaggttgcgaatgttggcaaaccgcaagtcattgcctccacaactgtcaatccaaaggcttcatacaatgcaggctgtgcaaaggcacctttcgtgtcggaaatgtatctgaggaccccaccgagattattgtgcatgggaaatttgattgcaccattgatccttaccatggtgatcaagcactttgacattcttggtcgattggtttgaaaaatttaagatagatccatc

SEQ ID NO: 204936 - DNA, 309 bp, Gossypium hirsutum
catcatctcaatatcctgatgtcaaccatgcaactgttatgactccatctggagaaaagccggttcgcgagcttgttaaggatgatgcatggttgaatggagaattcataaccactgtccaacaacgtggtgctgcaatcatcaaagctaggaaactctcaagtgcactatctgctgctagtgctgcttgtgatcacattcgtgattgggtccttggaactcccgaaggtacatgggtttccatgggggtttactctgatggttcatacaatgcaccagctggggtcatctattctttccctgtaactt

SEQ ID NO: 204937 - DNA, 355 bp, Gossypium hirsutum
ctttcttataacatgatggcagcactgttgtgctgtcttggatttatggattatggaataatttctcttcgttttctctatcgtttcatagacaacaatggcctccctcgaaactggctatttgttgggatgattcccacgttacttctcaacatccgtcgccctcatgataaagttgcccaaatcctcagacgaagcaatggtaccttcttttatagaggactttggtttactaacaccagcttcttaaccacctccgatcctgagaatgtgcgtcatgtattgagctccacttctgtttatttgaaaagtcctgaatggctgaaacaagttgatatcttcggcgaagcacttt

SEQ ID NO: 204938 - DNA, 364 bp, Gossypium hirsutum
ctcacttcaagctctttccatgggtttcgtccatataaacaacaacaatgtggagatcaatcataattttcactctcttcgcctttcttttcttccctatttcagcgacgacgataacactctacaacaaatgctcacatccactttggccagggattcaacccagcgcctgcaagccaattttagcccgcggtggattcaaactcccaccaaacaaagcctactccatgaatctacctccgttatggtccggtcggttctggggtcgacacagttgttcctttgacgcctcgggtcacggccgttgcccgacaggtgactgcagcggttccttattctgcaacaggctcggcggaaccccacc

SEQ ID NO: 204939 - DNA, 364 bp, Gossypium hirsutum
ctcaattgaaatcaaagttgacaaggttggggttgcgagattcaatgatcaaccagaaagcttattcctttctgttaatgataaatcgaatgataagaattctgagagaatgttagctcatctggggatgagcaaattgagtgatcctgataatgcaagtcaatgcagctcaatttaccatcacgagagaggttttagttctcattcatgagaagaagggagctctggaacggttcgaaaacagtcttcattgtcatatggaggactagtgacggcctctcccttagttggtctgccagaaatttcacatcttgggtggggtcactggtttactcttaaggatctcgatctcgccacaagtcac

SEQ ID NO: 204940 - DNA, 246 bp, Gossypium hirsutum
ttacgatctaaccccgcgtatcggcccgaacctagacaggcacttagggtttgcattgctggagttcttgcaagagcgacaactatacccagatgaacagatcttgaaagcaaagatcgagcttttgaacaagacaaatatggtcgattacgctatggatatccataagagcctttaccacaccgatgatgtccctcaggacatggtcgagaggagagtcgaggttgtcgctcgtctcaaaacttt

SEQ ID NO: 204941 - DNA, 315 bp, Gossypium hirsutum
  unsure (1)..(315): unsure at all n locations
aaaagagaaaacgggtggaaacataaaagattttcagtggctgcaccttcgaaaaagaaagttggtcctttctcttgcattcttacaaagaagcaaaatgcagaagccgccgccacaatcagtagactttgccctaaagcagacctcacccaacatcggggccggcagtcacccgtgataagctttcgtgcacctatgaccttgtggagcanatgcaatacctgtacgttctagttgtgaaggctaaggatttacctggaaaagatgtcactggtagctgtgatccttatgtggaggttaaacttgngaactaca

SEQ ID NO: 204942 - DNA, 201 bp, Gossypium hirsutum
  unsure (1)..(201): unsure at all n locations
ggcgcgtgagcaagacaggttcttgccgatcgcggacgtgggcaggatcatgaaaaaggcgttgccggcaaacgctaagatctccaaagacgctaaagaaacggtccaagaatgcgtctccgagttcatcagtttcatcacgggagaagcttncgacaagtgtcagcgccgaaaggcggagaacatttacggtgatgatct

SEQ ID NO: 204943 - DNA, 257 bp, Gossypium hirsutum
ccgcagatgaggcattagccgacccttactggaggggcttgtctaaaatcgagagggaaccttcttgtcaaccaatatcaaaattagagttcgagtttgagagacgacgggtgacaaaagaggacgtaagggaattaatttacagggaggcactagaatatcatcctcagctgctcaaagactacctgaacggacatgaaggatccaatttcctttatcctagtcctgtcggtcaattcaaaaagcagtttgcatat

SEQ ID NO: 204944 - DNA, 380 bp, Gossypium hirsutum
gcggaatctgaaggcaacttgaagggaattcttggttatgtggacgaagatttagtctcaactgacttcatcggagacaacaggtcaagcatttttgatgccaaggctggaattgctttgaatgacaactttgttaagcttgtgacttggtatgacaacgaatggggttacagttcccgtgttatcgacttgatccgacacatgtctaacgcttaagtgagtgagtgattgtgctttgcgtatccaagctttagcaattttaatttagaagagatgttatgagagaataaacgaattgtacggagcatatttttgtgtgaagaagggttgtttcagttttattacccaagtacttgaatgtttcaagtttcattgcagtt

SEQ ID NO: 204945 - DNA, 347 bp, Gossypium hirsutum
agaagctgctgttctctctctctttcccatgagtgggccccgtttttaatccatccctcaccaaaatattgggttggaaggaggaattcagggacattcccagaaaagtaaaaaccttccgggcggccctttgaacgatgacatgcttattctctatggactgtacaagcaagccactgttggaccaatgaataccggccgtgctggaatgttcaacatgagggaaaagtgcacatgggatgcatgtaaagctgttgaaaggaaatcaaaagaggaagcaatgggggattatatcaccaaagtaaaacaactgtttgaggctgctggaagatcttgatgtgtgtgtg

SEQ ID NO: 204946 - DNA, 270 bp, Gossypium hirsutum
ggcaagttggtcccggcgttggagaaggtggcatgttagaaagacatgacttcgccgccgccaatttgcattctaaaggaacgctagatttgaaaaatggacagagtagcactaattctggaggagacaccaccgttaagaagaaaaatatccatgggatactgaatactgtgagttggggaattttgtttccacttggagctatgattgctaggtacataagaagctttgagtcagcagatccagcttggttttatcttcatgttttct

SEQ ID NO: 204947 - DNA, 249 bp, Gossypium hirsutum
tcgagtttttttttttttggttttcttcaataacatctcaacttaaataacggaacattcatattatgtctggaacataaaataggtaacttataaagtactgaatgaaaaaacaaaagtgtccaccgccatggtttatgcgaactcctaccaattcctcaacgattggccttggcaactctctcaatttcgtccttcttcttgatggcatagctgttagatgatccctttgctgcgttaataagctca

SEQ ID NO: 204948 - DNA, 274 bp, Gossypium hirsutum
ttcactagcggcaatgcagatggaaggctggcagtatcagaggatgatggaagaacaatctgagtatgaccaggaagctttgcagcttcttaatgagcttatggtcaagagggagaaagagaaggtggagctcgagaaagagcttgagatatatcgcaggagggtgcaggactatgagaccagagagaaaatgataatgctgagaagaaggaaagatgatggcactaggagtgctacttccggtacttgcagcaatgctgaggacagtgacagt

SEQ ID NO: 204949 - DNA, 261 bp, Gossypium hirsutum
atttcatcaaaaaaaatggcatcatgagagaaatcctccacgttcaagccggtcagtgtggaaaccaaatcggaggcaaattctgggaagttgttagcgacgaacatggaattgatcccaaagggaactacgtcggtacttctcgtgttcagcttgagagggttaatgtttactacaacgaagctagtggtggtcgttacgtacccagagctgttttaatggaccttgaaccaggaaccatggatagcttgcgtactggtc

SEQ ID NO: 204950 - DNA, 274 bp, Gossypium hirsutum
cacagattgttttgaaaaacagcatctttcttgtgaattctgcaacctttggagtaacttaagaagaaatgggggaaaagagtttaattgccaaggatgtcaccgaattgatcggtaacacgccactggtatatctcaacaatgttgtagatggatgtgtggctaaaattgctgccaagttggaggcaatggaaccctgctccagtgtcaaggacaggattggatatagtatgattgcagatgcagaggagaagggtctcattgtaccaggcga

SEQ ID NO: 204951 - DNA, 254 bp, Gossypium hirsutum
gtgtaattttacactgaaggacggttcctttgatttcgagagtagatcttcgctcgcttctctctttcgtcgaactccgcgtaataatcgctcatatttctcgcagacgtgaagaatggggctgtctttcacaaagctgttcagccggctttttgccaagaaggagatgcgtatattgatggttggacttgatgctgctggtaaaaccaccattctttacaagctcaagttgggagagattgtcaccacaattc

SEQ ID NO: 204952 - DNA, 238 bp, Gossypium hirsutum
ctgtctctcgttctttttgctgttcaatcatgtcttgcttcattagcaaatatgctgatgagttggctaaaaacgctgcttacattggaacccctggaaagggtatccttgctgctgatgaatccactggcaccatcggcaagcgtctttcaagtattaatgtagagaatgttgaagacaacaggcgtgctctccgtgagctcctattcacaactcctggagctcttcagcacctcag

SEQ ID NO: 204953 - DNA, 231 bp, Gossypium hirsutum
ctcattctgaacaagcttcgtgctggaatcaaggtgtgtgccattaaggccccaggttttggggaaaataggaaagctggcttgcaggaccttgctgctcttactgggggccaggtaataactgaagaacttggtcttgacattgagaaagttggagcagaagtgcttggctcttgcaaaaaggttacagtatcaaaggatgacacaattatccttgatggcgctggagac

SEQ ID NO: 204954 - DNA, 261 bp, Gossypium hirsutum
tgtacgagctgaaggaaggagagggatgtgcagcttctgctcatgcatgtactgagtcttgtatgcttgagtttgacctaagatgtgcatatgctgctatcaaacaggctaattgggatgcttctaaagttagggaaaaactgcaacgcgatattgatgctcacttattatctgttcgtgatgcgaaattgtcagaattggttgccagatatgaggaaaaacttagacagttattatgtgaaccagtggagtctctttttg

SEQ ID NO: 204955 - DNA, 238 bp, Gossypium hirsutum
ttactagcaaatactttgctgcaaagtcgcccaaatttttcagaaaatctaacacaagttgttatcaattagggaaaaaaatgagagagatccttcatgttcaaggtggacaatgtgggaaccaaatcggctccaagttttgggaggttgtttgcgatgagcacggcatatatccaactggaaggtacattggttcctcggatctgcagttggagcgtgttaattgttactataacga

SEQ ID NO: 204956 - DNA, 267 bp, Gossypium hirsutum
tagcggcacgaggcttatggggcagcacctcctctatcacaattaccctacctgggtgctagaccaattgttccagaagctcctgcaccaccaaataacatcctgtttgttcagaatcttcctcatgatgcaaccacaatgatgctacaaatgcttttcaatcaataccccggtttaaaggatgtcagaacagtggaaacaaaaccaggtatagcctttgtcgagtatgaaaatgagatgcaatcaaccgtcgctatgcaggcactg

SEQ ID NO: 204957 - DNA, 275 bp, Gossypium hirsutum
ttgttgatggtaatatcattactgctgctacttatattggtcatcccgagtttatcaggctgtttgtgaaagcattagggggcaccatatccaaatcgaacaaaaggatcctatttctttgtggggattatatggaagattatgaagtaactgtgcctttccaatcacttcaagctctaggctgccatgtagatgcagtttgtcctaagaagaaggctggcgatttgtgtccaactgctgtccatgatttcgaaggtgaccaaacttacagcgag

SEQ ID NO: 204958 - DNA, 313 bp, Gossypium hirsutum
gggcggtctagaaatagcgaatccatccccctgcctgaatgcattactagcgggcctgtctcttggtcgccgagcatgtgtgtaagaactagtaatccgtactttctctcttacggcatttctggttaaaagagattaccgtaaactttacgattttttgtaccactcgattggttatgatcaagatgaacctgagaaactcggtatctgtcaagaagaagtgcgacataatctgtgatacggcacgtactataataccgcttgacagacgaagatatatttatggaacgtgctcaatagcattatcagggct

SEQ ID NO: 204959 - DNA, 263 bp, Gossypium hirsutum
cgggtctgtctcttggtcggccaacatatgtggaagaacttgtaatccgtacttttcctcttccgccatttctggttaaaaaagattaccggagactttacgattttttctaccactcgtctggtttcgttcaagatgaagctgagaaactcggtatctcgcgagaagaagtttgccataatctgttattcgccacgtgctttaataccttcggtggcatgaagattttcttccccaacatgctaaagtggattagcagggct

SEQ ID NO: 204960 - DNA, 275 bp, Gossypium hirsutum
tggaaactccgagacacagggcccaggtcaatgcgcatggccattccaccagcccatctacggaccacagaacccacctttggttgcacccaacaatgatatcggtcttgatgggatggtgatcaacctggcaagcctcttggctgggacagtgaccaacccgtttggaaatgggtactaccaaggtccaaaagaggcaccactggaggctgcatctgcttgtcccggtatttatggtaaaggagcatacccaggctatgctggagaccttccgg

SEQ ID NO: 204961 - DNA, 274 bp, Gossypium hirsutum
gggagttctaagatgtggggcgggtacaacaaacgatacaagcatttcactcccaccctcggctgttccctgactttccatatctacttccctccttgttcttatccttcccacacgttccctatactttactggctctctggacttacttgcactgatgagactttcataatcaaggcaggagcacaacgtgctgcttcagctgaaggcgttgctctaattgctcctgatacatctccaagatgcctgaatgtggaaggagaggctgacagct

SEQ ID NO: 204962 - DNA, 268 bp, Gossypium hirsutum
caagagaattccagacatgaccataataaacaaacaactcggtaggttggaaccccaagacatccctttgggacttgctcgaatctaccctaacctaccaacacaggacttatgccgaggctattaagaaatccatagcaaaaccttctgcatcctaaaggaggctagatgtttaaaccacggctaagaaaggatcatgaaatgtgctttatggcaaatgtttcaattcttctttcccccgctttttttaggaagtctttaaatatat

SEQ ID NO: 204963 - DNA, 263 bp, Gossypium hirsutum
ctagctttgaaaaccctaggccgcccaacgaagaagcacagccgcattttctttgacaaatatccgaaacacgaatggttggcacatacaacgatctgagttatgctgctggcttgaagaagctggatgagcatcaacatacacgcagttacatttgtggataccaagcttaagaggatgattttaccgactacgcatatctatctggtgcctcatcatctaactacggcaatgattatcaatggtacaaacacattgatgcc

SEQ ID NO: 204964 - DNA, 266 bp, Gossypium hirsutum
gaaatggagagatcaacagcatcgcggcttcgcactttgggtattcagctatcgctttgctttgctctctacattggtctcaacttgggtcagcctcaaacgttggtttacaacgataatgggggcccctttgacctgtactttatcagcgatagaggtggctctagatcactttaagaacagacccatcttctcaaactgatggggaatgtggccaaagcttatgatttgaactttgaggtgaatattagctagcttggtgagga

SEQ ID NO: 204965 - DNA, 263 bp, Gossypium hirsutum
cttcgcgttgctaaggctaccggaggtgcacctaacaagctttctaacataaaggtggtgaggctgtccattgctcaagtactgactgtaatctcacagaagcagaattctgcattgagggaggcatacaagaagaagaaattcttgcctctctatctccggaccaagaagaccctagctatccgtagaacgcttaccaagcaccacgcatctttgaagaccagaaagggagaagaacaaggaaatgtacttaccaatgagga

SEQ ID NO: 204966 - DNA, 278 bp, Gossypium hirsutum
ttttctagagggaggcccacttttctggggggattcggctgataaacaaccttgcattggtaccggtggtatgataccgtggaaacttcaagtgacggggatgctttttcacagtgggttaccacacatggctataaatgcattggagcttggcatggaagcacttaaagaaatccagctactgtcttataaagacttgccacctcatcccgatgagcaagtatctggatgtgcttcaccattaaccatgaaaccaacgccttgggattggccatgtg

SEQ ID NO: 204967 - DNA, 265 bp, Gossypium hirsutum
ttactagaagaaagggatagagaaggggaaggggatcagctgtctttattgacgcttttggtggctgcttttaggaagtctttgattgggtgtagcctttctggaagtaaagagctttgttcaatggaaattgggttgcctaccaatgttagacatgttgctcatgtgacttttgataggttccatggatttcttggtttgccggttgaatttgagcctgaggtccccaggagagctccaagtgccagtgcgagtgtatatgggg

SEQ ID NO: 204968 - DNA, 276 bp, Gossypium hirsutum
cccagatatggtgaggggccaaatgaactttaagaggcttcaattgactgatttcaaaattgacattcctcgtgttccaaagaagaagacactgattgaagcaatggaaaaagctgatgttaaaaacaagtgggagaatagctcatggggtaaaaagctgattgttcaaaagaagagagcatctctcaatgacttcgaccgattcaagatcatgttggccaagatcaagaaagctggagttgtgaggcaagagcttgctaagttgaaaaaggagaa

SEQ ID NO: 204969 - DNA, 269 bp, Gossypium hirsutum
ggttaatgccgtgttatgggttgtggtcgcgatggctctggtgctcggaatagccgagagtttcgacttccatgagaaggatttagcatcggaggagagtctgtgggatttgtacgagaggtggagaagccatctcatggtttctcggagtctagacgagaaacacaagcgtttcaacgtgtttaaacaaaatgtcaaacatgtgctccacaccaataatgacaacaagccttataagttgatgctgaacaagtttgcagacatgacaa

SEQ ID NO: 204970 - DNA, 219 bp, Gossypium hirsutum
ccggcatcaatgaggggggggaaaatagggcggagatatgccagaaaatcaagaaggcttgtgaaaattggggtatcttccaggtcgaggatcatggactcgacactaaactcatttttgagatgaccggtcttgccagagagttcttcgctttgcccgccgaatataagcttcggttcaatatgtctgatggcaagaaaggtgggttcatcttctcca

SEQ ID NO: 204971 - DNA, 267 bp, Gossypium hirsutum
agaaccctaacattgggcctaaattccacgaggctgctgcctctgtctcgatcattgcagactttctccctccccgatcttccttacgactatggcgctcttgagcccgccattagtggagagatcatgcaactccatcaccaaaaacaccatcacacttacatcactaactataacaaggctttagagcagctccatgaggctattcagaaagatgattcttccaccgtcgttaagttgcaaagcgctatcaagttcaacggcgga

SEQ ID NO: 204972 - DNA, 256 bp, Gossypium hirsutum
ggggttctaagttttcaaagctttcatggcttcttccattacatccaagcctttccttggagctactaaacccaattcttctctttctcctgatcttcaaagactttctttttcctctcttcgcatctcaatcaaaccaagaacccacaaaaagcttcagatacaagcagctgggagcacatttggaaattatttccgtgttacaacttttggagaatctcatggaggtggtgttggttgtatagttgatggatga

SEQ ID NO: 204973 - DNA, 303 bp, Gossypium hirsutum
gaggcgcgtggaacagtggggccccggctgaggaattcttactggagagaactcatctctggggggttcatttttattcacttcaagctctttacacagtttacagccatagaagcaacaacaatgtggagatcaatcataactttcattctcttcgcctttcttttcttccctatttcagcgacgaagataacactctacaacaaatgctcacatccagtatggccagggattcaacccagcgccggcaagccaattttagcccgcggtgggttaagactcccaccaaacaaagcctacttc

SEQ ID NO: 204974 - DNA, 263 bp, Gossypium hirsutum
tgtacgagtggccaccattgatgttcgtgagcaggtttcagttcttgcagatgcagaagctcttagaaaggcttgtaaaggatgggggacagatgagaaggcaataatttcagtgttgggtcacagaaatgcagttcaaaggaagcaaatcaggcttgcttatgaagatctttatcaggaagatctcatcaagcgtcttgaatcagagctttctggtgatttcgagaaagcagtgtatcgttgggtattggatccagcagatc

SEQ ID NO: 204975 - DNA, 265 bp, Gossypium hirsutum
attgctttagggtctgcaaaaggactggcatatcttcacgaggattgtcatcctaagatcattcatcgtgatattaaggcggctaatattcttttggatttcaagtttgaggctaaggttgctgattttggactggcaaagttctcttctgatgccaacactcatgtctctactagggtgatgggtacttttgggtatttggctccggagtatgcttcaagtggaaaactcacagacaagtcagatgttttctctttcggagtca

SEQ ID NO: 204976 - DNA, 267 bp, Gossypium hirsutum
gagaagcagaagcaggttatcgtggagaagcttggtgagccaactgagagctatgaagattttactaaatgtcttcccgctgatgaatgtcgttatgctgtgtacgattttgattttctaacagccgagaacgtcccaaagagcagaatctttttcatcgcatggtctcccgatacatcaaggatcaggagcaaaatgatatatgctagctccaaagacagattcaagcgagaactggatggaatccaagtggaattgcaagcaaca

SEQ ID NO: 204977 - DNA, 277 bp, Gossypium hirsutum
  unsure (1)..(277): unsure at all n locations
cgatggcctcgcgtgacaagaagacctgcgaagccgtcgagcagccgtgccggtggaatacgcacgctctcggatctgaaccggccctctggacccgattccgacagcgattccgatgatccccaggagtactacactggaggcgagaaaagtggcatgcttgttcaagatccttcaaagaaaaatgatgtagatgaaattttcaatcaagctaggcaanctgggagctgtagaaggtcctctcgagcatcctcgtccatcaagttcaacaagtttt

SEQ ID NO: 204978 - DNA, 201 bp, Gossypium hirsutum
cttccaattgttggaaaagcgatagtagacatccagaatctgaaggatgccgtcggttcagcggttgatgtgatgcacgcaatggcatcctcaatatgctcattatcatcaaaggtgaaggaaatgaattctttggtgaacgaactcgtgagtgtggccgcaaacgaaaggattttgctcgaacaatgtaaagaacatttg

SEQ ID NO: 204979 - DNA, 276 bp, Gossypium hirsutum
atggatttagcatggatgggggcttggaagttaaaaaaatagagagagtaactaatcatgatgtaaaagcagtcgagtacttcttgaaacagaaatgccaatcacagccagaaattgccaaggtccttgaatttttccattttgcttgcacatccgaggacataaacaaccttgcccatgcattgatgttgaaagaagcaatgaccaaagtcatgtttccaaccatggataaattggtcgaggcaatatgtaagctggctaaggctaatgcaagcg

SEQ ID NO: 204980 - DNA, 275 bp, Gossypium hirsutum
  unsure (1)..(275): unsure at all n locations
cctagcttgacctttttggtctttgtgaaacatcaaatcgcanagatggatctttcatagatttcgcctcagatctctttctctttgtaaaagaaaattgggtttacttatttatttggatcggattgggttggtttggttttagaaaagaaggaaggcgatgtcaaccccagcaaggaagaggctgatgagagacttcaagaggttacagcaggatccacctgctggtattagtggggctcctcaagataataatatcatgctttggaacgctg

SEQ ID NO: 204981 - DNA, 270 bp, Gossypium hirsutum
gaaatgttggcaacccgcggactttcttccagatcctaattctgatggatttcatgagcaagtcaaagagcttagggaaagggcaaaggagatcccagatgattactttgtagttttggttggtgatatgatcaccgaggaagccctttcaacttatcaaacaatgcttaataccttggatggaactcgtgatgagacaggtgctagccttaccccttgggccatttggaccagggcttggactgctgaagaaaacaggcatggtgatct

SEQ ID NO: 204982 - DNA, 246 bp, Gossypium hirsutum
agaaaatacgcccggcacaagaatgatggtttttgagtatgttcctaatggatcactctttgagcatctacatatacaagaagctgagcacttggactggggaatgcgcctaaggatagccatgggaatagcgtactgccttgagcatatgcatcagcttactccccctatagcccatagaaacttgcagtcttgctctgtgtatctgactgaagactatgctgcaaaaatatctgatttcagctt

SEQ ID NO: 204983 - DNA, 268 bp, Gossypium hirsutum
aaacggggaatgctgatcgcaggaagaatcagtagaccgaaagcccatttgtggtgtcctcctggccagaaaatttctaaaataaactttgctagctatggaatgcctgaggggagttgtggaaacttccgtgaaggaagctgccatgcccacaagtcctatggcgcattccaaaagaattgcatcggaaaacaatcgtgttcggtaaccgtggctcccgaagtattcggaggagatccatgtccaggtagcaggaagaagctatcag

SEQ ID NO: 204984 - DNA, 246 bp, Gossypium hirsutum
gctatttcaacagttgatgtggtgacccctaaagtttttattggcttgcttgtcggggcaatgcttccttactggttttctgctatgaccatgaagagtgtgggaagtgcagctttgaagatggttgaggaagtgcgcaggcaattcaacacaatcccaggtctcatggagggtactgctaaacctgactatgctacctgtgttaagatctctactgatgcttcaatcaaagaaatgatcccacct

SEQ ID NO: 204985 - DNA, 279 bp, Gossypium hirsutum
tagaaaagccggaatacaaacagcgaaagtatgacgaagagtacccaaaacatgagaagcctgaaattcacaaggaggaaaaacaaaaaccgtgcaagcaacatgaagagtaccacgagtcacacaaatcgaaggagcacgaagagtaccagaaagaaaaacccgagttccccaaattggaaaagcctaaagagcacgagaaacacaaagtcgaatatccgaaaatacccgagtacaaggaaaaccaagatgagggtaaggaacataaacatgaagagt

SEQ ID NO: 204986 - DNA, 253 bp, Gossypium hirsutum
ggcagaggaagttttttgtatgtgttggccgggatccacttattgaggtagctattagtttggagaaggccgcattatctgacgaatattttattaagaggaagctttatccaaatgttgatttctattctgggttaatataccgggccatgggatttccaccagagttcttcactgtgttatttgcaatccctcgaatggctgggtacttggcacactggcgcgagtctctagatgatcctgatacaaagat

SEQ ID NO: 204987 - DNA, 258 bp, Gossypium hirsutum
  unsure (1)..(258): unsure at all n locations
tagttttttttttttttttggggtggttttttaaaacatgaaaaagcataacatacagtaaaccatttcaagtctttaacaagcttcaaagaatagaagcttgcataacacggaagcaacaggtaataaaagacatcatacgcacactcaatcacaggtacttcttagtactcatcatcttcaccctcatcaccctcagccgactcagcaccaacttntttataatccttctccaatgcagcaagatcctcacgagcc

SEQ ID NO: 204988 - DNA, 233 bp, Gossypium hirsutum
ttcactaggtcattgccaggttcgaggctgtgccgtgcttactaatgcacccttcatattgaatctggattgtgatcactatattaacaacagcaaggctataagggaagcaatgtgctttttaatggatccccaatttggaaagaagctttgctatgttcaattccctcagaggttcgacggcattgatcgtcatgatagatatgctaatcggaacgttgtcttcttcgata

SEQ ID NO: 204989 - DNA, 266 bp, Gossypium hirsutum
attaaatcggagtgcgggggatccatcgcggaatgcctgatgctaagcggggaatattcctcggacttcgacgccgaattcgccatggactccgagatcaacaggcgcattttagcggcgaggcgttacattagctacggtgcgctgaggagaaacacggtgccatgttcgcgacgcggtgcgtcgtattataactgccggccgggagctcaagcaaatccttactcacgcgggtgcagtagaattacacgctgtcggcgttagat

SEQ ID NO: 204990 - DNA, 268 bp, Gossypium hirsutum
ctgcttctactgctataggggttggtgatcgtttgctagttgcaaatgttggagattcccgagctgttatctgcagaggaggcaatgcttttgctgtgtcccgtgaccacaagccagatcaaagtgatgagcgacaacggattgaggatgctggaggatttgtcatgtgggctggaacttggagagtgggaggtgtccttgctgtttctcgtgcatttggtgacaggctcttgaagcagtatgttgttgctgatccagaaattcagga

SEQ ID NO: 204991 - DNA, 272 bp, Gossypium hirsutum
aaggaacaagagagaaaatgagtcgaggaagtggtggcgggtacgatcgccatattaccatcttctcccccgaaggtcgtcttttccaagtcgagtatgcgtttaaggcagtgaaagccgctgggatcacatcaattggtgttcgagggaaagactccgtctgtgttgttactcagaagaaagttcccgacaaacttttggatcagactagcgtcactcatcttttccctattactaagttccttggattgttggctactggcatgacagct

SEQ ID NO: 204992 - DNA, 383 bp, Gossypium hirsutum
ctttttggtgctttgaagttgcaaagtagaaaaatgggaattccatcagaaataagggatgtttggatacagagaaaaagaaattccttcataattccttcccctgctgaagacgagaagaatttgagagccaagcaattctctcaagaaggaattcgtgccggtgtcaaggcggctgcggtcgccgccgttgtcagcgccgtacctaccttgattgcagtacgtaagattccttgggcaaaggcaaacctcaaccatactgctcaagctcttatcatcagtggagcatcaattgcggcctacttcattaccgtagataaaactgttttggaaagtgctaggagaaattctcgagcacagttcgacaaaactgtttgaatgct

SEQ ID NO: 204993 - DNA, 386 bp, Gossypium hirsutum
tggagatcacaaaagggctgccgttttgagggaattcggcaccaacttgccagatttggggctaggagacagagaaaccgaccatgatttcatgtcattatgcaaggaaggatacatggtgccaagaaccaaatgcgaaccattgccaaggaacaagcttctaagccatgttatattttatgagggccgcctagtccaaaggccaacccctttggctgctctgttgaccttcctatggcttcctataggcttcatcctctccctactcagggtctacaccaacatcccgttaccggagcgaattgctcgatacaattacaggttgctggggatcaaattgattgttaagggtacccctccaccagcacctaggaaaggccaaagtg

SEQ ID NO: 204994 - DNA, 385 bp, Gossypium hirsutum
aaaaatcctaaaaagccaccccctaaatgaccatgaccactaccaccaccactacccctaccatctccaccaatgtctccgccgatgcctcaaatccctcccaaaaactacccttttctcttccccaaagtacaatcctctgttctctctgacccttctcgtttcttctccccaaacctcctctcatcccctctccctactaactctttcttccaaaacttcactctcaaaaatggcgaccagcctgaatacatccacccttatctcatcaaatcagccgactcttctctttctatttcctacccatccttctttcacaacccttctttcatttaccaaattttcgtccctgatttaaccatctctgctaccgataaaaccacct

SEQ ID NO: 204995 - DNA, 390 bp, Gossypium hirsutum
cccaatcgtgaagcgtatgcaaccgtactacatgcttcggaatcctacgtttgtggtgcaataaccctagcccaaagcctcctaaaatccggcaccaaccgcgacttaatcctcctcctcgacgactccatctccgaaccgaaacgtcacgctctcgaattggccggttggcgtctccgtttcatcaaaagaatccgaaaccctcgagcccaaaaacacacctacaacgaatacaactatagcaagttccgactatggcaactaaccgattacgaaaaggttatcttcatcgatgctgacatcatagtgttaaaaaacctcgaccatcttttccatttccctcaattgacggccaccggtaacgacgtttggttattcaattcaggcata

SEQ ID NO: 204996 - DNA, 348 bp, Gossypium hirsutum
cccaatcttttttcgtatgcaaccgaactacatggttcggtttcctacatatctggcccaaccaccctatcccaaaacctactaaaatcccacaccaaccgaaacttaatcctcctcctatactactccatatccgaaccgaaacgacactctctccaataagccgcttaccataaccttttcatcaaaataatactaaaccctctaacccaaaaacacacctactaataatacaactatagcaagttcctactcttacaactaacccattacaaaaaagttatcttcatctattctcacatcatactgttaaaaaacctcaaccatctattccattatcctcaaatt

SEQ ID NO: 204997 - DNA, 381 bp, Gossypium hirsutum
ctaattttaagaagcacaagcatccctgggggcggtgcctaagctcacagtccaaagaagccaaactcactcgccttatccttctcaaaagtctcaaaatactgattgatgattgtgactgcgagaagaatacccgtccctgacccaattgctcccataagatcagccaatactgtgagtgcaccaatgcacatgcctccgaatgcagcagctgtgggaatgtaacggtttaactctttctgtaagcttccctcacgatggccaggcataaccatttgttgttccctgagctgcttggcaacatctctagcagatgaccctgagacttcaatccaagtttttgagaacaatgcacatgctgataacataaacacaagatag

SEQ ID NO: 204998 - DNA, 387 bp, Gossypium hirsutum
caactttcatatgattcacccggacagacctttggggcgtttgaaaagccagagggggtctcagctgttggaaagttttcaaatatgctgaggttcatcgtaaaagaggttgatccaagtactggcgaggctgaggacgatggagttgaggacgagtaccaactggaggaccttgaacttgttgcagccgattacatgttgaaggtgggtgtctctaatttcaggaatgcatgggaaagcatgggtgtggactttgaacacgtagatgaatatggccttggcccaagggatagcctagctgaagctgtaaatgctgtcattaatcttctcggcatgcaaccctgctagggcacagaggttgtccctccaaattcaaggtcacacact

SEQ ID NO: 204999 - DNA, 379 bp, Gossypium hirsutum
ccattttccttacaagtttgtttttcttgtgattgatcgatatggctagctcaatgtcccttaagcttgcatgtctgttggtgttgtgcatggtgatgggtgcacccctggctcaaggggccataacccgtgctgatggcttagtcggcctcccacgctgccttccttttttgtcagggaatggtgatggtgctgatgccacaggttgctgtgccatcgtcatgaatgccttgggatcgctctgtggtgatacataggaaccgatctagcttgaaatcgggttcggatttgggtggaatttcaaattggtgtgttatggaatcccaacttaatcgtgtttaagggtgggatccaattgtgtgatacattacagagcatg

SEQ ID NO: 205000 - DNA, 380 bp, Gossypium hirsutum
ctgaattcctccaagctaggagtttggagagcggtgaccgctgaagcaaaacaaatttcttgggggaaaagaaaatggagttatccatgatttttatgattagcttctctgtattgattttgtgctcctaactggcatatgggcaagttgcaatgaccacaaacccgacaccgtcaccctcaccaacacccttaccgacgccggcatacacaaatatcaatgacttactctatgtggcatgtccatatcacaagttcctgcgctacctcgagtcgactaaattaatcgacacgttccaaatccaagccaacaacacggttgaaggcattactattctcgtaccgaaagacagcgcattcaaagctcttacgaagccttca

SEQ ID NO: 205001 - DNA, 372 bp, Gossypium hirsutum
tttgttttagggagtgtaaacagacacatgcgaggtgctttaactaggaataggccattcttgcatgtggcatgccatggtgaggaactagggactgatccgtggaacaacataaacagaacggacatgcacgactattacgagttggatgaactaaaacaattgctgcaggaaggagagtgggaaagtcattataaaaagatggaggaggctgaaaatgattcagatgcggagggggaaagaattctgctcgtatttttacttaagatatgttggttgtaagtgtaacttgctactgctgaatgtgctggtaacttaatagtgggagtcacaatggatagcgaatattcaacttgattgttgttgcggatt

SEQ ID NO: 205002 - DNA, 272 bp, Gossypium hirsutum
cgatcgcgtaagccactggggtgccaacaaggcggatgagatagatttagcatcaggggagactttgtacccgggactcagctacggcgagaaccaactccggtggggttttatccgcaaggtgtacggcatcttggcggcgcagctggttctaaccaccgtggtctccgccttcgtggttctttctgctccggtcaacgagctccttcgtggaaattctggcctcttgctcttcctctgtttaatccccttcgtcttgttatggcccttgc

SEQ ID NO: 205003 - DNA, 272 bp, Gossypium hirsutum
ataggtaaatatgcggattccattcaaagagaaaccatacatagatgcaaccggtaaacaaagactagaaattatttaaaaggccattacagggcacagtccttcacgtaaaaccagaaaacccacattaagggagaccttaaggcttagaacccaccacgaagacgaagaacaaggtgaagagtggactccttttgaatattgtaatcagccaaaagtccttccgtcttccagttgtttcccagcaaaaatcaacctttgctgatctggtg

SEQ ID NO: 205004 - DNA, 389 bp, Gossypium hirsutum
caaaaaaaaaaaaaacccccgctagaaaattaaggggagggaatactaacaagagaagagggagtttgggagatttcctttttctttttggatttttgatggcgagcagcagaggctattactcgagaccgaactaccgctttctgtccagcgatcaacaactgcaatcgccgttgagtcacgactcggcgtcggcatttgagttagacgagtcagatatctacaacaacggtgtctcgactcgctctgactcgcctgagttcaggtccaccagtcgagtggcgaagaagcagtccaacaagcgcggcggcggagggaattccgtcgtcggaggggcgccggcctccctgccggtcaacataccggactggtcgaagatcttgagggaa

SEQ ID NO: 205005 - DNA, 156 bp, Gossypium hirsutum
gcttgtatgatcatattgtgagggaagttgaaaggcctggattaatgcttcacaagaaggaaacttgcgaagcatttaccatttttgagacccctcctatggttgttgttggagttatcacttatgtcaaaactccccttttttttcctactttaa

SEQ ID NO: 205006 - DNA, 365 bp, Gossypium hirsutum
ggaatgaacatgctgaggtattatatgccattgggaaaatgtaaacgatgaatggcaaatgtctattcaagcacgccatctgtttcgagtaaggacaaacaagaaaatgaacagtttgtgctgactgctgccgagtcaatctcgaaaattttcaaacataaatcaaaatgaagaataacatgtaaaaatccagatttctagatgtgaattggcttgtcataggtggccattgcagcttccttcaatgcctcactcatcgtaggatgtgcatggcacactcgagcgatgtcctcacttgatgcatcataattaatggcaagaactgcttcatgaatgagctctcccgcatttggtgccataatatg

SEQ ID NO: 205007 - DNA, 268 bp, Gossypium hirsutum
tgcttgcttacaagggttggagatttgtcattctttgggaggtggaactggttcagggatggggacactgttgatatcaaagatcaaggaagaataccctgatcggatgatgctgactttctcggtttttccgtcgcctaaagtgtctgatacggtggttgagccctataatgcgactctatcagtgcaccagcttgtggaaaatggtgatgaatgcatggtgcttgataatgaagctctctatgatatctgttttagaactctcaag

SEQ ID NO: 205008 - DNA, 386 bp, Gossypium hirsutum
gctgttttggttcttaaagcaatatacaaccccgtttcgtttctacgactgcaggcgctattctccctgctggaactggaaatgatatggccagggagctgtcctggggaggtggtttgggcgcaatggacagacacggaggcctttgcatggtgttccaacagatagagcatgctgcagcgaccattcttgatcgctggaaagcatctattctaaatcaacaggggaagcagctttaatctccaaaatttatgaacaactatcttgtgataggttgtgatgcaaacgaagctttggatattcacaacttaagagaggataatcctccgaagctctataatcagtttatcaataaagcgctatattccagagaaggagcaaggagt

SEQ ID NO: 205009 - DNA, 269 bp, Gossypium hirsutum
gcgagttgcttttggcaagcctcagggaacatgggctagagtagccattggtcaggtcctcctttcaattcgttgcaaggacagcaacagtcattatgctcaataggccctccgacctgctaagttcaagttccctggtcgccaaaagaatattgtcagcaggaagtgtgttttcacaaacttcatccttactgattatttaaaatataagtcatagaataacatatttcctgctgcgttaacaagcgtaacttctgtatatatggacc

SEQ ID NO: 205010 - DNA, 383 bp, Gossypium hirsutum
aaaatgtctcggagatatgatagccgcacaacaggcttggcccctgaaggccgtctctaccaagtagagtatgcaatggaagccattgggaatgctggctctgcgattggaatattatcaaaggatggtgttgtcttggttggtgaaaagaaagttacttccaagcttcttcaaacctccacatctactgaaaagatgtacaagattgatgatcatgttgcttgtgctgtggcgggaataatgtccgatgcaaacatcctaatcaacactgctagggtgcaagctcaacgatacacatatgcttaccaagagccaatgcctgttgaacagttggttcaatctctctgtgatacaaagcagggttatacccagtttggtggtct

SEQ ID NO: 205011 - DNA, 378 bp, Gossypium hirsutum
gaaatgaatctcttacagaaacttcaatttcggggtatacaagcaaacctcatttctttttctttttttatcttcaacaactcaatgaaaactataacatctattttctttttataaattatttcttcttgacacaaacaaacaattcataaccaagtgctggtgtttaggctgttccttttcttcaagtgttgacaaatcggcaattcttccttacttcaccattgataaagcgatccgaattcataatattccccagtttcaccattgaatccgagaactgattgaagaaagcaacagggtcagctgcatatttttggacaaggcttttggtttcgattccaaataggctggagtacaattcttggtctgaattaa

SEQ ID NO: 205012 - DNA, 379 bp, Gossypium hirsutum
aaaatacttgccaagcttcatcaagaaacagctggaaactggtgccagcatagttagtggaacacgatatgtcaaaggcggtggtgtgcatggatggaatctgattcgcaagctaacaagtaggggagccaatgttcttgctcagactcttttgtggcctggtgtatcggacttaaccggatccttcaggctttatcagaaatcagtgcttgaagatgtcatttcctcctgcgttagcaagggatacgtatttcaaatggagatgattgttagggcttcaagaaaaggctatcacatagaagaggttccaataacttttgttgatagagtatttggaagttcaaagcttgggggatccgaaattgtagagtatctaaaa

SEQ ID NO: 205013 - DNA, 385 bp, Gossypium hirsutum
cttttatctccttttctctttaaagaaagggtggttttcgatttcattttcaattttatatattttggattagatttggttggtcttagggaaaaacaaaggaaagggcaatgtcaaccccagcaaggaagaggctgatgagagacttcaagagactacagaagatccacctgctggtattagtggggctcctcaagataataatatcatgttttggaacgctgtaatttttgggcctgatgatactccttgggatggcggtacgttcaagctgactttgcagttcatggaggattatccaaataagcctccaaccgttcggtttgtctcacggatgtttcatccaaatatctatgcagatgggagtatttgtcttgatatttta

SEQ ID NO: 205014 - DNA, 269 bp, Gossypium hirsutum
tttcacgagcgctttgttcctcgggcggggctcatggactgggagcctgctacgatggacagtgtccgaactggtccttacggccagattttcaggccagacaactttgtttttggacaatccggtgctggaaacaactgggccaagggccattacactgaaggatgccgagcttatcgatgccgttcttgatgttgtgaggaaagaagcttataacttttactgccttgcagggtttcaggtatgccactcattgggtgggggaactg

SEQ ID NO: 205015 - DNA, 240 bp, Gossypium hirsutum
ctcatggactgggagcctgctacgatggacagtgtccgaactggtccttacggccagattttcaggccagacaactttgtttttggacaatccggtgctggaaacaactgggccaagggccattacactgaaggagcctagcttattcgatgccgatctcgatgttgtgaggaaagaagctgataactggtactgcctgtaaggtttcagttatgccactcattgggtgggggaactggt

SEQ ID NO: 205016 - DNA, 381 bp, Gossypium hirsutum
gtttatcattatctccttacaggtgataagctccgctgggactctatcccatacaacgaaatctataatggaatgttctggaaagtcgagggaaagaggattaaccaaggagctgtcaatgaacatattgaggctaacccttctgcgaaacgtggtgataataatgaaggcgttgacgatcaaaccatcaacgttgttgacatcaactacactttcatacttcacgagcaacctgcttttgacaagaaccagtttgtgaccttcatcacagaggtacatcacgaacttgacacccaaattacagcctgataagcaagagtctttcacgaataacatatagggggctactaaatttttgatttcgaagcttaaagatctcca

SEQ ID NO: 205017 - DNA, 387 bp, Gossypium hirsutum
gaaagttttgagtgcttcagaaagaaagaaaaagggcggtgcacgtgtttgtatattcgggggaaaagcatttgccacttatgttcaagccaagagaattgtgaaattcattaccgatgttggagctacagttaatcatgatcctgatataggtgatttactgaaggttatttttgttcctgactacaatgtgaatgtggctgaattgcttatccctgcaagtgaattatcacaacatatcagtactgctggaatggaggcaagtggaaccagcaatatgaagttcgcgatgaatggttgcattttaatcgggaccttggatggtgccaatgttgaaatacgagaagaggttggagaagaaaactttttcctcttcggggctaaagc

SEQ ID NO: 205018 - DNA, 389 bp, Gossypium hirsutum
cttagattcattcttcaaaaaaatttcatcatcggctgcgtcacacagatccatcaagctttcattttaatttttccatttttttttcaaattttttggcgcgaaaaaagggcatgagagtcgaacgattccagggaaaggtttacgaggcggctgaactctcgccgccacggcctaattctccaattaccaccgaagatgataacgataacaacggcgaggagttgttcgtgcctcccttgaatttcgctatggtagataatggagttttcaggtctggtttccccgattacgccaattttagcttcttgcaatcactagggctccgatctattatatatctttgcccggaatcctatccagaagccaacaatgagtttttaaaggct

SEQ ID NO: 205019 - DNA, 301 bp, Gossypium hirsutum
gaagtttacttattcgagggggaaaaatgcttgttctttttaagttaaaaagattttaaaagacccaaaaaaagtaaaataaaaatgtctgttgcatagctgaaagagaagcacgccgtggctactgagaccgtgaataatctatgagaacgattaaagcaaatacttcaacagttgttcgacactgatgttgctacctatgcacgatcacaagggaagagtccagttacttttggtcctaccgatctggtttgttgcaagaccttgcaaggtcacactggcaaggtctacttcttggatt

SEQ ID NO: 205020 - DNA, 270 bp, Gossypium hirsutum
cgctttgttcctcgtgctgtgctcatggacttggagcctggtacgatggacagtgtccgaactggtccttacggccagattttcaggccagacaactttgtttttggacaatccggtgctggaaacaactgggccaagggccattacactgaaggagccgagcttatcgatgccgttcttgatgttgtgaggaaagaagctgagaactgtgactgcctgcagggtttccaggtatgccactcattgggtgggggaactggttccggtatg

SEQ ID NO: 205021 - DNA, 390 bp, Gossypium hirsutum
tgatctatctctcaacaaggaagtttacttttttgattggaaaaatgctttttctttttaagttaaaaagattttaaaagacccaaaaaaagtaaaaaaaaaatgtctgttgcagagctgaaagagaagcacgcggcggcgacggagacagtgaataatctaagagaacgattaaagcaaagacgtcaacagttgctcgacactgatgttgctacatatgcaagatcacaagggaagagtccagttacttttggtcctacggatctggtttgttgcaggaccttgcaaggtcacactggcaaggtttactccttggattggactccggaaaggaaccggattgttagcgcgtctcaggatggacgattaattgtgtggaacgctctaact

SEQ ID NO: 205022 - DNA, 393 bp, Gossypium hirsutum
ccagtttctattttctaaaaacaaaactgaaaggggctggctgcggaggaaactgtggctgcagctctggttgcaagtgtggcaatggctgtggaggatgcaagatgttccctgacataatagagaagactacaactgagactattgttcttggtgtgacaactcagaaaatgcactttgagggatctgagatgggagttggggttgagaatggatgcaagtgtggagacaactgcacttgcaacccttgcaattgtaaataagagggggggaaaatgaacaacaaagagaagcagagaggcctttgtctttttaactaaataaattctattactttagtatgtatcagcaaatcttcatgaggatttggttcttaattatgtgtaatgtggg

SEQ ID NO: 205023 - DNA, 389 bp, Gossypium hirsutum
ctgatttttattctactcaacaagaacatagcaggtcgggatatgtatcgaaggctgctccagtttcgtatgaaccagatgacctttacatggtgattgggcgtggttcagcagaagagactgccatgacatcttggactccagagattgactacgaaatgaacgcgttatctgctgaagccaccagcaggcatgctgatgttgaaataaccggcgccaatgaaaaggggcctgatgctaaaaaacttgggaaatctgaggggaaacttccgaataaagaagttcgttctagagtttcaaatggacctcttgccaagagcaagtctgatgtagtatcaaagagcaggaaaccaccagcatgaagcaaaaccatgatacggagaactaag

SEQ ID NO: 205024 - DNA, 388 bp, Gossypium hirsutum
tcacactttctagtattcctacttggaggggggagtcttaccactcccacatttggtacctatgagtcaccaaattatgggaaaccccctactcctgtattcaagcctcccaaggtgaaaccaccaccatatgaacctaagccaccagtgtatgaaccaccaaaaaaggagaagcctgaacctaagccaccggtttatgcacctccaaagaaagagaagcatggacccaaaccaccaatgtatgaacctccaaagaaagagaagcctgagccaaagccaccagtttatacacctccaaagaaagaggagcctaaacctaaaccaccagtatatgaacctccaaagaaggagaaacctgagccaaaaccaccgatttatacacctccaa

SEQ ID NO: 205025 - DNA, 393 bp, Gossypium hirsutum
caatccacactattttttttccagactaaccacatcccattgtcccgtttacattttatgctttctcctcatacccctgtcatttcaactgagaacgcttaccatgagcagctattcgtggcttatataaccaacactgcttttgaaccctcttcaatgatggccaaatgtgacccacgacacgggaagtacatggcttgctgccttatgtaccgaggagatgttctgcccaaagatgtgaatgccgcttttgccaccattaataccaaacccacaattcaatttgtggattcgttccctacttgattcaagtgcggtatcaactaccatccaccaactgttgttccacgaagggaccttcccaatgttcataaaactttctgcatgaactcc

SEQ ID NO: 205026 - DNA, 384 bp, Gossypium hirsutum
atgtgtctgagttccagactaacctggtcccatgtgcccgggatccactttatgctttcttcttatgcccctgtcatttcagctgagaaggcttaccatgagcagctatcggtggctgagataaccaacagtgcttttgaaccctcttcaatgatggccaaatgtgacccacgacacgggaagtacatggcttgctgccttatgtaccgaggagatgttgtgcccaaagatgtgaatgcggctgtggccaccattaagaccaaacgcacaatccaatttgtggattggtgccctactggattcaagtgcggtatcaactaccagccaccaactgttgttccaggaagggaccttgccaaggttcagagagctgtctgcatgatc

SEQ ID NO: 205027 - DNA, 252 bp, Gossypium hirsutum
cctcaattctccatgttgtctttctttctttttttactccttagtttttattttcatttgtttactttttgaacataaatctgatcgtagaggatctcattctcatggccaccactggaaacaagaacatcaatgctaaattagttctacttggggatgttggagctggaaagtctagcctggtgtcgcgctttgttaaaggacaatttgttgaatttcaggaatcaaccataggtgcagctttcttttccc

SEQ ID NO: 205028 - DNA, 390 bp, Gossypium hirsutum
ttgaattattttaccaaatgaaagggatgccttctgggggtgatgtggagactggagatattccttcattgacggatctgggacttaacactgctgccacaatggctcaggatggcaggccatctgttagtgcttctatggctggtggcgagaatgaagcattgcaaaggcttaaaaagtttgcagctgagtgtaaagcacagccatacaaggggagcaaggatggtaaccaagaaaccatatatggtgctaacttttcttgcaaaatatcaccatggctagctatgggatgcttatctccccggttcatgtttgatgaactaaagaaaactgcaaataggaccgtttctgctacctcaaagaaaaatgatgggggcagtgactcacctg

SEQ ID NO: 205029 - DNA, 387 bp, Gossypium hirsutum
  unsure (1)..(387): unsure at all n locations
gagactttgagaaagctgctagcctttgcctttcgtttggtcttcttttgggataaaacattanctcaaatagctccggcgccgccgttaaaggtggacaacatcacttccatcctcgaaaaaggtggccaattcaccactttcatcaagctattgaaagccacacaggtggctgatcaactaaacaaccagctaagcacaccggaccctaacgacgggataacggtgtttgcaccgagtgacaacgcgttctccggactcaaacccgggacgttaaactcactttccgaccaagagaagcttcagttggttcagttccatatactcccgacgttaatgtcgacgtcgcagtttcaaaccgcgagtaaccctttgagaacccaagct

SEQ ID NO: 205030 - DNA, 381 bp, Gossypium hirsutum
aaggattggtcaagggacaccaggcggtgtgagcgggcaaggtcttcccggggaccgtaaaggcgacggatcgaacaagaaggaaaagaagttcgagccagccgcaccccctgcgagggtgggtcggaagcaacgaaaacaaaagggtccggaagcggctgctcgacttcccacagtaaccccactcagcaagtgcaagctacggctgttaaagctggagcggatcaaggattatttactaatggaagaagagttcgtagccaatcaggaaaggcttaagccccaggaagagaaagccgaagaagaccgatctaaagtcgatgatttgagaagctccccgatgagtgtgggcaatttagaggaactcatcgatgagaatca

SEQ ID NO: 205031 - DNA, 388 bp, Gossypium hirsutum
tcaggttatgggtatacctgtaggaaaacgtgctcgttacacagctcttggaggagtccgtccttctgcgtgcttgcctattactattgatgtcgggacaaacaacgagaagttgttaaacgacgagttttacatcggcctcaggcaaaggagggcaactggacaggaatatgctgaacttcttcatgagttcatgtctgcagttaagcagaattatggggagaaagtcctaatacagtttgaagattttgcaaaccacaatgcattcgagctgttggcaagatatagttctagtcatctcgttttcaacgacgacatacagggtaccgcatctgtggtgctggctgggcttcttgcagccctgaaattactcggtggaaccctcgct

SEQ ID NO: 205032 - DNA, 384 bp, Gossypium hirsutum
tgtatcgatagcttactaaccgaaatggtttcaacggattggaaccgattttacgctaataagcctgaactcgccgcccgtcggaccgaagccattggatatcaggtcggccaccagctctctgaacggtacacaatggagaggccatgttttagcgatcatttagaagcaatcaaattcatctgtaaggatttttggtttgaactcttcaagaagcagatagacaatttgaagacaaatcacagaggtacctttgtattgcaagataatcgttttcgttggcttacacgcatgtcaattgatcaatcacccgaaaatggaacatccgaagagctttctatcatggctgacaacaagactatgcaaagcatgcatctctatttt

SEQ ID NO: 205033 - DNA, 337 bp, Gossypium hirsutum
cagccatggaaattgatgctaatattgcaaaatggttgtatccaagacttggttacggtgtttaccttcctccagctgaggaagctgctattgctgcattgaagagagcccttggcgctttgaacactcatcttgcttccaacacatttcttgttggacattttgtcacccttgctgacattatcatgacatgtaacctctacttgggtttctcccagatcatgactaagagttttacctcggagttccctcatgttgagaggtacttttggaccttggttaatcagccaaaaatcaagaagattcttggtgaagtgaagcaggcagtctctctacc

SEQ ID NO: 205034 - DNA, 387 bp, Gossypium hirsutum
ctcttctaaatccttcatcagcagaacctcttgtctggccagcaactttaaagttcattaccgagcttaatgaagaggcaaaatcactattagaacaggccttaatggaggcaaaccgggaaagggaaaagaacatcttaaagggaacagcttactcacttccatcaccctcacattctgactcagggttagatgacagtgtttctgaggctagcgatactgaagtatgctgtatatgctttgagcagctctgcactattgaagttcaagactgtggccaccagatgtgtgcacaatgcacagttgccttgtgctgtcacaacaagccaaaccctgtgactgcaagcctaacaaccctggtatgccccttttgccggtgcaccattg

SEQ ID NO: 205035 - DNA, 371 bp, Gossypium hirsutum
gggaaatctttcgcaaaagcagcgaatttatctcttttgattatatctaggaacgagttcaatggttcactgcctgaagaaattggtttagttgataatttagttcaactttctgctagcggcaataagttcggtgggtcattgcctaaaagcatagtgaagcttgatgggctagggattcttgatcttcatgggaatgagttggaaggggagttgcctagtgggattgagtccttgaaaaagctaaacgagttgaatttagctgataataagttttcagggaagattcctgatggaatagggagtttgtcagtgttgaactatcttgatctgtctaataatcagataactgggagagttcctttgggttt

SEQ ID NO: 205036 - DNA, 382 bp, Gossypium hirsutum
caagaacttatcttactttgttgaatggatcccgggcaatgtgaagtccactgtttgtgacatccctccaatcggcttaaagatggcatccacatttatcgggaactctacttcaatccaagagatgttcaggagggtgagtgaacaattcactgccatgttccgtaggaaagctttcttgcattggtatactggagaagggatggatgagatggagttcacagaagcggagagtaacatgaatgacttggtttctgagtaccaacaataccaggatgcaactgcagatgatgaatagtacgaggaagaggaggaatactatgcagaggcttaaaatctaatggaataatttggatgtttttcgttgtgttttggattgggc

SEQ ID NO: 205037 - DNA, 383 bp, Gossypium hirsutum
tttaaaagcctcatattcttctgcatttaatggaattgagatacttcaaaggagggtatcattggagagaaatgagtctggtttatcattagatggaagcattgttagcgaaatcgaaggtgaaagtgtggttgatcggctgaaacgacaggttgagcatgacaggaaactattgagtgttttgtataaggaattggaagaagaaagaaatgcgtctgcagtctctacaaatcaagcgatggccatgattactcgactgcaagaagagaaggcaacgcttcaaatggaagccttgcagcatctgaaaatgatggaagaacaagcttagtacgatttggaagcactttaaaacacaaacgacctttttgctttataagagaaag

SEQ ID NO: 205038 - DNA, 382 bp, Gossypium hirsutum
aggaagtgtatggaaccagttgagaaatgtttgagggatgctaagatggacaagagcactgtccatgatgttgttcttgttggtggttccactagaattccaaaggtccaacaacttttacaagatttcttcaatgggaaggagctttgcaagagcatcaaccctgatgaggccgttgcatacggtgctgcagtccaagctgctatattgagtggtgaaggtaatgagaaagtgcaagatctcttgctcttggatgtcaccccattgtctctcggtttggaaaccgctggtggtgttatgaccgttttgattccaaggaacaccaccattccaaccaaaaaagaacaagtcttctcaacctactccgacaaccaacctggag

SEQ ID NO: 205039 - DNA, 385 bp, Gossypium hirsutum
gtgaccgcaagatctccgtcaagacaaactggcgaaggcccaagggtattgactcccgtgttaggaggaagttcaagggatgcactttgatgcccaacatcggttatgggtcagacaagaaaacacgccactatcttcccaatgggtttaagaaattcgtggtgcacaatgtccaagagctagagcttctcatgatgcacaacaggacatactgtgctgagatagcacatgatgtttcaacgaagaagaggaaggaaatcgttgagcgagcagcacagttggatgttgtcgttaccaacaaattggctaggttgcgcagccaggaggacgagtgaaggtcggttcttgaatgttgattttgctctttttaatatgatattttctt

SEQ ID NO: 205040 - DNA, 384 bp, Gossypium hirsutum
ctcaatgttcaacttctacggatttccattgctttgtgggtgttctatatatcatgcaggaatacatatttgtgtatatacatagagcttattctgcaatcacttcacaatctaataagctttttgccaaggggcgtgttgtataattgtacaacttcacccagtaaaagccaaaataaatggttgcgatcttaatttacttgaaagacaagaatacggagtgacgggttggatatagagaaaatgatttgtttctttcatatgtttctgatgtgttcatcagctgcaaatgacctccacagagagtttcttcatcacattaagacacgggtctcctccaaacatttcgggtgctacagtcactgtgcagaagatctgtccaac

SEQ ID NO: 205041 - DNA, 382 bp, Gossypium hirsutum
ctcgtgccgtgaaaattcattttctttggactttactctccgaaatccgagtcctaggaaagatgcgtgagattcttcatattcagggagggcagtgcggcaaccagatcggtgccaagttttgggaggtggtttgcgccgagcacggcatagattcaacgggacgctatcaaggagacaatgatttgcagctggagcgcgttaacgtttactacaatgaagcgagttgcgggaggttcgttccacgagccgtccttatggacttggagcctggcactatggatagtgttagatccgggccgtacgggcagattttcaggcctgacaacttcgttttcggccagtccggtgcagggaataactgggccaagggtcattacac

SEQ ID NO: 205042 - DNA, 371 bp, Gossypium hirsutum
atttcacaaacccccaaaatggctaacctcatgatcatggcggttctcctggttgcggtgtcgacggcggcaaccgttacggacgcgcaagcaacttgtgcggcaaagctagtgtcttgttctcgttacatcctaaacaccaccatcaaacctcaagatgactgttgtaacccgatcaaggaagaggtaaccaacgatctttcctgcctttgtaacctctacaaagaccctaaagtttttgcttctttgaacatctccaccgcgcaagctctcaatgtcactcgtgaatgcggcgtcactactgatctaaaccgttgcaacagcaacagcacttctacaagctctgctacatccccaccaggaggacgatc

SEQ ID NO: 205043 - DNA, 351 bp, Gossypium hirsutum
accagtgatttctatggcgatggaaaccctagatgacgagaaaccggaggaagatgaggtgatagataaataaaatgaagagggaagtgaaaagggttgtggtactcagcttaaagatattcccaatggcactttatgtgatgaatcctaataagttcagggcatgtgagtttctcatatggttccatgaatgagagcgtggtgataagataactgtctttgctgacaatctttttgcattggttgagtatgcaataaagctacgcaagcctataatctatggtgctaccagccatcttgagaggactaaaattctccaggcattcaagactagtcgtgatgtgaacacta

SEQ ID NO: 205044 - DNA, 382 bp, Gossypium hirsutum
atggcttactccgttaggtcgaggagaatttggagtaaggcaatgctttggaagcttcgaagccgatcttatcgtcgtcaagacccttgttcaggcagaagatctgggaagactaatcaagccatcatgaaaaaatcaagtaacgagaatactacaacaagaagggaagatggggttgggtttgttgaagaggcagatgaactaagacagcttgttccaggtggtgaaaccatgaatttatgcaacttgttggatgagactgcacattacataaagtgtcttaccacccaggtacaggtgatgaaaaaaattgcggatttctactctttctgagtaattatatataaatatattcttatcacttcaatatatataaaataaa

SEQ ID NO: 205045 - DNA, 385 bp, Gossypium hirsutum
aaggcatcccgccagaccagcaacgtctcatcttcgccggaaagcaactcgaggacgggcggactttagccgattacaatatccagaaggaatcgactcttcatctggttctacgtcttcgaggtgggatgcacatcttcgccaagactttgaccggtaagaccattactttagaagtggagagctcggatacgattgataacgtgaaagcgaagattcaggacaaagaaggaattccaccagatcagcaaaggttgatttttgctgggaaacagctggaagatggaaggactttggctgattacaatattcaaaaggagtccactcttcaccttgttcttcgtcttcgtggtgggttctaagccttaaggtctttcttaatgtg

SEQ ID NO: 205046 - DNA, 384 bp, Gossypium hirsutum
gagattactccaaaatatgtaaacttgcagataaatgtgtcatggcatcctcaggatttcaagctgacgtgagggctttacaaaagcaactggcagctaggcacttgatttatcagcatcagcacaacaagcaaatgagctgccctgcaatggctcaattgctttccaacacactttattacaagcgtttctttccttactattcttttaatgttttgggtggccttgataacgaaggaaagggttgtgtcttcacatatgatgctgttggttcctatgagaaggttggatacagttctcaaggttctggttcaacgctcatcatgccgttcttggataaccaactgaagtctcccagtcctcttctattgcctgcccaggatg

SEQ ID NO: 205047 - DNA, 385 bp, Gossypium hirsutum
aaggacttttagacccttctctttggtgaaaagccggtcacagttttcggtatcagaaaccctgaggaaatcccatgggctgaggctggagctgagtatgttgttgagtctactggtgtttttactgacaaggacaaggctgctgctcacttgaagggtggcgcgaagaaggttatcatttctgctcccagtaaggatgctcccatgtttgttgtgggtgtcaatgagaaggaatataagcctgaccttaacattgtctccaatgctagctgcaccaccaactgtcttgctccattggctaaggtgatcaacgataaatttggcattgttgagggtcttatgaccactgttcattctattactgctacacaaaagactgttgatg

SEQ ID NO: 205048 - DNA, 380 bp, Gossypium hirsutum
gctatatccgctgcttcgaagcggtccggaagtggaaggtatgtgatatacgttaaggcaggcacatacaaggaaaacgttgagataggaagcaagctgaaaaacatcatgatggtgggcgatggtatagggaaaactataatcacagggagcaaaagcgtcggaggaggatccacaacgttcaattcagccaccgttgccgttgttggagatgggttcattgctcgtggcattacgttctacaaatgcagcttcgaagggtaccaagacactctttacgtccattccgaaaggcaattttacagagaatgtgacatctacgggaccgttgattggatattcggcaacgcagccgttgtgtttcaaaactgcaacatata

SEQ ID NO: 205049 - DNA, 379 bp, Gossypium hirsutum
gttaaaaattcttttctttctatttggttaaccatggctcataacttttgtcatcctttcttccttttccaacttttactcattactgtctcactaataatcggtagtcacaccgtctcgtcagcggctcgacatttattccagacacaaacaacctcatcagagctgccacaattggcttcaaaatacgaaaagcacaaagagtctgaatacaaacaaccaaaatatcacgaaaagtacccaaaacatgagaagcctaaaatgcacaaggaggaaaaacaaaaaccctgcaaacatcatgaagagtaccacgagtcacgcgaatcgaaggagcacgaagagtacgataaagaaaaacccgatttccccaaatgggaaa

SEQ ID NO: 205050 - DNA, 389 bp, Gossypium hirsutum
cacacaagtaaagcattagcaaccatagccatggcttcctcaccaaaactcttctctatgtctatcctcttcctttttgccctcttctccatgcaaatccatgctagagagtacttcagcaaattcccaagagttaacatcaatgagaaagagacaacaaccagagagcaaaagcacgagaccttcgttccccagaccacccaaaagccagaagaacaagagccaaggttcattcctgaaacccaaaatggttatggcctttacggccacgagtcaggctcaggctcaggctcaggctcaggctcaagccggcccagtttcaccaccaaagaaacctatgaaccctatgtcacccctgttagattccaccctgatgagccctataacag

SEQ ID NO: 205051 - DNA, 381 bp, Gossypium hirsutum
gaacactagccactgtcacagagttcatggtgaatggctctcttagacatgtcttgcttagcaaagacaggcaacttgatcgtcgtaagcgactcattattgccatggatgcagcatttgggatggaatatttacattcaaaaaacattgtgcattttgatttaaaatgtgacaacctgcttgtcaacttgaaagatcctgtacggccaatttgcaaggttggggacttcgggttgtcaaagataaaaaggaataccttggttactggtggtgtgaggggaactcttccatggatggccccagagctgttgaatggcagtagtagcaaggtttctgaaaaggtcgatgtgttctcatttggtattgttctatgggagattc

SEQ ID NO: 205052 - DNA, 349 bp, Gossypium hirsutum
caggtactaattggttgcgtactctccaatatactgaaataaacatacatttttgcacaacatttaagaataattgattttgttgtttaaacagcgacgacgataacactctacaacaaatgctcacatccagtttggccagggattcaacccagcgccggcaagccaattttagcccgcggtggattcaaactcccaccaaacaaagcctactccatgaatctacctccgttatggtccggtcggttctggggtcgacacggttgttcctttgacgcctcgggtcacggccgttgcgcgacaggtgactgcggcggttccttattctgcaacgggctcggcggaaccc

SEQ ID NO: 205053 - DNA, 378 bp, Gossypium hirsutum
ttttacttttcttccccaaatggcaaaatgcgatggtgcactagaaacacggaatccaatatccaaaaatacctgcaaacattgacaaacaagacgcgtataaggaacataaaaatgaagagtatcactaatcaccctaatctaaagagcacgaagaatacgagaaagaaaaacccacattccccaaacggaaaaagcctaatgagcacaaaaaacacccattcaaatatccataaatacttgtctacacagaaaagcacgataagagtaaagaacataaacattaagagttccacaagtcacactaatcgaaagatcacgaagagtacgagaaagaaaaacccaatttatacaaatggaaaaagcctaaaagagcat

SEQ ID NO: 205054 - DNA, 381 bp, Gossypium hirsutum
aagaacttatacaaattgaggtatttggaacttggccaatggccttactatcagcaaacgagagacgggttatgattgaaggacctgtttgcgattcgtcacaagttataggatggcacctaaggaagatgaataaccagacagatgcagaaacagatgctgatatgaaacctcctattcatatatcaagttttgcatttaacagttcaatcctttgggaccctgagagatggggacgtctcacatcggtccaaggcacttcacagaactcactgaaatttgtgaaacaaattgtaatggaagatgagggcaagttaaaaggtatcccaccagaagagtgctcccaaataatgctatggcgtcttcatttccccattggag

SEQ ID NO: 205055 - DNA, 375 bp, Gossypium hirsutum
cttctttcttcttcttcttattcctttattgctttggagaatttttcttaatcgaaaatgagagagtgcatttcgatccacatcggtcaggccggtatccaggtcggaaacgcttgctgggagctttactgtctcgagcatggaatccagcctgatggtcagatgccaagtgacaaaactgtcggaggaggtgatgatgcttttaacacctttttcagtgaaactggtgctgggaagcacgtccctcgtgccgtcttcgtggatcttgaacccactgttattgatgaagtgagaactggtgcttaccgccagctcttccacccagaacaactcatcagcggcaaggaagacgcagctaacaactttgcccgtggt

SEQ ID NO: 205056 - DNA, 376 bp, Gossypium hirsutum
ggaagctgtttcagtcgtcgtcgccagcttctacggcgaatatcgtcgtggcccaagatggttcagggaattataagacgataaaagacgctctatccgctgcttcgaagcggtccggaagtggaaggtatgtgatatacgttaaggcaggcacatacaaggaaaacgttgagataggaagcaagctgaaaaacatcatgatggtgggcgatggtatagggaaaactataatcacagggagcaaaagcgtcggaggaggatccacaacgttcaattcagccaccgatgccgttgttggagatgggttcattgctcgtggcattacgttcagaaacaccgctggtcctactaaccatcaggcagtggctctacgttc

SEQ ID NO: 205057 - DNA, 381 bp, Gossypium hirsutum
aagcaggctgttgttgtttcgtctcatgaagatcccgagagtggtgacgatgaaatcatcgaggaactcaaagtggagaagacagaagaagatagtggcgatgtaaaaggttcggttccaatcaaggagatgaaaaatcaagctgtcacggagaacggacggaaacggaaaaggtcaatgcaggcgaaagaaaatgggattacgacaaagttaagcaccaatgattcgattaaacctgtggggtatcgacaaaatggtagcaggcgcaaaaacaaacctcaacgggctgccgaagctattgttgagtgcaaatgacgaggttttgaataaccgtcaccgtgtcttttaccttattttttcgtactaaaagtaatgcttgtt

SEQ ID NO: 205058 - DNA, 385 bp, Gossypium hirsutum
aagaaaccttcccttccagtgaaacccggttcaccacccgggcttccgatttacgacgcaatggctccaggtccatcactagccccggcaccagctccaggacccggtggacctcaccatcatttcaacggaatgaggcaagtcaaagatttcattcaaacactaattcaatatggtgggtacaatgaaatggctgatatattagtgaatttaacatcattagccactgaaatgggtcggttagtttccgagggttacgttttaactgtattagcacccaacgatgaagccatggctaagttaaccaccgatcaattaagcgaacccggtgcaccggaacaaatcatttattatcacataatcccggagtaccaaaccgaagaaa

SEQ ID NO: 205059 - DNA, 379 bp, Gossypium hirsutum
gtttgttgcatcgaccgtctcaactctgtgtcttgcctgacaaaagctggccagctggaaactccaatcgctgccaccaaattccacatttgatagttgggacacctagtctcaccgtttaagacaccccaccaagctgatcctaatataaaacagcgatgggttcccttctaagctccaacaagttaagccaggaagatacccaaatggcacttgacaaggtcaagcacatcgtttcctccacccccgttgttgtcttcagtaaaacctattgtgggtattgtaatagggttaagcagctgtttgctcagttaaaagcttcttacaaggccattgaattggatcaagaaagtgatggtggtgaaatgcaagcagctct

SEQ ID NO: 205060 - DNA, 382 bp, Gossypium hirsutum
gaaacctgttccttatccaccgatttatacacctgcgaagagagagaaacctgaacgcaaaccacccttatatgaaccttcaaagaaagggaagcccgaaccaaagccaccggtttatacacctccaaagaaagagaaacctcgacccaaaccaccagtgtatgaacctccaaaaaaacctccaatgtacgaacctaagccaccaaaaccaccggtttatacacctccaaagaaagagaaacctgtacccaaaccaccaatgtatgaacctccaaaaaaacctccaatgtatgaacctacaccaccgaagccaccggtttatacacctccatagaaagaaaaaccagaacccttgccaccaatgtatcaacctaccaacaac

SEQ ID NO: 205061 - DNA, 385 bp, Gossypium hirsutum
gttgcaaggcaagccagatctgatcatcggaaactagagcgacggcaatatcgtcgcctccttgctcgcacataaattaggtgtcacacagtgcaccatcgcccatgctttggagaagacaaaatatccagattcagatatctattggaagaagcttgaagacaaataccatttctcttgccaatttacagctgatctttttgcaatgaaccatacagatttcatcatcaccagtactttccaggaaattgcaggaagcaaggacactgttggtcaatacgagagccacactgctttcactcttcctggtctctaccgtgttgtacatggtatcgatgtgtttgatcccaaattcaacattgtttcccctggtgctgatatggag

SEQ ID NO: 205062 - DNA, 384 bp, Gossypium hirsutum
cccaaaccaccagtgtatgaacctccaaaaaaacctgcaatgtacgaacctaagccaccaaaaccaccggtttatacacctccaaagaaagagaaacctgaacccaaaccaccaatgtatgaacctccaaaaaaacctccaatgtatgaacctaagccaccgaagccaccggtttatacacctccaaagaaagaaaaaccagaacccaagccaccaatgtatcaacctcccaacaacccaccaatatatgagccaaaaccacctaagccaccagtttatgcaccaccaaaggaagaaaagccaaaacctaaaccaccagtttatgagcctccggcacatgagccaccatacggtcactatccaggacatccacctttggggaag

SEQ ID NO: 205063 - DNA, 381 bp, Gossypium hirsutum
gagaaacgattcggacaatcaccggttttcattgcctcaactttgatggaaaatggtggccttcctgaaggaactaattccacatcactgattaaagaggccattcacgtaattagctgtggttatgaagaaaaaactgagtggggcaaagagatcggatggatttatgggtcggtgacggaagatatattaacaggtttcaagatgcattgtagagggtggaaatcggtttattgtgtaccgaaaagaccggcattcaaagggtccgctccaatcaatctctcggatcggttgcaccaagttttgagatgggcacttggttctgtagaaattttccttagtcgtcactgtccactttggtatggttatggtggaaaactg

SEQ ID NO: 205064 - DNA, 389 bp, Gossypium hirsutum
cgtgaatcgaaggagcacgaagaatacgagaaagaaaaacccgagttccccaaacgggaaaagcctaaagagcacgagaaacacgaagtcgaatattcggaaatacccgagtacaaggaaaaggaagataagagtaagaaacataaagatgaagagtgccaggagtcacacgaatcgaaagagcacgaagagtacgagaaagaaaaacccgatttccccaaatgggaaaagcctaaagggcacgagaaacataaagccgaatatccgaaaatacctgagtgcaaggaaaaactagatgaggataaggaacataaacatgagttcccaaagcatgaaaaagaagaggagaagaaacctgagaaaggcatattaccctgagtgggtaaaaa

SEQ ID NO: 205065 - DNA, 389 bp, Gossypium hirsutum
cccgacttttacttaacgtctgatacctgcgaacggggctggtatgatctactgggagagcgctcccagtttgattgctgatttatccaaacctaacacgatcgccgccacagaaatcaactgtcaactgttaaaacagcttccgctgtagaaacaacatcgacccacatcaacacaggcatcaactcttacattctctgcacccctcaattccttaccaacggaaccatgattcacgaccttttcaatccagaccgagttcttataggaagcaatgcaacacccgaaggtcacactgcaatcacaaacttgagagatgtgtatgctcattagcctcctgtggaccgtttaatatgctctaacactatgttctgccgagctattaatac

SEQ ID NO: 205066 - DNA, 333 bp, Gossypium hirsutum
cccgacttatactcaggtctgggagctgggaaaggcgctgatctgacctactgagagagtgctgcccgtatgattgctgatgtatcgaaatctaacaagatcgtggtcgagaaatcaactgtccctgttaaaacagctgaggcaattgagaaaattttgacccacaacagcaaaggcatcgactttcagattctctccaaccctgaattccttgccgagggaactgcgattcaagaccttttcaatccggaccgtgttcttattggaggcagggaaacaccagaaggtcaaaaggcaatcccacaattgagagatgtgtatgcgcattgggtc

SEQ ID NO: 205067 - DNA, 382 bp, Gossypium hirsutum
cctgttcctacatcctcattcgtgagttatcccatcattgatcaaagtgttgtagtacctgtttcccaaccacctatacaatcttcatctgaggcatatcccatcagtgaccaaggcatttcagtccctgcggttccacaaactccaccttcatctgtgtcttatcctatcattgatttttcagaagctgctcctgttggaccctctcaagtgccacaccctgcaatcagcgtgcaagcacctagtcaaggggagagtgaaaatattgttgagcagtctctacttaaggaacttgaagatatggggttcaagcaggttgatttgaacaaggacattttgaggaggaatgaatatgatctggagaagtctgttgatgatcttt

SEQ ID NO: 205068 - DNA, 380 bp, Gossypium hirsutum
ctcgtgccgcatgatgacacattgaagattgtgagaagatgccaattcaaacattcaaattcatacttttaatcagagccaatatcctcgtctggtggctgaagattttactccatttccttgcaaaggccagcctggcaaggatggatggtatcctcctggtcatggtgatgtgttcccagctctaatgaacagtggcaagcttgctactttcttatcacaggacaaggagtatgcatttgttgccaactcagacaacttgggtgctattgttgacttgaaaatcttgaaccatttggtcaaaaacaagaatgaatactgtatggaggttacacccaaaaccttagctgatgtgaagggtggtactcttatttcttatg

SEQ ID NO: 205069 - DNA, 380 bp, Gossypium hirsutum
  unsure (1)..(380): unsure at all n locations
gggatcatttgcagttcaaagatattattgcaaaggtctagtgttgagctctattacaaggctgtccacttctacttgcaagaacatccagatctcatcaatgatatgctgaacgtgcttgcacttcgtgtggatcacactcatgttgttgacattatgagaaaggctggtcatctacgtcttgtgaagccgtacatggttgctgttcagagcaacaatgtatcggcagtaaacgaggcattgaatgagatttatgtggaggaagaagattatgatagattaagagaatctattgatttgcatgataactntgatcagattggacttgcacaaaagattgagaaacatgagctgcttgaaatgaggcgtgttgctgcata

SEQ ID NO: 205070 - DNA, 395 bp, Gossypium hirsutum
  unsure (1)..(395): unsure at all n locations
cgagcacctctttatagtttgtctanngggatcacaagaggcagatgtngtgctggtggttctgacccctgccctncttttataatttcctcaagttanctgggatgtagttttgtttgggggtgtgagcctggttatacctattgccactgggaattcatctctatcttcagttagctactcatcctaaacttgccaagcatgctggtgctttctggggcggcccagattatggtgttcttagctgggataataagcttgccggtgctcaggtgcttctgagccgattgagattgtttttgagtcctgggtatccatatgaggaaatattgagtacgtttcataatcaaaccagcataattatgtgctcattccttccagttttcactagcttt

SEQ ID NO: 205071 - DNA, 364 bp, Gossypium hirsutum
tacctcgagtcgacttaattaatcgacacgttccaagtgcaagccaacaacacggttgaaggcattacgattttcgtaccgaaagacagcgcattcaaggctcttacgaagccttcattgtcaaatctaactgatgatcagttcaaatcagtgctcctttaccatgccttgccacgatactatgcccttgcggacttcaatgacctaagtgagaaaggccctattagtacacttgctggtggccaatacactttgcaattcaacgatgagtctggtaccgtccgcctcgattccggatggagcaaaacaaaagtcactagcgcagtacatacgtccaagccagtcgcagtctatcaaatcgata

SEQ ID NO: 205072 - DNA, 331 bp, Gossypium hirsutum
aatcgagcggcaccttgtgtttttgcctttgcactttgccgaagacgcgtacaattctctgctttacgcgaggatgaatttaaaaagctagctatatgaccagtcaccaagactgacggtgaataggttgtgtcaaaaagatacacttgtttgacatgggttgttcgaaattgattgagtgaattcaaacatagtatagcaagctaaggaactctatttattcccttttagcaattcccaccaaataagatgaggacggactgcttctataataccacaccagctatgcaaactccaatggccttctagaatgttgattctcgtgagaact

SEQ ID NO: 205073 - DNA, 371 bp, Gossypium hirsutum
cagagatggttaatgccctgaggaaggctagtggacaggtggatcgggcaaatgcagctgtgagacggcttgagactgagaatgcagaaatcagagctgagatggaggcgtctaaattaagtgcatcagtatcagtcacaacatgtctggaggttgcaaaaagagagaaaaagtgcctgaagaagcttttggcttgggagaaacagaaagctaagttacaggatgaaattgctgatgaaaaggataagattaaagatctgcaacgatgcttagctcgagtagagcaggatcagaaagaaacagagttaaaatggagagaggagttaaagtccaaagaacttgccttggctcaagttgaggaggaacgatgc

SEQ ID NO: 205074 - DNA, 373 bp, Gossypium hirsutum
ctcgtgcctttgcagatctttcgttttcttgatttgggtgttgagtatacggccttgttagtgacttaactgagtttaattgttctgctgagttgaattaggaagtcatcggagatgctggacggaatctggggccgtggttttgccttcaaatgtaagtcattgataaaactgataaagagtcggatcgatgtaataaggaggaagaggagtgcgacgcttaagtttttgaagaaagacatagctgatctgctcgctaatggccttgatattaatgcttatggcaaggtggaaggatatataacttgaattggtccttttcttttgctacgattttgttgagaaatgctgcgagttcttgttgaaacatgtt

SEQ ID NO: 205075 - DNA, 375 bp, Gossypium hirsutum
gtcaaagctatagatccaagacaaggaaggcatccctgcggatcaacaacgccttatcttcgccgggaagcagcttgaagacggccgcaccttagccgactacaatatccagaaggaatccactcttcacctcgtcctccgcctccgcggcggtgccaagaagaggaagaagaagacctacacgaagcccaagaagatcaagcacaagaagaagaaggtcaagctcgccgttctccagttttacaaggtggacgagtcgggtaaggttcagaggctgagaaaagagtgtcccaatgccgagtgtggtgctggaaccttcatggctaaccattttgataggcactattgcggtaagtgtaggctcacttatgttta

SEQ ID NO: 205076 - DNA, 386 bp, Gossypium hirsutum
tgaccaagttcgctgtaaagtcctaaaacccataggagtcagatttgtcctccctgtacttcctataagtttgatattcgctggatattcactagctgcacttgaggaacgtggttctcgaaatggtgaaaagaaaagatcttcgtgcatttgcaacaaatggcgttccaaaaagcaacttgccatattcttcttgcttgcatccaatattccaatggccctgtatatgagtttgattcaccaaagaggaactgaggatgcgatgaactatctatctaaagaagctgcaaaagggaaagtgaaaagtatcgtttttctaatgccttgccatgccacaccctactatatcactttgcataacaacctgcctatgcgtttcttggatt

SEQ ID NO: 205077 - DNA, 267 bp, Gossypium hirsutum
ttaaagcttttggatccttatggattcacactgatgagaccgacccttgtcttggatctcgactctcaccaattgcaagcttttaccgctgcttatgctgaactagaaaccactctgtctggcttgaatgttctgattgagacctactttgctgatctcactgctgaggcatacaaaaccctcactgaattgaacggtgtcactgcttatggtatggatttggttcgtggaacccagaccattgagttgatcaagagcaacttccct

SEQ ID NO: 205078 - DNA, 384 bp, Gossypium hirsutum
agtattcctacttggagtggtgactctcaccctcccacatttggtacctatgagtcaccaaattatgggaaaccccctactcctgtattcaagcctcccaaggtgaaaccaccaccatatgaacctaagccaccagtgtatgaaccaccaaaaaaggagaagcctgaacctaagccaccggtttatgcacctccaaagaaagagaagcatggacccaaaccaccaatgtatgaacctccaaagaaggagaagcctgagccaaagccaccagtttatacacctccaaagaaagaggagcctaaacctaaaccaccagtatatgaacctccaaagaaggagaaacctgagccaaaaccaccgatttatacacctccaaagaaagag

SEQ ID NO: 205079 - DNA, 295 bp, Gossypium hirsutum
  unsure (1)..(295): unsure at all n locations
ggcaaacttttttttctgcaaaaacacccgnncggggaagggtttaaaaacccacatttacgggcattggccaataagttcaatggcgatgacaccaccaacgtaattcttactttcaaagacgtcaccgtagaagggcaccgtacgaggtgtgggactcacgaatcaacccgggtaggaacgcgtcctatcttcacaacatatgtttgtgcataaaactagaacaactaatggaccaatcaaagtgcttggccttttcatcaacctatttacggttcacaaaccctccctttgg

SEQ ID NO: 205080 - DNA, 381 bp, Gossypium hirsutum
atcatttccgcctgaagaagatgattatctcttgggtgaagctcgccagcctctatggcgaaaagtgccaatttcgtcaagtctgataagcccttaccggatagtcatcgtcctccgattcttcatcctcgcatttttcctccggttccgtattctaacacccgcctacgacgcttacccgttatggctaatctctgtcatctgcgaagtttggttcgccttctcctggattctcgatcagttccctaaatggttccctattactcgcgaaacttacctcgatcgcctctccttgaggttcgaacgtgaaggagagcccaatcaacttggcgccgtcgacgtcttcgtcagtaccgttgaccctctcaaggaaccccccat

SEQ ID NO: 205081 - DNA, 307 bp, Gossypium hirsutum
  unsure (1)..(307): unsure at all n locations
ataattcataaactcttatttttcggagtttttacgggtaatggtatctctccagcaacgcacagtancaccaaatttccgtacgcccaaacctttgatccattatcaccttctctgatcttccctcgactaacggagatttgaagatggtgtcggacgcgagcaagatgaaggctgctcacaaaaaggctgctgccgctgcgaatagaggagggaaggctgctgcacccgctgcatctttcaaggcggcagctgcggcgaccgcggagaacggcgttgataaggtttctgataaaaatagtatgct

SEQ ID NO: 205082 - DNA, 341 bp, Gossypium hirsutum
aagacgatcactctctagtcgccagctcctatacgatcgcatcgtgacggccaaagaccacataaggcagcatccattccaccagcagcgtatgatcttaacatcaaaacactttgaagacggtctaaccttgttcgagtacaacatgcaaaaagagtgaactctacacctagaacttcgtctgagcggtgtgaagcaaatatatctgaaaaccttgactaggaagacagtcactatcaaggtagagagctccgacactaccgacaacattgatgcgaaaatataagacaaggaacgcatggctctataccacctacgtaatatgtttgaccgaaaacaac

SEQ ID NO: 205083 - DNA, 383 bp, Gossypium hirsutum
  unsure (1)..(383): unsure at all n locations
gcgtagacaaaaaagaaattgaacatgccgcagttatgcactacaatggcaacatgaaaccctggctcgagctggcaatgaccaaatatcgatcatactggaccaaatacatcaagtatgatcatccctaccttcgcagctgcaatcnnnntgagtaaacctgattaattaaagcatttcatttttttcctttttggctttactccccccctcccccccacattgattattcttctttgtaattcattaaattcatccccttgaggactcgcccattggaacgagttaactgtgtacgaatgttaacctgtgaaagacacactatgatcctttttttcccctttttggatgtaagttcaattttagacagaatatggaaacct

SEQ ID NO: 205084 - DNA, 377 bp, Gossypium hirsutum
aatcattgtttaccgtggtctatattttggaatgtacgactctctgaagccagtgcttttgactggaagcatgcaggatagtttcttcgctagctttgctcttggttggctcatcacaaatggtgctggccttgcatcttacccaattgacactgttcgtagaagaatgatgatgacttctggtgaagctgtcaaatacaagagctcgctcgatgccttctctcagatcttgaaaaacgaaggtgccaagtctctattcaagggtgctggagctaacatccttcgtgccattgccggtgcgggtgtgctcgctggatacgacaagttgcagctcattgttttcggaaagaagtacggatccggtggtgcttaaattt

SEQ ID NO: 205085 - DNA, 362 bp, Gossypium hirsutum
aagatatcttgtccccttttgctggaaagaagcaatgatatacgtacgaaactatggatttctgggaacagatcaagactccagggatgtctttaaaatgttctggtctttatcttgctcaattccggtatacctcccctgatctattagctggtggagatggaactaaaagtgcttcgattcttggtgatgtctatgtgcatccctcggccaaagtacacccgaccgcaaagatcggtcccaatgtctctatttcggcaaatgttcgtataggagctggggtgagacttataggttgcatcatcttggatgatgttgaagttcaggaaaacgcggctgttattaattttattggtggatgg

SEQ ID NO: 205086 - DNA, 395 bp, Gossypium hirsutum
gaaaagcctaaagagcacgagaaacacgaagtcggaggttcggaaatacccgagtacaaggaaaatgaagataagagtaagaaacataaagatgaagagtgccaggagtcacacgaatcgaaagagcacgaagagtacgagaaagaaaaacccgatttccccaaatgggaaaagcctaaagggcacgagaaacataaagccgaatatccgaaaatacctgagtgcaaggaaaaactagatgaggataaggaacataaacatgagttcccaaagcatgaaaaagaagaggagaagaaacctgagaaaggcatagtaccctgagtgggttaaaatgcctgaatggccgaagtccatgtttactcagtctggctcgagcactaagccttaagccatat

SEQ ID NO: 205087 - DNA, 358 bp, Gossypium hirsutum
tagagctgatttatactttaagatgttatcattcccccatgggcagttgcatttcctgatgaccatgaaacttgtaatgtacatttatttatatcaattgatggtggggctgcttttggtttccctgagacacctgaagatgctgccagggctgggcttgtgagtggaaaggacaatatcattgtccgaagtattcaggatgcctatattaatgctatacgacgagcaaagaattttatctatattgaaaatcattatttcctcggaagctcatttggctggagtcctgatgacatcaatcctgaggatattaatgctttgcatctgattcccaaagaactttcacttaaaattgtta

SEQ ID NO: 205088 - DNA, 378 bp, Gossypium hirsutum
aagaaacattggagctgttctatttcatggtggtcggtgcattgggagcagtggttgcagcattagagctaagcaagaacagcaaagatcgaatcaacacttcccctgctttcaattcctttaagaacaattacctcgttgtttactctctcatgatggctggagactggctgcagggtccatatgtttactatctttacagtacatatggctttggaaaaggggagattggacagctttttattgctggttttggatcctccatgttgtttggcacaattgttggatctctagctgacaaacagggccgaaggagggcatgtgttacttactgcataacttacatacttagttgcatcaccaagcactctcctcaat

SEQ ID NO: 205089 - DNA, 380 bp, Gossypium hirsutum
gaaaatatcagctagggttcctctctccctctccaaaaactaaacaacaaaacaaaagagagatggcagtaatggcggatcaccattccctggctgttgtttttggtatattaggtaacatcatctcagtcctcgtatttctggcaccagtgccaacattctgtcggatttacaaaaagaaatcgactgagagtttccagtcactgccataccaggttgcattgttcagttgcatgctatggctgtattacgcgttgattaaaaagggtgctttccttctgatcaccatcaactcttttggatgtgttgttgagactatttatatatctatgttctgggcttatgcttcaaagaatagcaggatgtcggctatgaaactt

SEQ ID NO: 205090 - DNA, 380 bp, Gossypium hirsutum
gataacattcgttgttggttgatgcagggattgggagccctaggatttgtacccaagacgagaccacattaaccagatcggaaatcaatcgatttgaggataaggtgggattcttcgataaaggagtgggcggcggtgaatcactggtgagaaagcggtttttggagagattcttcgtcgatttagtgagcggtgaatcgatcgccaaagagcgagctgccgttaggtttaacgatttgttgggatcgagatcactggacgtggtcgccggcgagccgactcttcttaatccacggaggttcaggcaaaccctagtttggcaagaattgaataagcattggcgaaacaattcgaaggtcaagggcttttttattgataaa

SEQ ID NO: 205091 - DNA, 377 bp, Gossypium hirsutum
cgtttgtttcctacggagacacttctcatgggaggtgacatatcacaagcactgcccatcatgttgatcttgtcggtggttccactagaattccaaaggtccaacaacttttacaagatttcttcaatgggaaggagctttgcaagagcatcaaccctgatgaggccgttgcatacggtgctgcagtccaagctgctatattgagtggtgaaggtaatgagaaagtgcaagatctcttgctcttggatgtcaccccattgtctctcggtttggaaaccgctggtggtgttatgaccgttttgattccaaggaacaccaccattccaaccaaaaaagaacaagtcttctcaacctactccgacaaccaacctggagtg

SEQ ID NO: 205092 - DNA, 380 bp, Gossypium hirsutum
cgccccttccttcctctctgcttttactttgctaaggccaagccttcgacaatggccgaaccctctaccatttcaccagctcccctcttgaaagatgagctcgacatagtcattccaaccattcggaacttggactttttggagatgtggaggccctttttccagccttaccatctcatcattgttcaagatggtgatccttccaagaccatcaaggttccggagggcttcgactatgagctttacaataggaacgatatcaacaggattttgggtcctaagtcttcttgtatctctttcaaggattctgcttgtcgctgctttggttacatggtttccaagaagaagtacatttataccattgatgatgattgctttgt

SEQ ID NO: 205093 - DNA, 382 bp, Gossypium hirsutum
agcaaagccaaatttcttgggggaaaagaaaatggagttttccatgatttttatgattagcttctctgtattgattttgtgctcctcactggcatatggtcaagttgcaatgagcacaagcccgacaccgtcaccctcaccggcaccgacaccggcatacaaaaatctcaaagacttactctctgtggcaggtccatatcacaagttcctggactacctcgaatcgactaaattaatcgacacgttccaaatccaagccaacaacacggttgaaggcattacgattttcgtaccgaaagacaacgcattcaaggctcttaagaagccttcattgtcaaatctaactgatgatcagctcaaatcagtgctccttttccatgcc

SEQ ID NO: 205094 - DNA, 377 bp, Gossypium hirsutum
cttgattcttattctcagttgtgatttaggtgttgatattcaaatggcggatattagcaatggttccaaagggtttgcagtgaaacaaggagaaccaactagggtccttcctgcagaagagacaaagaagggtctttattacctgggaaaccttgaccaaaacattgcagtcataattcgaaccatttacttctttcagtcagagtctaaagggaatgaagatgctgccgaacaagttaaaaatggtttgtcaaagattcttgttcatcattatccacttgctgggcgactaaccatcagctccgaagggaagctcatagtggactgcaccggggagggggctgtttttgtggaggctgaagctaattgtgggattg

SEQ ID NO: 205095 - DNA, 197 bp, Gossypium hirsutum
  unsure (1)..(197): unsure at all n locations
tagaattactttttttttttaccccanggngaaaagcctgtcacggttttctttatgagggaccctgaggaaatcccatgggctgaagctggagctgagtatgttgctgagtctactggtgtttttactgacaaggacaaggctgctgctcacttgaagggaggccccgaaaaaaggttttcattttattgctccca

SEQ ID NO: 205096 - DNA, 377 bp, Gossypium hirsutum
catattcttgggaaagtcaacaatataaccattgacaaatgcactaagatgggagtggtatttaaggatgttgtggctgcttgtgaggtagtaaactgcaatggtgttgaggtgcaatgtcagggttctgctccaacaatttcagtggacaacacatctggctgtcagttgtacttaagcaaagactctttagggacatctataacatcagcaaagtcaagtgagatcaatgtgttggtgcctaccggacctgatggtgactggggggagcattcattgccgcaacagtatatccatgtatttaaggatggtcaatttgaaactaccccagtgtcgcactcaggagcataaatgaggcctatttgaattgaaaactt

SEQ ID NO: 205097 - DNA, 380 bp, Gossypium hirsutum
caaaatactatcttcgaagactgggaatatgtgttgatataacttccagtttggagtcagcatgcacctacgtgtcaagcattttcaccacaagcgcatttgcacatttggccatgattcttattgacaaagatgtttggaatcaagaaacagttcttcagttacgatctttgctcgaacaacataggaaaaattgcaaactaaatgtttcaacaaaccttccgaaaatttttcttttgggtacctccatgagccccgtggagcgctccaagcttaagacttctggttttgtagataatgtgctgatgaaacctcttcggttgagtgtcttaattgcctgtttccaagaagcccttggaggtacaaagggcaaagtacgt

SEQ ID NO: 205098 - DNA, 379 bp, Gossypium hirsutum
gtaaagtttctcctgtgaaggatggaacaaaaaactcaaccaagaatgatgatgaggaagtgattggatctccaaagtcagtgaagccaaacaaacaagattctcacaaggaggggacccctaagacaaattccaagagaaagcatatgccaagtaaagaaaaatcttctgattctatggagtatggtgagaatcttgtcggcttgaaggtgaaggtctggtggcccaaagaccgtgagttctatgaaggttttattcattcatttgattccgctaaaaagaagcacaatgtgcactataatgacggtgatgaagaaattttaaatcttaaaagagaaaagtgggctgtgattgaagatgagtcagggtcagatgagga

SEQ ID NO: 205099 - DNA, 387 bp, Gossypium hirsutum
gaaaaacctgatttccccaaatgggaaaagcgctaaagagcacgagaaacacgaagtcgaatatccaaaaatacctgagtacaaggacaaacaagatgaggataaggaacataaaaatgaagagtatcacgaatcacgcgaatcgaaggagcacgaagaatacgagaaagaaaaacccaagttccccaaacgggaaaagcctaaagagcacgagaaacacgaagtcgaatatccagaaatacttgggtacaaggaaaagcaagataagagtaaggaacataaagatgaagagtgccacgagtcacacgaatcgaaagatcacgaagagtacgagaaagaaaaacccaatttctccaaatggaaaaagcctaaaagagcatgagaaac

SEQ ID NO: 205100 - DNA, 376 bp, Gossypium hirsutum
ctaaaatcttgctctcttcactcctcctattttaaccatttcttccttgtcctcgccccttccctagcaagctacatttccatggccccccctgaattggttcaacccagtgataaaacaaacgttttcgctaaacaagtcagtttgcgtaatcgtgcatatgttacgttcttggccggaaatggggactacgtgaaaggcgttgtagggttagccaaagggttaaggaaagtgaaatcggcgtaccctttagtggttgccgttttacccgacgtgcctgaggagcataggcggatcctggagaaccagggttgtatcgtccgagagatcgaaccagtttacccgcctgagaaccagacccagttcgccatggcct

SEQ ID NO: 205101 - DNA, 379 bp, Gossypium hirsutum
gtgaattttagtgaaatttaaggttttttagggattgttcgtggatattatgatttttttttcgagagttaatcagatgagagatctgagctaaaaaagagattttgaaaaatgacgaatacggaggtagctatgaaagggaattgtgtgaacggaagaggaggagagagcttttcttctggttatagtgagccaaatgatggtaggaataccgtggaagggcaaaatggtcattcgactcgtcaagctccggctacagaccccgaatcggcgttgtataatgaactatggcatgcatgtgctggacctttggtcactgttcctcgtgaacaagatcgtgtgttttactttcctcaaggtcacatagaacaggttgagg

SEQ ID NO: 205102 - DNA, 377 bp, Gossypium hirsutum
ccggactctaactcagcgatctgagtcgcgagtcagtggttatcgaacaagacgaaccattggccgttaatttcgcgttcaagctttacaggatgccggacgagagcgtctccgtcgagaatccaagagacgagctcttgcgccgcgtgaaaggattagcaccgcgcgtggtgacattagtggaacaagaaatgaacacgaatacggcgccgttcgcgttaagagtgggagaagcatgcggatattacggagctttattcgactcggttgagtcgaccgcgttgagggataacccggagcgagcgcatcttgaggaagggctgttacgcaaaatcgccaactcagttgcttgtgaaggtagggaccgcgttgaaaga

SEQ ID NO: 205103 - DNA, 375 bp, Gossypium hirsutum
tagccgtctcctttatcgccttcttcttaacgggcaagctttaccaatggctaaggttcaagctcccaccaggtccacgcccatggccggtggtcggcaacctttacaacataaagcctattaggttccggtgttatgcggaatgggcacaggtttacggctccattatatctgtttggtttggttccactctcaacgtgatcgtgtcgaattcggaactggctagggaagttttgaaagagcatgatcaacagttagctgataggcatcggagtagatcggcagccaagtttagcagagatggacaggaccttatatgggccgattatggacctcattatgttaaggtaaggaaagtatgcacgctggagcttt

SEQ ID NO: 205104 - DNA, 321 bp, Gossypium hirsutum
atacgaatccagctcgagtttatcttttggtccgaactctgaaaaagggcgggagctgacttacagggagagtgcttcccctatgataactagatgtatccaaatctaacaagatcgtggtcgacaaatcaactgttcctcttataacatccgtgacccaaggaaaaatgttagcccacaacaacgaactcttaatccttcagattatgttccaacatctattgattgtcaagggaactgaaattcaggaccttttcaatacggaccctgttcttattggaagtccggtaactccacaaagtctaaaggcaataccaatat

SEQ ID NO: 205105 - DNA, 379 bp, Gossypium hirsutum
caaaaacatgttctgaaggtgttgaacctcggggaggtaatcgcaggattcagccaacatcaagacttttggaagggctacaaagctcgttggccatctcgaaaattccttcggtttcattcgacaaaagtcacaaaagtcaaagcagaagtatgagaggtgaaacttaaatttcatctctctctattctcaaatcaacattgctgtcctttgagccttctttgttatgaaacgtacgatgattcatgcaattgtaactgtctggaaaataacaggttgagaggtgccctcctgcaactagcggaatccagtcttaaaagaaattcagcgaatagggatgaccaaaatacaccagtgtagctttgtgtaaattatcaga

SEQ ID NO: 205106 - DNA, 371 bp, Gossypium hirsutum
gagaaattttatctaaagctaatgattgaagagcgggaacctatggatgtaccaatggtgttcatatgtccaatttctttagaaccaatgcatgatcctgttaccctttgtactggtcaaacttatgagagatccaatattcttaaatggttctctttaggtcattgtacttgtcctaccactatgcaagagctttgggatgattcaatgacaccaaacaagacacttcaacagttgattcatagttggttttctcaaaagtatttggctatgaagaaaaggtcagaggatgtacaaggaagggttaaagagattttggagaatctgaagaaaatcaagggtcaagctagagttcaagctttaaaagagct

SEQ ID NO: 205107 - DNA, 391 bp, Gossypium hirsutum
cggcactttgtgcttttgcctttacgctatgccaagagcgcattcaagtctctgtattacgtgaggatgaatatgaaaagcttgataaattacttggcaccaagtctgagggtaaattggttctctcaaaaagttacacttgtaagacatggttagttggagatggattgagtgaagtagaacaaaagaaagcaagcaaaggaactctatttattcccttctcgcaattcccaccaaagaagttgaggacggactgcttctatcataccacaccggctatgcaaactccgttggcctttgagaatgtggattcttgtgagaactggttgccgaggagggtgattagcgtatggcgtatagctgggttagtacatgcactggaaagatggga

SEQ ID NO: 205108 - DNA, 384 bp, Gossypium hirsutum
ctttgatgtttggtactcatggtgataaagcccgggttattcaagtgttgctgtttatgtctggtataaatactctgcttcaaacacttattggctcaaggcttcccacagtgatgggtgcatctattgcgtacaccttaccattgttttcgatcatcaatgattataatgatgaggacttcgcatctccacacgatcggtttgttcatagtatgagaaccattcaaggatcaatgatagtttcttcctttctcaacatcatccttgggtatgggcgggcatggggggagctgacaagattctttagtcccatagttgtggtgccagtggtttgtctcgttggtcttggtctttttgccagaggcttcccattgctaggtaact

SEQ ID NO: 205109 - DNA, 390 bp, Gossypium hirsutum
tggcagtactgtttgtatatcttggatttatggtttttggaataattggtcttcgttttctctatcgtttcatagacaacaatggcctccctcgaaactggctatttgttgggatgattcccacgttacttctcaacatccgtcgccctcatgataaagttgcccaaatcctcagacgaagcaatggtaccttcttttatagaggactttggtttactaacaccagcttcttagccacctccgatcctgagaatgtgcgtcatgtattgagctccagttctgtttatttgaaaggtcctgaatggctgaaacagtttgatatcttcggcgaagcacttttcaattccgacggtgaggcatggaaatgtcaccgcagagttttccatgctt

SEQ ID NO: 205110 - DNA, 200 bp, Gossypium hirsutum
gacaaagtggtccatgacgaagacagagacagtgaaccggatgtagttgatggagtgggtgctgaaacagggcatgtgataagaacaaccattggtggtcgaaatggtcattcaaagcagaatgtcagttatattgctgagcatgtggttggaactggatcttttggtgttgttttccaagcaaaatgtcgtgaaactgg

SEQ ID NO: 205111 - DNA, 318 bp, Gossypium hirsutum
cggactaacagggtcagctgcccaattaatcctcatccgtacataccgttactgtataagatagatctcgttgtgaaagatctattactggaaaatttatgagtagagccgaagagtgtgaactgtacaagttaccaattaaatgaaggaatgagctccggtgtatagagaggacctcaccgtttaagaagtaccatagaacgatggacccacttttatttatcatttctattaactcttattttagtaatatgcttttttgatcccaatatcaataaatttcttatttcaaggcgaaatggctataaaaaaagaaaa

SEQ ID NO: 205112 - DNA, 324 bp, Gossypium hirsutum
tggcaactattcttatgtgttgctgttggtctttgggctggcctaattattggtttcgtaactgagtactatactagcaatgcatacagccctgtacaagatgtcgctgattcctgcaggactggagctgcgactaacgttatttttggccttgcgttgggttacaagtcttgcattattcctatttttgctattgcaatcagtattttcgttagttttagctttgctgctatgtatggcattgctgtttctgcccttggaatgctgagcaccatagctaccgggttggctattgatgcttatggtcccatcagcgataatgca

SEQ ID NO: 205113 - DNA, 184 bp, Gossypium hirsutum
ccaaagcatacccactagcggatgctcagttaacaaccgcgattttagatcttgttcaacaagctgccaactacaagcagctcaaaaagggagctaatgaagctactaagaccctgaatagaggtatctcggagttcattgtgatggctgctgataccgagccccttgagattctgctccatct

SEQ ID NO: 205114 - DNA, 212 bp, Gossypium hirsutum
atgaaaagccggaatacaaacagccaaagtatgacgaagagtacccaaaacatgagaagcctgaaattcacaaggaggaaaaacaaaaaccgtgcaagcaacatgaagagtaccacgagtcacacaaatcgtatgagcacgaagagtaccataaagaaaaacccgagttccccaaattggaaaagcctatagagcacgagaaacaacaaagt

SEQ ID NO: 205115 - DNA, 344 bp, Gossypium hirsutum
gcacctccccgtaagcaaaccacaaaggaaagcttggagagagacccaaaaacaatgtctaaggaagttagtgaagaaggacagggtcgtaaggactatgtggaccctccaccggcacctctgattgacatggctgaactcaagtcatggtctttttacagagccctcatagctgagttcatagccactctcctcttcctctatgtcactgttgctactgtaattggtcacaagaaacaacaagatgcatgtgatggtgttggtctcttgggtattgcatgggctttcggtggcatgatctttatcctttgttactgcactgccggtatctcatgtggacacat

SEQ ID NO: 205116 - DNA, 365 bp, Gossypium hirsutum
gttaaacatggccaccgtcttgattttctcatgttggtggttaataatattgtgtttcagcacttatatctgtgtctaaccttcggtgcgtgttttagttactacgagggctgaagtacctgcactcggcgaacatccttcatcgagacttgaaacctgggaacctccttgttaatgctaattgtgacttgaagatatgcgatttcgggctggcacgaaccattagaggcaacgagcaattcatgaccgagtatgttgtcactcgttggtaccgtgcaccggagctcctactctgttgtgataattacgggacttccattgatgtttggtcggtcggatgcattttcgctgagattcttggtcgg

SEQ ID NO: 205117 - DNA, 377 bp, Gossypium hirsutum
gacagatgaaacctatactgcagagagtgttgctctaaggcagatttcaggaacagctgtacacaataataaaacattgcaagttgatgcggtggcaacatcattgaactcaactgactgcttcctcttgcaatctggatcctcaatttttacttggcatggaaatcaaagcacttatgaacagcagcaattagctgcaaaagttgctgagtttttgaagcctggagttgttcttaaatatgctaaagaaggaacagagagcaatgcgttctggtctgcacttggaggaaaacaaagttataccagcaaaaaagcatctacagagactgtcagggatccccacttgttcactttctcttttaataaaagaaagtttg

SEQ ID NO: 205118 - DNA, 221 bp, Gossypium hirsutum
  unsure (1)..(221): unsure at all n locations
gttgccgtcaaatatattgaaagaggaaagaagattgatgagaatgttcagagagaaatcattaaccaccgatctttacgacatccaaacataatcaggtttaaagaggttgtggtgactccaacacatttagctattgtcatggagtatgctgccggcggtgaactcttcgagagaatatgcagtgcangtcgatttagtgaagacgaaactggtttttc

SEQ ID NO: 205119 - DNA, 241 bp, Gossypium hirsutum
caaatccaagccaacaacacggttgaaggcattacgattgtcgtaccgaaagacagcgcattcaaggctcttacgaagccttcattgtcaaatctaactgatgatcagttcaaatcagtgctcctttaccatgccttgccacgatactatgcccttgcggacttcaatgacctaagtgagaaaggccctattagtacacttgctggggggcaatacacttttgcaattcaacgatgagtct

SEQ ID NO: 205120 - DNA, 333 bp, Gossypium hirsutum
atacacaaaatgtatatgatctgcccataacagagcaaggaactttcatactagaaaatgtaacataaagctgctttttaactttatttccacaacacattacacgcaatatatttttcacaacatagacatcacgcaacaaaatgttgttgagctagctactagattacctttagttataaggtagggaatgggcagaacatgaaattaggctccacgggccatggtttgctcgccaggagggaccatggtgaagacaggttgagcattgaaccctggatggtgcaaccttcgacgaatctcacgaccttcctgacaaacggcacaaggatg

SEQ ID NO: 205121 - DNA, 411 bp, Gossypium hirsutum
cgagaacttccttgaacgccgcttgcaaacacttgtgttcaagactggtatggccaagtctattcaccatgcccgtgtcttgattaggcaaaggcatatcagggtcgggaggcaggttgtcaacatcccatccttcatggtaagggttgactcgcaaaaacatatcgatttctctctcactagtccgtttggaggtggccgacctggaagagtgaagagaaagaaccaaagagcagctgccaagaaggctgctggcagagatggcgatgaagaggaagatgagtaaaaccttagaggggtactaccacccttagttacccttaaatagttttggagcttgccatttccttctcccctttattaaatatggtacgtatcttgcttctagacctttatctttagcgtatcttg

SEQ ID NO: 205122 - DNA, 213 bp, Gossypium hirsutum
attttatgttatagaaaatgcaaagaaaaaagtcgaagcagcgtgtcctggtgtagtctcgtgtgctgatattttggcttttgccgcaagggatgctgtcgtgctctctggaggtcctacatgggaagtgcctaagggaagaaaagatggtagaacatcaaaggctagcgaaactatacaattgccggctccgactttcaacatatctcaact

SEQ ID NO: 205123 - DNA, 230 bp, Gossypium hirsutum
gaaagttcacacgtaaggagcgaggcttctcagagttgcggcgtatgggaattggtctttttatttcagtcctatgcatgtcagccgcagctgtggtggagaccaggagattgcaccttgctaaagagctagatttggtcgataagcaggtcgctgtacccattagtattctttggcaaatacctcaatatttcttgttgggtgccgcagaggtctgcacatttatcgga

SEQ ID NO: 205124 - DNA, 234 bp, Gossypium hirsutum
tggttttacagggcagtgattgccgagttcattgctacacttctcttcctgtatgtcactgtgttgaccgtgattggttacaaggtccaaaccgaccctgctaagaacactgttgaccccgattgcggtggcgttggtattcttggtattgcttgggctttcggtggcatgatctttattcttggttactgcactgctggtatctctggagggcatatcaaccccgctgtgaca

SEQ ID NO: 205125 - DNA, 378 bp, Gossypium hirsutum
caacacatgaatgaattattcctttcattggcattgctgtttgctcacaccacttgcttctcctccttactcatctcagcatggcctcaaaacccttcatcgcattagccaccactgttctcttcttctccctcatcgccgtcaatcattttgggaaacctttccacggcaaacttggggaaatggaaattgtcccaattacggatgccgtaggacctgaaagtgtagcatttcacccacttggagacggtccctacgtcggaatatccgacggtcggattatcaagtggcaaccaaatgagcatcggtggatcagttttggcatcacttctcctaacagaaaagggtgtgaagggacagacgatcatgaaacaaggg

SEQ ID NO: 205126 - DNA, 381 bp, Gossypium hirsutum
  unsure (1)..(381): unsure at all n locations
tggctttgaattttaatgccatcgcctcgaaatctcagaagctcccttgctttgctcttccaccaaaggccacccttagatctcccaagttttccatgatctccaccattccttctggctccaaagaggttgggaatctgaaaaagcctttcacgcctccaaaggaggtgcctgttcagatcacccactccatgccgcctcacaagattgagatctttaaatctttggagggctgggctgagaacaacattctgactcacctcaaaccagttgagaaatgttggcaacccgccgactttcttncaaatcctaattctgatggatttcatgagcaagtcaaaaagcttagggaaagggcaaaagagatcccagatgattact

SEQ ID NO: 205127 - DNA, 266 bp, Gossypium hirsutum
gttctgtattatctcgtctactacgttttccattttcgggccgatccgtagctcttatttcagcaccatgactgttcactcccagattcaagatgaaactggcagaagtgtcaagccttcttattttaactcgccacctttggacgtttcggtcgcattccctcaggcaactccagcatctacttttcctcctcttgcttccgactattatcaatttaatgatctattgaggcctgaggagcaagctctacgtaagaaagtagaga

SEQ ID NO: 205128 - DNA, 321 bp, Gossypium hirsutum
acaaaatgtgggacgatgtagtagctgggcctcaacctgaacgtggtctcggcaggcttaggaagatcaccacccagcctttgtccatcaaagatgaaggagaaaagaaaaagtaccagaggtcgttgtcgctgccgaatagtccagtgtcaggtccgacacccgtgacaccgacgactccgacggcgcgtaaggagaacgtgtggaggagtgtgttccatccgggtagcaacctagccaccaaaagtataggttctgatgttttcgacaagccacaacccaactctcctaccgtctatgactggctttacagggggggag

SEQ ID NO: 205129 - DNA, 307 bp, Gossypium hirsutum
ctttgatatgaagaatgaacaaggaagaagatccgagcaagaattatggctaaggctaaagaataaaccaaggattcttatcatccttgatgatatttgggaatctatcaacttaatggaggagataggaattccaattggggatgatcataaaggctgcaaagttcttttaacaacacgtcattaacaagtatgtcgagctatggattgtcaaaacgtggtacaacttggctgtttgaatgatgatgaagcttggactctatttgaaaataaagcaggtctagatgacttttctgatgattctatt

SEQ ID NO: 205130 - DNA, 405 bp, Gossypium hirsutum
caaaaagtggcacgattccaaatggagatgcctcaaggtgcgatgggatgagacttctaccatacctcgtccagagagagtttctccttggaaaattgaacctgctttggctcctcctgcgctgaatccccttccaatgcccaggccaaaaaggccccgatctaatgcagtcccttcatctcctgattcctctgtacttactagggaaggctcatcaaaagctattgtagacccttcaccagctactgggttttcaagggtcttgcaaggtcaagaattctcgaccttgcgaggcaactttgctgagagtcaagagtctgacactgttgaaaagtcggtgatatggcgacctacggtagatgacgagaagattgatgtgggtcccacttcaagaagatttgggtc

SEQ ID NO: 205131 - DNA, 352 bp, Gossypium hirsutum
ggggttttggaacagaggaatctcggcgtgcgctgtgtgtgatggggcagctccgatcttcagggagaagcccttggcagtgatcggtggaggtgactccgccatggaagaatccacttttctcaccaagtacggttccaaggtttacatcattcacaggagggatacgttcagggcatccaagattatgcagaacagggttatttcgaaccctaagatagaagtcatatggaactcggtggtcgtagaggcctacggcgatagggttttgggagggctcaaggtgaagaacttggtcaccgaagaaagttccgatttgaaagtcaatggtctattctttgccatcgggcac

SEQ ID NO: 205132 - DNA, 241 bp, Gossypium hirsutum
caggcgactgtttgggtcaccaaggtggcggaggcatggaggggtgaacatggaccacaaatgttggcccctccaccaaccagcatcaaaacctctgccttggctttgtttgggctgttgggtattccacttgcggtaacatttagcattccattcgcattggcatccatctattgctctgaagaaggtggcggccaaggtctgtctttgggaatactaaacttgtctatagttatcccac

SEQ ID NO: 205133 - DNA, 243 bp, Gossypium hirsutum
cttgctagtattcctacttggagtggtgactctcaccactcccacatttggtacctatgagtcaccaaattatgggaaaccccctactcctgtattcaagcctcccaaggtgaaaccaccaccatatgaacctaagccaccagtgtatgaaccaccaaaaaaggagaagcctgaacctaagccaccggtttatgcacctccaaagaaagagaagcatggacccaaaccaccaatgtatgaacc

SEQ ID NO: 205134 - DNA, 284 bp, Gossypium hirsutum
tgtctaaaaccaaatgtgcaaccgttggtattcaaggcattgcttgggcttttggtggcatgatctttgctcttgtttactgtactgccggcatttcaggtggtcatattaaccctgctgtgacctttggattgtttctagcaaggaaactgtcacttacaagggcattgttctatatgatcatgcagtgcctgggtgctatctgtggagctggtgtggtgaagggattccaaggagataaccgatatgagatgttgggtggtggaactaatgttgtgaaccat

SEQ ID NO: 205135 - DNA, 308 bp, Gossypium hirsutum
agtacgcattcatgcagtatgcagatcagatcatgggacgtttccttagggtttttgcttgtaggagtgctaccgtacatgaggaggccatgcttgctattggagctcttgcttatgcaataggagcagattttgcaaaatacatgccggagttttataggtacttggagatgggtcttcagaattttgaggagtaccaggtctgtgctgtgacagttggtgttgtgggtgatatttccagggcattggaagaaaaaattgtgccttactgtgatgggattatgacacaacttctcaagatttgtcta

SEQ ID NO: 205136 - DNA, 338 bp, Gossypium hirsutum
gagaaatcctccatgttcaagccggtcagtgtggtaatcaaattggtggcaagttttgggaggtagtatgtgatgaacatggcattgatgccactggtaactatgtcggcacttcgcctgttcagcttgaaaggcttaatgtttactataatgaagccagtggtggcagatatgtgcctagagctgtgttaatggatcttgagccaggaactatggacagtttacgaacaggtccttatggaaaattgtttagaccagataactttgtgtttcggcaaaatggagctggcaataactgggctaagggacattatactgaaagagctggattgattgat

SEQ ID NO: 205137 - DNA, 242 bp, Gossypium hirsutum
catgatgatgcacaacacatcagatggcggcatgaacatgacgaaccaccataagatgatgatgcatatgaccttcttctggggtagcgatgccgagattctcttctccggttggccaggaaccagaaccggtatgtatgttttggccctcatagttgtcttccagcttgctttcatggtggaggggatttctcactctcggttcatgaaacccggttccaccaaacacgtgaccgccggtc

SEQ ID NO: 205138 - DNA, 314 bp, Gossypium hirsutum
gcttgctgtatgaagcacgatgcctgcgttcaagctatgaacaatgactatctgagtcaaaagtgcagccaaagcttcataaagtgcatgaaggatttccagaaaggaggaggaaggagtttcaagggtaataaatgccaagtcgatcaagtcgttgatgtcatctctgttgtcatgaaggctgccctgattgctggaggagtgcttcataaaccttagtctttttacccaacccaacactgtcagacaagacattcttctgcttctgcaatccctaagattgatgatggcatgggcatcccctcaattaaaat

SEQ ID NO: 205139 - DNA, 325 bp, Gossypium hirsutum
cttgtccctcttgttgttgatatcatatctttatcaatcaaggagttgatcgagttaggggcagtgacatttttggtccccggaaactttcctattggatgctccccatctttgctgacaagttttcatggttcagaaaaggatcaatatgatcccttaactggttgtctaacatggttgaaccaattctctcaacaccacaatgaattacttcgaaaagaactcgaaaatatccgaaaccttcatccccaaatcaacattatatatgttgattattacaaagcttcaacaccgttttaccagtctccgaaaaactatggattta

SEQ ID NO: 205140 - DNA, 364 bp, Gossypium hirsutum
cctgcctggtatggcctgaagggagcaaagttaaggtggcttgagcgatttgcatatgtcaacaccaccatttatcctttcacatccttaccattgcttgcctattgtaccctcccagcaatctgtttgcttacagataaattcatcatgccaccaataagcacgtttgcaagtctcttcttcattgccttgtttctttcaatatttgcaactggtattcttgagctaaggtggagtggagtgagcattgaggaatggtggagaaatgagcaattttgggtcataggtggtatttcagcacatctatttgctgtggttcaaggtctgctgaaagttctagcaaggatcgacactaatttcacag

SEQ ID NO: 205141 - DNA, 316 bp, Gossypium hirsutum
gttattgagactacaaggaacatctgagttcagaattaagacaagcaaaatgagtggcttgatggagcttgtaattcttgtcccatgttgtttcttcctcgtagctttaataaagttcctttatgattacctgtgggtacctctccgtatacagcatctgatgaattcacagggaatcaaaggacctccttacaaattcatccatggaaacaatgaagaagctaccaagatgagagaagaagcattaagcaaacctatggccttgaggcatgatatatttcctagagtgcagccacatatttacacctggatcaac

SEQ ID NO: 205142 - DNA, 351 bp, Gossypium hirsutum
gaaaaacccgagttccccaaacgggaaaagcctaaagagcacgagaaacacgaagtcgaatattcggaaatacccgagtacaaggaaaaggaagataagagtaagaaacataaagatgaagagtgccaggagtcacacgaatcgaaagagcacgaagagtacgagaaagaaaaacccgatttccccaaatgggaaaagcctaaagggcacgagaaacataaagccgaatatccgaaaatacctgagtgcaaggaaaaactagatgaggataaggaacataaacatgagttcccaaagcatgaataaagaagaggagaagatacctgagaaaggcatagtacccctgagtgg

SEQ ID NO: 205143 - DNA, 304 bp, Gossypium hirsutum
  unsure (1)..(304): unsure at all n locations
gtagatttgaaaggcaaagcatatgagatgctgagacagaatgcaacaaggtttttgctggatgatatctacagaaatcctggacccctccagtttgatggtccaggtgctgatgctaaggctgtgacattatgtgttgaagatcaggattacatgggccgcatcaagaaactgcaggaataccttgacaaggtccgtaccattgtgaagcctgngtgttctcaggaagttctgaaagctgctttaagtgtaatggcttctgtgacagaagttctgtcagtgatgtcttcatcgtcatctggcg

SEQ ID NO: 205144 - DNA, 306 bp, Gossypium hirsutum
ggaaagttgaggatgttgatgaggataaagagaaggagggaaagaaaaagaagaagattgaggaggtgtcgcacgagtggtctttggtgaacaaacagaagcccatctggatgaggaagcctgaggagattaccaaggaagaatatgctgctttttacaagagccttacaaatgactgggaagagcatttggccgtcaagcacttctcagttgaggggcaacttgagttcaaggctgtcctctttgtccccaaaagggctccttttgatctctttgatacaaggaagaaacccaacaacatttaac

SEQ ID NO: 205145 - DNA, 308 bp, Gossypium hirsutum
cggaacacagttttctttgatattaacatgaaaggtctagatggtatacaaggccctgtatatgtcggcacggggtgtgttttcagaaggcaagctctttatggttatgaacctccaaagggacctaagcgcccgaaaatggtaacctgtggttgctgcccttgctttggacgccgcagaaaggacaaaaagcactctaaggatggtggaaatgcaaatggtctaagcctagaagcagccgaagatgacaaggagttattgatgtcccacatgaactttgaaaagaaatttggacaatcagccatttt

SEQ ID NO: 205146 - DNA, 364 bp, Gossypium hirsutum
ctcaatatttcaaccagtatctactagtatccggtcatggccctgttcacactcgttctacatggttcaacaatgtaatgcaagtaatattctcatccccggcaacagtgggattcatagttgctttcttcttggattgcacccacagctacgggcatagctcagttcggagagatagtggaaggcattggtgggaaaagttcaggaatttcaatacggatacaaggagtgaagaattctattctttgcctgctaatcttaataggttcttcccttcattctaagctctaccagtaataaccatactcatcaaatactgaaaatcagtgacaacagtgatcatttaaagcatttctgttcaagg

SEQ ID NO: 205147 - DNA, 343 bp, Gossypium hirsutum
gttaatcttgattggcgagagtctgttccacaccctgaggatcgtgtggagtatgagctatggaccaacagcaatgatgagtgtggagtaaaatgtgatatgctgatggaatttctgaaggatttcaagggtgctgcacagatacttgaaaaaggtggctatactcaattcacaccccattatataacttggtactgccctcaggctttctcgctaagcagacagtgcaaatctcagtgcatcaactacggaagatactgtgcacctgatcccgaacaagattttagctctggctatgaggggaaagatgtagttattgaaaatttgagacagctgtgtgttt

SEQ ID NO: 205148 - DNA, 277 bp, Gossypium hirsutum
aaaaagcaaaaatggagaaatctcagatctggttggcctggggagtcttggccttgctattggcatcggcaacggcggatgacgtcgttgtactaacggaagataacttcgagaaggaagtcggtcaagatcgaggagctctcgtcgagttctatgctccttggtgtggtcactgtaagaagcttgctcctgagtacgagaagcttgggtcaagttttaagaaggctaaatccgtcttgattggaaaggtggactgtgatgagcataagagtgtctg

SEQ ID NO: 205149 - DNA, 356 bp, Gossypium hirsutum
caagattcttgaagtcattggtaagggaagctatggagtagtttgtgcagcgcttgacacacatacgggtgagaaagttgcaataaagaaaatacaagatgtatttgagcatatgtccgatgcaattaggattttacgtgaagtcaagctacttaggcttcttagacatcccgacatagttgaaattaaacgtataatgttgccaccatcaaagagggagttcaaagacttatttgttgttttcgagctcatggaatcggatcttcaccaagtcatcaaagctaatgatgacttaacacgagagcatcaccagtttttcctgtaccaaatgcttcgtgcaatgaaatatatgcata

SEQ ID NO: 205150 - DNA, 363 bp, Gossypium hirsutum
caagatcttgaaggttatccgcaagaacttggtaaagaagtgcattgagctcttctttgaaatagcagagaacaaggaagattacaacaagttttatgaggcattctcaaagaacctcaagcttggtatccatgaggactctcagaacaggactaaaattgccgaattgctccgctaccactccaccaagagtggtgatgagctgaccagcttgaaggactatgtgaccagaatgaaggagggtcagaatgatatctactacatcactggtgagagtaaaaaggcagttgagaactctcccttccttgagaagctgaaaaagaaaggtatgaaggcccttacatgtttgatgctattgatgag

SEQ ID NO: 205151 - DNA, 243 bp, Gossypium hirsutum
gagaaatcctccatgttcaagccggtcagtgtggtaatgaaattggtggcaagttttgggaagtagtatgtgatgaacatggcattgatgccagtggtaactatgtcggcacttcgcctgttcagcttgaaaggcttaatgtttactataatgaagccagtggtggcagatatgtgcctagagctgtgttaatggatcttgagccaggaactatggacagtttacgaacaggtccttatggaa

SEQ ID NO: 205152 - DNA, 400 bp, Gossypium hirsutum
tttattatgggttttgggtttatggagtgtttctgggattgatttgagccgagctgagagtttcctttcgtatttagatgaagaagttacaatgtcccctggtagtaccaccactcttatagttcctctcactctcattcaaggagctgcttctaaaggagctgtttgtttggatggaacgcttcctggttatcatcttcatcgtgggttcgggtcaggtgcaaacagttgggttatccatttagagggaggtggatggtgtaataccattcgaagttgtgtattccgcataactacaaagcgtggttcatcgaaatttatggagaagtccataaatttcactggaattttgagcaacaaagctgaagaaaaatctgatttctacaattgggatagagtt

SEQ ID NO: 205153 - DNA, 292 bp, Gossypium hirsutum
attgagcaaatccgacgtcggtttcccatgttggagtcgtgaccatgtgacgtatgatagcaaggtaaaccaagctgagaatcttatggtcgtgggcagaggacctgaatgcacagcaattgctgaccctaaatactcaatgtgccaacttgcattgaatggtttgccaagtgaagtttatgagatgaaatgggacttgataatgttggatgcaccgaccggttacttctaggactctccggggaagatgaccgccatatacaccgtgggtatgaatgctatgaataaagag

SEQ ID NO: 205154 - DNA, 295 bp, Gossypium hirsutum
cgtttttcaggttgaagaaatcctccttttgggttcgaggtctggcttcaccaccaatgctagagatcggacatgccccaggtaatgcccttttcggcaaatacgagatcggccggctcctcggttgcggtgctttcgccaaggtttatcatgccagaaacctccgcaccggcctcagcgtcgctgttaaggtcatcaacaaaaagaagctacccaacctcaccatgatgtccaacgtcaagcgcgagatctccatcatgagtcggttgaaccatccttatatcggcaaacttta

SEQ ID NO: 205155 - DNA, 323 bp, Gossypium hirsutum
cgcctttataagaacctatgctatgtatttggatcaaagagttgaattgatgcttttcgacaggaaaagcagtggaggcagtggcgctgggggaagtagtcatggaagtgctgatgatagatatggtgggcgagataatttccgatcaccaccaccgaggccatacgaatatgattatggggatatcagaggtgataatggatatggaaattatgggatgacaaggagaacgaggtcttatggcgatatgagtgaggcagtggggagtgatgggagagatggaagagaggagaagaaagcagtgacccctttgagggaaatga

SEQ ID NO: 205156 - DNA, 335 bp, Gossypium hirsutum
gatcgtaatgttggggatttatcaggtggggagctccagagatttgctattgctgttgtcgccatacagaatgctgagatttatatgtttgatgagccttcaagttaccttgatgttaaacagagactgaaagcagcacaggtcattcgatctctgctcaggcctaatagctatgttattgtggttgagcatgatcttagttcctggattacttgtcggatttcatttgctgcttgtatggaaaaccgggtgcatatggagtcgtaacccttcccttctctgtaagagagggaatcaatatcttcttggctggatttgtacctactgaaaatcta

SEQ ID NO: 205157 - DNA, 307 bp, Gossypium hirsutum
agcacggcatagatccaactggaaggtacattggttcctcggatctgcagttggagcgtgttaatgtttactataacgaggcttcatgtggtcgctttgttcctcgtgctgtgctcatggacttggagcctggtacgatggacagtgtccgaactggtccttacggccagattttcaggccagacaactttgtttttggacaatccggtgctggaaacaactgggccaagggccattacactgaaggagccgagcttatcgatgccgttcttgatgttgtgaggaaagaagctgagaactgtgactg

SEQ ID NO: 205158 - DNA, 293 bp, Gossypium hirsutum
ctgaactcaaccctcacctttcagactcgggcttggcgaggtttattccaaatgcagatgaggtactaaatcgtgacgatgtggggtctggatacagtgcacctgaggttactatgtctggacagtactctcttaagagtgatgtttacggttttggagtggttatgttggaacttctcactggacgtaagccatttgacagcacaaggcctagactggagcaatctttggttcgatgggcaacacctcaactccacgatatcgatgctctatccaaatggttgatccggcac

SEQ ID NO: 205159 - DNA, 273 bp, Gossypium hirsutum
  unsure (1)..(273): unsure at all n locations
cgtgaacgtcgttggccatggcgatgatcacaagggacggtggagatgcgttcccttcacgcatccttcaacgtttgaaacaatagctatggaatctgaccttaaaaacaaagtcaaatccgatctcgagtctttcctcaaagccaaacagtattaccataggttgggtcgtgtttggaaacgaagctatctcctttacggtccttcaggtactggaaaatcaagctttatcgcagctttggctaatttcttgagttancgatgttacgacat

SEQ ID NO: 205160 - DNA, 375 bp, Gossypium hirsutum
gagactacaaaaagttgctaaaacaatggaccatctagaaagggcaaagagagaggaagcagcccccttgattgaagctgcttttcaacggagattggtagaagagaaggtgcttcatgagcgtgagcaacagctggaagttgagttgagcagacatcgccatgatggggacttgaaagagaagaataggctggcacgtatgctagaaaacaagatgattttccaggaaagagtaataagtcgtcggcaatctgagtttgaccagaggagagtagagagagaggagaggatcaaacaaataattcaggcccggaagcaggaaagagatatcaagagaaagaaaatattttatgtgaggtctgaggaggagaaaat

SEQ ID NO: 205161 - DNA, 268 bp, Gossypium hirsutum
cagcattttcctttggaattctttgtctctatttaaaaaaaaagagcaatttttttgaggtggtagtatacaaaaacaaaatgaagatctgttgcattggagctggttatgttggtgggcctacaatggctgtgatcgcgcttaaatgtccggatattgaagtggctgtcgttgatatctctgtacctaggatcgctgcctggaacagtgaccagctccctatctatgagcctggtcttgatggtgttgtgaaggagtgtcgtggcaa

SEQ ID NO: 205162 - DNA, 292 bp, Gossypium hirsutum
caatggtgcattagtcgaaccataaccgtgacagccaccgacttttgtccacctaactatgctttatctagtgacaatggcgggtggtgcaatcccccacgagaacactttgatttggccgaaccggcattcttgcggatagcagaatatcgagctggaatcgtccctgttatgttcagaagggtgtcatgtgtgaagaaaggaggcatcaggtacaccatgaatggacattcgtacttcaacatggtgttgataacgaacgtgggaggggcaggggatataacgtcagtgt

SEQ ID NO: 205163 - DNA, 389 bp, Gossypium hirsutum
cttccctgtctttctctgtcttctcttactttttatattggtctcaattcccattaaaactttcaatctttcagccataattaagcttcttcccttcagaaaacatcgactgaagctgctccaagattaaagaagcttcaatttataatactctgccccttaaactagcaaagcctgatctgctgcataatcgtctaaagaaaaattgatggggataaataagttgctgtgttggtttgcagttttcttctttttgttgggtttctctgcttgcagttcgatttctgatggtgtttttgactctttcacttctactggaaggcacctccttcaagctaagaaagcttgccctgttaactttgagtttctgaactacacaattatcacaa

SEQ ID NO: 205164 - DNA, 379 bp, Gossypium hirsutum
caaatactttgctgcaaattctcccaaatttttcagaaaatgtaacacaagggaaaaaaatgagagagatccttcatgttcaaggtggacaatgtgggaaccaaatcggttccaagttttgggaggttgtttgcgatgagcacggcatagatccaactggaaggtacattggttcctcggatctgcagttggagcgtgttaatgtttactataacgaggcttcatgtggtcgctttgttcctcgtgctgtgctcatggacttggagcctggtacgatggacagtgtccgaactggtccttacggccagattttcaagccagacaactttgtttttggacaatccggtgctggaaacaactgggccaagggccattacac

SEQ ID NO: 205165 - DNA, 311 bp, Gossypium hirsutum
gattcttcgaaaacttcatcatgcaaggtctccatgttgaccaaatcgaaaagggtcgagtcctttgctccatgaaagtccctcctcgtttgctgaacgctggtaatttcttgcacggtggagctactgcatcactggtggatttggttggatcagcggttatttacacctacggagttagcaccagtggagtttctgtcgaaatcagtatcacttacttggatgctgcttatgttggcgaggaaatcgagatagaggctaaagcattgcgttgtgggaagaactgtgccgttgtcacggttgaatttcgg

SEQ ID NO: 205166 - DNA, 297 bp, Gossypium hirsutum
cagaattcggtgaactttatctcttcaaatggacaactggcttaatccctcccacaactctgataatactgaacatggtcggagtcgtggccggagtttcagacgcaatcaacaacggctatggttcatggggtccattgttcggcaaactgttcttcgcattctgggtcattcttcatctttacccattcctcaaaggtttgatggggagacaaaacaggacgcccaccattgttgtgctttggtccatacttttggcatcgattttctcactgggttgggtacggatcgatccct

SEQ ID NO: 205167 - DNA, 404 bp, Gossypium hirsutum
aagatgttcagggagagtaccattaccaagcttgcagatgtacctctatcacatatttctgatgatgtttataagacttcagctgattggatcagccaacaatcccttgaggcacttggtttttttgtcttatggtctttggacatcattcttggggatttggtggcccaacaagcaaatgctaagggctccaaaaaaagcgtgcaacaaccatcctcgaagtctaaggttggtatatttgtggcattagcaatggtattgcggcgtaaacccgatgccctaattagtgtattgccaaagctgagagaaggatcgatatatcaaggacaagataagctccctgttattatatggatgataattcatgcatgctctggagatcttgctgtggggctgtacatgtg

SEQ ID NO: 205168 - DNA, 366 bp, Gossypium hirsutum
gaccaaaaaatacgagacacacttcataatatattatataatactttaatattacacaattttctttttcaggtacaaattttcactataacatttaattataataagttcacttgtgtttcaagatcaaaatctcatcatcttgaagtttcaattctctctccaacctcgagttcccgaactcactcctctggttcagccaaccaatagtatctgcagacacaatctcgatgttttccggtaattcaccatacaacaggccatgccacatcccaggatacaacttgaaactcttgtccgaacttgctgcatcattgtacaattgctggctcactgctttgtctgttactttatcttccccttcat

SEQ ID NO: 205169 - DNA, 375 bp, Gossypium hirsutum
atcctttcacatcccttccactcattgcctattgttcactaccagcaatctgtcttctcacaggaaaatttatcataccaacgctctcaaacctggcaagtgttctctttcttggccttttcctttccattatcgtgaccgctgttctcgagctccgatggagtggtgtcagcatcgaggacttatggcgtaacgagcagttttgggtcatcggtggcgtttcagcgcatctctttgccgtcttccaaggtttccttaagatgcttgcaggcattgacaccaactttactgtcactgccaaagcagctgatgatgcagattttggtgagctctacattgtgaaatggactacacttttaatccctccaacaacac

SEQ ID NO: 205170 - DNA, 381 bp, Gossypium hirsutum
cattgagcaaacaaaaagaaaataaggacagaaattttacacacaaaatggttaagcatttggaagacacttgtaatttgttctctcaaggaaaccaacgaagtgagggaacagtgaagctcctgaaaattgtgtattgtacacaaactccacaaggaaaaagaaacacaactgtcatcttagaaatctgaacctatcactccatcgtccatgcaaatcttcttcagaagccaaccaaataagatttacatgaaacccagaaatataatcacataatggagcatcggctcctttcttctgctggttggggggccaccggctgatacctgtttgacttcgaggggttgtaggtgaactccgatgtatccagcccatactttt

SEQ ID NO: 205171 - DNA, 391 bp, Gossypium hirsutum
cttgaatttagcatggaagttgctgtgccccaaaggattaatgtatcttctgttgctgcaaatcaaaggccatcgtacccatcctccaaaccaaaaagggttgattgggataaaatcgaagctcaagtaaagaaggaggagaaagatgaaaagctagatggtgatgcagctttgaataaatttttccgtgacatttatcaggatgctgatgaggatgcaagaagggccatgcagaaatcctttgtggaatcaaacgggactgttctttcgacgaactggaaagaagttggtgtaaagaaggtggaaggaagtcctccggatggtatggaactgaagaagtgggagtactgagctcttttttctcaattgtatgctgttttggactccatta

SEQ ID NO: 205172 - DNA, 395 bp, Gossypium hirsutum
acatttttgtgaatctcatggtttgtataagcctttgctctggtgctgtacaggaggatagaaaggtttacattgcatacttgggatcacttcctgatggagactacattgcttcatctcaccattgcaatatgctttcagcactttctaaacacagctctctggaaaatcacttaatccgaagttacaaaaggagcttcaatggatttgcagctaagctaactaatgaagaggcaaagaaactttcaagctttaaaggagtggtttcggtttttccaagtaaagtttaccacctgcatacaacaagatcatgggatttcttgggactcaatcaaactgttaaacgtaatgccacagagagcgatgtcattgtcggtgtctttgataccggaatc

SEQ ID NO: 205173 - DNA, 368 bp, Gossypium hirsutum
ccaagccccagaaggccccattctttgtatcaacaactgtggcttcttcggcagtgcagctaccatgaatatgtgctccaagtgtcacaaagcgatgatcctgaagcaggaacaggcgcaacttgcagcatcatcaatcggaagcatcgtgaatggcagctcaactgggaacggtaaggaaccagccgtggctactgctttggatgtacaatctggaaacgccgacaccaaaatggtctcaacagagctacccattgacccatccggaacgacttcatgtgggatgaaaatgaaagagggtcctaacaggtgtaccaaatgctgtaaacgtgttggtttgacaggatttaactgcaggtgtggaaacc

SEQ ID NO: 205174 - DNA, 361 bp, Gossypium hirsutum
gttttctccgcagcggcagctgctatatctacatctgctcgtgttgcgtgtagaacgatagatcacagttcatttcaattttaaggaaccatggcggactcttcagggacgacgcttatggatctgataacggctgatcctgcgcctgttccagcggcagcatccacagtgtcttcttcatctgcatcatcgacgacagcggcagcgtctcctgctgccacgcagcaacagtatgtgtcgaccaagaccgcgctgggggagaaaaagtccaagagagcggctctgatgcagatccaaaatgataccatttctgtggctaaggcagctctcaaccccgtccgtactaacattatttctcatc

SEQ ID NO: 205175 - DNA, 257 bp, Gossypium hirsutum
tgggaagttgaacaaaacattgacatgttctggctcaagtggagtcgacgatatgcttgttggatgtcgttggcataacgaccatcttgtcactgtatctctaaggggcacaatgagtatattttctgctagcaatctttgaaaatccccaattccattatctggacacatgaaaaatttccatttaatagctggcccaaaaaggggcccaaaatgtggactggctaatagttattatgcgcctaatagttaaatgg

SEQ ID NO: 205176 - DNA, 321 bp, Gossypium hirsutum
ttcctacttggagtggtgactctcaccactcccacatttggtacctatgagtcaccaaattatgggaaaccccctactcctgtattcaagcctaccaaggtgaaaccaccaccatatgaacctaagccaccagtgtatgaaccaccaaaaaaggagaagcctgaacctaagccaccggtttatgcacctacaaagaaagagaagcatggacccaaaccaccaatgtatgaacctccaaagaaggagaagcctgagccaaagccaccagtttatacaccttcaaagaaagaggagcctaatcctaaaccaccagtatatgaa

SEQ ID NO: 205177 - DNA, 396 bp, Gossypium hirsutum
gttttacccagatgatgtggcgactaaactttttcgttgcattttgctgcattgttctcaacaatgattatatgctttactacatctgcccgatgcacacgcttttcaccctgatggtgtatggagctcttgggattttcaacaagtataatgagaagccatcggtgatggctgtgaaatttcttgcatgctttctcgtagttatctttatttgggaaattcccggagtttttgaaatattctggagtccattggctttccttttagggtacacggatcctgcaaaacctgatctgcctcggttgcatgaatggcaatttagatccggtcttgaccgctatatatggataatcggaatgatatatgcttactatcatccctatatcgagaaatgga

SEQ ID NO: 205178 - DNA, 359 bp, Gossypium hirsutum
gaaaaaactgtccctatttcttcatcaaggttgaagaagaagaagaagccatggaaaaacaaaacaggtcgggaactgcaggaaaagttataagatgcaaagctgcagtttgcagaaatccaggggaaccacttgtgatagaggaaattatggttgacccacctaaagcttgggagattaggataaaaattctctgtacttctctttgtcattctgacgttaccttctggaaaatatccattggaccatttgcactttttcccagaatttttgggcatgaagctgttggtgttgttgagagtgtaagggagcatgtggaggaatttcaagaaagagatatggtggtacctgtgtttcgt

SEQ ID NO: 205179 - DNA, 354 bp, Gossypium hirsutum
  unsure (1)..(354): unsure at all n locations
ctcaatcccagctgaaaaggatgcagcaccaaattccaactcatcaaagtcatcaaatttcccattttacagtccaagtccattgcccagcctcttcaagacatcccctgctgtacccagtgtgaattctactcctcttcgcttcttcaaacggccattccctcccccctctcctgcaaagcatatcaagtcattgctggcaagaaagcatggctcaattaagcctaacgaggcctcaatccctgaaagaaatgagtgtgaggttggtttgaataaaagatttgggttttcgaagcattttacgtctcattatgagcttggngaggaagtggggcgtggacattttggatatac

SEQ ID NO: 205180 - DNA, 385 bp, Gossypium hirsutum
cccaatcgtttttctgaacgatgggccgaatggggggatttgtctaggatatttccagagtacgtgtgtccatcatatccctcaatcccacctttggattttgcaatggatgtatcaaggatgaggaatgttgcttgttatattagccatagttccagtccgaatgtgctggtgcagtgtgtgttgtatgatcacaacaacttgatgttccctcaccttatgctttttgcaatggagaatatccctcctatgagagagcttagcatagattatggtgtagccgacgaatggactgggaagctttctatctgtaactaaatatcttaagaggaatattttggattttgatgtggtgcagccgggcagtgagacatgataaactgag

SEQ ID NO: 205181 - DNA, 393 bp, Gossypium hirsutum
cccggatctcagtcttacagtttcatccaaagtagtgagaatcaagggaagcgagagaaagatgagtggaacggggaaggtggtatgtgtaacaggagcatcaggttacattgcttcatggctcgttaagtttttactccaacgtggttacactgtcaaagccactgttcgtgacccaagtgatcgaaaaaaatcggaacacttacttgcgcttgatggagcaaaggaaaggctccgtttgttcaaggcacagctgctggatgagggagcttttgattctgtagttgatggatgcgtaggagttttccacacagcatctcctttttatcacaatatcaaggatcctcaggctgaaatgcttgacccagctgtgaagggaacacttaatgttct

SEQ ID NO: 205182 - DNA, 394 bp, Gossypium hirsutum
ttctcttctcgtctcggtttgcataaatctcttcggtttaggaactgccggggttccattttgtcatcaagatcggccaaattaaaatttcaggcgatcggagaagatggactctcatgatgaaactgggtgccaagctccagaaggtcccatcctgtgcgtcaacaactgcggcttctttggaagtgcggctaccatgaatatgtgctccaagtgtcacaaggcaatgattctgaagcaggaacaggtgcaacttgcagcagcatccattggaagcattgttaatggctgctctagtggtagcagtaaggaaccagctgtggctgctgctttggatgtacaacctgtaaatattgagtcaaagattgtgtcagcagagccatccattgatcct

SEQ ID NO: 205183 - DNA, 309 bp, Gossypium hirsutum
  unsure (1)..(309): unsure at all n locations
ttgaggcaaaagagaacttgcaaaaggatctgggtagagatcctacagaagatgaattagctgaggcaacaaattcgagtgcagctcaagtgagaagacagttagaggttggtcgagctgctagaaataagctcattaagcacaacctccggctcgttttgtttgtgataaaaaaatattttcaagattttgcaaatggtccaagatttcaagacctttgtcaggctggagttaaaggacttattacagccatcgaccgctttgaaccaagaaggagattccgtctttctacatacggncttttttgga

SEQ ID NO: 205184 - DNA, 159 bp, Gossypium hirsutum
agaaagtgctcaaattctcgagattgaaactttcatccgaatgttgcttcaaaggcaggaggatggttatgcacgacttaaacgctgcatattgattggtgatcatcaccagccgccttcttgtgcgaaaaatattgcttttcaaaaggttagccatat

SEQ ID NO: 205185 - DNA, 389 bp, Gossypium hirsutum
gtttcacaggccaaggaccttgaagaaagataggaacccgaagtatccacgcattagtgccccaccaaggaacaagcttgaccattaccagattctcaagtttcccctcacaactgagtcagccatgaagaagatcgaggacaataacactttagtatttattgttgacatccgtgcagacaagaagaagatcaaagatgctgtgaagaagatgtatgatattcaggccaagaaagtgaacaccttgatcaggcccgatggcacaaagaaggcatatgttaggttgacgccggattacgatgccttggatgttgcaaacaaaatcggaattatctaagcagttggcgactaccttgttttgaatgctttattttttgtgttttgttgca

SEQ ID NO: 205186 - DNA, 400 bp, Gossypium hirsutum
gaaggctagtggacaggtggatcgggcaaatgcagctgtgagacggcttgagactgagaatgcagaaatcagagctgagatggaggcgtctaaattaagtgcatcagaatcggtcacaacatgtctggaggttgcaaaaagagagaaaaagtgcctgaagaagcttttggcttgggagaaacagaaagctaagttacaggatgagattgctgatgaaaaggataagattaaagatctgcaacgatgcttagctcgagtagagcaggatcagaaagaaacagagttaaaatggagagaggagttaaagtccaaagaacttgccttggctcaaattgaggaggaacgatgctccaaggaagcagctgaggcaagcaataaaaggaagcttgaagcattgcgc

SEQ ID NO: 205187 - DNA, 369 bp, Gossypium hirsutum
gtcctattgtgaaaatgccctgaggatctttgcaaaacccgtgcctggaaccacagcagaagagatagctggtgggttaaccgaaatttcagccatatatgaatctgttgatgagcctgaggaggctttgaagctcttgcagaaagcaatgaagttgttggaagacaaacccggtcagcaaagcacaattgcaggaattgaagctcgaataggggtgatgttttacattcttgggaggtatgatgagtcaaggaactcttttgagagtgcagtaacaaagcttagagcaagtggggagaggaagtcagccttctttggggttgtcttgaaccagatgggcttggcttgtgtccaattattcaagattga

SEQ ID NO: 205188 - DNA, 387 bp, Gossypium hirsutum
gaaaagagtttaaagagcttctactttttctagattccacagtacattgcgcagttcactttgcgatcattcgtctggtttttttcttctttatggaggatatagaggcttttactctaaaaataccttgatattaacacccaaaggtgggaatgatatccacaaacgtgggggcacctttcttctcacttcacgagggggtcatgatactcaaaagattggtgataacatccagaatcaccattctatttggaaggcaaaggtggactctttgagtttattgaagagagattaaaagagaatggacatatagttattgttgttgctgaaagagctggtcaagaatatcttgctcaaagtatgcaaggaattgatgagaaagatgca

SEQ ID NO: 205189 - DNA, 388 bp, Gossypium hirsutum
gcaattaagaatcatccggataaaggtggagaccccgagaagtttaaggaactggctcatgcttatgaagtacttagtgacccagagaagagagaaatatatgatcaatatggtgaagatgctcttaaagagggaatgggaggaggcggttcttctcacaacccatttgacatatttgagtcatttttcggtgggggagccttcggaggcggtggtagctcgagaggaagaaggcagaagcgaggtgaagatgtagtgcatgctcttaaagtttctctggaagaattgtacaatgggacgacaaaaaagctctctctttccaggaacgcaatatgcagtaaatgtaaagggaaaggttcaaagagtggagcctcctctagatgctatg

SEQ ID NO: 205190 - DNA, 404 bp, Gossypium hirsutum
ttaaagatggtggagtcaaggatgcgcgagaggcatatgaatgcaatctttgatgaacttctcaaactcatgttacagctcgacttgatggtagacttttctgtattctcgtgcttctatgattttgttttcttcgtatgccgagaaaatggtcaaaagaatattactgtaagcagggcagttgctgcttggagattagtcttagcaggcaggttccgtttgcttaaccaatggtgtgactttgttgagaaaaatcagcggcacaatatttctgaggatacatggcagcaagttttagcttttagtcggtgtgtgcatgaaaccctagaagggtatgatcctgaaggtgcttggcccgttttaattgatgactttgttgagcatatgtacagaatttcagggtc

SEQ ID NO: 205191 - DNA, 397 bp, Gossypium hirsutum
ctttagaaactcaaacaaaccttttacttctcaactctctcaaattcaccatggctgacaagtgcggcaactgcgactgctctgacaagagccagtgtgtgaagaaaggaaacgccttggtcattgagactgagaaaagctacatcagcactgtagtggtcgaggctgtggcagagaacgatggcaagtgcaagtgtggaactagctgcagctgcacaaactgcacatgtggcaatcattaagcagacatatatagaactgcacgatgttttagtccataattaaattaagttgaataattggtggcgtgttgcatgtttgtctccgcctcattgtataccatgatagaatggccatgtctatggactttgtctgattaatgaatgattattagcac

SEQ ID NO: 205192 - DNA, 393 bp, Gossypium hirsutum
aattttcaatacaaacaatttgtgggtcaacctgaatgctatcaagaggcttgtggaagctgatgaactcaagatggagatcattccaaacccaaaggaggtcaatggaatcaaggttcttcaactggaaactgcagctggtgcagcaattaggttctttgatcatgctattggtatcaacgtacctcgatcgcgattccttccagtgaaggcaacttcagatttgcttcttgttcagtctgacctttacaccttagttgatggatttgttatccggaataaagatagagcgaatcctacaaacccatccatagaattggggcctgaattcaagaaagttggtaacttcttaagtcgattcaagtcaatcccgagcatcattgagcttgatag

SEQ ID NO: 205193 - DNA, 405 bp, Gossypium hirsutum
caaaatccttggtacttgaaacaggattcatcggaagtggaccaacagcctttttctccattatcatctccatcagactcatcagtcatgaaaaaggttgaatgtttggagagtgttactgatataccagagcgatcaagccccgtatctgttcttgagccaatatttgcagatgatcttatcagccctgcaagcatcagatcttattccggtgaaacatccattcaaccgctaagaattcgattcgaagaacatgactctttggccacaaatcagagcaatcgaattaaaacttgtatgaatgataaggaatcaatatttgagcacataaaggcagtgctgcaagcctcgagtttcagctgggacgaagtctacatccggtcactttcttcagacctgcttatc

SEQ ID NO: 205194 - DNA, 390 bp, Gossypium hirsutum
atttatttcactccaatttcaaggaaaccctcagtaaataagacctccaattcggccggagagagttgcggtagcggccatgtgagaaagccgacggagcacattcgtaagtccaacgaaaactaagagaagaaaatgttgcagcagcagacgaacaacaattccagtagtagcaatattccggtgagcgagaggtattggactttagttgataaagctgataagaaattttcgaagatcagagacttgccttactatgagcacaacaggtacgaaacatacttttacaaggtattcatacgctcagttgtgggagtttctgccggaaaatcggcagaagctagttgaagcagggcttatgagatgggagatgggtgagattgcatcgcg

SEQ ID NO: 205195 - DNA, 370 bp, Gossypium hirsutum
cgacaagttacatgctgcaagcatgggctagactctgcaagtgtttgggacaagacttcctcccttacatgagtgttgtcatgcctccccttcttcagtctgctcagcttaagccggatgtaactattacatctgcagattcagataatgacatagaggactccgatgatgaaagtatggaaaccattacgcttggggacaaaagaattgggatcaagacaagcgttctggaggagaaggctacagcatgtaacatgctatgttgctatgccgatgagttgaaagaagggttttttccatggattgaacaggttgctccaactttagttcctcttcttaaattttatttccatgaagaagttagaaaagc

SEQ ID NO: 205196 - DNA, 398 bp, Gossypium hirsutum
caaataaccacatgaatccattatacctgttgggcatttacaagttcccttaacaatttacttccaatacagacaacaaaaatatcaagtttcaacccaaacacaaataaaacatgaaaaagcataacatacagtaaaccatttcaagtctttaacaagcttcaaagaatagaagcttgcataacacggaagcaacaggtaataaaagacatcatacgcacactcaatcacaggtacttcttagtactcatcatcttcaccctcatcaccctcagccgactcagcaccaacttcttcataatccttctccaatgcagcaagatcctcacgagcctctgagaattctccttcttccataccctcaccaacataccagtgaatgaaggcacgtttggcat

SEQ ID NO: 205197 - DNA, 371 bp, Gossypium hirsutum
gatggacttgaagaatgtatgaattacttagtagcacattttcgtggttgctttaatggccataaaatcgaatctacacgatccatataatgttctcgaaaattgggattcgaattcggttgatccatgtagttggaggatggttacttgcactgcagatggatatgtttctgccttgggacttcctagtcagagcttatccgggtccttatcaacatcgatagggaaccttagctacttgcaatcagtgttgcttcagaataatgctatttcaggttccattccagctaccatcgggaagttagagaagctcgtaactctcgatctctccaacaatactttcagtggtgaaatacctgccttcttggggg

SEQ ID NO: 205198 - DNA, 362 bp, Gossypium hirsutum
ggtcgacactattatactcgatatgacatatgctaatgcagatgctggtggagcaaagagaaatagacgtgcaaatatggttaaaaggatgccatccctcgatgaagttaataccatcgggaagggggcccgatcagatgtgtcaaaagttgccaacgctcattagtttgaatacaaggatcccgttgatggttcagtttcaaagcatcaaggtattcggtttttgctcgaggacggatcacgattggtcttccgtctctctggaactggttcagaacgtgcaactatccgtctgtacatccagcaatacgaaaaggatccataaaatacagggaaaaattcccaagaagctcttgctcctc

SEQ ID NO: 205199 - DNA, 390 bp, Gossypium hirsutum
  unsure (1)..(390): unsure at all n locations
tctctctctctctttcccatagtttcacccatcttttaatccatcgctcacaaaattatgggtttgaaggaggaattcgaggagcatgccgagaaagttaagaccctcccggccgccccttcgaatgatgacatgctcattctctatggactgtacaagcaagctactgttggaccagtgaataccagccgtcctggaatgttcaacatgagggaaaagtacaagtgggatgcatggaaggctgttgaagggaaatcaaaggaggaagcaatgggggattatatcaccaaagtaaaacaactgtttgaggctgctggaagttcttgatgtgtgtgtgtatgaccaatgaaactggtgtaatttcaagcccttgtcngntacttggggttt

SEQ ID NO: 205200 - DNA, 408 bp, Gossypium hirsutum
ccacaatgaggcaacaatatgtcttcactactctcacgttgctcatcctgttttccctcagttgttcaacaacattagcccaagctccggcactggctccagcaccttctggtccgacaaacgtcaccaagatcctcgaaaaagccggtcaattcaccctcttcattcgtcttctaaagtccactcaagtggccaaccagctgctcggtcagctcaacaattccaacaatggtatgaccgtttttgcaccaacggacaatgctttctccagccttaaatcgggcacattgaattcactcaccgatgaacaaaaagtggagctggtgcaattccacatcgtcccaacatacctcacctcgtctcagttccaaaccattagcaatcctttgagaacccaagctggtgata

SEQ ID NO: 205201 - DNA, 384 bp, Gossypium hirsutum
cccaattaaacctttcgaaacctattacaattcacacattggtgagccatccatggcattggcacgtcttcaaatcctcgtagcactttccttggtgcctttttttctttttccggttgctttaggatatagggctaatgatgtgagatcatggtgcaggaaaactcctaacccacagccgtgcgagtattttttgagccatgatcccaaaaacaccccaatcaaagatgagttccaatttttcaaaatctccatgcacctcgctctaaagcgtgccgcacgagcagaaagtaacacgcattcattgggccctaagtgccggaatggacgtgaaatggctgcatggtccgattgcgtaaacctgtatgagataaccatccttcg

SEQ ID NO: 205202 - DNA, 338 bp, Gossypium hirsutum
gacttcttgcaaattggcagagggagtataccatggaggatttactgacacagctgaaaaaggagatggcagcaccacataaccgaaagctggttcaacctcccgagggtacctacttctagctctcaagattatcggacatcctggatctaagtgcatttctggtatgcaatatatagtttgtaatgcttgttgatctttaaagaaaatagtggggaatgccccaaaaagcttctccaattactttcccctggtttcatcttcattatccttttcttatcaaactctgtttaaggaatgctgtttaattaatgggactttatccgtatgtcgattat

SEQ ID NO: 205203 - DNA, 395 bp, Gossypium hirsutum
agggagtgccccttctccacaagcttctccagaggcttggataaacatgatcaatgactttcagaagggtagtttagcaacccgaatgcagatccccatgatttacgggattgatgctgttcatggcaacaacaatgtttacaaggcaacaatttttcctcacaacattggtctaggtgctaccagggaccctaaactggttaagaaaattggggctgcaacagcacttgaatctagagcaactggcattccatatgttttcgcaccttgtatagcggtttgccgagatccgagatggggccgatgttacgaaagttacagcgaagatccccatcttgttgacgcaatgacagagattgtaccaagattacaaggagacatacctgctaaatctt

SEQ ID NO: 205204 - DNA, 389 bp, Gossypium hirsutum
cggctgagggaactggttaacttggttgtagtaggtggagataggagaaaggaatccaaggacttagaagaaaaggctgaaatgaagaagatgtatgaacttatcgaaaaatacaagttgaatggacaattcagatggatatcgtcccagatgaaccgagtgagaaatggtgaactctatcgttatatttgcgacaccaagggagcattcgttcagcctcctatatacgaggcttttggcttgactgttgttgaggcaatgacctgtggactaccaacatttgcaacatgttacgggggccctgctgagattatagttcacggaaaatcggggttcaacatcgatccttataacggtgatttggctgccgagacccttgccaatttctt

SEQ ID NO: 205205 - DNA, 400 bp, Gossypium hirsutum
ttacattccaccattcttttgcttttaatctctatatccaaaaaaacaaagcagaaaacaaaacccaaatgtcaagttcaaagcttgtcgtcgttaaagatgatgatgaagctgaaaggaccagctcattggagtttcaaaacgacaagaagaagaagaagaagaagatgatgatgatatcatcgggagaattgaaggcaaatgatgatgaagatgaagacgaagacgaagacgaagacgaaaggaactcattggagtttcaagacaggaagaagaagattatatcattgggagaattgaaagcaaatgatgatggtgatgatgatgggtttaagactccaacatcattggatcataaaatcccagtgatgaaacaatgtccaccagcaccaaggaaacc

SEQ ID NO: 205206 - DNA, 390 bp, Gossypium hirsutum
ctccctctcatcagatgacagcttctgcccctcaacagtgttatgaagctccattataatgacgggcaccaattgcaacaccaatggagctgtctcatctgtagaacatctcaccacttcattcaatgtctcatacgcagctgtcctcaaccgagattccctagcatcttctcggtgagtgacagtgagaagagactgcacaatttcctggaagaaaggagttaaaggagatgatggacccacctcctcataaccttgagcaagaaaatagagagcaccacaggccttctcagcaacattaggagtgtccttcatactctgtagcagaactacgactatctgttggcaatttgcctgagtgatgatgggtgaatcaacagctgagccatg

SEQ ID NO: 205207 - DNA, 399 bp, Gossypium hirsutum
tcgagttttttttttttttttttttcaaataaccacatgaatccattatacctgttgggcatttacaagttcccttaacaatttacttccaatacagacaacaaaaatatcaagtttcaacccaaacacaaataaaacatgaaaaagcataacatacagtaaaccatttcaagtctttaacaagcttcaaagaatagaagcttgcataacacggaagcaacaggtaataaaagacatcatacgcacactcaatcacaggtacttcttagtactcatcatcttcaccctcatcaccctcagccgactcagcaccaacttcttcataatccttctccaatgcagcaagatcctcacgagcctctgagaattctccttcttccataccctcaccaacatacc

SEQ ID NO: 205208 - DNA, 322 bp, Gossypium hirsutum
attacatgacctatatgttcaagtacgacagtgttcacggtcaatggaagcaccacgagcttaaagtgaaggactcaaagactcttctctttggtgaaaagcctgtcactgtttttggcatcaaaaaccctgaggaaattccatggggtgaggctggtgctgaatatgttgttgagtctaccggtgtcttcactgacaaggacaaagctgctgctcacttgaagggtggtgcaaagaaagtgattatttctgctcccagtaaggacgcccccatgtttgttgttggtgtaaatgagaaagaatacaagcctgatcttgacat

SEQ ID NO: 205209 - DNA, 384 bp, Gossypium hirsutum
ggtttttccgtcgcccaaagtgtctgatacggtggttgagccctataatgcgactctatcagtgcaccagcttgtggaaaatggtgatgaatgcatggtgcttgataatgaagctctctatgatatctgttttagaactctcaagctcactaatcccagctttggtgatttgaatcatttgatttcaacaactatgagtggagctacatgctgccttcgtttcccgggccaactcaactccgatctccgaaaactagccgtaaacttgatcccattcccacgcctgcattttttcatggttggttttgcacccttgacattccgtagctcgcaacagtaccgagccttaacgatccccgagctaactcaacaaatgtgggatgc

SEQ ID NO: 205210 - DNA, 383 bp, Gossypium hirsutum
acagaatcattttgcgattgggtttctgatttacctgcaatgccaataacacaagtaattgaaacgatacgccgtaaattgatggaattcatctatacacgcaagatggattcggatcaatggtcatcaaaccttactccatctgcagaggaaaacctccaaagaagtcttgtcaattcacgttctcttgaagtagtactttcacacagtagttgtttcaaggttcgggatactttagacatgataaacgttgttaaccttgaaaattgggattgtagttgcagggaatggcagatcaacggattgccatgtttacatgcagtggcagcaattgagcacgttggcaagaatgtgtatgattactgctacagatattttactac

SEQ ID NO: 205211 - DNA, 379 bp, Gossypium hirsutum
ttgcacactgcccttacgccaaactatgtcctaaaaagtctcatagctttgtggtgcgagagcaatggtgttgagctgcctaagaaacaggggacttgtagaagcagaaaagcaggtagcagtgcttcggactgtgatcgtactgctatcatcactttgttggaaaaactggcaaatggaaattcagaacaacaaagagcagctgctggtgaactccggctattggcaaaaagaaatgcggataatagggtgtgtattgctgaggcaggagccataccacttcttgtcgagttattgtcttccacagatcctcgaacccaggagcatgctgtgacagctcttctcaacctttccattaatgacagtaacaagggaacca

SEQ ID NO: 205212 - DNA, 331 bp, Gossypium hirsutum
aagaatttggggagtgtagtatagaacgccgtttataccagagaactgctgaagtatttgaattccaatccctacaaataaagcatgcttgactccgggttcaaagatatcagtccaacttggtccctttgccgtttcagctggatgaaccatagctggtccaaccggatgttgcttcacaagctctgaggaataaagagccgaatgactcaccaaagcggctgcttggacatactcagtgtcagcagggacatcaccaccaggcagagaaactactgacccacgcctagattcaggtacagtctcttgatgcaaatagattcttttaaat

SEQ ID NO: 205213 - DNA, 380 bp, Gossypium hirsutum
gaaccaacgatggtggttggcgcagacagcaatgctgctgctgctggcggtgctgatggatcacctctccctccaccgacgtcttcaccgccgcaagcattagtcgagaggctcaaggactacggccaggaacacgttttcgccctttgggacgagctttctcctgatgaacgcctccacctcgtcaaggatatccagagtttggatctttcgagaatagatcggatcattcgctgctctcttcgatctcaaggactgccggtggcagcaatagagccagttcccgagagttgcgtgtcctctgcagaggagagaacgatggaggaaagggaaaggtggtggaaaatgggattgaaggttatatcggaaggcaaattggc

SEQ ID NO: 205214 - DNA, 338 bp, Gossypium hirsutum
gtagattcgggtaacgggttgaaatattctagccttttggaagctcaaatcgacgccgtttttgcagctatgtcggctattaaatacgacgacgtaaagatggttgtgaccgaaacgggttggccatcaatgggcgatgaagatgaaataggtgctagtgaatccaatgcggcgtcgtataatggtaatttagtacggaaagttttgaccggtaatgggacccctttaagacctcaagacccacttaacgtttatttatttgctttatttaatgagaataaaaaacccggtccaacttccgaaaggaattacgggttattttaccctaatgaacaaaa

SEQ ID NO: 205215 - DNA, 386 bp, Gossypium hirsutum
caaagttggaccgggtcggcctatgcccaagatgcgtcctttcgcgtttaatttgactgatttcggtggggtcggggatggggtcgccgatgaaacggcagcgtttgagagggctatcttggcgatttccaagtttgggaagagaggtggtgcgcagctcaatgtgccgcctgggaagtggcttacggcaccgtttaatcttactagtcatatgactttgtttctagctgaagatgctgagattcttggaatccaggaggagaagcggtgggctttaatgcctccattgccttcatatgggtacggaagagagcataatggatctcggtatgggagtttaatccacggccaaaacctcagagatgttgttataactgggcataatg

SEQ ID NO: 205216 - DNA, 340 bp, Gossypium hirsutum
agtcaatgcacttgccaaggcattggctggtcagaaggatgaggccttcttcactgccaacgcatctgctcaggcttcaaggaagtcctccccgagagtgaccaatgaggctgttcaaaaggctgctgctgctttgaagggctctgaccaccgtcgtgctacaaatgttactgctagactcgatgcccagcagaaaaagcttaacctgccagtcctccccaccacaaccattggatccttccctcaaactttggagctcaggagagttcgtcgtgaattcaaggctaacaagatctcagaggatgattatgttaaagccattaaagaggaaattaagaaa

SEQ ID NO: 205217 - DNA, 413 bp, Gossypium hirsutum
gaactagtctcgagttttttttttttttgattaatcgatatggctagctcaatgtcccttaagcttgcatgtgtggcggtgttgtgcatggtggtgggtgcacccctggctcaaggggccgttacctgtggtcaagtcacaagctccctcgcaccctgcattggttacttgacagggaatggtgctggtggcgttcccccaggttgctgcggcggcataaaatctctcaactccgccgcccaaacaacaccagaccggcaagcagcttgcaaatgcatcaaaagtgcggccgccggcatttctggcatcaactatggtattgcaagcggactcccaggcaagtgcggtgtcaacatcccttacaagatcagccctagcactgactgcaacagcggtaagtgaagttttggcat

SEQ ID NO: 205218 - DNA, 389 bp, Gossypium hirsutum
gaagaaatggtttacaagaccttcctgtttgatccagataagcttggacaactcaaggaacaagcccttgaagatggggttttatccaaatgcacaacattcgaagtccttgcagggtttgtgtggagagctcgatgcaaagcattaaacttggttcctcagcaaaaaactaagctcctctttgctgctgatgggagaaaaagattcataccaccattacctgaaggttttgcaggtaatgggattgttttaacatattcaatctccactgccggtgagttagctgagaagccattatcatttgctgtgggattgatccaacaggcggtcaaattggcgaccgacagttttatgcgatcagccattgattattttgaagtgacaagagc

SEQ ID NO: 205219 - DNA, 404 bp, Gossypium hirsutum
tccgactccatcgactctgaaaccgactgcaactatttggtgcgtaccaaaggccggtatttccgatgctcaattgcagtcgagtctagactatgcatgtggccagggcatcaattgcagtccgatccaaccgggaggtgcctgtttcgaaccgaacaccgtagcgtcccacgctgcttatgccatgaacctttactaccagaattccgccaagaatccgtggaactgtgatttctcgcagacggcaactctaacatcccaaaatcctagttataataattgcatctaccctggtgggagcacttaaaaaaagtcagataaaatgtgaagtgaaattggaaaaagaagaaagatggttaaatataagctgtgagtactttatatttgtgggtcttattttaaaa

SEQ ID NO: 205220 - DNA, 341 bp, Gossypium hirsutum
attgaaattttctttctcgattttctctttagccaaaaaagatgcagatcttcgtcaagactctaaccggcaagacgatcactctcgaggtcgagagctccgacacgatcgacaacgtgaagaccaaaatccaagataaggaaggcatccctccagaccagcagcgtctgatcttcgccggaaaacagcttgaggacggccggaccttggccgattacaacatccaaaaggagtcaactctccacctcgtcctccgtttgcgcggtgggatgcaaatcttcgtgaaaaccttgaccggcaagacaatcactctcgaggtcgagagctccgacacgatcgac

SEQ ID NO: 205221 - DNA, 244 bp, Gossypium hirsutum
gcttggcagttgcagttgtgttaaatagcatacccaagggaactacacaagtagtccttagaggcaagctgactaaagttgcttgtgctcttgcctttacgctatgccaaaagcgcattcaagtctctgtattacgtgaggatgaatatgaaaagcttgataaattacttggcaccaagtctgagggtaaattggttctctcaaaaagttacacttgtaagacatggttagttggagatggatt

SEQ ID NO: 205222 - DNA, 394 bp, Gossypium hirsutum
atcttaagacccaaagccaaaagagacaggcatagggtgactttttcaactggttttctggctggttgcatggcctctcttcttctagcccttataatgatcgttcggctccgtacaatcatggatagtagagggaggactatatatatggaaaccatgtttcccctttatagtttgttcggattcattgttctacacatgctgatgtatgcaattgacattttctactggagaaagtaccgagtgaattacgccttcatattcggtttcaagccgggaaccgaattaggctaccgagaagttcttcttctgagcttcggccttggaatattagcattagctgctgtgctctgcaaccttgacatggagatggatcccaaaacaaaagactata

SEQ ID NO: 205223 - DNA, 149 bp, Gossypium hirsutum
cccccctggcccccttcccatcccggttttcggcaactggctccaagtcggcgatgacttgaaccaccgcaacctcacagacttatccaagaagatcggtgacatcttcttgctcctgatgggacaacgtatcctcgtgggtgtttttt

SEQ ID NO: 205224 - DNA, 387 bp, Gossypium hirsutum
ctcgtgccgtttttttttttttttttttttaacaaaacaaaaattaacatgcttttatcagcatagatatagtaatagtatcaatgttgtataaatattacatttaacaatacaaacaatattacaggaaaaacaatgatatgaaactttgcaaccttctttcagtgaaaatcaattttgggttcaatgccatgtcgacattcgtctgcaagagcaatatttaacatttcagtgcaaaacggatcatccggtttcagccataaagccttatgatagtatgtaattgcagaagtaaaattatcctgcaaatggtacgtgtatgcaagaccagcataagtgctcaagctttttgttgataacggtagtgccttctcatagaatgagatt

SEQ ID NO: 205225 - DNA, 380 bp, Gossypium hirsutum
aaaagaaagaggcagcaaaagccagcctccatcaaatctctaaattcaagagttcttttaatgctcagtttaaacacattattacatgatgtttttttcactaaaatttttcattatcttgttaactcacattgtggtatgagtcaatgatggcgtcagctagatattcacacttagccaaagataatcctgcaagtgatatccttccatccttgatcatataaacatgccacttgtttgtcatattatcgcactgagctttgtttaagcctgtgaacgaaaacatcccgatctgcttaagaacgaaagaccaatccttcccacttttatctttggaagaaagactatcaaataatttatgtctcacattcttgattctc

SEQ ID NO: 205226 - DNA, 371 bp, Gossypium hirsutum; identical to SEQ ID NO: 193050

SEQ ID NO: 205227 - DNA, 389 bp, Gossypium hirsutum
gtatttctggcaccagtgccaacattctgtcggatttacaaaaagaaatcgactgagagtttccagtcactgccataccaggttgcattgttcagttgcatgctatggctgtattacgcgttgattaaaaagggtgctttccttctgatcaccatcaactcttttggatgtgttgttgagactatttatatatctatgttctgggcttatgcttcaaagaatagcaggatgtcggctatgaaactttttatatcaatgaacctggggctcttctctttcattctcatcctcacacactttctgctgaaaagctcgattcgcatccaagttcttggctggatttgtgttgccatctctgtatccgtctttgcagcacccttaaacattat

SEQ ID NO: 205228 - DNA, 392 bp, Gossypium hirsutum
gcgagtttgttttttttgttttcattttgttgggttttggttttttttttgtttgtttctctataaaaaacatcgccggccgcggattttactcttttcacaaacaaaaaaaagggggggttttgatctttgatcaggtgagtggagtaccatgaagttttgtaggagcttaagcatattgatcgaaaaagcgttgcctgatgggagagataagttttttccttacaaggatttgaaaaacccgttgaatttgatttaccccaaagatgcgagcgagaagcatcctaacaaacggcccaaattagattcattggacggcggggatggggaggagagcgaggtttccaaggaggtgatggatttcgttttgttgttggaaaatgaagtggaga

SEQ ID NO: 205229 - DNA, 368 bp, Gossypium hirsutum
  unsure (1)..(368): unsure at all n locations
gctgagggagtccgaagaaaggcttgggttcgtaagtgaagaaagggatcaattgatcaagcagagagactctgccatgcaggaggcacatatgtggcgtaatgagcttgcaaaggctcgagagcgtgttgtaatattagaagcagcagttctgagagcagaggagaaggtcagagttgcagaaacagatgctgaagcaagaataaaagaagcagagcagaaagaggcagccgctgtgaaggaaaagcaagaccttcttgcatatgtgaatgcgttacaagcacatctccaaagacaacagagtgacacgaagcanattttcgaggaaaagatggagtcgtcaaatactagcaacagtccacctgata

SEQ ID NO: 205230 - DNA, 378 bp, Gossypium hirsutum
  unsure (1)..(378): unsure at all n locations
aaatggttctgctagagaaactttgggatgatgtagtggccggtcctcaaccggaacgtggccttggccggctgaggaagatcaccaccaccccacccttgtccaccaaagatgaggcttcatcaatggcgatgccgacgagtccgacgacacctgggacaccatcgacgccggtgtcggctcgtagggacaacgtgtggaggagcgtgttcaatccaggtagcaaccttgcaaccaaaggtattggcgctgaagttttcgacaagcctcaacctaactctcctactgtttatgactggctttacagcggngagacccggagcaagcatcaccgttgattangcggtggctgacggcggcggatggtagcaaaaccac

SEQ ID NO: 205231 - DNA, 390 bp, Gossypium hirsutum
  unsure (1)..(390): unsure at all n locations
atattattttatgccccgagtgataccaacacctccaatattttgactcagctgaagaaatctctttcagaaaccctaaacatcttatatcccttttctgggagaatctttagtaacatgttcatccatgatttcgacgctggtgttccgtttttatcggctcgaatcggttgtcgattatccgagtttcttaggcatcatcaaattgagaccttgaacaacttgctcccttgcactcctttatccaaggaatcaaatcatcagggtcctctcttggtttgtcaagtcaccatgtttgcatgtggaggaatagctntaggcatctgcgcctcacataaaatcactgactccgaaacagcagtcattntaggctttgtttggagcacaatc

SEQ ID NO: 205232 - DNA, 388 bp, Gossypium hirsutum
gttggttcaaatcagtatgttttgtggagctcatgtataacttctgttgatgcattattttcatcttgaagctgtgggtttagtaccaaactatgctgtgaggcccatccaccttaaaacctctggtggatttagttgatctgctacgcatttcttttctataatgttctatagtttgatttaatacaagcaatcttctactgaagataaatgtcacatgggtattgttggttctcatacctctcttgaataaagaaagagctactctttgttctgctaggcaatggagaggtacaaattaattaaggaagttggtgatggaacatttggtactgtttggcgagctattaataggctctctggtgaagttgttgcaattaagaaaatg

SEQ ID NO: 205233 - DNA, 396 bp, Gossypium hirsutum
aaaaaaatgaagctcttgtttctaactttgctgctttgttctcttcttctatgttcttcagtttttgcaccaacaatggctcagcctcgttcacctttttgtgaagggaaatgcaaagggaggtgcaataaagcggcggtttgggatcggtgcttcaaatattgcggcatatgttgcgaggagtgtcaatgcgttccgtccggtacttacgggaacaaacacgagtgtccttgctacagagataaggtgaacaacaagggcaaacccaaatgcccttgaaaatgaaatatattcgagttcgggatttaatcaagcttaaagatcgaagacgaagaggccatatatatatatatatgcatgttgatgatgatgttattataaaaataaacttggttt

SEQ ID NO: 205234 - DNA, 388 bp, Gossypium hirsutum
  unsure (1)..(388): unsure at all n locations
atactttgctgcaaattctcccaaatttttcagaaaatctaacacaagttgttatcaattagggaaaaaaatgagagagacccttcatgttcaaggggcaatgtgggaaccaaatcggttccaagttttgggaggtntgtttgcgatgagcacggatagatccaactggaaggtacattggttcctcggatctngcagtgggcgtgttaatgtttactataacgaggcttatgtggtcgctttgttcctcgtgctgtgctcatggacttggagcctggtacgatggacagtgtccgaactggtccttacggccagattttcaggccagacaactttgtttttggacaatccggtgctggaaacaactgggccaagggccattacactg

SEQ ID NO: 205235 - DNA, 398 bp, Gossypium hirsutum
atccctcaatgggaagcttataaacttcttgcgggagagggctcaggttgaacaacttattcaatatattgtggtagaacctccagagaatgctgataagaagcaaatttacaagtttccttctattgcatgtgagatttttacgtgtgaggttgatatcatactaaaaacactagtagaagatgagggattaatgaatttgttattttccttcttgaattcgaatcactctcatggcacacaactgacagggtacttcaacaggattgtcatatgtctgctgttgcggaagacatcagcgttcatgcagtatattaagggacatcaagaaattgttgagatgctaattgacctgattggcataacttccattatggaggttttaatacgtctaattg

SEQ ID NO: 205236 - DNA, 401 bp, Gossypium hirsutum
atttcatccgattcccttcttgagccacaattcacttcggagctttgcgcccctgcttgctgccacaactgccccaacattgtcgaccttttcttcaatttggccgcgggtgaaggagtatttttaccagatttgtgtgaggctcaacgcatcaacccaagacgttcaatggtggagttgatgtctagctctggggcagcccttggccctatttctagtgaagcttcagctttagctccaagcccaactcctcctattactagtgaagttcctgattcaaatgaaggtttagcttcaatcctaagcccatcttctatttctagtgaagcttcaactccaggcccaggcctagcacctatttctagtgaagcttcatcttcaacttcgtctccaggcccaac

SEQ ID NO: 205237 - DNA, 392 bp, Gossypium hirsutum
tgatgaacttgctgcagttgacttcttcgtgagtacagtggatccattgaaagagcctgcattgattactgccaatactgtgctttccatccttgccttggactacccggtggataaggtctcttgttatatatctgatgatggtgcggccatgctgacatttgaatctctagtagaaacagccgactttgcaagaaagtgggttccattctgcaaaaaattttccattgaaccccgggcacctgagttttacttctcacagaagattgattacttgaaagataaagtgcagccctcttttgtaaaagaacgtagagctatgaaaagagattatgaagagtacaaaattcgaatcaatgctttagttgcaaaggctcagaaaacacctgatg

SEQ ID NO: 205238 - DNA, 384 bp, Gossypium hirsutum
  unsure (1)..(384): unsure at all n locations
gaagcatggacccaaaccaccaatgtatgaacctccaaagaaggagaagcctgagccaaagccaccagtttatacacctccaaagaaagaggagcctaaacctaaaccaccagtatatgaacctccaaagaaggagaaacctgagccaaaaccaccgatttatacacctccaaagaaagagaaacctgaacccaaaccacccgtatatgaacctccaaagaaggagaagcccgagccaaagccaccggtttatacacctccaaagaaagagaaacctgaacccaaaccaccagtgtatgaaccttcaaaaaaacctccgatgtacgaacctaagccaccaaaaccaccggtttatacacctncaaagaaagagaaacctgaacc

SEQ ID NO: 205239 - DNA, 394 bp, Gossypium hirsutum
agggtgtcttaataaacgccttcgatttactttcggttgccatttacttctttatttctacgtttttgaatttttagtaagcgaaaatgagagagtgcatttcagttcacatcggtcaggctggtatccaagtcggaaatgcctgctgggagctttactgccttgaacatggaatccagcctgatggccagatgccaagtgacaagactgtcggaggaggtgatgatgcttttaacacctttttcagtgaaactggtgctggaaagcacgtccctcgtgctgtctttgtggatcttgagcctactgttattgatgaagtgaggactggtacttaccgtcagcttttccaccctgagcaactcatcagcggcaaggaagacgctgccaacaactt

SEQ ID NO: 205240 - DNA, 394 bp, Gossypium hirsutum
ggggggggggccaaactcgaagaccccaatttgtttcaaaaagagagagggttgaaaaatggatcaagggttactggatgatattataaaccggcttttggaagttaggggtcgaccagggaaacaagttcagttatctgaatcagagatccggcagctttgtttggtttctaaagagattttcttacaacaacctaatttgttggaacttgaagcccccatcaagatttgtggtgatattcatggtcaatattctgatcttttaaggctttttgagtacggtggattgccgccagatgccaactacttatttttgggggactatgttgatcgaggcaagcaaagtctggagaccatatgtcttcttcttgcttacaagataaacaccctgaaa

SEQ ID NO: 205241 - DNA, 356 bp, Gossypium hirsutum
ctgggggctgatagttaataccgcatttgaaaccagctgttgtccctggaggtgatcttgctaaggtgcagcgagctgtttgtatgataagcaataacacagcagtggcagaggtgtttgcacgcattgaccacaagtttgatctgatgtactcgaagagagcttttgtgcattggtatgttggagagggcatggaagaaggtgaattctcggaagcccgtgaggatctggctgctcttgagaaggattatgaagaagttggtgctgaaagtggagatgatgaagaagaaggtgaagaatattgatgctactatcgcaatatcatttattctgaaaatgatgggttcaccctgtga

SEQ ID NO: 205242 - DNA, 345 bp, Gossypium hirsutum
atcaatcagttccggcgaatcagatggcaaaagaagttgttaatcccgatgaactggttgttgttggagaggaattagaccatgtaagaatcatcactttgaacaggcctcgacatttgaatgtcatctcatccaaagtggtctccctgctagctaaatacttagaaaaatgggaaagagatgagcaagctcagcttatactgatcaagggagccgggcgtgcattttctgctggtggagatttaaaaatgttctatgagggaaggaaatcaaaggattcctgccttgaagtggtctatagaatgtattggctttgctatcacattcatacctataagaaaactc

SEQ ID NO: 205243 - DNA, 383 bp, Gossypium hirsutum
caacaactaaggttgaaagagaggctgaaatcccacctgagcaacaaatggaagataaaccggcaccggatgcttcccagcccctctcgactataattccaatcccgaaaagcagacttgcaccataccgaaccgtgatcattatgcgattgatcattcttggtcttttcttccattatcgagtaacaaaccccgttgacagtgcttttggactgtggctcacttcagtcatatgtgaaatctggtttgcattttcctgggtgttggatcagttccctaagtggtatcctgttaacagggaaacatacattgacagactatctgcaagatatgaaagagaaggtgaacctgatgaacttgctgcagttgacttcttcgtgagt

SEQ ID NO: 205244 - DNA, 357 bp, Gossypium hirsutum
ggcaagaaaaaagaggtttggtgggcaattatggtgatgcaggacatgatcaagctgaacaagaagaagaagaagattacctcatggcagaagctcgacaacccctctggcgaaaagttccgatttcctcgagcctgataaacccttaccggatagtcattgtcctacggctctttgtcctcatctttttcctccggttccgtattataacaccggcctacgatgcttttcccttatggcttatctctgttatatgtgaagtatggtttgctttctcctggatactcgaccagttccccaaatggttccccattactcgtgaaacttacctggatcgcctctccttgagggttgagc

SEQ ID NO: 205245 - DNA, 429 bp, Gossypium hirsutum
ggggggggcggttataaactagggggacccccgggccggcggaattcgggcccgagctcaaaggaggaacccacacacttccacggaaaatcaccgaacttggtccaagactcctaaaccggatttaaccgcctccgcggaacgctcaacccgccctaacaagccgtgggatgggatcagaaaagtggtgtttggaggtcaagtgaccgatgaagaatttgaaagcttaaacaaaaggaaaccttgttctggatataaaatgaaggagatgactggtagtggtatttttgcagccgatggagaaaatgacgaatcagaacctggtagcgcaaaccctactccaaacaacaaaacagcaatacgaatgtaccagcaatctctagctggaatcagtcacatctcgtttgccgaggaagagagtattacacc

SEQ ID NO: 205246 - DNA, 400 bp, Gossypium hirsutum
  unsure (1)..(400): unsure at all n locations
ctagtctcgagtaatttttttttttttttatgcaagggggaaataaccacatgaatccattatacctgttgggcatttacaagttcccttaacaatttacttccaatacagacaacaaaaatatcaagtttcaacccaaacacaaataaaacatgaaaaagcataacatacagtaaaccatttcaagtctttaacaagcttcaaagaatagaagcttgcataacacggaagcaacaggtaataaaagacatcatacgcacactcaatcacaggtacttcttagtactcatcatcttcaccctcatcaccctcagccgactcagcaccaacttcttcataatccttctgcaatgcagcaagatcctcacgagcctctgagaattctncttcttccataccc

SEQ ID NO: 205247 - DNA, 391 bp, Gossypium hirsutum
taacactcctccagttcaggaccaccttgaggaggctgagggattgcttaaaaccaccaattccacaggtcaatcgaaagaggcaagactggctcgggtttgtgctggactttcatctcgtcttcaagaatacaaatctgagaatgcacagcttgaggagcttctaattgctgagagagagctgagtaaatcttatgaggctcacataaaacaactacagaaagatttatttttatgtaagagtgaagtaacaaaggtagaggcaaatatggttgaggctttggcagcaaagaactctgagattgaggtgcttggcaactctatggatgcgcttaagaaacaagctgctttatctgaagggaatctggcatcacttcaagcaagcatggag

SEQ ID NO: 205248 - DNA, 388 bp, Gossypium hirsutum
tgcgaaggcaaggcaaagtagctgcccaagaacaagcggatcaggggacaacaatctagcacccctagacgtggcaaccccaaattcttttgacttaaaatacttcaataacctcttaaacaaaaagggtttgctccactcggaccaaatactcttcaatggcggatccaccgattcattggttaaaacatacagcagcaacaccaagaagttctattcagacttcgttactgcaatgataaagatgggagatattaccccactcaccggatcaaatggtgaaatcaggaagaattgcaggaagcctaattaatggctcttcctccattgctttgccccaatatctgaggacctgtctagtctacacagtttgctttcttatttatat

SEQ ID NO: 205249 - DNA, 366 bp, Gossypium hirsutum
aaattccagcacccaaaataatggccctctgcaagccgtgtgctaggttggtcctagcactggccatggcattggtggcagctacggtgcctgtttatgggcagagaactatcaacactccatgcaccccatcggcacttaacatcttcactccttgtatgaacttgcttaccaatagcagtgccaatggtacttcgcccactgcagattgttgcaactcgcttaaaacgctcacatcgagcggcatggactgtttgtgcctcattgtcaccgggagtgtcccgttccgtttacctatcaatagaactctagctatttctcttccccgagcttgtagcatgcctggtgtccccctccaatgcaaag

SEQ ID NO: 205250 - DNA, 375 bp, Gossypium hirsutum
cggaattcaagtgtgacggctgatgttccattctttttggttagtattggttctgattcacatgctgccgtcaggcatcttaaggatttggaagcttgtcaacgtgatggtcaaaagttgctatttgcattttatgacccatgccatcttccaaacaatcctggctggcctctccgcaacttcttagcacttatttctgccagatggaatctgaaaactgttcgctttttgtgctatagagagaatcgaggttttgctgatttgaatttgtcacttgttggtgaagccttgattacagttcaacaaggatggagagaacagcagtgtgtgcccaatgctgtaggatgggaacttaacaaggggagaaaagtaccg

SEQ ID NO: 205251 - DNA, 351 bp, Gossypium hirsutum
cttacatacatgagggtaaatggcctcctgggtcagttgatattcacatcatcgaaaagagtcttcgaaaggctgtctttgcagctattctccttatacccattgcctgcattttcctatctctcaaggaaatttcagccactcttattttgtggagacttcagctaagtggactccttgtcatattattattttttttttggaaccctgttcacaaagagtctgtcatcataatgccagcctttggagttcagcttgaaacacactatacgagtggaagaatcatccgcagattcattcccgccggtgagattttgaaacctgttttattaaaatgtgttacccccgtaa

SEQ ID NO: 205252 - DNA, 351 bp, Gossypium hirsutum
ctagtctcgagttttttttttttttttttagtgttaggggtttttccccctattttaagaaaaccctaattctatgtaatgtgcaggatcttgatgacatgaaaaaaaggttaaaagagatggaggaagaagccgctgctcttcgtgagatgcaagctaaggtcgagaaagagatgggttccgtacaagatcctgctgctgctgcagctacatctcaggcaaatcgagaggaagtggattctcgatcagtctttgtgggcaatgtggattattcatgtactcctgaagaagttcaacagcatttccagacttgtgggactgtaaatagggttactattcgtacagacaagt

SEQ ID NO: 205253 - DNA, 375 bp, Gossypium hirsutum
aaatttctctggaaacaaagcaactatcaactacgtttacctcagatctaaaacacctcgtctcagatccactaaattcaccatgtctactactttcagcggcgatgaaacggctcccttcttcggcttcctcggcgccgccgccgctctcgtcttctcctgtatgggagctgcatacgggacggctaagagcggtgtgggtgtggcttcaatgggtgtgatgaggcctgagttggtgatgaaatccattgttccagttgttatggctggtgttttgggtatttatgggttgattattgctgttattattagtactggcatcaatccaaaggccaaatcgtattatctttttgatggttatgcccatctttcctc

SEQ ID NO: 205254 - DNA, 416 bp, Gossypium hirsutum
tggctttgccgtagtggcggcggacacatcggcggttcacagtatcctcgtgcacaaatccaacgaagacaagatcatggtcctcgattctcacaaactcatcgccgccagcggtgaatccggtgacagagtgcaattcacggagtatatacagaaaaacgtggctttgtatcagtttcgcaatggtattcctttgacaactgccgccgctgccaatttcactcgcggtgagcttgccactgcattaaggaagaacccgtacttcgtgaacattcttcttgctggctacgacaaagagacaggcccctcactttactacatcgactacatcgctacacttcacaaagttgataagggagcattcgggtacggatcctatttttctctctctatgatggacaggcactaccacagcg

SEQ ID NO: 205255 - DNA, 193 bp, Gossypium hirsutum
  unsure (1)..(193): unsure at all n locations
cccagaccaacagaggctgatttttgctggtaagcaacgtggaggatggncgtaccctggctgactataccatcaaaaaggagtccaccttcaattggtggcttctttttcgggggggattgcaaattttggggaaaacattaacgggaaaaacaataaccttgaaggtgaaaagctttacaccattcatata

SEQ ID NO: 205256 - DNA, 376 bp, Gossypium hirsutum
  unsure (1)..(376): unsure at all n locations
ggtgtacccaagtctgatattcccatcattctaggtaagaggcctcaactgtgtggaattagtctctccgaaaatcttatacccaccatgactttcttagaagatttgggtgttgataagaaacaatgggcaaaagttatatacaggtttcctgcacttctcacttacagcaagcaaaagtttaagactactggggatttcctttatgaaatgggcctttcatcaaaaaatgttggtaaggttttaacgcggtgtccgaccataattagttatagtgttgaagacaagctacgccctacagctaagtatttcaggtcattgggtgctgatgtttctcttcttctattanccgtgccacagacttttggtcttagca

SEQ ID NO: 205257 - DNA, 410 bp, Gossypium hirsutum
agaaaaaaataagcttatcccttcgattgattcaaacttatcaaaggtagacattatctcataagtataacgatagagtttgatgcagaaacaatccatgaaaaaagatttcagtttcatttacaaatttcaatctcttaagcatataatttcccctataatcagcaaattaaccatctatatccttcttaaatcataatttaaaaaaaaaaaagaaattaacgaggattcttacaagcacagatcaacaaagaaaactcatgacctcttcctttgtcactatgttccaaacacccacttttttcttctaaccaaagcctgctatcaaacccactccttgtcctaaacatgaacacagctctcccatttgtttgcttaaacacccaatcatgcaaatcccacatcatatc

SEQ ID NO: 205258 - DNA, 387 bp, Gossypium hirsutum
aaaccttctgcttagcttaaaaaatcttgaatctgcactgtcctacttccctcgttatcgtcaatggcttcggacaagaagattaagatcgggattaacggatttggaagaatcggacgtttagttgccagagttgctcttcagaggaacgatgttgaactcgtcgccgttaacgatcccttcatttccaccgattacatgacatacatgttcaaatacgacagcgttcacggtcaatggaagcaccatgatcttaaggtcaaagactctaaaaccctcctcttcggcgaaaaacccgtcactgttttcggaatcaggaaccctgaggagattccatgggctgaagccggggctgagttcgttggtgagtcaactggagtgttcact

SEQ ID NO: 205259 - DNA, 354 bp, Gossypium hirsutum
gttaatgccactttaaattggatcacttttgctttggatgccccttctgcacgagctgtggtgtttggagttcacataggcgggcatttatttgtggaagttcttcttttggtggtcattctttttctgctttcccagaaaagttacaagcctcctaagcggccattgacaaagaaggaaatagatgagctctgtgatgaatgggtcccagaatcccttattcctcctatcacgcaagagatgctgagtgaacccccagtgttggaaagtgctgctgggctccatactataatcgatgggaaagaagttgtgaactttgcttctgcaaattatcttggatttgtagggcatgat

SEQ ID NO: 205260 - DNA, 394 bp, Gossypium hirsutum
atcaaatatacatgttgctgattatactcctcatacttagtcaagactcttcattcaatgctagcattcacaagatgatactgcctggtgttccatggtataaagagcatctccttcatcagacatcacttggttccctgatggtcataattttgataaggactgtccagtataacttgtcaaagttgcgggatgtctatcttcatactacttgtctagcaactttggcaaatatggcacctcatgtccatcgtttgagtgcatatgcttcccagagacttgtcagcctcttctatatgctttcacgcaagtacaacaaattggtagagctaagggacgataaactgcaaaccaaagccatctcaacaggggatggccttgtagaagatatgtc

SEQ ID NO: 205261 - DNA, 399 bp, Gossypium hirsutum
  unsure (1)..(399): unsure at all n locations
ggaacatctagcagccaaccaaaaatggttctccaaaacgatatcgatttgttgaatcctccagcagagcttgagaagaagaagcacaaactcaaacgtcttgtccagtctccaaattctttcttcatggatgtcaaatgccaaggctgtttcaacataacaacagtgtttagccactctcaaacagtggtggtatgtgggaattgtcagactgttctttgtcaaccaacaggaggaagagctagactcactgaaagatgctctttcaggaagaagggtgattgatctcatattttgctattttatgattcacaaaaacaaaagaaagtaatctttggatcaaatatgggaatcatatgagtaatctttttcatgtgtttcangtatgacatatgtttg

SEQ ID NO: 205262 - DNA, 395 bp, Gossypium hirsutum
atcaaatatacatgttgctgattatactcctcatacttagtcaagactcttcattcaatgctagcattcacaagatgatactgcctggtgttccatggtataaagagcatctccttcatcagacatcacttggttccctgatggtcataattttgataaggactgtccagtataacttgtcaaagttgcgggatgtctatcttcatactacttgtctagcaactttggcaaatatggcacctcatgtccatcgtttgagtgcatatgcttcccagagacttgtcagcctcttctatatgctttcacgcaagtacaacaaattggtagagctaagggacgataaactgcaaaccaaagccatctcaacaggggatggccttgtagaagatatgtca

SEQ ID NO: 205263 - DNA, 399 bp, Gossypium hirsutum
ggtgatggtggctcgtctagttatccttgctttctttcttcgctatcggattttgaacccggtacatgatgcaattgggctttggctaacttccgtgatctgtgaaatctggtttgccttttcatggatccttgatcagttccctaaatggttccctattgaccgcgagacgtatctcgatcgcctttccctcaggtatgagagggaaggtgagcccaacatgcttgcttctgttgatatttttgtcagtacagtggatccattgaaggaacctcctctagtaacagcgaatacagttctatcgatcttggccatggactatccagtggataaaatctcttgttacatttctgacgatggtgcttccatgctcacctttgaatcattgtctcaaacagc

SEQ ID NO: 205264 - DNA, 398 bp, Gossypium hirsutum
gctgcatggtccgattgcgtaaacctgtatgagttaaccatccttcgtctcaacaaaactgttgattccggcaccaatctcaataaggatgatgctcaaacatggctcagcacggctttaaccaatctcgaaacatgccagaccgggtttatggaactcggggtcccggattatcttcttcccatgatgtctaacaacgtttcccagttaattagtaacaccctggctctcaacaaggcaccttacaaggaaccaacctacaaagatgggttcccgacatgggtgaaacccggtgacaggaagctgttgcagtcgtcgtcgccagcttctacggcgaatatcgtcgtggcccaagatggttcagggaattataagacgataaaagacgctatatccgc

SEQ ID NO: 205265 - DNA, 399 bp, Gossypium hirsutum
ccaccatgcaggattgtccgaccaaaataatgagttcttgtacccagggagaatgtgaagaaaacagtacaaagctgtaactgcattgtgataaaactgacaatagcccttaggaaaccttgctccaagatgaagcccaaaaccattggcacagctgaaaagataccaatttgaaacagaaactgagtatttagagcagcttcaagagcagcgttatccattatccgagctcgctcttgcattgtttcaccaactccagaaagtgccaaataagcccttccataaaggaaaatatatatagtcagcacggttaacatggtacaaaaatagaatcccacagtggtgaagtagaatgacatcattctgaagaagtcaaagagctgcccaagcctgtataca

SEQ ID NO: 205266 - DNA, 391 bp, Gossypium hirsutum
cattctcgctgtcagggaagcaacgatagagtgaatcattgctcagctattgaaatacaactccagttaactgcgtttaagactttcctagatcttgctggcaaccaacttacaggaaaggattttacagaagcatttgatgcagcttgctttcctcttactctcttctctagctcatttgatgctggttgggcttctgggatctcagctacagtgatccaaggtttgttggatatgttggtggaggggggtgcagacaatgtcaaccagtgtttccttgaagcctctcgattcggcagtacagaacttgttcgcattttattgcagattgcccaacggaatagcttggatgttgatgttgatcttgccttgggttttgcctcgcattact

SEQ ID NO: 205267 - DNA, 397 bp, Gossypium hirsutum
tcgggatcaagatcctatactacgttatggtggtatgtatgcactagcattggcctataggggaactgctaacaacaaggccattcgtcagctgttgcacttcgctgtatcagatgtgagtgatgatgttaggagaactgctgttttagctctggggtttgtcctttactcggagccagagcagactcctcgaattgtctccttactatctgaatcatacaacccacatgttagatacggtgcggcacttgcagtgggcatttcatgtgctggcacaggattgagtgaggccatatcattgctagaacccttaacatcagatgttgttgattttgttcgccaaggtgccctcattgcaatggctatggtcatggtccagaccaatgaagccagtgat

SEQ ID NO: 205268 - DNA, 377 bp, Gossypium hirsutum
cccatcaaaaacaaatttatttcaataaaaataaaatacaacaaaaacaaacatgaaaactaaaacccattgttccatccatcacaagagacagtcacaagtaaaaacataaaacaggtccagattattatattcacaagtcatagcccacataaacaggattcaaagcagatcaactctcagaaaccaacggctccatttcagtcgtctgctcaccaaacaccttagcgatcttctctgtaggaaccaaaggcaaataggaggcaaccttgtaccctttctctgcactgctagccactgtctcgttatacttatcgctgcaataagcagctgttgggacaacgaccgaggcaacttgaaggaagagcgggagcatg

SEQ ID NO: 205269 - DNA, 401 bp, Gossypium hirsutum
aaaacttctaaaaacatgaaactcacctcaggttcaagcgttatcatcaaccttttggcattacaatacttgcctgttctttgtctctcacaagattttgatttcttctactttgttctacagtggcctggatcatactgcgacacgaaacaaagatgttgttacccgaagacgggaaagccttccgcggattttgggatccatggactttggcctaattacaacgatggtggctacccttccaactgtgaccccaacagtcgtttcgacaaatctgagatttcaagcctgattgggagtctggaaaaggaatggcccactctttcatgtcctagcaacgatggagttaagttctggactcatgaatggctaaaacatgggacttgctcagaatctgaact

SEQ ID NO: 205270 - DNA, 400 bp, Gossypium hirsutum
cggcacgaggaaaagtacccaaaacatgagaagcctaggatgcacaaggaggaaaaacaaaaaccctgcaaacatcatgaagagtaccacgagtcacgcgaatcgaaggagcacgaagagtacgataaagaaaaacccgatttccccaaaatacgaaaagcctaaagagcacaagaaacacgaagttgaatatccgaaaatacccgagtacaaggacaaacaagatgaggataaggaacataaaaatgaagagtaccatgaatcacgcgaatcgaaggagcacgaagaatacgagaaagaaaaacccgagttccccaaatgggaaaagcctaaagagcacgagaaacacgaagtcgaatatccgaaaatacccgagtacaaggaaaagcaagataagagt

SEQ ID NO: 205271 - DNA, 401 bp, Gossypium hirsutum
ggcacccatatcgtttttctttgtcttcattttcattggtaagtgatttcattgaaaaagtgaaagattttttcaatttcgctgtctctgccatcattggaaacattttctctgcgatcttaactttcttctttgcattagttggtacattgttaggagccatgactggggctttgataggacaagaaaccgagagtggtttcgttcgaggggctgcggtcggggctatatccggagccgttttctccatcgaagtcttcgaatcatctcttcttctttggcaatctgacgaatccgggatcttatgtttgctttacttgattgatgtcattgcaagccttttaagtggaaggcttgttcgagaacgtatcggtccagcaatgctgagtgccgttcaaagt

SEQ ID NO: 205272 - DNA, 397 bp, Gossypium hirsutum
gttcagaagacagtgaagagtattggatagtgaagaattgatggggaacaagttgggggatagatggatatttctatctaaaaagagacactgatttaccatatggtgtttgtgctgtcaatgccatggcttcttatccaactaaacaatcctcttcaccatccccttatccatcgccaagtgttcctccaccgccacctccttcaactccaccaccaccaccacctccatctccttcaccaagtgattgtggagacttttcctattgttcaagtgatgagacatgctgttgcctttttgaattctatgattattgcctaatatacggctgctgtgaatatgaaaatgctgtttgctgtactggaactgaatactgctgccctagtgattaccccat

SEQ ID NO: 205273 - DNA, 401 bp, Gossypium hirsutum
aaaaagagcttgaatctgtcagaaaacatcgaaagcaatatagaaaccgccggttttctgttcccgttcctgtagtatctttggttgggtacacaaatgctggcaagagtacacttttaaatcaattgactggagctaatgttctttcagaggaccgactgtttgctacccttgatccaacaacaagaagggttcagatgaaaaatggaagtgaatttcttcttactgacactgttggtttcatccaaaagttgccaacaaccctggttgctgcattcagagctacattagaggagatatctgagtcttctcttttagtgcatgtggtggacatcagccatcccctagcagagcagcagatagatgctgtggaaaaagttctagcagagctagatgtgtca

SEQ ID NO: 205274 - DNA, 314 bp, Gossypium hirsutum
tttggctgctgctgttttctctccaacccataagtctgccgttctgaatcaatttcagcaacagcaaagtatgctatcacctattaatacaaattactctcctaaaagtattgagcatcctctcttgcaggcttctctatccggtaggatgtctcctcgaaatgttgagcctatctcaccgatgagctcgcgagtttcaatgttagctcaatgggagaagcagcaagaatttcgcagcctaagctctagggagcttggctctggcttggctgccattgttggttccccggtcaattcatggtcgaaatggggat

SEQ ID NO: 205275 - DNA, 401 bp, Gossypium hirsutum
ctttattgctcggaggtcactacctccccttaatgaagttggactcacgtgtttccgggaactggtttaccaagagctaaatgcaaaagtgagagatgctgtaatttctctgattgatcaagaacgtgaaggcgagcagattgatcgcgctttgttgaagaacgttttatatatatttgttgaaattggaatggggcaaatggattactatgagaatgactttgaggctactatgctcaaagatactgctgcctactactcaaggaaagctgcaaattggatcgtagatgattcttgtccggattacatgttgaaatctgaggaatgtttaaaatgtgagaaggatagggtctcccattacttgcattctagtagtgagccaaaactgctcgagaaagttc

SEQ ID NO: 205276 - DNA, 366 bp, Gossypium hirsutum
caaatccaaaagtggcacgaatggcttcacttgaccatatgctgggcatatcatctaattcacttgtagcaatggcttcacaactttcagaggcagaagagcgggagcgtgcgttcactaaccgtggacgttggaatcagttgcgctccatgggagatgcaaagaacttgcttcaatatatgttcaattctctcggagactcaaggtaccagttatgggaaaaaggcatagaaatcagggaaatgaaagaacaacttaaggaacttgtaggtctgttgcggcagagtgagttacaaaggaaagaagtggagaatgagctaaaattaagagaacaggctgtagccattgcactggctacatcagcta

SEQ ID NO: 205277 - DNA, 357 bp, Gossypium hirsutum
aaaagaaatttaaaattaaaagatagaattaaaatccaacagagtatgcatacataaaaagaaatttcaaagagggtgtaaaccaaatataccattattttttttgctctttacaaatatgccaaatctttctcacaaactagctactacttcacacatcaagaaacaatggtatgctgatatgattttacaaggtccaatcctccattccatctctctactagtgtattatgttgtaaggacatccggaagctgaatggagtgagctccaattactttaccaccaacatcaggaaaattctcatgttcagggaagcggtttacttttccatccatatctacttgcaaatggataca

SEQ ID NO: 205278 - DNA, 369 bp, Gossypium hirsutum
gaagggcttaggtaatgttgacaagatagaagacatagaattgacagatgaggagatggacatgttcctggatttacacccttttaccaatgcttcaccgtacacagttgtggagacgatgtcactagctaaggctctcatacttttccgtgaagttggtctgcgacacctacttgtcatacccaagatctctagcagagcaccagtggtgggcatattgacaaggcatgatttcatgccggaacacatattaagtttgcatccatcgttggtaaggagcaagtggaaaagattgaggtttcaattcccccttttactgaaaatattctaagtgggggatctcattcagttgttgcaaacggggcttac

SEQ ID NO: 205279 - DNA, 398 bp, Gossypium hirsutum
aacttagggtctccattataacaaggctattggatacatgctatcagatccgagctgcacgggtttgctcctgtgccctttggatcattggagagtattgcctatctctatctgaagttgagagtgggatggcaaccataaagcagtgcctcggagagctacctttctactccgtttctgaggaaggggaagctactgatgcttctaagaaaactccacaggcaaactccattactgtctcctcaaggagaccagctgttcttgctgacggtacttacgcaacccagagtgctgcctctgaaactgctttctctgctcctaccgttgttcagggatcattggcttccgggaatctcagatctcttctcctcacaggcgactttttccttggggcagtt

SEQ ID NO: 205280 - DNA, 394 bp, Gossypium hirsutum
tcggaccagggtcggaacaaacaacgagaagttgttaaacgacgagttttacatcggcctcaggcaaaggagggcaactggacaggaatatgctgaacttcttcatgagttcatgtctgcagttaagcagaattatggggagaaagtcctaatacagtttgaagattttgcaaaccacaatgcattcgagctgttggcaagatatagttctagtcatctcgttttcaacgacgacatacagggtaccgcatctgtggtgctggctgggcttcttgcagccctgaaattactcggtggaaccctcgctgaccataagtttttgttccttggtgccggagaggctggaaccggtatagctgagctcattgctcttgagatgtcaaagcagactgga

SEQ ID NO: 205281 - DNA, 411 bp, Gossypium hirsutum
  unsure (1)..(411): unsure at all n locations
cccggcttgaggattccgcccaggggaatccccgatccaaaaaaaccaggttggggtacggaactaacttgagttcccaagcatgaaaagaagagagaaaaacctgagaaaaggcagagtaccttgagtgggctaaatgcctgaatggtcgaagtccatgtttactcagcctggctcggccactaagccttgaatcatatgacactggtgcatgtgccatcatcatgcagtaatttcatggtatatcgtaatatatagttaataaaaaagatggtgattgggaaatgtgtgtgtgcattcctccatgcactaatggtgaatctctttgcatacatagaaattctaaatgggtatagnttatgttatagtgtatgttgtagtgaaattaattttaaatgttgtttctaatgt

SEQ ID NO: 205282 - DNA, 276 bp, Gossypium hirsutum
gctgctcaaagatctagaaggcttgatgccattgaagctcagctcaaggctgaacagcaaatgggagaaagtttactcgcgggaagaggagtagtgttttataaaatcttagaagctgtaccttttcagggtagtggagataagatcaaattgccaccatcctgtttcacagaattgtctgatcaaggtgcatttgacaagggaccgatgtactttcagttgtcgctggttcatcaagaaggttcttctgctactaaagatgatgaaaagggaaat

SEQ ID NO: 205283 - DNA, 403 bp, Gossypium hirsutum
gaaactaggtgtgaaacaatggcgtcctcggatcttattggcaagctcgagactgatgtcgagatcgatatttctcccgaaaagttccaccatatgtggtgccacaggccgcaccatgtccaccacactagctctgaaaaagtacaaggatgcgatttacatgaaggtgaatttggaactcccggcgtcgttatctgctggagatatgtgcatgatggaaaggctaaaactgcaaagcaggtagttgaagttatggaccatgagaaaaagtcaataactttcaaaatgcttgaaggagatctgatggaggaatacaaaagcttcgtgattacaatccaaacttcccccaagagcgaacggtaaggcagtatagtgcactgggactctgattatgaaaagctgc

SEQ ID NO: 205284 - DNA, 201 bp, Gossypium hirsutum
ctcgaaccgcgttattcatagggatcagacaagctcagagatattcgttacaaaggacgcagacatgcggctaggcgactttggacgagacaaattacttaacacggatgacctaacttactctgatgctggcacacccaactatatgtggacccagctgctggcggatctaccttatggatataaatctgatgtatgggc

SEQ ID NO: 205285 - DNA, 393 bp, Gossypium hirsutum
gttttcagttcttaatactttgtttcatttcatcaaaaagaatcccatcatgagagaaatcctccacgttcaagccggtcagtgtggaaaccaaatcggaggcaaattctgggaagttgttagcgacgaacatggaattgatcccaaagggaactacgtcggtacttctcgtgttcagcttgagagggttaatgtttactacaacgaagctagtggtggtcgttacgtacccagagctgttttaatggaccttgaaccaggaaccatggatagcttgcgtactggtccgcacggacaactttttagacctgataacttcatttttggtcaaaatggagcaaggaataactgggctaagggtcattacactgaaggagctgaattgattgattc

SEQ ID NO: 205286 - DNA, 404 bp, Gossypium hirsutum
cttaaagtcagcaaagacctaatggaaatcggcggcgacgccctcaaaaccaacatcacagcattgggtccgctcgtcctcccattctccgaacaactcttcttcttcgccaccctaatttggcgccatttctttggcggcgataaatccaaaacctccctatcaccgtcgtcgaagccatacatccccgactacaagctcgccttcgaacacttctgcgtccacgccgcaagcaagacggtgctagacgagctgcaaaagaacttggaactcagcgaaaacaacatggaagcatcgaggatgaccttacaccggttcggcaacacatcgagcagcagcatatggtacgaattggcttatttggaagctaaagaaagggttaaaagaggggataggatctggca

SEQ ID NO: 205287 - DNA, 370 bp, Gossypium hirsutum
  unsure (1)..(370): unsure at all n locations
cgagcccgagagnntgagttggtaaccntgggagtcaaannatcttcccaaatcgtgctgggccctnnctccaaagggagaccgctctcttctcttagaaaccccaccgtcgagccatgtgctctaatcanncccgaaccaccgccaatnncgcctccctcaacctcctctccctacagcgtgcgcctcgctattcacacacaccgcccttctctctcctcttctgccaccccaaccacatacgctcgcccttctccgccgtccacctccggcactccctccagtctgtctaagcctgctgagtacgtgatctccaaggtcgatgacctcttgaactgggcccgtcgtgggtccatatggcccatgactt

SEQ ID NO: 205288 - DNA, 387 bp, Gossypium hirsutum
tagacaagggaatcgaccaaaaagctttgcatgatacgtgttctgcatttggaaacattctctcttgcaagctagccacagattcttccggccagtcaaaaggttacgggtttgtacaatttgacaacgaagaatctgcccaaaaagcaattgagaagttgaattgtatgctattgaatgataagcaagtctatgtgggcccttttgttcgcaagcaagaaagagatacttctactagcaagacaaaatttaacaatgtctacgtaaagaatctctcggaatcaactaccgatgaagacttgaatcaaacttttggtgaatttggtcagatcactagtgctgtggtaatgagggatgctgatgggaaatccaagggctttgggttta

SEQ ID NO: 205289 - DNA, 384 bp, Gossypium hirsutum
tacattctgcttctttcttcttgtttttcttcaagtgttgctgtcgtaattaagggtaagagaaatcggaacatctctgcgaaccttaatgaaataggagtataggaaagggaaaggcctagcaggtattggaggaagcaatggcagcaaggtactggtgttatcagtgttctcaagtggttactcccatcatggaagctgagattaaatgcccattttgtcgaggtgggtttattgaagaaatgggcaatggtacaagagacagtgctccaggcatggattcccatatccaatctgatcgagcactctcactatgggctcccatcttgttaggtatgctgggtaatcctcgtcgccgcagaagacttagacgtatcgagtttg

SEQ ID NO: 205290 - DNA, 364 bp, Gossypium hirsutum
ctcgtgccgctcagttagtcttttctttaagcttacagcttctctccagagttttataatgggtaaggagaaggttcacatcaaccttgttgtcattggccatgtcgactctggcaagtcgaccactaccggtcatttgatctacaagcttggtggtattgacaagcgtgtgattgagaggttcgagaaggaggctgctgaaatgaacaaaaggtcattcaagtatgcttgggtgcttgacaagcttaaagctgagcgtgaacgtggtatcaccattgatattgccctgtggaagtttgagaccaccaaatactattgcaccgttattgatgcacctggacaccgcgactttatcaagaacatg

SEQ ID NO: 205291 - DNA, 347 bp, Gossypium hirsutum
cgagttactgcctgtcgtctataccccaactgttggagaggcgggccatacatattggagcatactcaggcccccttactatctttttatcacattaaaacatactgggaacagctattaatttctgagaaagtgtccttatacgtatatttcagtcattgtttacactgatggtgaaagtatatttggtgtacattacctctgctgctaagggatggcaatttttatatgaaacctctctctatatcctgaacttcaaggagttcatgcttctccacacttgcctgcaaccatctatgttactacctacaatgagccatcgtatggatgaaaattctatatctggc

SEQ ID NO: 205292 - DNA, 349 bp, Gossypium hirsutum
  unsure (1)..(349): unsure at all n locations
acaaataaagaacatttaaaaaaatgatcaaaagcgtctattttcttgttccaaaagttacatttatccatacaacaaaaggaagcaacatttgatgtctcttcttttaaaaaaagggaatgttgatggcatcgttaaactcccccattttaggcattgaagagacagaacaaacctttcatacataaaactaaatttaaaaaaaaacaaaacaaaacaaaacaaaaaagaaagaaacattgngcatccctagcccatggcatacttctgggtccaactccttgcagttgtctcgtacttgttcctgtctgtcttggacatgtgtgcaatctccggcaccaaaagatca

SEQ ID NO: 205293 - DNA, 371 bp, Gossypium hirsutum
  unsure (1)..(371): unsure at all n locations
tcgagnnnttttttttttttttttttttatactcttaccatatttataaaaagttttaggggcgcggataaagtatagactaaagaaagaagaccccctctatacaaaaatccaacggccagggataaagtggccaaacacttcattttagaagtattgagaagacattatttatcaacaaatgaagactctgcaagatcgatggcacgggcaagagcggcggctttattctcacactctctctgctcatcagcagggacactgtctgcaactatgccagccccggcttgcaggtgagcaacccattctcgacgcttgttcgcgtctttgtatgaatacatagtgtcataacgagtcgatgtcggaaaaac

SEQ ID NO: 205294 - DNA, 387 bp, Gossypium hirsutum
cggcacgagcttcattacattgttcaagaacaaacagagaaaaaaagaagcaaaaaaacatggccaaagttctgttgttcattgctctatgtgtgcttccagctttggttagtgctacacgcattctgaataaccaattggtggttgaaggctatgtgtactgggatacttgccgtgctggttttgaaacccctaatactagaaggctagctgatgccatggttaagctggtatgctccgacaggaagaccggcggagttgttttcgagaaggagggatataccgacaaaaccggaaaataccagattcgtgtatccgaggatcacttggatcagatctgtgatgcagttcttgtgaagagcccccagcttggatgtgccacaatgt

SEQ ID NO: 205295 - DNA, 366 bp, Gossypium hirsutum
agaaccccttgattttctctaatcttttcaataagagagagttccgtgtacaggctgagtcttaccataccacatataaggcctctggtcagcattctcgtttaatggcttctgcagcaattgagacaagaagtaatttttcgacacagtctctttctaccaatgatccggttgtttctgttgattggcttcatgctaatttaagggagcctgatttgaaggtattggatgcatcatggtacatgccagatgagcagaggaatccaattcaagagtaccaggttgctcacattcctggtgctcttttctttgatgttgatggaatatctgatcgaactacaaagttgccgcatatgctgccatccg

SEQ ID NO: 205296 - DNA, 343 bp, Gossypium hirsutum
  unsure (1)..(343): unsure at all n locations
gatacatcagcatggaaccctaagcatttggcttttcaagtcctaaaagttgaaccaggaaccattcctgtctgccatttccttcctcgggatcacattgtttgggtccctaagtaaaaatcctgaagagtagattcatacactataagtttcatcatagtgtgcattaaaacagcttaaagcaatatccagtttgttctataataatatacccacgagtttagttatgtgaaatctatccatgaatcatgttcttggtaatggataaaatgatattactttctgtatcacaatggtttggtgataaatgtattagtatttgaagaaaaaaaacnaacaacaa

SEQ ID NO: 205297 - DNA, 90 bp, Gossypium hirsutum
tggagaatggaaagtactactatgacgtcaagagtgagaacagctattattcaaaccagctcgacaactcaagaggagttgctttcaaga

SEQ ID NO: 205298 - DNA, 391 bp, Gossypium hirsutum
  unsure (1)..(391): unsure at all n locations
gccacttgctgagaagaaagctacacgtaaaaaaccaactgggcttggtgctcctccccctggccctccatcaactggtgatgcttacgagaagctgctttcatcaattcctcagctcgcaagctttggcccgctcttcacgtcctctgcacctgtggagttgacagaagcacaaacggaatatgcaggtaatgccgacaaacatatntttgatggtcatgtggtgtttcagtacaactgcactaatactattccagagcaattattggagaacgtaactgttattgtggatgcttcacaggctggagaatatgctgatgtagctttaaagcctttaagacaactttcatatgattcacccggacagacctttgtggcatttgaaaagccc

SEQ ID NO: 205299 - DNA, 198 bp, Gossypium hirsutum
gtcagaagaaagcaataacatgtgcgaactgcttaggatcaactgcgaccgaggtgttatgcttgctgatgggaaaacccaatttttcaatcaccggcagccttatctacaatttggtggaaccctgaaccttaacccatataactgccgccattgtgggccaggtggccaaaacaagcccacccccccttttgataa

SEQ ID NO: 205300 - DNA, 273 bp, Gossypium hirsutum
aaagttctgttgttcattgctctatgtgtgcttccagctttggttagtgctacacgcattctgaataaccaattggtggttgaaggctatgtgtactgtgatacttgccgtgctggttttgaaacccctaagactagaaggctagctgatgccatggttaagctggtatgctccgacaggaagaccggcggagttgttttcgagaaggagggatataccgacaaaaccggaaaataccagattcgtgtatccgaggatcacttggatcagatc

SEQ ID NO: 205301 - DNA, 390 bp, Gossypium hirsutum
gggatgggagttttaggcaaagtggtggatgggattctattgctaacattcgtgtccatgtcggtggtgccagcgtgcttggacgcccaggtacttttgcctaaagcgcttttccccgatgtgctgggtcgtgtatattcatggtatacgaccacataccaagattatttgctgttggatgagcctcattttttcatggcacttatgaaattggagcttgttttagtattgccgcttgctatacttaacacttatggcttgttgacctccaagccctggttcaacaccacctgcctcatcttcggttctgctcttgttacctccacgacagctatggtgggagacatgctgggatccgacaaaccatcagcaggtaaactggcgtcgatg

SEQ ID NO: 205302 - DNA, 380 bp, Gossypium hirsutum
gagtcattttttttttttttttaatcttgaaaatttgaagctcgtcattccaaattcattatataaatttacactccaattttattaaatcacaattcacatttgatatatatatacaaattcacaattcacattactaaaaatcccaacacaaatgaaaaaacatggcctccttatttaaaaccatcaaaatgaacaccacatttgattttttttctctaggccattactataaaaagtcgaaaaggatcccgtcaattttcctcaacttcatcttcatacccttcaccatcttcatcaaccacagcatcttgatattgttgatattcagaaaccaaatcattcatattactttcagcctcagtaaactccatttcatc

SEQ ID NO: 205303 - DNA, 376 bp, Gossypium hirsutum
ctcaattgacaatgacattgcctgatggtcgtgaagaatctgtcatgaagcgcacaacacttgtggctaacacttctaacatgcctggggcagctcgtgaagcctcgatttacacggggatcactatagctgaatacttcaaagatatgggctacaatggtagtatgatggcagactcaacatcttgatgggccgaagcattgcgtgaaatttctggacggctggcagaaatgcctgctgatagtggatatcccgcgtatctggctgctagattagcctcattttatgaacgtgctggtaaagttaaatgccttggtgggccagaacgtacaggtagtgtgacaattgttggtgctgtttctcctcctggaggaga

SEQ ID NO: 205304 - DNA, 386 bp, Gossypium hirsutum
tggaagaatcccattggtcgccaatgttgtaatcatgactccgcatggatactttgcccaagacaatgttttgggataccctgacacaggtggtcaggttgtttatatcttagatcaagttcgtgccttggaggaagagttgcttcatcgtttcaagctgcaaggactcgacattaccccacgtatcctagtcattactcggctcctccctgatgctgtaggaacaacttgcggtcagcgtcttgagaaagtgtatggaaccaagtattctgatattcttcgggtacccttcagaactgagaagggaattgtacgtccatggatctcacgattcaaagtctggccttacctggagacttacactaaagatgttgcagctgagatca

SEQ ID NO: 205305 - DNA, 373 bp, Gossypium hirsutum
cacaaattgctttgcttcttgcccttcacaaactgaaggtgtcagatgagcaacgcaagtctgcaatcgatacatacgaaccacttgtaacttttgcactcagttctgggatgtactcatcacctgcggtgagaatttacactgctaagaatgttagggaagagcttgaagaagcacaacgcgattttatacgagcttcggttggggttagcagcaaagggaagctattagttccgaagttactgcactgcttcgctaagggctttgtggatgattccaatttggcagtatggatatctcattacctgccaccaaatcaagctgcctttgtggagcaatgcatatcacaaaggaggcaaagccttcttggatc

SEQ ID NO: 205306 - DNA, 388 bp, Gossypium hirsutum
cttggatttttcctccatagcccatttccatcatctgagagatataggacacttcctgtaagagaggaacttttaagagcactactcaactctgacctcattggctttcatacttttgattatgccaggcacttcctcacgtgttgcagcagaatgctcggtctttcttatcagtcaaagcgtggctacatagggcttgaatattatggtcggacggtgagtattaagattcttccagttgggattcatataggacagcttcagtctgtgctgaatcttcctgagactgaatctaaggtggctgagttacgcaataaatttaggggtcaaactgctatgcttggggttgatgacatggacatatttaaggggatcagcctgaagcttt

SEQ ID NO: 205307 - DNA, 368 bp, Gossypium hirsutum
gaaaaacaaaagtcaccatatttaactggaattgacgggcgcacaaccccatgttcaaacaatgccggcgaaaaaaggaaaaggaaaagacaagatgaaatacaaaggagcttctccaattgaaattaaaaaacagaatattattctccaagaaaaaccggcccaatgttatttaacagcttcaatttactcctctgccaatggaactgattcagccagcttacggtacttaagagcataaaacatctcaaggtaacgacgactctcacggcgttcaaggttggaaacatgcttccagaatccatacactcctgtcagggtcaatagtctctccgagtaaatcttccatgtatacttctcctctattc

SEQ ID NO: 205308 - DNA, 392 bp, Gossypium hirsutum
acgacacaagaagaaaagcatgtttggcattatgttgaatgatagtaacgagaaatttatgacacacacacatacgtacacacagaatcctcaagtcctctgcacaaatctctaagtgacagtttttacattattactggtatcagtttaataacaatgatctgatttgatttctagctttctcaaacaaaatgactgaggccttcttccacaggggtgtatttcacttcaaggtagaagctaaaagcttcgtatccgaatgatggatcgatctcgaagttggtgcagtcaccattgacaaagattgagtgactgatggccaacacaatattgattgggattggagactcttggatctgtttgagaagttggtcctcaagaacatatgtttt

SEQ ID NO: 205309 - DNA, 264 bp, Gossypium hirsutum
aggagtaatataaagagctttaatctttcaggaatggggtgcagtgcggggcttatctccattgatttagctcgagatcttctccaagtacaccctaattctaatgcagttgttgtcagcactgagatcatcactccaaactactaccaaggaaaagaaagagccatgctccttcccaactgtcttttccgcatgggtggcgccgcaatcctcttgtcgaaccgtcgttccgagaggtggcgtgccaagtatcgtcttgtgcat

SEQ ID NO: 205310 - DNA, 384 bp, Gossypium hirsutum
gacgatcagatctctgaattcaaggaggcctttagcctgttcgacaaggatggagatggttgcattactaccaaggagttgggaactgtgatgcgatcacttgggcagaaccccactgaggcagaactgcaagatatgattaatgaagtcgatgctgatggaaatgggaccattgattttcctgaattccttaacctgatggcaagaaaaatgaaagatacagactctgaggaggagcttaaagaggcattcagggtgtttgacaaggatcagaatgggttcatttctgcagccgagctgcgccatgtcatgacaaaccttggtgaaaagcttacagatgaggaagtcgacgagatgatccgcgaagccgatgttgatggtgat

SEQ ID NO: 205311 - DNA, 382 bp, Gossypium hirsutum
caaagttcctggatgaaaagctccgtgctggtaataagggtacttcggaagaggaattagagggtacactggataaagctttggttttatttaggttcatccagggcaaggatgtctttgaagcattttataagaaagatcttgcaaaaaggctgcttctaggaaagagtgcttctattgacgcagagaaatctatgattactaagctgaagactgagtgtggcagtcaatttacaaacaaacttgaaggaatgttcaaggatattgaactatcaaaggaaataaatgaatcattcaagcagtcatcccaagccagaacaaagcttccatctggaattgagatgagcgttcatgtcttgacaactgggtactggccgacata

SEQ ID NO: 205312 - DNA, 381 bp, Gossypium hirsutum
gaagcaattcatgtcttcggctgtggctatgaggagaagactgcttgggggaaagagattggatggatatatggttcagtcactgaggatatcttaaccgccttcaaaatgcactgccgaggatggagatcgatttactgcatgcccttaaggccagcattcaaaggatctgcacccatcaatctgtctgatcggttgcaccaagttcttcgatgggctcttggatctgttgaaattttcctaagcaggcattgccctctatggtatggctttggaggtggtcgtcttaaatggcttcaaagactagcatatataaacaccattgtctatcctttcacatcccttccactcattgcctattgttcactaccagcgatctgt

SEQ ID NO: 205313 - DNA, 401 bp, Gossypium hirsutum
gaagcccatctggatgaggaagcctgaggagattaccaaggaagaatatgctgctttttacaagagccttacaaatgactgggaagagcatttggccgtcaagcacttctcagttgaggggcaacttgagttcaaggctgtcctctttgtccccaagagggctccttttgatctctttgatacaaggaagaagcccaacaacattaagctctatgtgagacgtgtctttatcatggacaactgcgaggagtttattcctgaattcctcagctttgttaagggtattgtcgactcagaggaccttcctttgaacatctcaagagaaatgttgcagcaaaacaagatcttgaaggttatccgcaagaacttggtaaagaagtgcattgagctcttctttgaaa

SEQ ID NO: 205314 - DNA, 386 bp, Gossypium hirsutum
ggcaggtgtgttattggcaaaacatgaatgcattattcctttcattggaattgctttttgctcacaccacttgcttctcctccttactcatctcagcatggcctcaaaacccttcatcgcattagccaccactgttttcttcttctccctcatcgccgtcaatcattttgggaaacctttccagggaaaacttggggaaatggaagttgtcccaattacggatgccgtaggacctgaaagtgtagcatttcacccacttggagacggtccctacgtcggaatatccgacggtcggattatcaagtggcaaccaaatgagcatcggtggatcagttttggcatcacttctcctaacagagaaggatgtgaagggaaacacgatcatg

SEQ ID NO: 205315 - DNA, 364 bp, Gossypium hirsutum
agaaaaaagaaacagacgaatatatagaaaaaacaaagtatagttccgcaagatcagacacaaaacttgactaagatgccttggcaaaccaaagcatctcaaactttaaaaatcctacataaaacaggcaaaaacttcaaaccacatataaccaaagataaaaacactcaatctgcttcaccgctaaaaccttttggcctcttcacttcttcttagcagcagacttggtgaccttggcaccggttgggtccttcttctcgacactcttgataacaccaacagccacggtctgacgcatgtccctcacagcaaaacgacccaggggtgggtactcagagaaggtctccacaaccatgggcttggt

SEQ ID NO: 205316 - DNA, 375 bp, Gossypium hirsutum
aaaataatggccctctgcaagccgtattctaggttggtcctagcactggccatggcattggtggcagctacggtgcctgtttatgggcagagaactatcaacactccatgcaccccatcggcacttaacatcttcactccttgtatgaacttgcttaccaatagcagtgccaatggtacttcgcccactgcagattgttgcaactcgcttaaaacgctcacatcgagcggcatggactgtttgtgcctcattgtcaccgggagtgtcccgttccgtttacctatcaatagaactctagctatttctcttccccgagcttgtagcatgcctggtgtccccctccaatgcaaagcctctgttggtgcacctgttcct

SEQ ID NO: 205317 - DNA, 332 bp, Gossypium hirsutum
ggaagaggaatcgaaactcatagtaaaccaaaaattaagataattgataacaatatcacataatttctagcaaacaaaatggcggttcaatccaatccttgaaaccaatatcataaaaacattttcaaaagaaaacaaagacttaaaatccatcaaagctttcaacaagggtttttgccttcttcacctacatagatctcttacttttcaaatgagttaggccccctttttttgccaaatccaaccactgctgtgacaaaccgtcggttgtattgcatccgcttgtaagcgcggccaccgggcttctttttcttggcttgcttggccacttt

SEQ ID NO: 205318 - DNA, 380 bp, Gossypium hirsutum
aatatttttggcggcaaacttgcatgggggcctgaagctattgtttgtgatgatccaaatttccagggccatgggaatccttcaagtggtgatatcttccatgcggcaccaaatattgatcattcgcagcactttgtgcgaaaagatgtaaaggaatggttatactggctccgtaatgatattggttatgatgggtggcggcttgactttgtgagaggcttctctggaacatttgtgaaagaatatatagaagcttcaaatcctgcatttgctataggagaatattgggacagtatggcttatgaacatggtaacttatgttacaatcaagatgctcaccggcaacggatagtaaactggatcaatgccactggtggtac

SEQ ID NO: 205319 - DNA, 387 bp, Gossypium hirsutum
tgggcaggtttggttgataggtacgaggagatgatggagaaatatcatccaggtttgggagatgagaggtggccgtttgtgactcatttcgttggttgcaagccctgtgggagttacggagattaccctgtcgagaggtgtttgcgaagcatgcaaagggcattcaactttgccgataaccaggtgcttaagctgtacgggtttagacatagaggattgttaggccccaatattaagaggatcaggaacgagacggtgactcctttggaaatcgttgatgagcttgatattcgacgatcaacgcacgagaaagccgaaacacggagctagtgatggaaaagatatataatgtgccataatgtgtaggtaatggtcattccttttgat

SEQ ID NO: 205320 - DNA, 392 bp, Gossypium hirsutum
cgagggcacgagtggtcttttttgcatgctaggggcactcatgttaatctgccgtgtcctcatcttgtgtttgctggcactcgggcatttttggatattcggctgtatgttactcgtgctctttaggctgttcccatttgaagaaatggggtttttctttctcgcactcttcatgatctttcgattcgagtgactcgcggcactcttcatctttatgacccttactcttatcttgcttttccttgaactcgggaattttcggatattcaacttcgtgtttctcgtgctctttaggcttttcccattaggggaactcgaggttttctttctcgtattcttgcggctccttcgattcgcgtgattcatggtgctcttcatttgtatgttcctta

SEQ ID NO: 205321 - DNA, 389 bp, Gossypium hirsutum
ggcacgagcctctcacaaacctcaaacaatggaagtggtgaagaacttggacatccaaagatacatgggaaagtggtacgagatagcttccttcccatctttctttcaacctaagaagggggagaacaccagcgctttttacactctgaaggaagatgggacggtgcatgtgcttaatgagacttttgttaatggcaagaaagattccatagaaggcaccgcctacaaggctgatcccaagagtgacgaagccaagctcaaagtcaaattctacgttcctcctttcttgcctatcattcctgttactggggattactgggttttatacattgatgaggattatcaatatgttcttgttggtggtcctaccaagaagtacctttggatat

SEQ ID NO: 205322 - DNA, 382 bp, Gossypium hirsutum
gaagaaaagcatgtttggcattatgttgaatgatagtaacgagaaatttatgacacacacacatacgtacacacagaatcctcaagtcctctgcacaaatctctcagtgacagtttttacattattactggtatcagtttaataacaatgatctgatttgatttctagctttctcaaacaaaatgactgaggccttcttccacagtggtgtatttcacttcagggtagagctcagaagcttcgtatccgaatgatggatcgatctcgaagttggtgcagtcaccattgacaaagattgagtgactgatggccaacacaatattgattgggattggagactcttggatctgtttgagaagttggtcctcaggaacatatgttt

SEQ ID NO: 205323 - DNA, 350 bp, Gossypium hirsutum
ttccgccccaggcatttttgccttactctaaacctttcaacagatatggagtttcaagggggagtatgatgaatccggtccacacattgtccacaagaagtgcttctaaaattttgaattgcttttgatggtggtctacattttgcatttaattggctttttttggtgtgccgtgttaagtgaactcaaaagactggtttatgtctgtgaagttagggatcattgtactatgggctacttgatattaatgtactattattttagcctttcaccgtatcgccaccattaagaagactggccctatattgctggcggtgggcggacaataggtgcttaattacctacttgct

SEQ ID NO: 205324 - DNA, 386 bp, Gossypium hirsutum
ttgtcttcaagccaaagtttatcttcaacgtgagctattcgggcgctatgaatatcatgctgaagggcgaccacgatttggagtaagcttgggcctctttgtcgactgtttgaactcattttctgcacctggacgttcaagtatgatcgagattcaatacccaggacctgatatgcagcttcttataaagtctgttgattcacttgatgcttgtatttatgcggaaatcaggacaagaatttcagatacaatttcatgggactacaactttgaacctgccggaagcacaccacttacttttactgtcaagtccgcagcattaaaggaagcaattgatgatctagaatggccagggtcgagcatccatatcaatctacagccagacc

SEQ ID NO: 205325 - DNA, 368 bp, Gossypium hirsutum
  unsure (1)..(368): unsure at all n locations
gagnnnntttttttttttttttttttttttttttttttggaaagagagcacatttatattggactttacttaaatttggagcaatatattacagattcttacatccaaatacaaaaggcatgcaaacaaaaaaaaatggaaaaacaaactgaaagggtgcatgagtggaactttcactttcttgaaatcatatgatcatgaccattgatgtagatcattttgatttgaaaggaatggctctgatcacaacaacgtggtaaagtgctgctagtgctgcaccaatgaatggacccacccagaaaatccaatggtcatcccagcccttgtccttgttgaaaatgatggccgcaccaaggctacgagctggg

SEQ ID NO: 205326 - DNA, 229 bp, Gossypium hirsutum
ctctcattgaatcaattatgggaggattggaaggtctaattaacatccttgattctgaaagtggatttggggctttggagatgcagcttcttccagagcaagcagcattttatttgaataatgcatctagagtctcaattccttcagcaaaatcaccaaaaggagcagttgcttatcctttgccaggccatgagagttatccagagaataacaattcaatcaaaatgtt

SEQ ID NO: 205327 - DNA, 385 bp, Gossypium hirsutum
cgacgcagcctcgttcagattcaactatagaagcgaaatggctggttccagggttgctcatgctaccttgaaaggaccaagtgttgttaaggagatagttatcggaataacacttggcctttgtgctggtgggctttggaagatgcatcactggaatgagcagaggaaagtgagagcattctacgacatgctcgagaaaggtgaaatcagtgtcattgcagaagaataaatgttcttttagtcttgtgaaagtgtggacagcttcagctgtgtttcgttatatgcattctcttcatttggctcttagatagaagatgagcaaaacacaatttggagcttctaagaataatgtcatcattttgggatcttgatttcatatttgcat

SEQ ID NO: 205328 - DNA, 386 bp, Gossypium hirsutum
cgaagacaaaaccactggacaaaagaacaaaatcaccatgacaaacgacaagggccgactctccaaagaagaaattgaaaagatggttcaagaagcagagaaatacaaatccgaagatgaagaacataaaaagaaggtcgaggcaaagaatgcattggaaaactatgcatacaatatgaggaacacagttaaggacgaaaagattggtgccaaactcccagcaactgataaaaagaagatcgaagatgctattgaacaagccattcaatggctagacagcaaccaactcgccgaatccgatgaatttgaagacaagatgaaggagttggagagtatttgcaaccccatcattgctaagatgtaccagggtgccggcggtgacatgg

SEQ ID NO: 205329 - DNA, 108 bp, Gossypium hirsutum
attcttatgaagtgcttcctttctggaatgcctgatctgaaattgggcttgaatgataaaattgggcttgagaaagaatcacaacttaaatcccgtcctcctaaaagt

SEQ ID NO: 205330 - DNA, 382 bp, Gossypium hirsutum
ctcgtgccgatgaagaaagctctccctgctaacgctaagatcgctaaagatgctaaggagaccgtacaagagtgcgtttcggagttcatcagcttcatcactagcgaagccagcgacaagtgccagaaggagaagaggaagacaattaacggggacgatcttctctgggctatggcaactttagggtttgaagattacatcgatccgcttaagatttaccttaccaaatatagagagatggagggtgatacaaagggttcggttaaaggtggagatacatttgctaagaaagatgtccaaccaggtccaaatgcccagcttgttcatcaaggttcgttctcgcaaggtgtttattatgggaattctcaatctcagtcacaag

SEQ ID NO: 205331 - DNA, 334 bp, Gossypium hirsutum
aggtaaatatgcaaattccattcaaagagaaaccatagatagatgcaaccggtaaacaaagactagaaattatttaaaaggccatcaaagggcacaatccttcacgtaaaaccagaaaacccacattaaggaagaccttaaggcttagaacccaccacgaagacgaagaacaaggtgaagagtggactccttttgaatattgtaatcagccaaagtccttccatcttccagctgtttcccagcaaaaatcaacctttgctgatctggtggaattccttctttgtcctgaatcttcgctttcacgttatcaatcgtatccgagctctccactttt

SEQ ID NO: 205332 - DNA, 236 bp, Gossypium hirsutum
gtgctgcagcttgtgtacgacattcagcaagacgtagaccgcggatgagccagatagtccgtgctttagaaggagatgcatcattgtcatcttaacgaaggaatgagacccggccagagcggtgtctacagctcttatggaagctcagactacgacaccagccaatacaatgaagatatgaaaaagttcaggaagatggcattgggtacgcaagaattcggcgctagtagcgagta

SEQ ID NO: 205333 - DNA, 384 bp, Gossypium hirsutum
tgcatggttacttcagtgcttcaataaagttacctgctgattatactgctggagttgtggttgctttctatatgtcaaatggtgatatgttcgagaagaaccacgatgaaatagattttgagttcttgggtaacatcagaggcaaagattggaggattcagaccaatatttacggcaatggaagcaccagtgttggcagagaagaaagatacaatctttggttcgaccctgctgatgatttccatcagtacactattctctggactgattctcaaatcatattttatatagacaacatccccattagagagtttaaaagaacagctgcaatgggtggggactttccctctaagccgatgtcgttgtatgctacaatatgggatg

SEQ ID NO: 205334 - DNA, 378 bp, Gossypium hirsutum
ccctcttctcttagcttcaaccctttttcatcttcattcgcttctttctcaacgcgacaaaacaagggttttaggagaacatctctggtagtagcttccatggctgatctcagcactgtgctcgtcactggagccgctggcagaacaggtcagatagtttacaagaagctgaaagagaggtcggatcagtttgtcgtgagaggactcgttagaactccagaaagcaaggagacaatcggtggagcagatgatgtgtttgttggggatatcagggataccacctctctggttcctgccatgcaaggaattgatgcactcataattcttactagtgctgttcctagaatgaaacctgggtttgatccgacgaaaggcgga

SEQ ID NO: 205335 - DNA, 390 bp, Gossypium hirsutum
ctcaaaccaaaaagttccaccctttagtccaagcgttctagcgaaagcatccagctttttagcagtttcaagtctcccagctgtagtcatcacaggtatacagaaaggatgggatcgttccaagcgcctcctggaatgagaagctctgcattgttagaaacttcatgtggatatttacttcaagagttgcagatgatatggaatgaagttggagaagatcagtcagaaagagagaaggttctactagaattagaacaggaatgtctggaggtctaccggagaaaagttgaccgagcaaatatgtcaagagctcgcctgcatcaggaactcgccgaatctgaagctgaattcactcaccttcttttgtcccttggtgaacgttcccttccc

SEQ ID NO: 205336 - DNA, 333 bp, Gossypium hirsutum
  unsure (1)..(333): unsure at all n locations
ggaaggcgcagtagagttgatggttccagggaattttcccatcggttgctcagctgtttacttgacattgtttgaaagccctaaaaaggatgattatgaccgtcatggttgcttgaaggcatttaatggttttgcgaagtatcataataatcagcttaaacaagccctggataccttgagacaaaagtatccccatgtcaggattttttacgctgattactacggngccgccatgcgttacgttcatgccccactacatcacgggttttatggtgggactctaaaagcatgctgtggagggggtggtccatataatttcaacatctcaccaag

SEQ ID NO: 205337 - DNA, 340 bp, Gossypium hirsutum
ctatactaaggtctaacgaacttaatcaacacgctgcagaaggattggagtagggattatagaaatgaggctttgaagccactgagaatgggctctttgaattgccatcggcaacgccgccaattctttcgcaagatgggcacatggtgagagtggccgccggcatgtgcatgtaaaaaggttgagccgccagtttcagtgccttgagttcttgtagttccttttgcagtctcctgttctcatctgtcagtgtctcacaacacttcttcaagaactcacaatccacctcagtttgcttaagctttgtccttgctctcctgttctggaaccatactttaac

SEQ ID NO: 205338 - DNA, 293 bp, Gossypium hirsutum
ggttttgagaaaatcaattcaaaacgactggtttcactctttttttcctgccttgctgatctttttgggggtcttccacaaaaagaaacaaaaaattttgggtgatctgtgttgaaaaagaaataaaatatggcgacattccaaggaactcaacaaaaatgcaatgcatgcaacaagactgtttatctggtggataagttgacggctgataataaggtttttcataaggcttgcttccgttgccaccattgcaagggtaccctcaagcttagcaactacaactcatttgaggg

SEQ ID NO: 205339 - DNA, 324 bp, Gossypium hirsutum
ctcccattacttggtttggccactttgatgggaaaaaggaaaaaagaggcagaaatttagagaagttgattcaaacagaaagggtgatggaactgagcattcagaaaatagaagccttgattaggctaaatacgatagtgatgttggttttaacagcttgtttaattgggttggattctcaaacaaaggtcatcttctacgttcaaaagaaagcttctttcaaggatttgcgtgctcttgttggattgctgtatatcacttcattggctgctgcttataatctacttcaactatgctgttcttcattctcagcttcttacaaag

SEQ ID NO: 205340 - DNA, 380 bp, Gossypium hirsutum
ccacaattagttgcaaaatacgaaaagcaggacgaggctgagtatgaaacgccggagtacaaacatccaaagtgtgaccaagagtacccaaaacatgagaagcctgaaattcacacggaggaaaaacaaaaaccgtgctagcaacatgaacagtaccaccagtcacacaaatcgaaagatcacgaagagtaccagaaagaaaaacccgagctccccaaattggaaatgcctacagagcccgagaaacacacagtcgaatatgcgaatatacccgcgtgcaaggcaaaccaagatgagggtaaggaacatatacatgaaggagaccacgaatcacgcgaatctgaagagcacgaaaagtacgagtaagaacaacccgagtt

SEQ ID NO: 205341 - DNA, 107 bp, Gossypium hirsutum
  unsure (1)..(107): unsure at all n locations
ctttcttccttttccaacttttactcattantgtctcagtaatgatcggtagccacaccgtctacacaggggttagacttttattcgagacacacacacccttatgg

SEQ ID NO: 205342 - DNA, 292 bp, Gossypium hirsutum
tgtccttggtagaagccaatgaagtaaagatccagaggcccacaataattggacaaacagtattgtcaatggaagtagacaggcaacgaaacatgctccgcgctgctgaggctatggctgaggctagatctgctgctgaacatggtgatctaactgctgctgtctcactactagaaagttgccgcaaggctttatccgaaaccatttttgcacaagctggtgacaggttatgcattgcactatgtgctgaactaaaggagatgcacgacaggatggccaaccgtccagttta

SEQ ID NO: 205343 - DNA, 381 bp, Gossypium hirsutum
  unsure (1)..(381): unsure at all n locations
tctcattgctctcttttgatcgtcgncgtcgttattattaattaaaatccctttttttaagaccatacgaatttgcctagatttaggccctgcaattgactcttttttttttctctcttgttgtttgttttttgattgtttcaatcaaaagtaagatacggttttacgaactttccgtgctgcatccaccgatgccagataatcggcaaattcagaacaatgttgtttcgaatcaatccgctgatagcattgaagaagcaattttgcgtttgaaaattaatgataataatcaagaggtgggtgtttctaaatcagtctcgtatcctgatcgtcctggtgaaccggattgttcttattatttaaggaccggttcatgtggtt

SEQ ID NO: 205344 - DNA, 261 bp, Gossypium hirsutum
gctgatttgttcatcagcttgattgaatctgacgcctattatcgtcgccggcaccgatctgttgctttaaaaagaaatggagaatttaatttctcttgtgaacaagattcaaagagcttgcaccgctcttggtgaccatggagaagcaagtgcattgccgactctttgggactcattacctgcgattgccgtcgtcggcggtcagagttcaaggaaatcttcggtgctcgaaagcattgtcggcaaagattttttaccccg

SEQ ID NO: 205345 - DNA, 310 bp, Gossypium hirsutum
  unsure (1)..(310): unsure at all n locations
ggtntttttttttttttttttttttttttttaaagtaaagtgcacaacataaacttcattaaaacataaatcaagccaagtgatgttaacattagatacaacattcaaaattaatttcactagaacaaacgatataacataaactataaccattcagaatctctatgcatgcaaagagattcagcattgctacatggatgaatgcacacacacatttcccactcaccatcttttttattaacaatataattacgatatcccatgaaattactgcatgatgatggcacatgcaccaatgtcatatggctta

SEQ ID NO: 205346 - DNA, 309 bp, Gossypium hirsutum
cgtttctttattttttcagtggatatgaagcagtgacgaaatcaagatcgtgtgatgcttataaccttacatatcctattacaaatggtcaagtttataactgggatgctatggaacggtatttggcagcaatgtatattcaattattttacggtgtgatcctgaggatcattactttttgttgactgagagtcctcttactgctcctgagaatcgagaatatacaggtgaaattatgtttgagacgactaatgttccggggctttatattgctgtgaattccgtgcttgctttagcagctgtgtacac

SEQ ID NO: 205347 - DNA, 375 bp, Gossypium hirsutum
tagcaaccatagccatggcttcctcaccaaaactcttctctatgtctatcctcttcctttttgccctcttctccatgcaaatccatgctagagagtacttcagcaaattcccaagagttaacatcaatgagaaagagacaacaaccagagagcaaaagcacgagaccttcgttccccagaccacccaaaagccagaagaacaagagccaaggttcattcctgaaacccaaaatggttatggcctttacggccacgagtcaggctcaggctcaggctcaggctcaggctcaagccggcccagtttcaccaccaaagaaacctatgaaccctatgtcacccctgttagattccaccctgatgagccctataacagca

SEQ ID NO: 205348 - DNA, 399 bp, Gossypium hirsutum
tagattccaaagctttagtgaaatcggaaaactcaccggaaattcaccatgtgtacgttggagaaacgcggcaacctctttattttaacgtttaccggcgaagaccagcaccggtttaatcccaatgtcatcggctcccttctcagccttctctctcaggtcaaggctgaagccactcgtggctcagctcttattacccaagcccaaggtaagttcttctccaacggcttcgatctcgactgggctcaagccgccggatctgaacaaggagccgcggaacggttacaccacatggtggatttgtttaggcccgtcatcgcggctcttctgtccctcccgatgcccaccgtcgccgccatcaccggtcacgccgctgccggtggatttgccctcgcgttg

SEQ ID NO: 205349 - DNA, 412 bp, Gossypium hirsutum
  unsure (1)..(412): unsure at all n locations
aaccacatgaatccattatacctgttgagcattcacaagttcccttaacaatttactttcaaatacacccaacaaaaatatcaagtttcaacccaaacacaaataaaacataaaacagcataacatacagtaaaccatttcaagtctttaacaagcttcaaagaatagaagcttgcataacacggaagcaacaggtaataaaagacatcgtaagcacactcaatcacacgtacttcttagtactcatcatcttcaccctcatcaccctcagctgactcagcaccaacttcttcataatccttctccaatgcagcaagatcctcacgagcctctgagaattctncttcttccataccctcaccaacataccagtgaacgaaggcacgtttggcgtacataagatcaaacttat

SEQ ID NO: 205350 - DNA, 284 bp, Gossypium hirsutum
gccaaacttgcaaaagattttcaagcagttttgaaagagtttcagaaggctcaacggcttgcagctgaaagagaaacttcatattccccttttgttccccagtcagctcttcctgcaagctacacggcaggggagatggatgcaagttctgataaaagtgctgaacagcgagcccttcttgttgaaagaagacaagaagttgtgctgctggataatgagattgcatttaatgaggctatcatttgacaaagagaacaagggattcaagaaattcaaccgccaat

SEQ ID NO: 205351 - DNA, 393 bp, Gossypium hirsutum
gcagtgcacctactgccaaggctcaggttgttggttggcctccaataagatcatttaggactaaaacactgaccacttcttcaaagaacaatgatgaagttgatggaaaaccgggacctggtactctttttgtcaaggtcagtatggatggagctccttatctgaggaaggtagatttgagaatgtattcaacttaccaggaactgtcttctgctcttgagaagatgttcagctgtttcacccttggtcaatgtggggctcatggtactcctgggaaggaaatcttgagtgagagcaagttgaaggatcttttgcatggatcggaatatgtgcttacatatgaagataaagatggtgactggatgctggttggggatgttccatgggagatgt

SEQ ID NO: 205352 - DNA, 358 bp, Gossypium hirsutum
ccttaaccatagctatccgctaacgaaccaaaaggagagagatcgataatcactgttccttgttagccagtttatacaggcagattcatgctggctagtgctacactacacccgcaccagtgatcatcatggatgaagagacaacatccacttagtacaagcccctgatctttgtttcccataccacccaaatgctacaagaacaagagccatggttcttttattgaacccaaaaaagatctggactcttctgacactattcatgttttagctcttgcttatgctcatgcgtaaactgatctatttttatcaccaatgaaacctatgaaccctatgttagcccttttagatttcaccc

SEQ ID NO: 205353 - DNA, 383 bp, Gossypium hirsutum
gggtactgattatcttctgaagaccttcaacaatactggggataccattgacaggattgcagcgcaggtagggataggagatacatctggaggagtttcagccccaaatgatcattattgctggatgcgccctgaggacattgattacccccgtcctgtatatgaatgtcatagttgctccgatcttgctgctgaaatggctgctgctttggcttcggcttccatcgttttcaaagacaacaaagcatactctcaaaagcttgttcatggtgcccgaacactctttaagtttgctagggatcaaaaaggcagatatagtgctggtggttctgaccctgccctcttttataattcctcaagttactgggatgagtttgtttggg

SEQ ID NO: 205354 - DNA, 341 bp, Gossypium hirsutum
  unsure (1)..(341): unsure at all n locations
ggcaccaacttttcggggccnganggaccgngggagggggaggnnnnnnaaacagcaagggacnangngaaanngangaagncaannnnngacnncgagcccanccgcaagcngcnnnaaacnccgaagnnaacaancngcnangangcacnncanggnggngcnggagcnnangcaaancgcancnnngnggaagagcnnggggcacaacaaagcncacnnnngaacngcacacccaaggaggacnnnggcggaggacaaccggancccaancngacnaaagccaaggagnnggnngagcgcangggaaagggaaaaacgaacncnggnngggaaccacc

SEQ ID NO: 205355 - DNA, 400 bp, Gossypium hirsutum
ccctaaagagacaatgagaaagctgctagcctttgcctttcttttcttcttcttttgggataaaacattagctcaaatagctccggcgccgccgttaaaggtggacaacatcacttccatcctcgaaaaaggtggccaattcaccactttcatcaagctattgaaagccacacaggtggctgatcaactaaacaaccagctaagcacaccggaccctaacgacgggataacggtgtttgcaccgagtgacaacgcgttctccggactcaaacccgggacgttaaactcactttccgaccaagagaagcttcagttggttcagttccatatactcccgacgttaatgtcgacgtcgcagtttcaaaccgcgagtaaccctttgagaacccaagctggggat

SEQ ID NO: 205356 - DNA, 393 bp, Gossypium hirsutum
aagaccatcaacagggagaatgtctcgacatgaatgaggtatccaacttcataacatcccctccaacgccaaattcagccttggatgatcctccttacaagatcaacaaccagggaattcaacgacccattaataacaaaacagttcctgcaactgctctgcattttggtaacctgacagaatacgatgttcataacctgtatggtttactggaatgcaaagcaactcatgcggcattgaccaatctgaccggcaaacgcccatttatacttagcagatcaacgtttgtaagctctgggaaatatacagcacactggactggtgacaatgcagccacctgggaggatttggcttatacaattccatccattttgaacttcggactctttggaa

SEQ ID NO: 205357 - DNA, 393 bp, Gossypium hirsutum
gtcgactgcgggacggccataacacggttgcaagcggaggcttacaacgcactccgcgacgcgttcgtgaaattatcgccggacttgccgaccaccggtggggttgcgttgttcgacacgtgctacgacttgtcttcaagaaccagtgttagggttccgtcggtggcgtttcatttcagcggcggaatgtcactggacttgccggcgaaaaattatttgataccggtggactcatcgggaacgtattgcttggcgtttgcccccacgacgtcgtctttgtctataattgggaacgtacaacagcaagggacacgtgtgagcttcgatttggctaataataaggtcgggttctctcctcataaatgttaagacagtaaataaatagcttattgg

SEQ ID NO: 205358 - DNA, 392 bp, Gossypium hirsutum
ccgaaatgaagaaaatgtttgagctgatcgagaagtacaacttgaacggccaattcagatggatatcatctcaaatgaacagaatccgaaatggtgaactttaccgatacatttgcgacacgaaaggtgcctttgtacagcctgcattgtatgaagcctttggattgacagttgtggaggcaatgacttgcggtttgccaacattcgcaacctgcaacggtggaccagccgagattattgtccatgggaaatctggtttcaacattgatccttaccatggtgatcaagctgctgacatactggtcgatttctttgaaaagtgtaagaaagatccatctcactgggataagatctcccaaggaggcttgaaacgtatcgaggagaagtataca

SEQ ID NO: 205359 - DNA, 399 bp, Gossypium hirsutum
caaaagcttttttctgaaatctaccctcttttgatcaaagcaaaaacaaccagaattcaatggggaagaaagctgtgttgattggaatcaactatccaggcacaaaggctgaactgaaaggctgcataaacgatgtgaagagaatgtacaaatgccttatagaacgctatggattctctgaagaagacatcacggtattgatagacaccgataattcttatgatcagcccacagggaagaacatcagaagggctttgaatgatcttgtgagatcggctgagcctggggattttctgtttgtgcactacagtggccatgggactaggcttcctgctgagactggggacgatgatgatactggctacgatgagtgcattgtcccctgcgatatgaatctca

SEQ ID NO: 205360 - DNA, 387 bp, Gossypium hirsutum
cacacacttttttgtgacatctaccctgcttcgatcaaaggacagtcaaccataattcattggggatgaaagctgagttgataggaatcaactacccacgcacaaaggctgcactgtaaggctgcatctacgaagtggagagcatgtacacatgctttataaaacgcttggggtcctacgaggaagacatcacagtatcgatcgacaccgctcattctgacgatcacgaccagatggcagaacatcggaccggtgactaatgatcttgcgagatcaaacgagcctcgggaaattcagtttgcgcactacagaagccataggactaggatttctatttacactcgagacaatgtgatactggcttctataaacgcatagtaccctgtg

SEQ ID NO: 205361 - DNA, 333 bp, Gossypium hirsutum
atcttatattgctctttatgtgccgttgctcagcaacctgttagtgtgggaattgatgggtccaacattgattttcaactttacactgttggaatttatgatgggagctgctcggatgatccacatgacattgatcatgctgttttaatagatggttatggttcaaatggcagaaaaaagtattggatagtgaataattcatggggaacatgttgagcgatcgatggatattttctatctaaagagagacacagatttaccatatagcgtttgtgctggcaatgccatggctttttattcaactaaagaatgctcttcaccatcctcttatac

SEQ ID NO: 205362 - DNA, 379 bp, Gossypium hirsutum
ccgccatgttgagaagacctgcaaggtgttatggtcagataaaaaacaaaccttacccaaagtcacgttattgtcgtggtgttcctgatcccaagattaggatttatgatgtgggaatgaaaaagaagggtgtggatgagttccctttctgtgttcacttggactcttgggagaaggaaaatgtctctagtgaagctctggaagctgctcgtattgcttgcaacaagtatatggccaagtatgctgggaaggatgccttccacctgcgagtccgtgttcacccattccatgtcttgcgtatcaacaaaatgcttttatttgctggagctgataagctccaaactggtatgcgaggtgcttttggcaagcctcatggaac

SEQ ID NO: 205363 - DNA, 403 bp, Gossypium hirsutum
agaaacttggtgtgaaacaatggcgtcctcggatcttattggcaagcttgagactgatgtcgagatcgatatttctcccgaaaagctccaccatatgtggtgccacaggccgtaccatgttcaccacactagctccgaaaaagtacaaggatgcgatttacatgaaggtgaatttggaactcccggcgtcgttatctgctggagatatgtgcatgatggaaaggctaaaactgcaaagcatgtagttgaagttatggaccatgagaaaaagtcaataactttcaaaatgcttgaaggagatctgatggaggaatacaaaagcttcgtgattacaatccaaacttcccccaagagcgactgtaaaggcagtatagtgcactggactctggattatgaaaagctg

SEQ ID NO: 205364 - DNA, 380 bp, Gossypium hirsutum
atttggtttaccatggctcataactttcgtcatcctttgttccttttccaacttttactcattactgtctcactaatgatcggtagccacaccgtctcgtcagcggctcgacatttattccacacacaaacaacctcatcagagctgccacaattggcttcaaaatacgaaaagcacgaagagtctgaatacaaacagccaaaatatcatgaagagtacccaaaacatgagaagcctgaaatgtacaaggaggaaaaacaaaaaccctgcaaacatcatgaagagtaccacgagtcacgcgaatcgaaggagcacgaagagttcgataaagaaaaacccgatttccccatatgggaaaagcctaaagagcacgagaaaca

SEQ ID NO: 205365 - DNA, 340 bp, Gossypium hirsutum
gttttccttgtaggatctgaaaaagaatgtcggctaatgggactgacaactcaacttctaagaagcctccaagtccttttcctttgagattttccaagttttttcagtccaacatgagaattcttgttactggtggagctggattcattggctcccatttagtggataaattgatggagaatgaaaagaatgaggttattgtcgtcgacaactactttaccggcacaaaagacaatctcaagaaatggattggacatcccagattcgagcttattcgtcacgatgtcaccgagccgttgctcattgaggttgatcaaatctaccattttgcttgcccggc

SEQ ID NO: 205366 - DNA, 390 bp, Gossypium hirsutum
agacctgatacgcttttttacaactgcttgatccatgcgctggggcgagcaggccaagttgaagatgctattaaggtttttgaggtagagatgccgaagacaggtgtttcccccaatacatcgacgtataattgcatgattgccatgctttgtcatcatgctcaacaacagaaggccctatctcttcttcaggacatggggaatttgaaaatttgcaagcctgaagttcagacatattaccccttgctgaagtcatgctttaaaactgggaagatagataacctgttgagcaaactattgaatgatatggttaataagcatcatctaagtcttgatagttctgcctactcactattgattcatggactttgtagagcaagtagaagtgag

SEQ ID NO: 205367 - DNA, 392 bp, Gossypium hirsutum
ttttctttctatttggttaaccatggctcataactttcggcatcctttctttcttttccaacttttactcattactgtctcactaatgatcggtagtcacaccgtctcgtcagcggcttgacatttattccagacacaaacaacctcatcagagctgtcacaattggcttcaaaatacgaaaagcacgaagagtctgaatacaaacagtcaaaatatcacgaagagtacccaaaacatgagaagcctgaaatgcacaaggaggaaaaacaaaaaccctgcaaacatcatgaagagtaccacgagtcacgcgaatcgaaggagcacgaagagtacgataaagaaaaacccgatttccccaaatgggaaaagcctaaagagcacgagaaacacg

SEQ ID NO: 205368 - DNA, 305 bp, Gossypium hirsutum
aggtaaatatgcaaattccattcaaagagaaaccatacatagatgcaaccggtaaacaaagactagaaattatttaaaaggccatcaaagggcacaatccttcacgtaaaaccagaaaacccacattaaggaagaccttaaggcttagaacccaccacgaagactaataacaaggtgaagagtggtcttcttttgaatattgtaataaaccaaagtcctttcatctttcagctgtttcccagcaaaaaacaacctttgctgatctggtggaattacttttttgtcctgaatcttcgctttcacgt

SEQ ID NO: 205369 - DNA, 396 bp, Gossypium hirsutum
caaagatcaacttagccaaaggccggtagctcatttatcaactgagcgaatacttatttgtaagggctcaactaattcaaagcacatacgaaacatacctcaatgttgggatgtttcaagcgtattaactgaaatttttacagcaagatcattcccaaatcacgtaccttcggaatttaactggatatagctactcgttcaaatgccttcgggacatatcccggttatagtgactctcacaaatgccttctggacttaacccggttatatgtaactcgcacaaatgccttctggacttaacccggatttagtaactcgcaccaatgccttcgggcttagcccggaattagtaactcacacaaatgccttcggatattagtccggatatggtcactt

SEQ ID NO: 205370 - DNA, 371 bp, Gossypium hirsutum
ttttccttttttattattacagatcatttatgggcataggtcacaagcttggagtaaatcatgaccctatttatctttgcagggagaatagagaaagaatatcccatggaaggctacaagaatgcttttaatcacatagcagtgttggctttcccttttctcacccaatgctgtctctcttctcaacattatccgtaactatcagacgcttgccccgacaccatgtttttcttccttagcacccaacaatcaaacaacttaacttttcccaaaaaccttgattaaattaagccttttaatgtatgggatggattacctgaggggtttagctttagggggaaatctcatgagcccgtctattatcttcttaa

SEQ ID NO: 205371 - DNA, 383 bp, Gossypium hirsutum
ctacatgctactcttgtgattcttgttggtcaattgagtaaagaaactggtgtgctcgctctaaacagaacccttgccaagccttgtttatcagatattgagcaagtcttggctggccagggtgctggtgacggtctcaatcaagtttgttcgattcattcatcaaaccttactgaagcatcttgtcccgtaaaagatgttgatgaatttgagaacatggtaaactcttctgagcttcttgcttcatgtgaaaagattgatcctgttaaagaatgttgtgaccaagtttgtcaaggtgcaatatctgatgctgcaacaagacttgcattgaaagcttctgatcctctaagcatggatggacctcatgttttacctcagcacac

SEQ ID NO: 205372 - DNA, 387 bp, Gossypium hirsutum
tctgcatctgcttttatttctttacagctcaaaattaataattataaatcaaatcaaatcaaatctctttcttccttatcctttcgatctgctaatcaagtcatttcaagatttttttttctgaacaagaaaaatagtaggacaatgccgtccttggaggatgagctgtttccgtcgacgccagggaagttcaaggtcgacagagcacacaatatgaaccgtcaattccatcgttgcttcgcttcaaccagcaccatgtttttatgggctcttttcttgatcgcattgacggcgtcgtatttgagcttccagagtttcgttgattctggtagccgatatttcagtgcttcatggggtggtatccaatgggaaaaacaagtccgtaac

SEQ ID NO: 205373 - DNA, 293 bp, Gossypium hirsutum
cactttggcttttttcagtcgataagaagatcaacgtgaggggaggattaactcgcaacctctcctggttggcagtgtgaggagaatgatcagcacgagcaagagatggttgccacagtgtgcatgatatgccacatgttggtgatgctttgcaagtcatcacctgcatgccctaactgcaaattcatgcaccccccagaccaaggcccttcgaaactatttaagcacgggcttatcctgttgtgctagtaaggacaatcaagttttttatgtttaggataacaaattcaccc

SEQ ID NO: 205374 - DNA, 385 bp, Gossypium hirsutum
ggcgttttatggatgtgcagactaggcttatcactccagtctgccctcactatgcggagtttgtttggagagagcttctgaagaaggatggctttgtgataaaagctggctggccatcagctggttctccagatcttaaactcaagagtgccaataagtatctgcaggattccattgtgttgatgagaaagctgctgaataagcagattttgggctcaaagaaatctaataagaaaggggctccagttacatcactatctgaggacaagttaaaaggcctaatctatgtgaatgagaaattcgaaggatggcaagcagagtgtttgcagattctccaaagcaagtttgacagtaatgcccgaacttttgcatcagatggggagat

SEQ ID NO: 205375 - DNA, 160 bp, Gossypium hirsutum
tttgtttttgtaagggagtccaccgtctccgaccctgttgagggaaaacttgtcgacaacttcaaaaacttaagggtccatttgttgttaggggatatgttccaccattagagtttggtcaaaacaaaaaaacaagatgatgtggtgattttcgttgtgg

SEQ ID NO: 205376 - DNA, 378 bp, Gossypium hirsutum
cgaagctgctgctcctagaattttgcatagagatgtaaaatcgacgaatattcttcttgataagaactgtagagcaaaaattactgatcttggtatggccaaacgtttaagagctgatggacttcccagctgttcgagttctccagcgagaatgcagggaacctttggctattttgccccagaatatgcaattgttggaaaagcctcacctatgtctgatgtttttagttttggtgtagttcttctggaactgatcactggtcggcaacccatccacaaatcaaacaataaagaagaaagtcttgtcatttgggctacccctcgtttacaagatagtaagcgagtgacctcggagttacctgacacacgtttgaaaag

SEQ ID NO: 205377 - DNA, 393 bp, Gossypium hirsutum
gatttggacgagatttgggttaccatgggtcataactttcgtcatcctttcttccttttccaacttttactcattactgtctcactaatgatcggtagccacaccgtctcgtcagcggctcgacatttattccacacacaaacaacctcatcagagctgccacaattggcttcaaaatacgaaaagcacgaagagtctgaatacaaacagccaaaatatcatgaagagtacccaaaacatgagaagcctgaaatgtacaaggaggaaaaacaaaaaccctgcaaacatcatgaagagtaccacgagtcacgcgaatcgaaggagcacgaagagtacgataaagaaaaacccgatttccccaaatgggaaaagcctaaagagcacgagaaacac

SEQ ID NO: 205378 - DNA, 400 bp, Gossypium hirsutum
gttcttttctttctatttgattaaccatggctcatagcattcgtcaccctttcttccttttccaacttttactcataagtgtctcactagtgaccggtagccacactgtttcggcagcggctcgacgtttattcgagacacaagcaacctcatcagagctcccacaattggcttcaaaatacgaaaagcacgaagagtctgaatacgaaaagccagaatacaaacagccaaagtatcacgaagagtactcaaaacttgagaagcctgaaatgcaaaaggaggaaaaacaaaaaccctgcaaacagcatgaagagtaccacgagtcacacgaatcaaaggagcaaaaagagtacgagaaagaaaatctcgagttccccaaatgggaaaagcctaaagagca

SEQ ID NO: 205379 - DNA, 350 bp, Gossypium hirsutum
tttcagttcacatcggtcaggccggtattcaggtcggaaatgcttgctgggaactttactgtctcgagcatggcattcagcctgatggccaaatgccaagtgataagactgttggtggaggagacgatgctttcaacacctttttcagcgaaactggtgccgggaagcacgtccctcgcgccatctttgttgatctggagcctactgttatcgatgaagtgaggactggtacgtaccgccagttattccaccctgagcaactcatcagtggcaaagaagatgctgccaacaatttcgctcgtggccattatacaattggcaaaagagatgttgatctctgcttggatcgt

SEQ ID NO: 205380 - DNA, 402 bp, Gossypium hirsutum
cttcctacttaaactcttattatgtctatcctcttactttttggcctcttcttcatgcagaatccatgctagagagtacttcatcaaattcccaagagttaacaccaatgagaaagagacaacaaccagagagcaagagcacgagaccttttgtttcccataccacccaaaagcctgaagagcaaaagccaaggttcattcctgaaacccaaaatggttatgggctttacggacactagtcaggctcatgctcaagcttaggctcaagccgggccagttttaccaccaatgaaacctttgtacccgatgttacccctgttagatttcaccctgttgaatcctttaacaacattcctcgattcttcaatgatgaattcactttctactacaacaagaatgcct

SEQ ID NO: 205381 - DNA, 390 bp, Gossypium hirsutum
ctcaaattttaagaaaggtttgctatgtccaattccctcaacgtttcgatggtattgatagacatgatcgatatgccaatcggaacacagttttctttgatattaacatgaaaggtctagatggtatacaaggccctgtatatgtcggcacggggtgtgttttcagaaggcaagctctttatggttatgaacctccaaagggacctaagcgcccgaaaatggtaacctgtggttgctgcccttgctttggacgccgcagaaaggacaaaaagcactcttaggatggtggaaatgcaaatggtctaagcctataaacaggcgaagatgacaaggagttattgttgtcccacatgaaacttgaaaagaaatttgtacaatcagcccattttt

SEQ ID NO: 205382 - DNA, 393 bp, Gossypium hirsutum
ggcgagcggaggaaaagtgtcatttaaagtcactcttacctctgatcctaagctccctttcaaagtgtttagcgtgcctgaagcagccccttttacagccgtcttgaaattcgcagccgaggaattcaaagtccctcctcaaaccagtgctatcatcaccaatgatggtgtgggaatcaatcctcagcaaagtgcaggaaatgtgttcctcaaacatggatcggaacttcgcctgattccccgtgacagggtgggagccttttgaaataacaaaaacttcatttgttatctctgagtgagaagactggttatgactttgtttggttatggatcctttgttttggtatgtatgtttaaacttttacttgagtgtagaacatgacggatagcaaa

SEQ ID NO: 205383 - DNA, 390 bp, Gossypium hirsutum
gttctcttttaaaatttccgtttgtttcctgagcaaatctcgggaaggaataccctttttttccccctgttgttaactcgttgtgattgtgaagctttctttaagagaatcctagttaactcgacgcgtttacccggaaagaggtgaagatgtcaactcctgcaaggaagagattgatgagggattttaagaggttgcagcaagatcctcctgcaggaattagtggtgcacctcaagataacaacattatgctttggaatgctgttatatttggacctgatgacaccccatgggatggaggtacgtttaagctgactcttcagtgtacggaggattatccaaataaaccaccaactgttcgtttagtatcccgaaatgtccatccaaata

SEQ ID NO: 205384 - DNA, 388 bp, Gossypium hirsutum
attttccactcattccaaaaccccttcaacaatggcgatgacgaagcaacatttgatcccgcttttcgctatctcatttctcttgtttttccagctccattgctcaacaacttcagcccaggctcccgctcagtctcccgcaccacctgtgtcaccagacgtcaccaaaattctgcaaaaagccggccaatactccgtcttcgttcgtcttctcaaatacacccaagtcttcgaccgtctcattggcgagctcaaagacacagatgatgggaagaccatttttgcccccactgataaggctttctccgccctcaaatctggtgccttgaattcactcaacgatgaacaaagggttcaactggtgctatttcacgtcatccccagttat

SEQ ID NO: 205385 - DNA, 344 bp, Gossypium hirsutum
gttaaattaacaatacatgcaatatcattaaagtaaaatacacaacataaacttcattaaaacataaatcaagccaagtgatgttaacattacatacaacattcaaaattaatttcactagaacaaacgatttaacataaactataaccattcagaatctctatgcatgcaaagagattcagcattgctacatggatgaatgcacacacacattttccactcaccatcttttttattaacaatataattacaatatcccatgaaattactgcatgatgatggcacatgcaccagtgtcatatggcttaaggcttaatgctcgagccagactgagtaaacatgga

SEQ ID NO: 205386 - DNA, 310 bp, Gossypium hirsutum
ttcttgttaagtacactgtaaaagatggccgatactgaggagattcaaccccttgtctgtgataatggaactggaatggtgaaggctggttttgctggtgatgatgctcccagggcagtttttcccagtattgttggccgaccccgacacactggtgttatggttgggatgggtcagaaggatgcatatgtaggagatgaggcacaatctaaaagaggtatccttactttgaaatatcccattgagcacggtattgtcagcaactgggatgatatggaaaagatctggcatcatacattctacaatgagc

SEQ ID NO: 205387 - DNA, 270 bp, Gossypium hirsutum
  unsure (1)..(270): unsure at all n locations
gttttctgtgtgtgtcngttcgtattttttattcatcgggttgatatcgtcggaggctttctcgggcgtcggatcagaagttgatccgttgatcaggcaagtaacggacggtcaagatgatggagtggagacacagcctttgaccgctgagcatcacttctcgctgttcaaggctcggttcaagaaatcgtacggctcggaggaggagcatgattaccggttcaaggttttccgggcgaacttgagacgagcggcgcgtcatcagaagct

SEQ ID NO: 205388 - DNA, 251 bp, Gossypium hirsutum
ctaccatcttctatgctagggttggaagcggtgacaggagcgttagatgattttggctttgaggattatctgaatgatcctcgagattcggagactgttcggccattggacttgcaccacagcatggaagttcgtctcggcctctccaagggaccagtctgtcctagttttatgtgagattttcattgactacttcagtgttgtcccatgaaggaagtcacttgctgactttttattttcccttaatgaat

SEQ ID NO: 205389 - DNA, 329 bp, Gossypium hirsutum
  unsure (1)..(329): unsure at all n locations
attgtttcaacatgaaggtttgtaataaaaatttgtttctgtcagggttgctttgcattgctgttgcaggagttttgggtcaagctcctacttatcctgctacgtgtacgccggcgccacccacaccaccgggttctactcctcctccgacgactcaagcaccgtctacaccaaccgccactccggcactggtttatactcctcctgccacttgatgaccgcccccagagacagcttgtgcacccccagtttcaactcctgcacccagttctactcctcctgcaactccaccacctgcttntgctactcctgcaactccacctgcagct

SEQ ID NO: 205390 - DNA, 372 bp, Gossypium hirsutum
gaaaaacaccatctttcttgtcaattctgcaacctttggagtcacttaagaagaaatgggggaaaagagtttaatcgccaacgatgtcaccgcattgatcggttacacgccactggtatatctcaacaatgttgtacatggatgtgtggctaatattgctgccaagaaacacgcaatggaaccctgctccactgtcaaggacaggatcggatatagtatgattgcagatgcagatgagaaggctctcatcgtaccatgcgagagtgtgctgatccagccaactagtggcaataccactatagggtatgcattcatggcagctgctgatgctacagactcataattactgtgccttcttcaatgagtttagaa

SEQ ID NO: 205391 - DNA, 350 bp, Gossypium hirsutum
caaaaactctctgcatctggaccttctgaggatggaaatgttaggaaaaatgtgcagcgtcaacttgctacttcccttcagaacctatcaatggagctcccgaagaagcaatcaacttatttgaagcgcctcaggcagcaaacagagggccaggatggagttgatctacagatgaatataaatggaaataggtcttatgcagaaaatgatgacttggatgatatgatatttagtgagcatcagatggcaaagttaaaacaaaatgacgcactcacagttgagagggaaagggagattcaacatgttgcggagtcccgaaatgagcttgctcagattatgaaagatttgtc

SEQ ID NO: 205392 - DNA, 370 bp, Gossypium hirsutum
  unsure (1)..(370): unsure at all n locations
tacagtgcttatacgaggctgccggcgagctaggcatgttaaagagatcatcaaatggggtactgattatcttctgaagaccttcaacaatactgctgataccattgacaggattgcagcgcaggtagggataggagatacatctggaggagtttcagccccaaatgatcattattgctggatgcgccctgaggacattgattacccccgtcctgtatatgaatgtcatagttgctccgatcttgctgctgaaatggctgctgctttggcttcggcttccatcgttttcaaagacaacaaagcatactctcaaaagcttgtccatggtgcccgaacactctntaagtttgctagggatcaaaagagcaga

SEQ ID NO: 205393 - DNA, 300 bp, Gossypium hirsutum
ctccatggttcatctactcttttttgggtgtgggcattgtgctgtgctgcattagtctcattggttgcattgcagctgaatctattaatggctgttgcctttgtttttatacactcatcaaaattgttctcattttaatagaagcttctttggtggcatttattgcaattgatcgtcattgggagaaggacattccgtttgacccaactggagaacttgacagtcttcgctccttcatagaagacaatatcgttatatgtaaatggggttggccctcaatgtggtcataaatacaaggta

SEQ ID NO: 205394 - DNA, 365 bp, Gossypium hirsutum
ctgacccgaggcacggtcgttacctcacagcatcagccatgttccgaggcaagatgagcaccaaagaagtggatgaacaaatgatcaatgtccaaaacaagaactcttcctacttcgtcgaatggatcccaaacaacgtgaaatccagtgtctgcgacatcccacctagagggctatcaatggcatcaaccttcgtaggaaactcgacctccatccaggaaatgttcaggcgagttagcgaacaatttaccgctatgttcaggaggaaagctttcttgcattggtacaccggtgaaggtatggacgagatggagttcaccgaggctgagagcaacatgaacgatctcgtgtccgagtatcaacaa

SEQ ID NO: 205395 - DNA, 399 bp, Gossypium hirsutum
ggtcgaagagctgaaagccggatttaaaaattatggttcacagcttgcagagcctgaagtgcagatgctcattgaagctgttgatgctaatgggaagggaacattggactatggggaatttcttgctgtttctctccatctgcaaagaatggccaatgatgagcatcttcggaaggccttttcttactttgataaagatggcaatggttttattgagcccgatgagcttcgggatgcattgatggaggatggagcagatgattgtacaaatgttgcaaatgacatcttccaagaagtggacactgacaaggatgggcgcatcagctatgatgaatttgcagccatgatgaaaactggtacggattggagaaaggcatctcgacattactcgagagggag

SEQ ID NO: 205396 - DNA, 382 bp, Gossypium hirsutum
ctggaacagacacgagcggagcaaatcaaatgtggaccgtgcaaaagatgatgggaagcttagccatgggatgggctctgctcaatctgatggtttaaaacaaccgtgtgcctcacatttgatgccatagctctgtaatgtttcattcaattgcttatttcggccttgtttttctcgtattttatgggctgatgtctcatatgggacttttctactatacgtatatgagagcctacattactttaccattatattgtattctttgagacattattattatttttttaccttttgaggacactcttttttgtattagaaggaattcattgtttattttgtttggaatatgttggttgatttattcgattcatatatattatat

SEQ ID NO: 205397 - DNA, 230 bp, Gossypium hirsutum
agttgttgttcattctcagcaattgcagcagtggaaggcgtaaacaaaatcgtgtccggtgaactaatctctctatcggaacaagaactagtcgattgtgaccgatcctacgatgccggttgcaatggtggcctaatggactatgccttccaattcattatcgacaatggtggcattgacactgaaaaggattatccttaccttggcttcaataaccaatgtgatccaac

SEQ ID NO: 205398 - DNA, 369 bp, Gossypium hirsutum
gaaagatcaatgttgatctctcaaacaagctttgagaaaacttttggcttatcttcagtcttcattgaatctacactaatggagaatggaggagtggctgaatctgccaacccttccacactaatcaaggaagcaattcatgtcatcggctgtggctatgaggagaagactgcatgggggaaagagattggatggatatatggttcagtcactgaggatatcttaaccggcttcaaaatgcactgccgaggatggagatcgatttactgcatgcccttaaggccagcattcaaaggatctgcacccatcaatctgtctgatcgttgcaccaggttcttcgatgggctcttggatctgttgaaatttcct

SEQ ID NO: 205399 - DNA, 369 bp, Gossypium hirsutum
ccggttccttttccagtaaactgtgccacaaacagtagagactggtgtgagggcactgcttatcaagcccttaatgccatggaagctaaaagatatatgtgggttcgtatgaaccacgtgatatacgattactgcaccgacaagttccgttacccggttaccccaccggagtgcatgtccattatctgaaaatccaaacccaagtgacgtttcttgtcctattttacgtacatatgtacctccctttatacaaataatatagcccatgcaaaaattggggttttaatctgtaaaggggaaaaattaagtgtgcatttgcattataaatttgtgaaagtaaaaaagtcaaattccctattttggtcttgt

SEQ ID NO: 205400 - DNA, 316 bp, Gossypium hirsutum
tcaacattgatctttcatacaagctttgagaaaacttttggcttatcttcagtcttcattgaatctacactaatggagaatggaggagtggctgaatctgccaacccttccacactaatcaaggaagcaattcatgtcatcggctgtggctatgaggagaagactgcatgggggaaagagattggatggatatatggttcagtcactgaggatatcttaaccggcttcaaaatgcactgccgaggatggagatcgatttactgcatgcccttaaggccagcattcaaaggatctgcacccatcaatctgtctgatc

SEQ ID NO: 205401 - DNA, 387 bp, Gossypium hirsutum
tcgagttttttttttttttttttaatctaaacctactgatttcggcctctaatcccaatattttggatttctttttaaagaagaaggatacaaattgaaaatagtaggaagaggcgacagatgttgggaattctctcatgccgctcctctcactaaatctgtctcctaatttgcagatttcttcaaccaatcagctgccttttcgacctccttgttccaattggttgtggcagtgagaacaacaagagttgctgtttgtaggaggacaccaataatcataccccaccaaattcccggtactcctaaactagttttgaagccaagaacacatccaaatgggagaccaatattgtagtatgttgccaggtttacataagccacaattgc

SEQ ID NO: 205402 - DNA, 359 bp, Gossypium hirsutum
gattatttttttaagaaagcagagaaaaagctaaggcgggggggcttgtttagttctaaatacaaagacgccgccgatttatttgataaagctgctaattgcttcaagcttgccaaatcatgggacaaagctggatcaacttatgtaaagttggcgaattgccatttgaaatcagacagcaagcatgaaacagctcaagcttatgttgatgctgctcattgttataagaaaacagctacaaaggaggctatatcttgcttgcagcaagcagtgaacttgttttgtgatattggaaggctaagcatggctgcaaggcattataaggaaattgctgaattataccagtctgaacagaacat

SEQ ID NO: 205403 - DNA, 320 bp, Gossypium hirsutum
gcaactagaggaacacgttagagtattagaggaagctaaggcgagaaactcagagctccagtcattgcatgaaactttaacaagggattcagaacttaaactccgagaagtaatggaaaatttcaacagcaaggattctgaaacaaaatctctgttcgagaaattgaaaacatttgaagatcagataaaggtgtatgaagaacaagttgctcaagcagctggacagtctgcgtcttcaaaagaagaaatggatcagagcttacagaaattggcttctctagaaagcacaaatgaacaactcaaaagcaagatatcggagt

SEQ ID NO: 205404 - DNA, 399 bp, Gossypium hirsutum
gtcagtagtttctctgcctggtggtgatgtccctgctgacactgagtatgtccaagcagccgctttggtgagtcattcggctctttattcctcagagcttgtgaagcaacatccggttggaccagctatggttcatccagctgaaacggcaaagggaccaagttggactgatatctttgaacccggagtcaagcatgctttatttgtagggattggaattcaaatacttcagcagttctctggtataaacggcgttctatactacactccccaaattcttgagcaggcaggagtcggggttcttctttctaacttgggcctcagttcatcttctgcatcgctgcttatcagtggcattacaaccttgttgatgcttccaagtatagctgtcgccatgcg

SEQ ID NO: 205405 - DNA, 341 bp, Gossypium hirsutum
caggcaactagattaactcgttagagtattagaggaagctaaggcgagagactcacagctccagtcattgcatgaaactttaacaagggattcagaacttaaactccgagaagtaatggaaaatttcaacagcaaggattctgaaacaaaatctctgttcgagaaattgaaaacatttgaagatcacataaaggtgtatgaagaacaagttgctcaagcagctggacagtctgcgtcttcaaaagaagaaatggatcagagcttacataaattggcttctctataaagcacaaatgaacaactcaaaagcaagatatcggagttcgaaaataaaactcttc

SEQ ID NO: 205406 - DNA, 326 bp, Gossypium hirsutum
gtatctttgaagaagtttgtgattttattgatcacgttgggcaaacaggtggaagagtcttagttcattgctttgaagggaaaagtcggagtgccacagtagtgatcgcatacctgatgctacgaaagaacttaactttattagaagcatggaactccctcaagcgagctcatcgtcgggcccaaccaaatgatgggtttgcaaggatactattggatcttgatcggaaactgcatggaaaggtttcaatggaatggcatcagcgaaaaccaatgatgaaagtatgtccaatttgcgggaagaatgctggtttgagcagcagctca

SEQ ID NO: 205407 - DNA, 367 bp, Gossypium hirsutum
ttgttttggctggagctgaatatggaagtggtagctcccgagattgggctgcgaaaggtccaatgctattgggagtaaaagcagtaattgccaaaagttttgagagaatccatcgaagtaatttggtaggaatgggcatcattccactttgttttaagtctggggaggacgccgacacactaggtttaaccggtcatgagcgttataccatagatctcccaagcaaaataaccgatataagacccggtcaagatgtgactgtcacgacggataatgggaagtctttcacctgcactgtccgcttcgacactgaggttgaattggcctacttcaacaatggcggcatacttccatatgttattagaaa

SEQ ID NO: 205408 - DNA, 373 bp, Gossypium hirsutum
cttctcttcatattggttttttcccttagcactccacgagagagatccgaggagttggggaaaaccctcacacaaattctctctctaaatcttaaccgagaaggtctccaaaaaagactaccctttttgcccatttactctccttattcaacaaattcggcatcacatcccccaaaatagtcgcttttttatctcttgctctcttcatctgcttcaagtcatggctggtgtagcacccgaaggatcccaattcgatgctcgtcaatttgatcagaaaatgagtgatttgctccaaacggatggagatgatgttttcacttcttatgatgaagtttatgacagttttgatgcaatgggacttaaaagaaccttt

SEQ ID NO: 205409 - DNA, 334 bp, Gossypium hirsutum
aaccacgcctaataaccgctcggatttttctcagacgtgagaaaaatggggctgtctttcaccaagctattcagccggctatttgccaaaaaggagatgcgcatactgatggttgggcttgatgctgctggtaaaaccaccattctttacaagctgaagttgggagagattgtcactactattcccaccatcggtttcaatgttgagaccgttgaatacaagaacatcagcttcactgtttgggatgttggcggccaggacaagatccgaccattgtggagacactatttccaaaacacgcaaggacttattttcgtggttgatagcaatgatc

SEQ ID NO: 205410 - DNA, 325 bp, Gossypium hirsutum
aaacagcagagaaataaacggggggactccctcaagaaaaccacaacagatttcagatcctccttccaagctctgcagaaagtactgtgagcagaaagtggaaagcaacgatggggctgacatttacaaagctctttagccggctttttgccaagaaagagatgcgtattttaatggtgggtcttgatgcagctggtaaaaccaccattttgtacaagctcaagctcggcgaaatcgtcaccacaatccccaccattggattcaatgttgagactgtggaatacaagaacatcagcttcactgtttgggatgttggtggtcaaga

SEQ ID NO: 205411 - DNA, 366 bp, Gossypium hirsutum
ggcagcaaaacttcatgtggttatggagtggcaactgggggaccattggcttggggtctatgctacaacaaggaaatgagtcctagcaaattgtattgtgatgattactacaaatacacctacccttgcactcctggagtttcttaccatggccgtggtgccttgcctatctattggaactacaactatggagaaacaggcgacgcattgaaggtggacttattgaaccaccctgaatacatagaaaacaatgcaaccttagctttccaggcagcactctggagatggatgacaccggtgaagaaacaccaaccgtcggcccacgacgtgtttgtcggcagcttgaaaccgaccaagaacgacacg

SEQ ID NO: 205412 - DNA, 388 bp, Gossypium hirsutum
aaaaaaggcaataacagtcttaagcatgtatctataaatttaagcaaccaaaacaaacatccaaaaattcagaaactcagtcacagctaatttaaatccatataataaaaccttaattcaaaacaagcataaccatatcatttcactaagaacaacatcaaaacgaaccatgacagttcttcaacggtaactcttctggaaccttgccctggcacctcttccaccaaacttcttaggctcgcacctcctgggatcagcgaccagcaaagtcctatcgtacccgaccaaaatatccttaatctccttcttgctctgctcatcaacgtacttctgggtaaaagcgacaagggctttagcgatgctttgacggatagcgtagatctgagaa

SEQ ID NO: 205413 - DNA, 399 bp, Gossypium hirsutum
  unsure (1)..(399): unsure at all n locations
tcttgagcaaagttacagtcgtcctcatcgaacaactatggcagccatcaaagtccacggaagccctctgtccactgctacacaaagggttcttgcatgcctttacgagaaaggcactgattttcagtttgttcccataaacatggctgctggtgaacataaatccgaaaactacctttccctcaatccattcggtcaagttccagcttttgaagacggggacttgaagctcttcgagtcaagagcagtcacccattacattgctcatgaatacagcgacaaggggacccaactcttaattcctggctctaacaaggatatggctgtcttacaattatggaaggaagtggaagcccaccagttcgattctccatgttcaaaaatagcctgngaggcgtt

SEQ ID NO: 205414 - DNA, 401 bp, Gossypium hirsutum
aggacataattcccctcttggagaagactactcagttaagagctccattgcttataattgctgaggatgttaccggagaggctcttgctacacttgtagtgaacaaactccgaggtatccttaatgttgcagccattaaagctccgagtttcggcgaaagaagaaaagctgtccttcaagatattgccattcttactggtgccgagttccaagcaaatgatctgggtttgttaatcgagaacacctctgttgagcagcttggtatagccaggaaagttatcatcaccaaggattcaacccaaataattgctgatgccgcttcgaaggatgaaatacaagctagggtgcaacaattaaagaaagaactagccgagacagattctgtttacgacacagaaaaa

SEQ ID NO: 205415 - DNA, 266 bp, Gossypium hirsutum
tgttatgccaataccccatgccttagctacacaccgttttacaggaaccaagtggcttcaaacccagttttcaaagagttctactacgtaactctacgtaaaattctggtgggcgataagcacgtcaaagttccgtacagttatttggtcccaggatcagacggtaacggtggcaccatagtggactcgggatcaacattcacttttatggagagaccaatgttcgaggtagtctcgaaagagttcgagaaacaaatgggaaatta

SEQ ID NO: 205416 - DNA, 363 bp, Gossypium hirsutum
gattcagtagactggagagatcatggagctgttagtccggtcaaggatcaaggatcttgtggaagttgttgggcattctcaacaattgcaacagtggaaggcataaacaaaatcgtgtccggtgaactagtctctctatcggaacaagaactagtcgactgtgaccgatcctatgatgccggttgcaatggtggcctaatggactatgccttccaattcattatggacaatggtggcattgacactgaaaaggattatccttaccttggcttcaataaccaatgtgatccaacaaaaaaaaacgctaaggttgttagcattgatgggtatgaagatgttccaaataacgagaatgctttaaaa

SEQ ID NO: 205417 - DNA, 279 bp, Gossypium hirsutum
gagctcagacctttcttcagcattctatggattctacctgcgggggtgttgggatcatccaagctgaacccaaaggtcaatacatcagtctcgaacagcaacagtacgagatccttaacggacttatcattcttatcggcttcagctctcttccttagctgttgcattattccattatcgggattaatctccattgttttgttgctggacatgtaagaactcatgctattatctctcagagcttgcgctttcatgatcctttccatgttagcagtccat

SEQ ID NO: 205418 - DNA, 403 bp, Gossypium hirsutum
attacaagaacaagtaaattctatagcagccctaactttcaacacatttgggacactgcaacgagatgctccacccgttaggctctcccctaattacccagaacccccttccaatcccaccgaggactctgccaatttcgccgatcaacctaagctcatgagtgctgctcttgttaaggctgctaaacagttcgatgcattggttgctgcacttccaccttcagaaggcggtgaagaagctcaacttagaaggattgctgaactccaagctgaaaatgatgctgtaggccaagaacttcagaaacaactggaggctgctgagaaggaactgaaacaggttcaggagttattcagtcaagcagcagataattgtctcaacctgaagaaaccagattgaattcat

SEQ ID NO: 205419 - DNA, 372 bp, Gossypium hirsutum
ttcagttccatatactcccgacgttaatgtcgacgtcgcagtttcaaaccgcgagtaaccctttgagaacccaagctggggatgttaaaggtgggaagtttccgcttaatgtgacggcggaggggaaccaagtgaatgtgacgaccggagtggtgaatgcgacggtggagaatagtgtgttttctgaccgaaggatcgcggtttatcaggtggataaggtgcttttgccgttggagatttttgggacagcgccggagccggctccggcgccggttgttccggagaatggtggtttggtttcgagtcctaaaacagcggttaagggtgctgatgcagctggtgcggtgagcttgaaatttcatgctttggcaa

SEQ ID NO: 205420 - DNA, 358 bp, Gossypium hirsutum
tcaagaaaggttgtcatccgtaatattaattacaggtcttcgaagaggaatggggataagggcagtgattccgaagataattctgatgaggatgagttcattgatggagattctctcaaacagcaagtagaggaggctgttggatcactagggaaacggcacaagtctacctcacaccatcataagaaacacaatggaagcaagcatcgaaacagtgtgtcctacgatgaagatgaactggtaactaaaaatccggagggagaaaaacgaagcaatccctgggatactttccaaaaccttctcttgcaagacaaggatttggattcttctgaagtagataaacagcctgcaagattgc

SEQ ID NO: 205421 - DNA, 402 bp, Gossypium hirsutum
caacacacttgctagtattcctacttggagtggtgactcggaccactcccacatttggtacctatgagtcaccaaattatgggaaaccccctactcctgtattcaagcctcccaaggtgaaaccaccaccatatgaacctaagccaccagtgtatgaaccaccaaaaaaggagaagcctgaacctaagccaccggtttatgcacctccaaagaaagagaagcatggacccaaaccaccaatgtatgaacctccaaagaaggagaagcctgagccaaagccaccagtttatacacctccaaagaaagaggagcctaaacctaaaccaccagtatatgaacctccaaagaaggagaaacctgagccaaaaccaccgatttatacacctccaaagaaagagaaac

SEQ ID NO: 205422 - DNA, 393 bp, Gossypium hirsutum
  unsure (1)..(393): unsure at all n locations
caaaacatgaatgcattattcctttcattggaattgcttgttgctcacaccacttgcttctcctccttactcatctcagcatggcctcaaaacccttcatcgcattagccaccactgttttcttcttctccctcatcgccgtcaatcattttgggaaacctttccagggaaaacttggggaaatggaagttgtcccaattacggatgccgtaggacctgaaagtgtagcatttcacccacttggagacggtccctacgtcggaatatccgacggtcggattatcaagtggcaaccaaatgagcatcggtggatcagttttggcatcacttctcctaacagagaaggatgtgaagggaaacacgatcatgagacangggaacacatatgtggac

SEQ ID NO: 205423 - DNA, 309 bp, Gossypium hirsutum
catcgaaccatcattaaaacgacaactgcttatctccaccgttctcatgactgctgggattgctgtcgttagcttctttgcattgccatcagaattcactctcttcaattttggaactgaaaaggaagtgaagaattggcacttattcttctgtgttgctatcggattgtgggctggactcattatcggttatactacagaatattatactagcaatgcttacagtccggtgcaggatgtaacagatgcttgcaggacaggagctgcaacaaatgtgattttcgggttgctctgggataccaaatcgtc

SEQ ID NO: 205424 - DNA, 373 bp, Gossypium hirsutum
gcggctttcacttcccttctctcacctcttacagaagcgagaagtcagtttagtagcaatggcgtatgctgcgatgaagcctaccaagccgggtttggaggagccccaagagcagattcacaagatccggatcactctctcctctaagaatgtgaaaaacctagaaaaagtttgtgctgatttggttcgcggtgcaaaggataagagactgagggttaagggaccagtaagaatgcccaccaaggttcttcacatcacgaccaggaagtctccctgtggtgaaggaacaaacacatgggatcggtttgagctccgtgttcacaagcgagttattgacctattcagctcccctgacgtggtgaagcagatcaca

SEQ ID NO: 205425 - DNA, 391 bp, Gossypium hirsutum
gagctttccgttctttgtgatgctgaagttgctcggatgatcttctccaatagaggaaagttgtacgaattttgcagcagctcaagcatgatcaaaacattggagaggtaccaaaaatgcaactatggagctcctgagccaaatgtgtcatcgagggaggctgctttggaattaagcagtcggcaggaatatttgaagcttaaagcacgttacgatgccttacaaaggtcccaaaggaatttactgggagaagatttgggacctttgagcagcaaggaactcgagtcacttgagaaacagcttgattcatcattgaagctaattagatcgacgcggacccaatacatgcttgatcagctcaatgatcttcaaagaaaggaacatcttctta

SEQ ID NO: 205426 - DNA, 408 bp, Gossypium hirsutum
aagaaaaaggctaagggagataaggaagctgttccagagaagaaagcacctgaaaaagaagcatctgataaagacaaagaactcagtgtcagtttactgaatatacaggttggtcttatacgtaaagcatggaaacatccatctgctgatagtttactggtagaggagatagatgtcggagaggctaaagtacgacaggttgttagtggattggccaagtattgcagtccagaagacttgacgaatcgtcgtgttgtgctgattacaaatgtaaaacctggaaagctacgagatgtgatgtcagagggactggtgctttgtgcttctaatgaagatcataccaaggtagagccattactgccccctgaaggtgctaaacctggcgagcccatttcattttcagggatt

SEQ ID NO: 205427 - DNA, 377 bp, Gossypium hirsutum
aatcatccgaaccaaacatgggtcaccattcttgctgcaatcaacagaaggttaagagagggctttggtcccctgaggaagacgaaaagctcattcgatacatcaccactcatgggtatgggtgttggagtgaagtccctgagaaagctggtcttcaaagatgtggcaaaagttgtcgcttgagatggattaattatttgaggcctgatatcagaagagggagatttactcctgaggaagagaagttgattattagccttcatggggttgtagggaacagatgggctcacattgcaagtcacttgcctggaaggacggacaatgagataaagaactactggaactcatggatcaagaagaagataagaaagccttca

SEQ ID NO: 205428 - DNA, 399 bp, Gossypium hirsutum
gtgaaattaaagatgaggaaagcaaaaatcctcccgaagtgaacaagcaactcaatgatgagaagcagtctatgatcaaagaactgaattcgtatgtagctatgaggaaaacatacatgaatacccttggtaacaagaaaattgaactctttgatatgggagctggagtcagtgaacctacagctgatgaaaatgttaaaatggcatcatcaatgtcaaaccaagagcttgttgatcatgggatgaaaacaatggatgagactgatcaggccattgaacgctcaaaaaaggttgttgaacaaacaattgaagtaggaactcaaactgctggtactctaaaggacaaactgatcaaatgggccgtattgtaaatgagctggatacaattcagttttcaat

SEQ ID NO: 205429 - DNA, 392 bp, Gossypium hirsutum
gaaaagaaaaggaaaataaaaaaaccctttacttcccctgcccattgtttttagttttcttttggctaaagaaaattatggaaccgagtcagacggtcgaggataaatcacaaccatccgtcgccaccgtgacccgtcgtatccaacgcttgtcccttcacctgatcccacttccgcccctccaatgttcacctcagctcgacatgctgacctgcgccaaggccaataagcaggaggtcgacgtatcctccctttcaagctacatgagagggaagcatagggaaattcaagagaagatttttgatttttttaactcaaagcctgatttgcaaaccccgactgagatttcaatgaaagaacataaggagctttgtttgagacaacttttgggg

SEQ ID NO: 205430 - DNA, 396 bp, Gossypium hirsutum
gcaatcggtaccatggagttccggctgttgttttttcgcttggcggatatgcggggaacaatttccatgactacaccgatatcattattcctctttatctaacatctcgacggtttaacggagaagtgaagtttcttatcaccaacaagaacccatggtggatcaacaagttcaagaccatactacgaaatctttcccattacgacccaatcgacattgataatgaacaacaagtccattgtttcccaaccgtgatcatcggcctaaaacgcgaccctaaagaactaaccatcgatccatcgagatcacctcattccatgaaagaatttcgacaattccttagaacaacgtactcattgaaaaaaaccaccgctgtaaaactaaccaacaacaatc

SEQ ID NO: 205431 - DNA, 399 bp, Gossypium hirsutum
ctctagagaatgatttggctaacatgtgggtgcttgttgctaagttgaaaaaagagggagttgctacccccgagagtaatacggatgagcagcatggtaatagtattgataatgccgacaatccaaaggcaaacagcatcgagaataacagacaagtgtcagatgtgtcatcaaaaccagctattgaaatgcctaaggaagaacccctggttgttcgcctcaaggcacgaatgcaagagatgaaggaaaaagaactcaactccgttggaaatggagatgcccattcccatttatgtaaagtatgtttcgaatcaccaaatgcagcaattcttctcccttgtcggcatttttgtttatgtaaatcatgttcgcttgcttgttccgagtgtccaatttgtc

SEQ ID NO: 205432 - DNA, 405 bp, Gossypium hirsutum
ctcaaataaacccattagcagataacagcttagttgacgcaacttggcagtcaggaacatagagagttggctagagaagcagtgagaaaatcacttgttttgctaaagaatgggcactctgccgatcagccattgcttcccttacctaagaagacatcaaaaatacttgttgctggtagtcatgcagacaatttgggttatcaatgtggtggatggactattgagtggcaagggttcagtggcaacgaccttacaaatggtacaacagtcctaaaagccatcaaaaacacagttgattcaagcacgaatgttgtgtatgaggagaatccggatcccaaattcgtcaagtccaacaacttctcctgtgccattgtggtagtaggggagcatccatatgtcgaaaca

SEQ ID NO: 205433 - DNA, 389 bp, Gossypium hirsutum
cgacattgatgtcctggttcacggagagcctgagagaaatgatatggttgagtatttcggtgagcagttgtctggttttgctttcactgttaacgggtgggtccaatcttacggatctcgctgtgttaagccaccaatcatctatggtgatgttagccgccccaagccaatgactgttttctggtcatcaactgctcaaagcatgactcaacgcccaatgaagggaatgcttactggccctgttaccattcttaactggtcctttgtcagaaatgatcagcccagattcgagacttgctaccagattgccttggccatcaaggatgaagtggaagatcttgagaaggccggtatcaacgttatccaaattgacgaagctgctttgagag

SEQ ID NO: 205434 - DNA, 398 bp, Gossypium hirsutum
ctctgggcctctccaaagcgaaccctctcttctctagaaaccaccgtcgagccatggctctaatcacccgaaccaccgccaatcgcctccctcacctcctctccctacagcgtgccctcgctattcacaccaccgtcccttctctctcctcttctgccaccccaaccacatacgctcgcccttctccgccgtccacctccggcactccctccagtctgtctaagcctgctgagtacgtgatctccaaggtcgatgacctcttgaactgggcccgtcgtgggtccatatggcccatgactttcggcctcgcttgctgcgccgtcgaaatgatgcacgccagtgcttctcgctacgacttcgatcgctttggtgtcatttttaaggctagccctcgccaa

SEQ ID NO: 205435 - DNA, 397 bp, Gossypium hirsutum
taactccaggctttaccttctagcgttagttcgttcagcgccttcgattccaatagagatagagagagaggaggagatcttcgcttctctccgtcgttctgctccatttgataaccgcttgcagttctctcagacgtgaaaaatggggttgtctttcacaaagctattcagccggcttttcgccaagaaggagatgcgtatactgatggttgggcttgatgctgctggtaaaaccaccattctttacaagcttaagttgggagagattgtcactaccattcctaccatcggtttcaatgttgagaccgtggaatacaagaacatcagcttcacggtttgggatgttggtggccaagacaagatccgaccattgtggagacattactttcaaaacaca

SEQ ID NO: 205436 - DNA, 411 bp, Gossypium hirsutum
agtttaccacttctcgcctattgtaccctaccggcaatctgtttacttaccgataaatttatcatgccaccgataagcacctttgcaagtctattcttcattgccttgtttctttcaatctttgcaactggtattctcgagctaaggtggagtggagtaagcattgaagaatggtggaggaatgagcaattttgggtcatcggtggcatttcggcacatttgttcgctgttatccaaggcttgttgaaagttctagctggtattgacactaatttcactgtcacatccaaggcaactgatgacgaggagttcggggaattgtatactttcaaatggacaacccttctaattcctcctactaccgtcttaatcatcaatttagtcggtgtcgttgcaggcatctcggatgcc

SEQ ID NO: 205437 - DNA, 370 bp, Gossypium hirsutum
cggcacgagacgagctgagccttacaaggctatgtacgaaaacccgactcctaaacaagcctaattacaaccccctttttttttctcaaaggaagactaataatcataaggaatatatgtatataaatccgaaaagagcacgatagatactacacacagcaatgagattacttggatttctatgccctttttgcggtaatttgatccatgttagcggaacttttggcatgtttaggcctccatcgggtcctgcctctcacaatctcagctccatcgtcgagtcggagcaaatgttggcaattaaattcaccaacatttactgcattttccgtattggaatcagacacagtggtcagtgactgcagcacgc

SEQ ID NO: 205438 - DNA, 396 bp, Gossypium hirsutum
ttcgttaatggcagatctttcgttttcttgatttgcatgttgagtttacggcctcgttagtgacttaactgagtttaattgttctgctgagttgaattaggaagtcatcggagatgctggacggaatctggggccgtggttttgcctccaaatgtaagtcattgataaaactgataaagagtcggatcgatgtaataaggaggaagaggagtgcgacgcttatgtttttgaagaaagacatagctgatctgctcgctaatggccttgatattaatgcttatggcagggtggaaggatatatagctgaatcggtcctttcctcttgctacgattttgttgagaaatgctgcgagttcgtgtctaagcatgtttcacttatgcaaaaactgagtgact

SEQ ID NO: 205439 - DNA, 388 bp, Gossypium hirsutum
tttatggctttggtccaccttcaatgccaagttttcccaagtcatcctcctcatcttgctcgtgttgctgcccgggcaagaaggaacctaaagatccatcagagctttatagggatgcaaaacgggaagaacttgatgctgccatctttaaccttagggaaattgacaattatgatgagtatgaaagatcaatgttgatctctcaaacaagctttgagaaaacttttggcttatcttcagtcttcattgaatctacactaatggagaatggaggagtggctgaatctgccaacccttccacactaatcaaggaagcaattcatgtcatcagctgtggctatgaagagaagactgcatgggggaaagagattggatggatatatggttc

SEQ ID NO: 205440 - DNA, 407 bp, Gossypium hirsutum
ttcagcacgagcggcacgagccatatttgtcattctttgagaggtacaacgggagcagggatggggacactgttgatatcaaagatcaaagaagaataccctgatcgtatgatgctgactttctcagcttttccgtcgcctaaaacgtctgatactggggttgagccctatattagcgactctatcagggcaccagcttgtaggaaaatggcgataaatgcatggtgcttgataataaaactctctattatatctgttttagaactctcaagctcactaatcccagctttggtagattcgtatcagatagatttcaacaactatgagtggagctacatgctgactttttttcccaggccaaactaactacgatcttcgaatactagccgtaaacttgatcccattcc

SEQ ID NO: 205441 - DNA, 373 bp, Gossypium hirsutum
tgttgatccacacacactggtgaaggcaaagctcaacaaccatggcaatcttggtgctcttgtacagcatgagcttagaccgaagtccttccttactatatctggggcctttgacacaaaggcgttggagaagactcccaagtttggtttggcactctctctaaagccctgaacaggtatattgacttaatgataggaacaaacaatgtggctgatgagattgataaatcgtgtcattttctttttcacgtaggcttctagtgattgaaaatggaatcttagtaactttcagaaggtgtttgctttttggattgttaaaaaacctttgattattactcattttaataaattattacacctattgattaggcct

SEQ ID NO: 205442 - DNA, 378 bp, Gossypium hirsutum
caaaagtggtagtttatttttcacttctttatacacaaaaggttgtgtcctcgagtttcaacaccccgttcgatttgggggtttctttaaactccaaattgagtggggtttgtggctctaaaagaaaagaaaatggggcaaaagagtgtgcgcaaaaagggcgcgttgcccccataggggctcacacagcccccttctgaagaaagatgaaacaacactctccccaacttctttctttcagtaaggctgaaatatgtggagcttggctaccattacgttatctctaacgctatgtatttgatgttggtgcctctcctacgcatagctgcagttcatctttccacacctactctcttatattatgttcgactatggaac

SEQ ID NO: 205443 - DNA, 389 bp, Gossypium hirsutum
attttgtcccttcaacggaccggctaaccttaagatcgggttaatgaatatacaaatgaacaaaatcgggcaacatgtaggtgactgggaacacttcactcttcggataagcaacttcacgggtgaactatggcaagtatacttctcacagcatagtggtggtgagtgggttgatgctttcaacttggaatttattgaaggtaataagccgatcgtttactcatccaaacacgggcatgctagttttccacatcccgggatttaccttcaggggtcagataaactcggaattggaattagaaacgatactgctcgaagcaattattttgtagattcaagcactaggtatcagattgttgcagctgagtatcttggaggagtagttacag

SEQ ID NO: 205444 - DNA, 397 bp, Gossypium hirsutum
atcattgttgtctttgtcattgtttttccaagaaagcacaatgaatgtagacgaggaggtggagagactcaaggaagaaatccaaagactaggccagatccaatcagatggttcttacaaggtcacattcggggtgctatttaatgatgatcgctgtgcaaacatctttgaagcactagttgggacactaagagcagcaaagaaacgaaaagttgttgcatatgatggtgaactactgctgcaaggagttcatgacaatgtggaaatcattctcaaagctacaacaccagcagcagcccagagtagcaactaatgcagttctaaacaaataattgcaattatagttttgcagcaaaagtttgatgatattctatgtaatttttcaatagttatcatg

SEQ ID NO: 205445 - DNA, 412 bp, Gossypium hirsutum
tttctatttagttttctcttcctccaattaagatgcagatcttcgttaagagggtgagcggctagaccatcaccctcgaagtcgagagttccgacacgatcgacaacgttaaggcgaaaatccaagacaaggaagggatcccaccagaccaacaacgtctcatcttcgccggaaaacagctcgaagatggccggaccttggccgattacaacatccagaaagagtccaccctccatctcgtcctccgtctacgtggtggcatgcagatcttcgtcaaaaccctgaccggcaagaccataactttggaagtcgaaagctctgacaccattgacaacgtcaaggccaagatccaagacaaggaaggcatcccaccagaccagcaaaggctcatctttgccgggaaacaactcga

SEQ ID NO: 205446 - DNA, 396 bp, Gossypium hirsutum
cttcgatttactttcggtttccatttacttctttatttgtacgtttttgaatttttagtaagcgaaaatgagagagtgcatttcagttcacatcggtcaggctggtatccaagtcggaaatgcctgctgggagctttactgccttgaacatggaatccagcctgatggccagatgccaagtgacaagactgtcggaggaggtgatgatgcttttaacacctttttcagtgaaactggtgctggaaagcacgtccctcgtgctgtctttgtggatcttgagcctactgttattgatgaagtgaggactggtacttaccgtcagcttttccaccctgagcaactcatcagcggcaaggaagacgctgccaacaacttcgcccgtggccactacactat

SEQ ID NO: 205447 - DNA, 399 bp, Gossypium hirsutum
tgcatttctattcacatcggtcaggccggtatccaggacggaaacgcctgctgggagctttactgcctcgagcatggaatccagcctgatggtcagatgccaagtgacaaaactgtcggaggaggtgatgatgcttttaacacctttttcagtgaaactggtgctgggaagcacgtccctcgtgccgtctttgtggatcttgaacccactgttattgatgaagtgagaactggtgcttaccgccagctcttccacccagaacaactcatcagcggcaaggaagacgcaactaacaactttgcccgtggtcactacactattggacaatgagattgttgacctctgttggaaccgaatcaggaaactggctgataactgcactggtcttcaagggttcct

SEQ ID NO: 205448 - DNA, 396 bp, Gossypium hirsutum
agtttaatgtatgggatggattacctgaggggtatagctttagagggaatcctgatgagcccgtcgattatttccttaaggcagttcctgggagttttataaaggctatagatgctgttgtgtctgaaactggtaaaccagttgattgtttgataacagatgcattttatgcatttggggctgatatcgcggacgagctgaatattccttgggtggcggtttggatgtctggccctagggcactcttccttcatctccagaccgatgttattcgccagcatgtaggaattaacaatccggaagacaaaccacttgattttcctgaattttctggctttcgtgttactgacttacctaatggaatagcctctggagacattgatgcccccatgccag

SEQ ID NO: 205449 - DNA, 387 bp, Gossypium hirsutum
aaacagagagcctctgaaatcccagatctctctttggaacccatatttctaaggaaaatggtgcacaaatcgttgatctatgcatttgtatctcgtggggaagttatcttagcagaatatactgaattcagtggtaatttcaattccatagcttttcaatgcctccaaaagcttccttcttccaacaacaagttcacttacaactgtgatggccacaccttcaattaccttgttgacaatggctacacatattgtgttgttgcagatgaatcagctggaagccaagtaccgattgcttttttggagcgtgtcaaggaggactttgtgtcaaaatatggtagtggaaaggctgctactgctcctgccaacagcctgaacaaggaattt

SEQ ID NO: 205450 - DNA, 316 bp, Gossypium hirsutum
ccgaaagtaccaagcattcgcacaaacgttgcagcaatcgagggggtttggaagcgaattcaagtttgcagaaaccggttccagggctgcaacatctgatccttttgcaactacagcaggtggagctgatgaagatgatctttacagttaaaattgctttcatttgagggtttcttttttaaaagaattttaatttaatccattatggtaacaattattgaactaaaggagcctttgcttgtggcttaagcatcggagtccaaaataacagtttttgttgtttttggaactgagaattttacaattgtctattttt

SEQ ID NO: 205451 - DNA, 387 bp, Gossypium hirsutum
tttaagtcaacagttatcagaaagagacattatagtggcatgcatagactacagaaattttccacagggtacaataagtgacatggtggaggatgcttctcaaggcatctcatttatttgcaataatatttctgaatatggaggtgatcccaacaggatttatcttatggggcaatcagctggtgcacatattgctgcttgcacacttgtaaaccaggcaatcaagagactggcgaaggcgacagtgtttcttggagtgtgtcccagataaaagcttaccttggtttgtctggagggtacaatctttttaacctcatagagcactttcatactcgaggtttataccgttcgatctttttaagtcaaaattttgctgatacgcttcga

SEQ ID NO: 205452 - DNA, 396 bp, Gossypium hirsutum
gaaaaatggttctgctagagaaactttgggatgatgtagtggccggtcctcaaccggaacgtggccttggccggctgaggaagatcaccaccaccccacccttgtccaccaaagatgaggcttcatcaatggcgatgccgacgagtccgacgacacctgggacaccatcgacgccggtgtcggctcgtaaggacaacgtgtggaggagcgtgttcaatccaggtagcaaccttgcaaccaaaggtattggcgctgaagttttcgacaagcctcaacctaactctcctactgtttatgactggctttacagcggggagacccggagcaagcatcaccgttgattaggcggtggctgacggcggcggatggtagcaaaaccactagcagaaggttgca

SEQ ID NO: 205453 - DNA, 392 bp, Gossypium hirsutum
cgacgcgtctgttttgacggggttagccgattccggggggaccgttgtcgtcgcactgtctaatgaactactttcatccaccgctgctgatcagtcgtttgcagacaactgggttgaagcaaacataacaaagttttacccaaagacaaaaatcgaagccatagctgtcggtaacgaagtgtttgtcgatccggccaacacgaccaaatacctcgttccggcgatgaagaacatccacgcttcgttagttaaatccaaacttgattccgccattaaaatctcttctccgatagctttcagtgctttaaaaacctcgtatccttcatcgggcggttcgtttaagccggaattgattgaaccggtgattaaacccatgttggtttttttgaaac

SEQ ID NO: 205454 - DNA, 396 bp, Gossypium hirsutum
aacaaattttcccctctaacttggtagtttatcctaaagatttcccatttattaaccatccccaaacaagacgaacagtgtctgcaactgtttgtaatcttgaagaagacagaaagattagctaaactaaaatggagggaatgattcaggacccatcgcagccggcgtcgcagccacagcagcagaatcaggcagtggtaggggcggagaggctgaaccaggcgcttcaacaacagctcaatttggaatctgtaaagaccagagcaatttcccttttcaaggccataactcgcatcctcgaagacttcgacgcctattctcgcacaaataccacccccaaatggcaagatattttgggtcaatactcaatggtgaatctcgaacttttcaacattg

SEQ ID NO: 205455 - DNA, 400 bp, Gossypium hirsutum
tgataatatgcgtgctcctggagagcagaatctggttgcatgggcacgaccgcttttcaaagatcgtaggaagtttccgaaaatggctgacccgctactacaaggtcgttatccgatgcgtggattgtaccaagctcttgcagttgcagcaatgtgtttgcaagagcaagcggctacaaggcctttaataggcgatgtggttacggcccttacgtatttagcctcacaaacttatgacccaaatgcccctggcaaccaaagcaacagagtcggtccatcaaatccaagacttaaggatgataggaatatggctgacgggttagacagccccgagggtcgtggatggcatcatggttctccttccacgcatagaaattcacctgattacaggaagaggaat

SEQ ID NO: 205456 - DNA, 278 bp, Gossypium hirsutum
  unsure (1)..(278): unsure at all n locations
tatgcaaccatagccagggctttttcaccaaagcggttggttatgnntatactcttcctttttgcccccttctccatgcaaatccatgctatagagtacttcagcaaattcccaagagttaacatcattgaggaagagacaccttccagagagcagaagctcgagaccttttttccccacaccaccccaaagccacaaaaacatgagccactggttatatttgaaacccaaaaaggttatggcctctacagccacaaatcatgctcaagcttaggctc

SEQ ID NO: 205457 - DNA, 385 bp, Gossypium hirsutum
ttcatcaggccttccaagaacacctactcatttaacgagctcatcgccctgtgggagaaggtgattggcaaaacccttgagaaaacatatgtttctgaggaccaacttctcaaacagatccaagagtctccaatcccaatcaatattatgttggccatcagtcactcaatctttgtcaatggtgattgcaccaacttcgatatcgatccatcattcggatacgaagctattgagctcttccctcaagtgaaatacaccactgtggaagaaggcctcattcgttttgtttgagaaagctacaaatcaaatcagatcattgttgttattaaactgataccaggtattattcaaaaactgtcactgtgagatttgtgcataggacttg

SEQ ID NO: 205458 - DNA, 338 bp, Gossypium hirsutum
tcaaaactggcttttatgatcttcaaactgcgagggatgagtataggttctcttgtggcagtgggggcatgaaccgtgaccttgtatggcgttttatggatgtgcagactaggcttatcactccagtctgccctcactatgcggagtttgtttggagagagcttctgaagaaggatggctttgtgataaaagctggctggccatcagcttgttctccagatcttaaacttaagagtgccaataagtatctgcaggattccattgtgttgatgagaaagctgctgaataagcagattttgggctcaaagaaatctaataagaaaggggctccagcttca

SEQ ID NO: 205459 - DNA, 387 bp, Gossypium hirsutum
gtcatgtgtggagatcagtctgcaaggcacgtggacttgaagatgatcaagggactaaactgtacattgccactgatggaagggcaaggttgcgccccccactcccacctggttactttgggaatgtgatcttcactgctaccccaatagcagtggcaggggatctactgtcaaagccaacatggtacgctgcgagccgtattcatgatgcattggttcggatggatgatgaatatctaaggtcagcccttgattacctggaacttcagccagatttgtctgcacttgtacgtggtgctcatactttcaggtgtccgaaccttgggattactagctgggttaggctaccaatccatgatgcagatttcgggtggggcaggcccatat

SEQ ID NO: 205460 - DNA, 393 bp, Gossypium hirsutum
aaaaaacacaccctaaagagacaatgagaaagctgctggggtttgcctttcttttcttcttcttttgggataaaacattagctcaaatagctccggcgccgccgttaaaggtggacaacatcacttccatcctcgaaaaaggtggccaattcaccactttcatcaagctattgaaagccacacaggtggctgatcaactaaacaaccagttaagcacaccggaccctaacgacgggataacggtgtttgcaccgagtgacaacgcgttcttcggactcaaacccgggacgtgaaactcactttccgaccaagagaagcttcaggtggttcagttgcatatactccccacgtttatggcgacatctcagttttaaaccgcgagttaccctttga

SEQ ID NO: 205461 - DNA, 392 bp, Gossypium hirsutum
tcgagttttgccttcagattctccctctttgtaagttcaaatctacaaagccatggcaaatgctgcttctggaatggccgtgcatgatgactgcaagctgaagtttctagagctaaaggctaaaaggacataccgcttcatagtattcaagatcgaggagaaacaaaagcaggttgtcgtggaaaagcttggtgagccaagtcaaagctatgacgatttcactgctagcctccctgccgatgagtgtcgatatgctgtatacgatttcgactttgtgactgctgagaattgccagaaaagcaggattttcttcattgcatggtctccggacacatcaagggtgagaagcaagatgatttacgcgagctcaaaggacaggttcaagagagagt

SEQ ID NO: 205462 - DNA, 393 bp, Gossypium hirsutum
gttggactaaatgctcttgctggaaaatctataaagcctggtggttcagctgtaggagcttggaactacaccaatgcagaatcttttatacgttacaccgttgaaaagaactataaaatccatggttgggagctaggaaacgaattgtccgggaatggggttggaactaggatcgcagttaatcagtatgcagctgatacagcagctctacaaagaatagtgcaaaagatatacaaggatgttgatttgaaacccttgatcatagcacccggtgggttctacgagtcaaaatggttcaaagaattcatcgataaaacaaccacatccttagatgtagtcactcaccacatatacaatcttgggccaggagtcgatacccaccttattgaaaag

SEQ ID NO: 205463 - DNA, 391 bp, Gossypium hirsutum
  unsure (1)..(391): unsure at all n locations
ggaacatatagatatctgattttggccttagtgcattgcctcaacatattaggggggatggcttactgcatacaacatgtggaagtccaaactacgtcgcgccagagattttggcaaatagagggtatgatggtgccacttcagacatatggtcatgtggtgtcatcttatatgtcattctcaccggttatctcccttttgatgatagaaaccttgcagttctttatcaaaagattttcaaaggggatcctcagatcccgaaatggttgtcancctgggctcggaacatgataagaaggattcttgacccaaaccctgaaaccagtataacaatggcgggtatcaaggaagatgaatggtccaacaagactatactcctgctgtacctgat

SEQ ID NO: 205464 - DNA, 392 bp, Gossypium hirsutum
gttgtttctgacaagagcttgatcgtcagcttcggtgagatgctgatcgattttgtccccactgtctccggtgtttctctagccgaagctcccggcttcctcaaagcccctggcggtgctccggctaacgtggccattgctgttgctagactcggaggcaaagcgtcatttgtcggaaaacttggggacgacgagttcggtcatatgctggccgatattctcaagcaaaacagtgtctccggtgacgggatcttgtttgaccaaggcgctagaactgctcttgccttcgttacgttacgcgccgacggagagcgtgagttcatgttctataggaatcctagcgccgacatgctgttgaagccggaggagttgaacgttgatcttatcaaatc

SEQ ID NO: 205465 - DNA, 384 bp, Gossypium hirsutum
gccatcgcccctccctcccatggcggaatccaaccctagggcctgcatatggggtcatcaagctcttggaggtggcacatttaaccatgtgctgctgtggagagaacggtgtaacggtgttttgatgctgaccttgtcaaccacggtgtggaaccttattgaaagagctggttataatctcatgtctttcatggccaacgtaatgccgctcactgtcgctattctcttcttctggggcaaaaatgattttgttctcaacaggtcattaccatgccttcctaatttagagattattgagaacacagttgtgattcttactgatgagctacaccaatggatcaaccacacattattcattgcacataacattgcaaatgcaagaga

SEQ ID NO: 205466 - DNA, 411 bp, Gossypium hirsutum
ctcgagtttttttttatgttttgtgcgtaaatggcatcatcccttctctctagaactcttttgggtcaccgcttaattcgattttcctcgtctctccctcagaaccccttgattttctctaatcttttcaataagagagagttccgtgtacaggctgagtcttaccataccacatataaggcctctggtcagcattctcgtttaatggcttctgcagcaattgagacaagaagtaatttttcgacacagtctctttctaccaatgatccggttgtttctgttgattggcttcatgctaatttaagggagcctgatttgaaggtattggatgcatcatggtacatgccagatgagcagaggaatccaattcaagagtaccaggttgctcacattcctggtgctcttttcttt

SEQ ID NO: 205467 - DNA, 350 bp, Gossypium hirsutum
aatcagataggagccaagttctgggaagtcgtatgtgccgaacatggcatcgattcaacgggtcgatatggtggtgactcggagctccagcttgagcgaatcaatgtttactacaacgaagccagttgtggccgttttgttccccgcgcagttttaatggatctggaacccggtaccatggatagcgtaagatccggtccttacggacaaattttcagacccgataacttcgttttcggacagtcgggcgccggaaacaattgggctaagggacattacactgaaggagcggagcttatcgatttcgttctcgacgtagttagaaaggaagccgagaattgcgattgctt

SEQ ID NO: 205468 - DNA, 387 bp, Gossypium hirsutum
cgacgaagtaggaagagttcttgttttggacattgatcatttgttcatccacttctttggtgctcatcttgcctcggaacatggctgatgctgtgaggtatcgaccgtgcctcgggtcagcagcacacatcatgttctttgcatcccacatttgttgtgtcaactcagggacagttagagctcggtactgctgagaaccgcgggaggtcagtggagcaaatccgaccatgaaaaagtgaagacgggggaagggaatcaagttcacagcaagctttcggaggtcggagttgagttggccggggaatcttagacagcaagtaactccactcatggttgcagagatcaaatggttcaaatcaccaaagctaggagtagtctatttaagag

SEQ ID NO: 205469 - DNA, 366 bp, Gossypium hirsutum
aatctacccgaatttatatgtcattcaatcaacttttcagatacgaggcatgcatacccttattcgtgactctcaaacaacgaaacatgactttgttttttacgctgatcgattgattcgtctggttgctgaacatgggctgggacatctgccatttacagagaagcaggtgatcactcctacagggtctgtatatacaggtgtggatttctgtaagagattatgtggagtctctattattcggagtggtgagagtatggagaatgctttgcgagcatgttgcaaaggtatcaagattggcaagattcttatccatagggaaggtgacaacggtcaacagcttatctatgaaaaattaccacaaga

SEQ ID NO: 205470 - DNA, 391 bp, Gossypium hirsutum
atctatacttcttctcactaatcatgagtcgtcatccagaggtaaagtgggctgaaagagctgacaaggtttacattacggtgctattaccggattcgaagaatgcgaaggtcaatcttgaacccgagggagtgtttactctttcggctaatgccggagctgacaataacctttatgaattgaagttggatctttatgataaggtcaatgtggaggaaagcaaaattagtataggagtccggaacatagtttgtgtgttggagaaagccgagaaagtgtggtggaaaaaactattgcgcagcgaaggaaaggccccccattatattaaagtggattgggacaaatgggtcgatgaagacgaaaacaatggtcctggtgatattgacttggg

SEQ ID NO: 205471 - DNA, 393 bp, Gossypium hirsutum
caacttgaggatggccgcacattggctgattacaacatccagaaggagtccacactccacttggtgcttcgcctacgtggaggaatgcaaatttttgttaagactttgactgggaagaccattacattggaggtagagagttcagataccattgacaatgttaaggcaaaaattcaggacaaggagggaatccccccagaccaacagaggctgatttttgctggtaagcaactggaggatggccgtaccctggctgactataacatccagaaggagtccaccctccacttggtgcttcgtcttcgtggtggtatgcagatttttgtgaaaacacttaccgggaagaccatcaccctggaagttgagagctcttacacaaatcattattgttaa

SEQ ID NO: 205472 - DNA, 390 bp, Gossypium hirsutum
gatttctctctttaatgaatctccaaatcgaaatttaaggccaaaaagacacaagggttactaattaaattaatcttcagcgaatatgttggtttatcaggatcttcttacaggtgatgagctcctctcggactctttcccatacaaagaaatcgagaatggaatgttatgggaagtcgagggaaagtgggttgttcaaggagctgtcaatgtagatattggggctaacccttctgcagaaggtggtgatgatgatgaaggtgttgacgatcaagccgtcaaggttgtggacatcgtcgacactttcagacttcaggagcaacctgcttttgacaagaagcagtttgtgaccttcatgaagaggtacatcaagaacttgacacccaaatt

SEQ ID NO: 205473 - DNA, 400 bp, Gossypium hirsutum
gaaaatgagagagtgcatttcgatccacatcggtcaggccggtatccaggtcggaaacgcttgctgggagctttactgtctcgagcatggaatccagcctgatggtcagatgccaagtgacaaaactgtcggaggaggtgatgatgcttttaacacctttttcagtgaaactggtgctgggaagcacgtccctcgtgccgtcttcgtggatcttgaacccactgttattgatgaagtgagaactggtgcttaccgacagctctttcacccagaacaactcatcagcggctaggaagacgcagctaacaactttgcccgtggtcactacaccattggcaaggagattgtcgacctttgtttggaccgtatcaagaaacttgcttataactgcactggtctt

SEQ ID NO: 205474 - DNA, 252 bp, Gossypium hirsutum
ctcaatacctccaacaatgagtccatgtcggttttgccgggtgggtgttttgaccctcgagatgaccgtaaatcctcttttgggttcgacaaaaccggtccttacagagccacatttttgattgaattcggatctgatctccggatgaatctgcaagcacgagggtctgatcttgtggttcggattgtgaagccggtgtgtgttatggttgagtatagcaaaagctttctgggccgactctttctttgctta

SEQ ID NO: 205475 - DNA, 356 bp, Gossypium hirsutum
attttctttggactttctctgaaatccgagtcctaggaaagatgcgtgagattcttcatattcaggcagggcattgctgcaaccaaatcggtgccaagttttgggaggtggtttgcgcctagcacggcatatattcaacggtacgctatcaaggggacaatgatttgcaactggagcgcgttaacgtttactacaatgaatctagtttcgggaggttctgtccacgagccgtccttatggacttggagcctgtcactatggatagtgttagatccggtccgcacggacagattttaaggcctggcaactttgttttctgcctgtcctgtgcatggaattactgggccaatggttat

SEQ ID NO: 205476 - DNA, 379 bp, Gossypium hirsutum
  unsure (1)..(379): unsure at all n locations
accaagaatccacttcatgctttcctcgtatgccccagtgcatctctgctgagaaggcttaccacgagcaactgagagctgtttntggttagtcaatgttgctgagaaggctttttaagggctgttgcagagaggaatgtttttttgcttccgcgcagaggtaatgtcgtcttttgtcttgcacatattaacttggcttagatggggcttggatttaatccctttgctgatttgtatacagggtttaagaaatttgtaagattgtttctcaacttctattctggttgtaaaaagggcttcttgattgattaattgttttatttttgtgggaggtatccttctgactaattaatttctaattattgtttttgtacatttt

SEQ ID NO: 205477 - DNA, 394 bp, Gossypium hirsutum
catccagttgttcttaagttccaaccaaaagcaaacagcaaaagagagagggcgaggcggcgaccgcatttaacgcttatccccttctaatttagaaaagaaatggagactttcaacatcccggcgacgccgtcattgatgaaggagttcctccgccagatgggaggcaccgctgttatcgacggtggactggcgaccgagctggaactccacggtgctgacctaaacgatcccctctggagtgccaaatgcctcctcacttctcctcaccttattcgctccgtacaccttgattaccttgaagctggtgcagatattattatcacagcatcctatcaggccacaattcaggggtttgaagcaaaaggcttttctagagaacaaagtgaaaact

SEQ ID NO: 205478 - DNA, 388 bp, Gossypium hirsutum
agaagagtactgggagtggagggaagaagaagggtcctgctcaatttagggtatacaatttggggaatacttcacctgtcctggtttcggatcttgtgagtatcttggagaggcttttaaaggttgatgcaaagaggaatgttatgaagctgccgcagaacggagatgtccggttcactcatgcaaatattagcttggctcagagggagctcggatataagccctcgactgatttgcagacagggttgaagaaatttgtaagatggtatctcagctactattctggtgggaaaaaggctgctggatagattcattgttttatattgtggtaggatcctcttgttcattatcattcttatcattgttttgaacatttctccgttcgatt

SEQ ID NO: 205479 - DNA, 395 bp, Gossypium hirsutum
ggaagtcaagcaacatggtggaagcaacttacaacattgacaaaacgatcatttgtcaacatgtgtagagatgtaggatattactgggcaaggattgtgatatacatacttgtatctatttgtgtgggaaccgtcttctatgatgtcggatatggcaatactgcaatccttgcccgagtagcctgcggtgcatttattacaggtttcatgaccttcatgtccatcggaggttttccttcttttatcgaagaattgaaggttttcaataaagaaaggctgaatggatattatggagttgcggcttatacactttccaatttcttgtctgcatttccgttcctagttacgatttcacttatcacaggaaccataacattttacctggtgaaatttcg

SEQ ID NO: 205480 - DNA, 330 bp, Gossypium hirsutum
ctgaatcattccaggatgatctaggaagcgccggtgcacttgatgtggatggcaaagagctgcctcgacttgtctatgtttctcgtgagaaacgacctggttatcagcaccatgagaaagccggtgctgagaatgctctggatcgagtttctgcagagcttactaatgcacccttcatattgaatctggattgtgatcattacatcaacaatagcaaggccattagggaagcgatgtgctttttaatggatcctcagtttggaaagaagctttgttatgttcaatttccacagagatttgatggtattgatcgtcatgatcgatatgcta

SEQ ID NO: 205481 - DNA, 367 bp, Gossypium hirsutum
gagagctctcgcgtcaatttgtacttctttcaatccgatttgactcagttaccttgttttaaggcgtttttggctcgctttccggtcgttcgtttcgatggcgtcgacctcaaaccgaaccggtggcggttcctcctacggcggtgcggctccttaccgatcaagagatggtttaagcacgagaccggtggctagctccgatgagatacaattgcgtattgatccgatgcatgctgatttggacgatgagatctctggtctccgtagccaagttaaacaattgagaaacgttgctcaagagatttgatcagaagccaaatttcaaaaggacttttttagatcagctgcaaatgaccatgatttaagc

SEQ ID NO: 205482 - DNA, 399 bp, Gossypium hirsutum
caaaagataactcagcaagtgctgttattacttgccctggtgtctgtgccatggatgctattaccaaagccttttcttctaaagagacaacacgaaaataggcaccaaggccaatcctacgcaccacttgaaagcacagatgaaactctcctttcagtcgcaaatcatgattcccatggtcatgaccatgaggaatttgagtttagtgaagtctttgtgcatcaactgatccataccatagagtttgtgcttggtgcagtttcaaatacagcttcataccttcgtttatgggccctcagtcttgctcactcagagttgtcagttgtgttctacgagaaggttcttcttcttgcttgggggtataacaatataatcatcctcattgtcggcataatcgtc

SEQ ID NO: 205483 - DNA, 210 bp, Gossypium hirsutum
gtttcccagtgctgcttgactaaacatgtatttagaatgagcaaacaatatttggccaatgtggcattgaaaattaatgtcaagggtgggggaagaaatactgttcttgttgatgcaatatcacgaaggataccttttgttagtgaccgcccgactataatatttggtgctgatgttacccatccttaccctgtggaggattcaagccct

SEQ ID NO: 205484 - DNA, 384 bp, Gossypium hirsutum
cctaagcaggcattgccctctatggtatggctttggaggtggtcgtcttaaatggcttcaaagactagcatatataaacaccattgtctatcctttcacatcccttccactcattgcctattgttcactaccagcaatctgtcttctcacaggaaaatttatcataccaacgctctcaaacctggcaagtgttctctttcttggccttttcctttccattatcgagactgctgttctcgagctccgatggagtggtgtcagcattgaggacttatggcgtaacgagcagttttgggtcatcggtggcgtttcagcccatctctttgccgtctatcaaggtttccttaagatgcttgcgggcattgacaccaactttactgtcac

SEQ ID NO: 205485 - DNA, 293 bp, Gossypium hirsutum
gacagattgatgggttgcaccaggttcttcgatgggctcttggatctgttgaaattttcctaagcaggcattgccctctatggtatggctttggaggtggtcgtcttaaatggcttcaaagactagcatatataaacaccattgtctatcctttcacatcccttccactcattgcctattgttcactaccagcaatctgtcttctcacaggaaaatttatcataccaacgctctcaaacctggcaagtgttctctttcttggccttttcctttccattatcgtgaccgctgtt

SEQ ID NO: 205486 - DNA, 392 bp, Gossypium hirsutum
tatcatctcaaatgaacagaatccgaaatggtgaactttaccgatacatttgcgacacgaaaggtgcctttgtacagcctgcattgtatgaagcctttggattgacagttgtggaggcaatgacttgcggtttgccaacattcgcaacctgtaacggtggaccagccgagattattgtccatgggaaatctggtttcaacattgatccttaccatggtgatcaagctgctgacatactcgtcgatttctttgaaaagtgtaagaaagatccatctcactgggataagatctcccaaggaggcttgaaacgaatagaggagaagtatacatggaagatttactcggagagactattgaccctgacaggagtgtatggattctggaagcatgtt

SEQ ID NO: 205487 - DNA, 404 bp, Gossypium hirsutum
gtgcgatgagccagtagtccagccagagacgccagagaagaaaggtttcctcgagaagatcaaggagaaactccctggacaacacaagaaagctgaagaggccagtagcccagctccagccccagcagctgagccccatcacgaaggggagtcaaaggaaaagaagggaattctggagaagatcaaggagaagcttcctggtaaacactccaaatcagatgaagaaaaagaaaaggcttgagattcaagttcacataaaaatactgatgggattgtgtgtttcttcaattgttaaaaaaatatctgtttttgttttgaggttgtatttgttgtatatttcatattaagtttcttcttttcccagcatttttagtacatatcataagaaaaaaaaagtttgcttt

SEQ ID NO: 205488 - DNA, 385 bp, Gossypium hirsutum
gtatgtatctttgaggaaaacatacatgaatacccttggttacaagaaaattgaactctttgatatgggagctggagtcagtgaacctacagctgatgaaaatgtttaaatggcatcatcaatgtcaaaccaagagcttgttgatcatgggatgaagacaatggatgagactgatcaggccattgaacgctcaaaaaaggttgttgaacaaacaattgaagtatgaactcaaactgctggtactctaaaaggacaaactgatcaaatgggccgtattgtaaatgagctggatacaattctagtttcatttaagaaggccttccaactggtgaatgagattggtaggcaggtagtcatgataaatgcatcatgctatttctttttt

SEQ ID NO: 205489 - DNA, 394 bp, Gossypium hirsutum
ccattacaacagcataaggcccctcagcttcattctcttcactcataggaggtaatctagatatataagctaacataggcaaaacaaaagcagcagtcttacctgatcctgtctctgcaatcccaattacatccctttgttgcaaccccaaaggaatagccgccatttgtataggtgaaggcttcttatacccaactctttccactgctttcaataactcggcagtcaatttactctcactccaactcctcattgggcgtggtattttcgaccctttataggaaatattaaaatcttccctgaaaatcctccaatctctttcagtcatttcctcaagcttcttatcagaccaatgcttatcgaccctcatatcaaaagtatcataagtattcgc

SEQ ID NO: 205490 - DNA, 281 bp, Gossypium hirsutum
ggcgagtttacttgagatgttgactggccggaggtccatggacaaaaacccaccaaatgggggacacaatcttgtggaatgggcgagaccgcatctatgagacaagagaaggtttttccggattttaaatactcgcgttgaagggcatttttatgtcaaaggtgcatttaaagcggcccacctggctgaccaaagtgttatcctagatcccaaagccagacctctgatgagtgaaattgttgaaactctatagccccttttataccttaatgatatggcca

SEQ ID NO: 205491 - DNA, 390 bp, Gossypium hirsutum
ggtttgagaagatacaaaagacagttaagaacgttctagatgctgttaatatattcaaaactccagtaaatatatcagatgcggctcatgtacgtaaggaatatgatgaatccagtgccaagttatctaaaatacagtcaaggatatcaagtttgacacaaaagctaaaacatgattttggactggagaaggagttctatgcattctatgatcgttgttttgagatcaagcagaacaagtatgtttacaaagtttgcccatacaaacaagcttcttaggaggagggccacatgacaacccctttatggcgttgggataaatttgaggacgcataccagatgatggtattttcaaatggtgataagtgctggaatggtccacaacgaaata

SEQ ID NO: 205492 - DNA, 366 bp, Gossypium hirsutum
gagaaatcctccatgttcaagccggtcagtgtggtaatcaaattggtggcaagttttgggaggtagtatgtgatgaacatggcattgatgccactggtaactatgtctgcactttgcctgttcagcttgaaaggcttaatgtttactataatgaatccagtggtggcagatatgtgcctagagctgagttaatggatcttgagccaggaactatggacagtttactaacaggttccttatggaaaattgtttagaccagataactttgttttcagccaaaatggaactggcaataactggtctaatggacattatacttaatgagctcaatcgaattattcaattcttgatgtttttcttaaagag

SEQ ID NO: 205493 - DNA, 395 bp, Gossypium hirsutum
aaatcgtttaaaaggtgaaatgagtcaggtgcgaaatgttatgatagagaatattgacaaagttttagagagaggtgatcgcttagaattgttggttgataaaactgctaatatgcaaggaaatacctttcgcttcagaaagcaagcgcgccgttttaaaaacacagtgtggtggagaaatgtcaggcttacggttgcgctcataataatcctcctaattgttgcttatatcgtgactgcgtttgtttgcaaggggcccacgttaccatcctgtgtctaaaacgaggtcaacagcttgagattcgaacacgttccgcatcccggtgcttcttttttccatttgtctccgtttttgtttgcttgtttctaatctgcttgggggatatatgtgggat

SEQ ID NO: 205494 - DNA, 374 bp, Gossypium hirsutum
ggactttccgggtcggtgggttacagctttcaaagtttgacatcattgaaagaattggacttgagccacaacaattttgcaggagatataccatattttactcttccgaacttgcagcgattaaatctcgagtataatcaatttactggcagcgtcccttttgccatcagtcagatgccttctcttcagtacctaaatcttgctcataatcagttgcagaatgcgctgaacgacatgtttggaccactttcttccctctccacactggatctctctttcaattctctgaacggtggtctgcccgagagttttaagaatcttaccagtataagctttatgtacttgcaaaacaaccagttttcaagcactattga

SEQ ID NO: 205495 - DNA, 379 bp, Gossypium hirsutum
agaagggagatattgctatttttaggaaaaaagttaatgacaaatcctgccgcaggaattctgccaatatgtgtaaacctaggggttcagatgatgtttggtacaagaaaatggaaacatgcataacccctttccctaaggtaagtagtgcaagtgaagtggcaggaggggaactgaagaagttcccagctaggctttttgctgtccctcctcgtatatccaaaggacttgttgagggggtctcagttgaaacttaccaagaggacaataagctttggaagaagcatgtaaatgcttacaaaaggataaatagattgattggtactgcaagatacagaaacgtgatggacatgaatgcttgtcttggaggatttgcagc

SEQ ID NO: 205496 - DNA, 403 bp, Gossypium hirsutum
tttgaattgcaacaaacaatagagaaacacattatgttttctttttcttgttctacataaatcaaactctgcctatttgaatgagaaggagaaattttgaacaaaaatcaaaactttcaatatccatgaaaatcaaagaaataaaccgaactcagttgtccttggtagctgcaatctgctttgcaccaactgcaaagaattccgtaatgacttcaagaggcatgcctttggtttctggaacttttaagaagacaaacacccatgatataacgcatacaactgcatacatgccaaagacgccagcaaggccaactgatttcagcagcaacgggagcgaatacgtgacaatgatgtcgcaaatccaaaaagttagggcgcatatagcaatgcagatgccacgaac

SEQ ID NO: 205497 - DNA, 396 bp, Gossypium hirsutum
cgaatgcccagtatcctatcatggctaccgggtttatgctatgcctgtgtttgacctgctggagaacatgatgatcaaaaggctcaacttcccaccagggattgctctcaggctcataagtcgatctacttacgtagcatttaccctgttcataggagtcactttccctttctttggagatcttctgggtttctttggtggatttggctttgctcccacttcatattttcataatgtggttggtgatcaagaaaccaaaaaggttcagcctcaattggttcatcaattgggggtgcatatttgtaggagtgttcattatgatggcattaacaattggaggtttaaggaatatcatagcagatgcttcaacatacagtttttatacatgaatgaatg

SEQ ID NO: 205498 - DNA, 356 bp, Gossypium hirsutum
acaaaacaggctctttatcaaaatgcctggataaggtgtgactaattaagtctctggaagagattgaaaaacagttgcaaatggaaagtgtatcccaagaccttgagttgggaaaatcaccaaatgcagatgtctctacacgattggggtatgaagaaaccagcatttctgagatcgaaaagtcttttcttcaatatacaatcagagtggcagataagaccgagcgtaatgaagtcgaagagatgcttaagagccaaatggttctatgtctaagcagcctaagctactgtcttaatgatttgaagagagaagccacagaaacagagaaagaaatagctgaactactgaaatgggag

SEQ ID NO: 205499 - DNA, 315 bp, Gossypium hirsutum
agaacatcagcttcactgtttgggatgttggcggccaggacaagatccgaccattgtggagacactatttccaaaacacgcaaggacttattttcgtggttgatagcaatgatcgtgaccgtgtggttgaagctagagatgagttgcacaggatgttgaatgaggatgagttgagggatgctgtgctgctagtatttgcaaacaagcaagatctttcaaatgctatgaatgctgctgagattaccgacaagcttggccttaattctctccgccagcgtcactggtatattcagagaacttgcgccacatctggtg

SEQ ID NO: 205500 - DNA, 394 bp, Gossypium hirsutum
accgatcagatagcagcagctccagctcttcaagcgacggggaagaaggtgaaggagaagagaagaagaagaagaaaaagaaggagaagaaggggctgaaagaaaagattgaagagaagttagaaggagaaaagaaagaagaggacacctcagttccagtagagaagtgcgatgagccagtagtccagccagagacgccagagaagaaaggtttcctcgagaagatcaaggagaaactccctggacaacacaagaaagctgaagaggccagtagcccagctccagccccagcagctgagccccatcacgaaggggagtcaaaggaaaagaagggaattctggagaagatcaaggagaagcttcctggtaaacactccaaatcagatgaagaaaa

SEQ ID NO: 205501 - DNA, 366 bp, Gossypium hirsutum
acagaaaagatggacatttttaaatttctgcaattagtacaccaaatttgtgttctaatagcacaacaatatgcatccacacacttaatggtttgattttttttcgaaagcaaagcactaactcgagttccctgcactcttcattgtgttacacttccatgaaagtattccgttacaaattcggctatgtagagcacaacttgtctcaccttacagttctctggctgattgttgagtcagcagggtggtacggtccaataggcggtagggcgagaaagttgatcatatatttgaagcacttaaggccattactttgcattgttcattcatggccaaaagttgagcttctttcttgtcgagaagtgc

SEQ ID NO: 205502 - DNA, 349 bp, Gossypium hirsutum
ccgccgactatatttgtcctttgctgataatgcttaggtgctggaaggttcctgtggcaaatctcttgcttctttccctcaatgctgtttctactccacagcactttgaggattaataagctatgataatcctaagaacaagatcactgcagtgcctgctgaataagatgatatatggggtgctaatttcaaagtggaagggccatctgtttttgctgacacaaattattcctttgctctctccttttaaatctatggatccatggaattatatgagctgcatatgcatttcatatggatcaatccccatattaaagtacttgtttagtgtctaatgaaatgaataaaa

SEQ ID NO: 205503 - DNA, 403 bp, Gossypium hirsutum
aaaaaaacaaaaaacatatttccagaaacaaagaggacacgacaaatcccctccgttcttcagtttcttcctgacaaactaagaagaaaaaaatggctgtctcttcggccacattttccacttttgtctcgccccaaacggtgtcgttctcgggcaaacccttttttttcggtttttttaatccaactaacgtgcccttggtccgaaccttgcttaaggccacggtttcaaagacggacagcggtccccggaagccgcgtggcatattgaagccccgccctgtgtcgcctgagatgcaagctctcgtgggagtcccggaaatccctcgaactgaagttcttaagcagatttgggcttatattaaagagcacaatcttcaggaccccaataacaagaggtttat

SEQ ID NO: 205504 - DNA, 302 bp, Gossypium hirsutum
ccgacctccaatgagaacacggtcagggttaaaaagatcttgaatagcagttccctcggcaagaaactctgggttcgaaagaatttggaaattgattcccttgctattgtgggtgagaatcttttcgattgcctcagcagttttgacagggactgttgatttctcgaccacaatcttatcagattttgatacatcagcaatcattcgagcagcactttcccaatatgtaagatctgcagccttgccagctccaagccctcgagtcttggtcggagtgttgacggaaacaaagactatatcag

SEQ ID NO: 205505 - DNA, 388 bp, Gossypium hirsutum
gctaaacttcaaccagatggaattggcttttctgacttaccaaatcacaaggccattctcgagacaagccttcgtcagcatgctaccctttctcaagatgatgttcttacagttaaatatggggagttgacatataagttacgtgttcttgagctaaaaccctcttcaagcatttctgtcttggaaacagatattgaggtggatattgtcaaccctggtgttgaatcagagaggactgatcaatatgtcctaaaaccactagcgtttggtgcatcagaatctggattggttgaggagggaaattacatgtactataagttctcaattgatgatgatacatgggaaaaacttgtttctgatgatgtcaaaatagaagtgaagatagatg

SEQ ID NO: 205506 - DNA, 334 bp, Gossypium hirsutum
tgctgagcaccatagctactggattggctattgatgcttatggtcccatcagtgataatgctggaggcattgctgagatggctggcatgagccacagaattcgagagagaactgatgctcttgatgctgcaggaaacaccactgctgctattggaaagggtttcgccattggttcagcagcccttgtgtcccttgccctctttggtgcctttgtgagccgtgctgctatttcaacagttgatgtattgacccctaaagtttttattgggttgcttgtcggggcaatgcttccttactgtttctctgctatgaccatgaagagtgtgggaagtgc

SEQ ID NO: 205507 - DNA, 392 bp, Gossypium hirsutum
tttccacagagatttgatggtattgatcgtcatgatcgatatgctaatcgaaacgtcgtcttcttcgatatcaacatgttgggattagatggacttcaaggccctgtatatgtaggcacagggtgtgttttcaacaggcaggcattgtatggctacgatccaccagtctctgagaaacgaccgaagatgacatgtgattgctggccttcttggtgttgctgttgttgcagaggttctaggaagaaatcaaagaagaaaggcgaaaagaagggcttactcggaggtcttttatacggaaaaaagaagaagaagatgatgggcaaaaactatgtgaaaaaagggtctgcgccagtctttgatctcgaaaaaatcgaagaagggcttgaaagata

SEQ ID NO: 205508 - DNA, 402 bp, Gossypium hirsutum
gtttctcctgatccgtttggaccagaagcaaaatattttacagaagttcgctgtttgaatagagaggttcgtattgtcctcgaaggtgtagacaaattcagcaatttgattgggtcggtttattatcctgaaggtgatacggcaaaagacctcgctttggagcttgtggaaaatggtctagcaaaatatgttgaatggagtgctaatatgatggaggatgataccaagcggcggttgaagtctgcagagcttcaagccaagaaggctcggctgaggatgtgggcaaactatgtaccgccagctacaaattccaaggcaattcgtgatcaaaacttcacaagaaaagttgtggaagttgttagtggggactgtattgttgaggctgatgattctatcccttat

SEQ ID NO: 205509 - DNA, 384 bp, Gossypium hirsutum
cgattttctttagagttttaaatttgatcttctcttccaaaatcaaatccaaaaagagagaaaatcccaccaaaaaaatggcgatttctaatgacaacaacaacgacgagcaccatgaatcgagtcctcttttgagcaaacaagtggcagaccaagatttgaaggagaaaccaagtggtaaaaaggcaaaagaagctgccgccgaggtgccagctcatccggtagttgctaccggagatgggtttgggtggacagctgatgggttgccgttggtccaccggagtgtcgtcggagaacccttgggtcgatctcaatggaactcatctctccttgcttgtcttggccgtaacgatgaattttgcagcagcgacattgaagtttgtc

SEQ ID NO: 205510 - DNA, 285 bp, Gossypium hirsutum
ggcaaaaagaacccaccgctttattgttttcaaaatcgaggagaagcagaagcaagttattgcggagaagcttggtgagccaactgatagctatgaagattttacttaatgtcttcccgctgatgaatgtcgttatgctgtgtacgattttgattttttaacagccgagaacgtcccaaagagcataatctttttcatcgcatggtctcccgatacatcaaggatcaggagcaaaatgatttatgctatctccaaagacagattcaagctagaactggatggaat

SEQ ID NO: 205511 - DNA, 281 bp, Gossypium hirsutum
tagatactgtgttgcaaattctcctaattttttcagaaaatggtgcggaatggaaaaaatgagggagatccttcatgttcaaagtggacaatgtgggaaccaaatcggttccaagttttgggaggttgtttgcgatgagcacggtatacatccaactggtaggtacattggtttctttgatctgcaattggagcgtgttaatgtttactataactaggctttttgtggtcgctaagaacctcttgctttgctcatggacttggaaactggtactattgaca

SEQ ID NO: 205512 - DNA, 370 bp, Gossypium hirsutum
aaaaaacctacaccgccatccctcgtaacgcacagcgactgttcccagactttatccgaggaatttcttttgtcatttcgttgataatccgaacttcaattctttaaaaaggctttggattcttggataaggcctctttgataaacaaagtttcatgtctgatctcgacgtccaggttcctactgcctttgatccctttgctgatgcaaatgctgaggactcgggtgctggtgcaaaggagtatgttcatatccgtgttcaacaaaggaacggtaggaaaagcctgacgactgtccaagggttgaagaaagaattcagttacaacaagatacttaaagacctcaagaaggagttttgctgcaatggcact

SEQ ID NO: 205513 - DNA, 394 bp, Gossypium hirsutum
cagggaaaaggggagaaaaaaaaacccccagtaaccacttaagacctaaaaggtaaaaagagggggaaaaaaaagaaggggaataatggtttggttttggttgggttctgaatgataattcttttcctcgattaaggcttaaaaaactctggtttccttcacttcttcactttcaggggggctttgagttacttatcggcgtactactagaaacctttcttgttaagtatcttctgcatcatacataggaagctagatgggttccagattcccatctcatcagctcagcaatgggctttacgtgtcaggcaggccagagcagcctaaagaaaggactccgaccatgagctcagtggccatgccctatactggtggagatattaagaaatcagga

SEQ ID NO: 205514 - DNA, 350 bp, Gossypium hirsutum
tgagcggagctcttacggcggcgtatttagctcgaagagcggcgcaaaaggagagggttcggatcctctaccgccgtgccctgaaagacacactcaactgggccgtccatcgccacctcttttatcaagatgcttctgaccttcgcgagaaattcgaagccaacaagcatgtggaagatcttgatataatcgacaaaatgatagatgcaggtgaagcaacttataataagtggcggcatcccgatccttatatcgttccttgggctcctggtgggtccaagattactcgaaaccctggcccaacttctgggatcgaaatcgtgtatgattatgggctagaagaaaatgac

SEQ ID NO: 205515 - DNA, 400 bp, Gossypium hirsutum
tatggcccagcctttgcttctccaaagcgagtgattgcatgtcttattgaaaaggagattgaattcgagactgtccctgttgatttgcttaaaggagagcacaaagaccctgaatttctcaagctccagccttttggaacagttcctgtcactcaagatggagattatgttttatatgaatcccgtgcaatcataaggtactatgcagaaaaatacaaatcacaagggactgatctactgggaaagacagtagaggaaaggggtcaagtggaaaattggctagaagttgaggcacacaatttcaacccatcaatttacgccttgaccctacatgtgatgtttgcttccaagatggggttccctcctgatgaaaatttgatcaaagaaagcgaggaaaagc

SEQ ID NO: 205516 - DNA, 403 bp, Gossypium hirsutum
aaatccgaagatgaagaacataaaaagaaggtcgaggcaaagaatgcattggaaaactatgcatacaatatgaggaacacagtgaaggacgagaagattggtgctaaactcccagcagctgataaaaagaagattgaagatgctattgaacaagccattcaatggctagacagcaaccaactcgccgaagccgatgaatttgaagacaagatgaaggagttggagagtatttgcaaccccatcattgctaagatgtaccaaggtgccggcggtgacatgggtggtggcatggatgaggatgttccggctggtggaagtggtgctggtcctaagattgaggaagttgactaaatcattgattttcttcacctggtttctctattggtctcttatgttttttggg

SEQ ID NO: 205517 - DNA, 398 bp, Gossypium hirsutum
ctcaaaaagagaaagattgaccgaaacaatcggatggctgcacaccttgaatccaaggagggaaaggcatctgaagcttttcttagaaagtatcgtcttcatgggaacttgggggaatcagaggacattgatattgtggcactaaagaactacatggatgctcagtactttggtgagattggtattggcactcctacacagaacttcactgtgatatttgacactgggagttctaatttgtgggttccttcatctaaatgttatttctcgatagcatgctatttccatccaaaatataaatcaagccgttcacgtacctacaaggctaatggtaaaccagcggatatccaatatggcactggggctatttcaggattctttagtgaggaccatgtaac

SEQ ID NO: 205518 - DNA, 399 bp, Gossypium hirsutum
  unsure (1)..(399): unsure at all n locations
ggattttcgagagaaatgagtgccacaagacaccgggcccgtagggggtggggttaaccatgtattggactatttgagacgaatgcaagcggagaatccttcgttcttttatgcaattcaaggtgataatgaccacaccggtggaagcatattttgggcggatgcaacatcaaggatgaattatgcttactttggggatactgtcatatttgacacaacatataggaccaatcgttatagggttccgtttgcctcgtttactggactcaaccaccatgggcagccggtgttgtttggttgtgctttaattctcaatgactctgangcctcatttgcatggctnattcaaacttggcttcatgcaatgtctgatcgtcgtcccatctctataacaactga

SEQ ID NO: 205519 - DNA, 389 bp, Gossypium hirsutum
caacaatttcttgtttacgaatatatacccaatggaagcgggtccattcacttgtacggagttggtcaagtctcagctcagaagatagaattcaagcatagactttcaatagctctaggtgcagctaaaggtgatcctctgcaaaatcagcttggctcatctccactctttaagtcctcgattggtacataaagatttcaaaacggcaaatgttcttgtagatgagaattttatagcaaaggttgcggatgcaggactgcgtaattttctgggaagaattgatgttgctggaccttcttctcaagtgacagcagatgagatatttcttgctcctgaggtgagggagtttagacgtttttccgaaaaaagtgatgtgtatagtttcggag

SEQ ID NO: 205520 - DNA, 335 bp, Gossypium hirsutum
tgaatctgaccatgtattcgaaaataccgggcctgatttggctgatggaagggatccaacatgatttcctttgttttacattaagccttctgaccaccaacatgttattacgaagtattatcctgaggagaagggtcctgtgaataatatcgatccaattggcaattctacagtgatatattagaacgtctgcgctggagaaaattgcacctacatggatgaatatttctttgaggatgaaagatgacccattgactgacaaagcatttggatgggtgctagaaatgtatgcatatgctgtggcatctgcactgcatgacgtgcaccacatactt

SEQ ID NO: 205521 - DNA, 385 bp, Gossypium hirsutum
ggccgcacccttgctgactacaacatccagaaagagtcgaccctccaccttgtccttcggcttaggggtggcatgcagatctttgtaaaaacgctcactggaaaaaccatcactttagaggtggatagttctgatacaattgataacgttaagtccaagattcaggacaaggagggcatcccaccagaccagcagaggttaatttttgctgggaaacaacttgaagatggcagaacccttgcagactataacattcaaaaggaatctaccctccatttggtgttgcgtcttcgtggtggtatgcaagtttttgtgaagaccctcacaggaaagactattaccttggaagttgagagttctgatacgattgacaatgtgaaagcta

SEQ ID NO: 205522 - DNA, 344 bp, Gossypium hirsutum
attctaatggctgaacctgaccatgtatttgtaaatcctgtgcctaacttggctcgtggaaaacatccagcagggtttcctttcttttacattaagccgtctgaccacgagcatgttattaggaagtattatcctgaggagaagggtcctgtgaagaatatcgatccaattggcaattctccagtgattattagaacgtctgtgctggagaaaattgcacctacatggatgaatatttctttgaggatgaaagatgacccagtgactgacaaagcatttggatgggtgctagaaatgtatgcatatgctgtggcatctgcactgcatgacgtgcaccacatact

SEQ ID NO: 205523 - DNA, 394 bp, Gossypium hirsutum
aaatggttctgctagacaaaatgtgggacgatgtagtagctgggcctccacctgaacgtggtctcggcaggcttaggaagatcaccacccagcctttgtccatcaaagatgaaggagaaaggaaaaagtaccagaggtcgttgtcgctgccgaatagtccagtgtcaggtccgacacccgtgacaccgacgactccgacggcgcgtaaggagaacgtgtggaggagtgtgttccatccgggtagcaacctcgccaccaaaagtataggttctgaagttttcgacaagccacaacctaactctcctaccgtctatgactggctttacagtggggagaccaggagcaagcatcgctgagagggtggcgactgacaggcggctagcaagctgctcta

SEQ ID NO: 205524 - DNA, 389 bp, Gossypium hirsutum
cttgtttctaactttgctgctttgttctcttcttctatgttcttcagtttttgaaccaacaatggctcagcctcgttcacctttttgtgaagggaaatgcaaagggaggtgcaataaagcggcggtttgggatcgatgcttcaaatattgcggcatatgttgcgaggagtgtaaatgtgttccttccggtacttttgggaacaaacacgagtgtccttgctacagagacaaggtgaataacaagggcaaacccaaatgcccttgaaaatgaaatatattcgagttcgggatttcatcaagcttaaagatcgaggacgaagaggctatatatatatatgcatgctgatggtgttattataaaaatgaactgttttattgctgttgttttc

SEQ ID NO: 205525 - DNA, 394 bp, Gossypium hirsutum
gagctgcttcaagtgtccacactgtggtgaagcttcgtgcatctttggtgctggtggagcccgtaaaacagcagctgagatgggtttgcaacttgttggtgagatacccattgaattggacattaggaaaggctgtgacaaaggcatgccgatagtggtatcagcacctgattccgctgtctccaaggcttaccatgatgtagctcaaactgttgtcatgagacttgaggatctggcaaaggcatgaaactactcttgaggttggtcagtgaagtttactcgtgccatccatctccattcctgtgctttcgtggtggtgctttgttcatcttgatataaataatttttgagtttgagcatttttggtcattcgatgacactattaagcatttgg

SEQ ID NO: 205526 - DNA, 391 bp, Gossypium hirsutum
atggatgagttgagcaagacattaggggagttgaagcgacgggttaggggagacgttggggtttcaaatgagtaatgcgcggacatgggtgagtgcggtgctgacgaatgaggacacgtgtcttgatgggttcgaaggagttgacggcaaggttaaatctaatgtgaagaggaagatcacgaatgtggctaaagttaccagtaatgctctgtacatgatcaataggctcaatgaaagtcgtggtaggcaccgttgaatctttgatgatgatgatgatgaataatggatggatgcgatttatttagcttattatgggtcttaaatataagttcttattttgattttggttgcaagctgtatatgtaatgctttctatacatatattaagcat

SEQ ID NO: 205527 - DNA, 394 bp, Gossypium hirsutum
tttggctgcaagatttggtttcttggaccaagattggcaagatttgaaatcttgattgtcttgattcttgaaatctcttcgaagagcaaaattgggccaagattcggtttcttgattttcttgacaacaagaaagtgaatcttgattttcttgttctctcgtgtatgcatctaaggccttgctaacaagctcttgaatggtcccatttagtttggaccgcatttgtcgggcctttgatctcgttattgggccttgtggcaatttgagcccatcacgttcttaaacttggattgggcctttatgactcgtattagcccgatcgtgaattaggagtaaattgaggctttacaaaataggctagaagaaagagggttatttaagcttaaaagggttt

SEQ ID NO: 205528 - DNA, 392 bp, Gossypium hirsutum
aaaaatgggagatcagttagcgaaaggagaagaattcgtgaagaaagcagagaaaaagctaaatggttggggcttgtttagttctaaatacgaagacgccgccgatttatttgataaagctgctaattgcttcaagcttgccaaatcatgggacaaagctggatcaacttatgtaaagttggcgaattgccatttgaaatcagacagcaagcatgaaacagctcaagcttatgttgatgctgctcattgttataagaaaacagctacaaaggaggctatatcttgcttgcagcaagcagtgaacttgttttgtgatattggaaggctaagcatggctgcaaggtattataaggaaattgctgaattatacgagtctgaacagaacattgagc

SEQ ID NO: 205529 - DNA, 341 bp, Gossypium hirsutum
tagacctgccacacgtgctcttaaacgtgcccttttggtggcacttaggtgtgttgatcctgatgcaaataagcgacccaaaatgactcaggttgtgcgaatgcttgaagctgatgaatatccatttcgtgaggaccggaggaacagaaagagccgaacagccagcatggaaatcgaatcattgaaggaaccaacggacgcggagagcaaggccggggaatcacagagcagcgtaaccaagacgacgcatgagtaataggactactgacaaaaaagcaatgacatggtgaataattggtgtagtatttaaagcttttcggctacccattgatacatgtaca

SEQ ID NO: 205530 - DNA, 404 bp, Gossypium hirsutum
tgctttagagtattacgatcgctcctttgatcgaattaccccgaagaacgaacggagactcgagaggttcaagaacagaaacttctttaaagtcaccacgactgacgacccggtgatccgaagattggcaaatgaggacaaagcaactgttttcgccactgatacgattctggcaacgttaatgtgtgcacccaggtcagtttattcttgggacattgtgattcaacgtgttgggaataaactatttttcgacaaaagagatgggtcacagttagatttgctatcagtccacgagacctctcaggagccattgcctgaagctaaagatgatattaactctgcttattcattgagtgttgaagcagcttacataaatcagaatttttcacagcaggttttggtta

SEQ ID NO: 205531 - DNA, 396 bp, Gossypium hirsutum
gagaattaaggatgtggcggtgccagagaaggaacgggaggcaaaaatggtggctgtcggagccatggatcaccacaacttggtcccgttaagggcgtattacttcagtggggatgagaagcttcttgtttatgattacatgcccatgggaagcttgtctgcacttttgcatggcaacaaaggagctggtaggacaccattgaattgggacacacggtcaagcattgcacttgaagcagctagaggcattacatacctccattccaagggaccattaatctcacatggaaacatcaaatcctcaaatatcctactcactacatcctacgaagctcgtgtatccgatttcggtcttgctcagtttgctggccccacatctaatcccaaccgtgttga

SEQ ID NO: 205532 - DNA, 394 bp, Gossypium hirsutum
gttcctacctcggcaaagtggtgatcttacaattatgggtgatgtgacgagaacgtacgactcgaactattgggcacaggttactatctcaaaccataacccccttgggcggcttgataattggaaattgagttttgattggatgagggatgaatttatatatacgatgaaaggggcttatccgtatgtcgttgattcatcagactgcatatttggtccgcaaggacaacactatagggatctagactttggcaatgtgttgaactgtgagaggaggccgacgattattgacctgcctctgacaaaggcaaacgatacaaccatggggatgatcccaaaatgttgccggaatggtactattttgccaccaacaatggaccctagcaagtcaagt

SEQ ID NO: 205533 - DNA, 392 bp, Gossypium hirsutum
acagactttaagcagtaccaagttttgaagcagaacccagggtggtggactcaccaaaggcatgatggcaaattgtggaacttgaacaactatcgaactgatgttatccaagctcttggaggtgttgagggaattctagaacataccttgtttaaaggaacatactttccaacttgggagggtctgttttgggaaaaggcttctggattcgaggagtcaatgaagtataagaagctcactaatgctcagagatctggtcttaaccagattcctaaccgtaggtttactctttggtggtcacctacaatcaatcgggctaatgtttacgtgggttttcaagtgcaactagatctaactggaattttcatgcatgggaagattccaaccttgaa

SEQ ID NO: 205534 - DNA, 391 bp, Gossypium hirsutum
ttgagagataatagcatgagttcttacatgtccagcaggaaaacaatggagattaatcccgataatggaataatggaagagctaaggaagagagctgaagccgataagaatgataagtccgttaaggatctcgtactgttgctgttcgagactgctctattgacctctgggttcagcttggatgatccgaacacattcgcaggtagaatccatagaatgctgaagctgggtctgagtattgatgaggacgggaccggtggtgatgatgcggacatgcctactcttgaggaagatgaagctgagggaagcaagatggaagaggtggattaaaaaaatcataattaatttcacttttctgctttctgatgatttcatggttttggtttttgtc

SEQ ID NO: 205535 - DNA, 226 bp, Gossypium hirsutum
gatcttatgctaaatcatcatgtgctgctctttttgtggcgtccatatcatcctttggtatcagccataagtttacagcaatgtcttatcccttgctcattaactcaaagggaattgaggtatgtttgataactacactttttgcaactgatctgtttctgatcaataaagtacgtgtcatactaccgttattcaaaccacaactgcttattttcacacaacttat

SEQ ID NO: 205536 - DNA, 362 bp, Gossypium hirsutum
ggcaagtacatctgcacttcagaaggctttctggggtcctggctgtttcaatcccaagaccagagatgattgttgggaagaagggattaagcgcaggaagtaaggcaaggccagtgtttgtgcagtttgtccttgaaccactttggcaggtttaccaggctgctttggagccggatggggacaaagggacacttgagaaagtgattaagtcttttaattagtctattcctcctcgtgaattgcagaataaggacctcaagattgtgcttcaagctgtcatgagtagatggcttcctttgtcagatgcagttttgtcaatggtggtgaagtgtatgccacatccaatttctgctcagtctcac

SEQ ID NO: 205537 - DNA, 386 bp, Gossypium hirsutum
gcagaaaatggtcctagacaatttggcaatatctgtattgatactaaatggatacaagaaacagaaacctcattattgatacgcaacttggaagtaaattataaggagtcagaggacccaccattatcagttttgcacattcaatatcctgagtggcctgaccatggagttcccactgacactcttgctgttcgtgaaatcttgaaaagagtattacaagtaccagtaaatattggcccaatactggtgcattgcagtgcaagtattgggaggactggaacatactgtgctattcataacaccgtccagagaatcctcattggggacatgtctgcattagaccttgctaatacgatatctatgttcaagtcccagcgcatcggaat

SEQ ID NO: 205538 - DNA, 388 bp, Gossypium hirsutum
atgatattcatggactacgagtcattgttgaaaatgaggaagactgttatgaggctttgagagtagttcaccagttatggtctgaagtgcccggaaagctgaaggactatataagtcgccctaaatttaatgggtatcagtccttgcacacggtggtgatgagtgaaggtacagttccacttgaagttcaaattcgaacaaaggagatgcatctgcaagctgagtttggctttgcagctcactggagatacaaggagggtgactgtaagtactcttcatttgtacttcagatggttgagtgggctcgatgggttgtgacttggcattgtgaaacaatgagcaaggaccaatcgtcaatatgctacattgattctgtcaagccaccctg

SEQ ID NO: 205539 - DNA, 395 bp, Gossypium hirsutum
gatagttgagagacacacctcaaaaaggatctagaaaagagaatatctcatccttttattttcatttcgtcttcttttcagctcaaattcatcatcgaaattacttgtagttatcaaaatggggacaataggcaaaactactacggccgctctttttctttgtcttcttctgtttcctattgtcttttccacgcctaatgacagattggttagaattggactcaaaaagagaaagattgaccgaaacaatcggatggctgcacaccttgaatccaaggagggaaaggcatctgaagcttttcttagaaagtatcgtcttcatgggaacttgggggaatcagaggacattgatattgtggcactaaagaactacatggatgctcagtactttggtg

SEQ ID NO: 205540 - DNA, 272 bp, Gossypium hirsutum
  unsure (1)..(272): unsure at all n locations
ccaactcgccctgacaaggctcgtcgattgnngtacaagccaagcagggttatgttgtctatcgtgtccgtgtaaggcgtggtgggaggaagagaccagttcctaagggtattgtatatggaaagccaacaaaccagggtgttacccagctgaaattccaacgtagcanacgatcagttgcagaggaacgagctggccggaagcttggtggtcttagggtcgtgaactcttattggatcaatgaggattcaacttacaaatacttttgaagt

SEQ ID NO: 205541 - DNA, 327 bp, Gossypium hirsutum
aagggcctatcgtgattctccgggaggaatacccgcagcttggcggtgttttcacattgaacttggttaacaagaagattactctcttggttgggcctggggtttcatcacacttttttaaggcttcagaatcagacctcacccaacaggatgtctatcagttcaatgggccaaccttcggtcctggtgtggtttttgatgtggattacactattaggcaagagcacgtcctgttctttacagaggcccttagagttaattaacttaagggttatgttgatcagatagttacagaagcttaggactacttctcaaaacggggggata

SEQ ID NO: 205542 - DNA, 370 bp, Gossypium hirsutum
  unsure (1)..(370): unsure at all n locations
gggaacnnaaacgcagccgcccacgaccaaacccccnaagaagaacaaaatcaccatcacaaacgacaagggccgactctccaaagaagaaattgaaaagatggttcaagaagcagagagatacaaatccgaagatgaagaacataaaaagaaggtcgaggcaaagaatgcattggaaaactatgcatacaatatgaggaacacagtgaaggacgagaagattggtgctaaactcccagcagctgataaaaagaagattgaagatgctattgaacaagccattcaatggctagacagcaaccaactcgccgaagccgatgaatttgaagacaagatgaaagagttggagagtatttgcaaccccatcatt

SEQ ID NO: 205543 - DNA, 364 bp, Gossypium hirsutum
  unsure (1)..(364): unsure at all n locations
aaaaacacaccctaaagagacaatganaaagctgctacctttgccggtcgtttcttcttcttttgggataaaacattagctcaaatagctccggcgccgccgttaaaagtggacaacatcacttccatcctcgaaaaaggtgggcaattcaccactttcatcaagctattgaaagccacacaggtggctgatcaactaaacaaccagctaagcacaccggaccctaacgacgggataacggtgtttgcaccgagtgacaacgcgttctacggactcaaacccgggacgttgaactcactttccgaccaagagaagcttcagttggttcagttccatatactcccgacgttaatgtccacgtcgc

SEQ ID NO: 205544 - DNA, 253 bp, Gossypium hirsutum
  unsure (1)..(253): unsure at all n locations
aaactccgctttcgtcaacacgcgcgtggactggaaggagacacccggaggcacacgtgtcaaggcggaccttcccgggatggagaaagaggaggtgaaggtggagatcgaagacgatagggttctccaaatcagcggagagaggcacgtggagaaggaagacaggaacgacacgtggcatcgagtggagcggagcagcgggaagttctcgcggaggttcangttgccggagaatgtgagaatgggcgacgtg

SEQ ID NO: 205545 - DNA, 376 bp, Gossypium hirsutum
cttcttattcctttattgctttttagaatttttcttaatcaaaatgagagagtgcatttcgatccacatcggtcaggccggtatccaggtcggaaacgcttgctgggagctttactgtctcgagcatggaatccagcctgatggtcagatgccaagtgacaaaactgtcggaggaggtgatgatgcttttaacacctttttcagtgaaactggtgctgggaagcacgtccctcgtgccgtcttcgtggatcttgaacccactgttattgatgaagtgagaactggtgcttaccgccagctcttccacccagaacaactcatcagcggcaaggaagacgcagctaacaactttgcccgtggtcactacaccattggc

SEQ ID NO: 205546 - DNA, 375 bp, Gossypium hirsutum
cccactcaccatcttttttattaacaatataattacaatatcccataaattactgcatgatgatggcacatgcaccagtgtcatatggcttaaggcttagtgctcgagccagactgagtaaacatggacttcggccattcaggcattttaacccactcagggtactatgcctttctcaggtttcttctcctcttctttttcatgctttgggaactcatgtttatgttccttatcctcatctagtttttccttgcactcaggtattttcggatattcggctttatgtttctcgtgctctttaggcttttcccctttggggaaattgggtttttctttctcgtactcttcgtgctccttcgattcgtgtgactcgtg

SEQ ID NO: 205547 - DNA, 346 bp, Gossypium hirsutum
  unsure (1)..(346): unsure at all n locations
aacaccaaaccaaaagaaagatggcagtaatggcggatcaccattccctggctgttgtttttggtatattaggtaacatcatctcagtcctcgtatttctggcaccagtgccaacattctgtcggatttacaaaaagaaatcgactgagagtttccagtcactgccataccaggttgcattgttcagttgcatgctatggctgtattacgcgttgattaaaaagggtgctttccttctgatcaccatcaactcttttggatgtgttgntgagactatttatatatctatgttctgggcttatgcttcaaagaatagcaggatgtcggctatgaaactttttatatc

SEQ ID NO: 205548 - DNA, 382 bp, Gossypium hirsutum
  unsure (1)..(382): unsure at all n locations
tgaaaagttgtgatttttgttgaagtgggggttggnnttctcttttaatagttttagaaatgggtttgatggagatttcaataatgcttcatgttggattagttttgttcctgctttggacgctttctcaattcaatctttgccatccagttgcttatttcgtgtctctcatctacctctatttggttcatgaaaggtatgtggcgagattgaggaagaaattggagttcgaggaaaaacgccaacaatttaggagaagggtactttcggattccgaatctgttcggtggctaaaccatgctgttgaaaaaatatggcctatttgtatggaacagattgcatcacagaagattctgcttcccatcataccttggttcttggc

SEQ ID NO: 205549 - DNA, 316 bp, Gossypium hirsutum
  unsure (1)..(316): unsure at all n locations
aggtttgaccaggctacttatgataagcttttatctgangctccccgaagnaactcatcactccctcaattttgtctgatcgtatgaggattaatgggtcccttgctaggaaggctataaaggaattgatggcaagaggatcgattcgtttggtgtctgcccattccagccagcagatttacactagggcaaccaacacctaaatcccttggtatattttttcttaaattaagtctaatgagtatttggctttcttgactttctataaaatgattttcccttttgctaaagaccctcatctaaaattgtgtgagct

SEQ ID NO: 205550 - DNA, 294 bp, Gossypium hirsutum
tgtttataggactcatgtcaggcccctgcaagagcagcttcagaaactgccaaagccttttccgattttgaagatcaatcccgagaaaaacaatatagattcctttgtggcttctgatttcaaactcatagggtatgatccttacaagaaaatagagatgaaaatgggtggatagagctttattttagggtctggaaaaccaaagtcttcaggggaattttggacaggatcttcttaagtttaaagggcaggtactggaaggttatggtgatgtaatgacttataccgataggc

SEQ ID NO: 205551 - DNA, 346 bp, Gossypium hirsutum
  unsure (1)..(346): unsure at all n locations
ggaaatcttgcatatccaaggaggccaatgtnnnaaccgatcggggctaagttctgggaagtcatatgcgatgagcatggaatcgacaacactggaaagtataacggtgactccgatctccagctggagcgtatcaatgtctactacaatgaagccagtggcggtaggtatgtccctcgcgctgttctcatggatcttgaacctggcactatggactccgtcagatccggtcttttcggccagatctttcgtcccgataactttgtcttcggtcagtctggtgctggcaacaactgggccaagggtcattataccgaaggagctgagctcattgattctgttctag

SEQ ID NO: 205552 - DNA, 383 bp, Gossypium hirsutum
  unsure (1)..(383): unsure at all n locations
cttttcttctcttctcttgtcttctctcctnnnnnnnccactttctgatgctatggagatagaggtagcaagctgctgtaagaaaggtgccggtggcgcttctcatgaggatgagctcaggggtgtttacttggtttggcaggacctcacggtggtgttgccaaactttggtaataaaccaaccaaaaggttgcttcaaggacttagtggatatgctgagcctggcagaatcatggccattatgggtccttctggttccggaaaatctactctgctcgactctcttgcaggtagacttgccagaaatgtggtcatgactggaaatatccttttaaatggaaagaagaagagactagagtatggtgctgttgcttatgtaactc

SEQ ID NO: 205553 - DNA, 275 bp, Gossypium hirsutum
ggaggaggaaggctgaggagattaccaaggaagaatatgctgctttttacaagagccttacaaatgactgggaagagcatttggccgtcaagcacttctcagttgaggggcaacttgagttcaaggctgtcctctttgtccccaagagggctccttttgatctctttgatacaaggaagaagcccaacaacattaagctctatgtgagacgtgtctttatcatggacaactgcgaggagttgattcctgaattcctcagctttgttaagggtatt

SEQ ID NO: 205554 - DNA, 392 bp, Gossypium hirsutum
  unsure (1)..(392): unsure at all n locations
gnnnnnnnncatnnncnagnnccttccttcnccgnnnnnnntttttgttacctcgatttcaagtgaatcagaatgggtaaggaaaagactcacattaacattgtggttatcggccacgtcgattctgggaaatcaaccaccactggccacctgatttacaagcttggtggtattgacaagcgtgtgattgaaaggttcgagaaagaagctgctgagatgaacaagaggtcattcaagtatgcttgggtgcttgacaagctcaaggctgagcgtgagcgtggtatcaccattgatattgccttgtggaaatttgagaccacgaaatactactgcactgtgattgatgcacctggacaccgtgactttatcaagaatatgattactggtacgtc

SEQ ID NO: 205555 - DNA, 348 bp, Gossypium hirsutum
  unsure (1)..(348): unsure at all n locations
gagagaactagtctcgagttttaagtgccaanancnccgattcaagttataataatgtataccctgggaacgaagatgaagcacgtgacccaccagttgtccctcctcacctgcatcataccttgcttaggtaccctgctagcatgaacacatccgggaatcttcccttgcctgaaaacgtgattctaaatcatctttacattgaaaaccgagaaccaccgagatctgtggtggcacttgggttcactcaacgctttcgtgcaaaatatgttactggtgtgctatacaaaccagttccaagaaggggaagtagcaatacttaatgcatgaatcaagagtagaccttga

SEQ ID NO: 205556 - DNA, 278 bp, Gossypium hirsutum
  unsure (1)..(278): unsure at all n locations
gntngagctagctagctcttactcaaatggnnnccgnccgatgatgttgcaaatatttccacttttcttctttttgttcagtgtctgcaactccattttccttggtgctaatggagatgacaatggtggttggcaaactgcccatgccaccttctacggtggtgctgatgctaccggcacaattgggggagcttgtggttatggaaacctgtacagtcaagggtatggaacgagcacagcagncttgagcactgcacttttcaacaatggcttgagct

SEQ ID NO: 205557 - DNA, 285 bp, Gossypium hirsutum
tcagacgcgaagggaggcgtttcgcccctctgatctctccgcgtccaatttctgctgtccgatcctctcctatcgctcccactcacgaatatgagggtccgagtggggttcgttatatttcaactcaagtcgttagaaaccggatgaagagtgttaagaatatgcagaaaattacaaaggctatgaagatggttgctgcctcaaagttgagagcagttcaaactaaagctgggaattccccgggcctctggcggccatttactggacttgttggggatcttccca

SEQ ID NO: 205558 - DNA, 329 bp, Gossypium hirsutum
  unsure (1)..(329): unsure at all n locations
gacctatgcatgagatggcacacattgncnaaggncnnttcatggcaattgcgtttccctcctgcgtgccagtgccatgaacgcaaatcagagcagcatgttgatattgcaggaaacatgcatagacgcagcagggtcgcttgtagtgtacgcgccagttgatattccagccatgcacgttgtcatgaacggtggtgattccgcttacgtcgcacttttaccttcgggattcgccattgtcccggacggtcctaggtctcatggacctatctctaacggacatgttaacggaaacaccggcggagggtcgtcgagtgtcagtggatcgc

SEQ ID NO: 205559 - DNA, 334 bp, Gossypium hirsutum
  unsure (1)..(334): unsure at all n locations
caggaaacaccanccancnaccancccnanccaagcnnnnttattgctgcgagagtgcacatacagagggctatattcatacagatcgtttcacatcacatgggccaggctgatattaacgtccgaaacgcctggggtggactagactggccctgacaaggaacaacccctgatggccagattccatatgacaagactgatatgggaggtcaatatgcttagaacacgtctatgagtgaaacccgagctggaaagcacatcccatccgcagccttccaagatctcgaacctactgttctcgacgaaggcaggactgcatcttaccgactgcttt

SEQ ID NO: 205560 - DNA, 336 bp, Gossypium hirsutum
caaccggaacgtggccttggccggctgaggaagatcacaaccaccccacccttgtccaccaaagatgaggcttcatcaatggcgatgccgacgagtccgacgacacctgggacaccgtcgacgccggtgtcggctcgtagggacaacgtgtggaggagcgtgttcaatccaggtagcaaccttgcaaccaaaggtattggcgctgaagttttcgacaagcctcaacctaactctcctactgtttatgactggctttacagcggggagacccggagcaagcatcaccgctgattgggcgatggctgacgggcggcggaggtaacaaaaccactagca

SEQ ID NO: 205561 - DNA, 349 bp, Gossypium hirsutum
cacatcggaggcatcaacagctgaagttgagggatacggtgcttccaagctcactgttgactctgctggtaagtacctacaacttggcaataaacttttctctcaagcttaactctatcatttctgggcaagcattttggaactccgtattccaggttataagagcagaagagcatatggacaactggctaaatgtcatacattgctcacaaacatctatgaatcaatccttgagcaggagtcaagccctatccctttcactgatgctacttactatagggttggggatttatggtgagagatttggtaagcttgacccggaaagatatgtttaccgagaacctcgtga

SEQ ID NO: 205562 - DNA, 291 bp, Gossypium hirsutum
gagatctgaatatgggtgagagtagggtgactgggaaggtaaagtggttcactgaccaaaggggatttggtttcataacgccggatgacggcggcgaggagttgttcgttcaccaatcgtcaattcgttccgacgggtttcgtatcctcgccgacggcgaagaagtcgagttcgttatcgattcttctgaaggaggtcgtacccaggctgttgatgtcactggccctaatgggaaccctgttcggggccccaccagatctggaccccatggtggcggagggggattccggg

SEQ ID NO: 205563 - DNA, 339 bp, Gossypium hirsutum
ttgcattctaaaggaacgctagatttgaaaaatggacagagtagcactaattctggaggagacaccaccgttaagaagaaaaatatccatgggatactgaatactgtgagttggggaattttgtttccacttggagctatgattgctaggtacataagaagctttgagtcagcagatccagcttggatttatcttcatgttttctgtcaaatatcagcttatgccatacgagttgctggctggggaactggtcttaagcttggaagtgaatcctctggtatcacatattcgggtcatagatacattgggattgcccttttcgtcctcgctactgtccag

SEQ ID NO: 205564 - DNA, 348 bp, Gossypium hirsutum
acctttccccttctgccgatgatttgaaggatattctcggatctgttggagctgaggctgatgatgataggatagagttgctattgtccgaagtcaaaggcaaagatatcaccgagctaattgcatctggaagggagaagttggcttcagtcccttcaggtgggggtgctgttgctgctgctcctaccgcaggtggcggtggtgccagtgctgcaccagctgctgaggccaagaaagaggagaaggtcgaagagaaggaagagtccgatgatgatatgggtttcagcctcttcgattaagccaagtaatgcagatgtcaaggtttttcttatgcggttagtgctttta

SEQ ID NO: 205565 - DNA, 368 bp, Gossypium hirsutum
gagggcttttcaccagatgatgcatacccatttggtgctccattgtttatggagaccccaagaccatgttccccacttgcgcagatggagtttctggcatttgaagagattatgccacttgctgcaataactgatgatgaagcctttcctgaaggcaatggaagtcaatcaggtcgcaaagcatcactatctctcagtacactagatgtgctaagtgtcaatgaacttttggattcggttctggaaacagcgcgacaagtagcaagcttttcagtttcgcctacacccattccttatgaacaaatgaggagtcagtgtgaagctcttataataggtaaacagcagaagatgtcggtgattcatagctt

SEQ ID NO: 205566 - DNA, 261 bp, Gossypium hirsutum
gaaaattggttctgctagagaaactttgggatgatgtagtggccggtcctcaaccggaacgtggccttggccgcctgaggaagatcaccaccaccccacccttgtccaccaaagatgaggcttaataaatggcgatgccaaccagtccgacgacacctgggacaccatccacgccggggtcggttcgtagggacaacgtgtggaggagccggttaaatccacttaccaaccttgcaaccaaaggtattggccctgaaattt

SEQ ID NO: 205567 - DNA, 367 bp, Gossypium hirsutum
caggaacaatcactacaacctacctccttggtctatcagcattcttcccgactgcaagaatactgtgtataacactgcaaggattggagcccaaattgctcggaagaaaatggttcctgttcccatgcatggaggactctcttggcaggcatacaatgaagagactgcttcagatgctgacagttcattcacaatggccgggttgttggagcagataaatacaaccagagatgcaactgactatttgtggtacacaacagaagttaagattgactcccgtgaaagattcttgaggaatggaaaatctcctgttcttactgtcttatcagctggccatgctttgcatgtttttgtcaaatgtcaacta

SEQ ID NO: 205568 - DNA, 373 bp, Gossypium hirsutum
gatggatcggagacaccgtagactccatcaaaccaattcagatccggcagctcctcactcaggccgtcagtcttggtatgatcgttacatcagcccttataatatggaaggcattgatgtgcatcactggcagtgaatctcctgttgtggttgttctttctggaagtatggaacctggcttcaagagaggtgatattttgttcttgcacatgagtaaagatcctattcgtgcaggggagattgttgtttttaatgttgatggccgtgaaatcccaattgtccatcgtgtaattaaggtccatgaaaggcaagatactggagaaagtgatgtcctcaccaaaagagacaacaattatggggatgacaggctttt

SEQ ID NO: 205569 - DNA, 368 bp, Gossypium hirsutum
gtggtcaaactgtgtcgttttgagagcaattataagtgaaagtactgttggatgcacggaaagaaatggagttgagaaggggaagaaactggcatcatctccattgaaatggagagaatcctctcctggtagaaaggaaaataaaagttttagcgactgggacaacccgcttgcctttacttcggccttagaaagggttgaaacatgggtcttttctagaatcatcgagtctgtctggtggcaggcactcactccgcatatgcagtcggagggcaaaaaggaaatttatgaaggcaagggctctggttcaagtaaaagctatgggaggatacctagttcaagtaatcaagaccaagtgaacttttcat

SEQ ID NO: 205570 - DNA, 369 bp, Gossypium hirsutum
tagacaagggaatcgaccaaaaagctttgcatgatacgttttctgcatttggaaacattctctcttgcaagctagccacagattcttccggccagtcaaaaggttacgggtttgtacaatttgacaacgaagaatctgcccaaaaagcaattgagaagttgaattgtatgctattgaatgataagcaagtctatgtgggcccttttgttcgcaagcaagaaagagatacttctactagcaagacaaaatttaacaatgtctacgtaaagaatctctcggaatcaactaccgatgaagacttgaatcaaacttttggtgaatttggtcagatcactagtgctgtggtaatgagggatgctgatgggaaat

SEQ ID NO: 205571 - DNA, 369 bp, Gossypium hirsutum
caaggattcaaataaggaggaaagggagagaatgggtcgaaggtcgaagtttgaagagccacgaattgaacagatccaagatcttgagaatgatatgatgaagtatttcagagaggatctacataggcgcttattgagcaccgatttcaagaagcaagttgatggtcttgagatgttacagaaggcactcccttccattgggaaggaaataattgaagttctggacatactattgaggtggtttgttttgcagctatgtaaatctaacacgacatgccttttgaaggtgctggagtttcttccagaactttttgactcgttgaagggtgaagcatatagtttgacggaggcagaagctgccatttttct

SEQ ID NO: 205572 - DNA, 313 bp, Gossypium hirsutum
acagccattgctttttggcctgtccactggtaatgatgctacggattttgttcacttttgtgcaaaggcatcgttatatatcaactcacctgactatccaatcacatcgaccgtcgaatacaaacatcaccaatactgattgaaaaaccatattagaagcagaggaaaaaggtgttagagtgttgagtctaggcctcatgaaccaggctgaagagcttaacatgtatggtggggtgtttatacaaaaacatccccagcttaaagtgaaattggtagatgggagtagcttggcagttgcagttgtgttaaatag

SEQ ID NO: 205573 - DNA, 370 bp, Gossypium hirsutum
ccccaacttcacaccagcaaagcaaaagcttcaccaatggggatcgatttagtcgcaggaggtaagagcaagaagacgaagaggacagcccccaaatccgatgatatttacctcaaactcctcgtcaagctttaccgtttccttgtaagaagaactgggagcaaattcaatgctgtgatattgaaacgcttgtttatgagcaaagttaacaagcctccactatctctctctaggcttattgaattcatgaagggaaaggaggataagattgctgtggtagtggggacagtgacagatgatattagggtttatgaggtttctgctttgaacgttactgctcttaggtttactgagactgctagagctagga

SEQ ID NO: 205574 - DNA, 75 bp, Gossypium hirsutum
ctacaacacacttgctagtattcctacttggagtggtgacgtctagcacttccacatttggttcctatgagtcac

SEQ ID NO: 205575 - DNA, 438 bp, Gossypium hirsutum
gaattcccgggtcgacccacgcgtccgacggttgcgagaagacgacagaagggcaccctagaatgtcccatttgataaaaatgaaaatggatgcttgtttgataagaaacacattttattccttgatcatcaacatgggatgctacagagacaggaaagagcatttccaagatgaaaagagaagaagccaaaatcactgtctgggaaaatctgcagaatgctaaaggcgatgcagccataacgaaactagagatgaagctggaaaagaagagatcgtcatcaatggataaaataatgaataaactaagatcagctcagaagagagcccacgatatgaaaagtttgatgctggccaaccaggcccaccaggttacaaagacctcgcatatggctatatctttcagacgaacccgccagatgagttcattgagtggttgc

SEQ ID NO: 205576 - DNA, 382 bp, Gossypium hirsutum
caaaaaaaaaacacaccctaaagagacaatgagaaagctgctagcctttgccgggcttttcttcttcttttgggataaaacattagctcaaatagctccggcgccgccgttaaaggtggacaacatcacttccatcctcgaaaaaggtggccaattcaccactttcatcaagctattgaaagccacacaggtggctgatcaactaaacaaccagctaagcacaccggaccctaacgacgggataacggtgtttgcaccgagtgacaacgcgttctacggactcaaacccgggacgttaaactcactttccgaccaagagaagcttcagttggttcaataccatatactcccgacgttaatgacgacggcgcagtttcaaacc

SEQ ID NO: 205577 - DNA, 363 bp, Gossypium hirsutum
cgagagcggcttcggcaaatggacctttggccagtccgagacagggaatgaaaactgggatgatagcttgctgacaaaggaagaaatggaggcaagaatgcagagaaaggtggaggcagtcatcaaaagagaaagggccatggcgtatgcatattctcaccagctatggaaagatgcaatgaaatcacctcacacaggtgtacccaacattcggtccggtgtattcccatggtggtggaactggttagaacgtcgattaccaccaaccgatttacccgaaaaccaagccacaaagaccttccaatttacaccaacaatgccaaactccgaattaaagcctagtccgaggccacaatccagtca

SEQ ID NO: 205578 - DNA, 324 bp, Gossypium hirsutum
aatagcaaaggccagatttatcaagtgtgtcacggtcggtgatggagctgtggggaaaacttgtatgctcatttcatataccagcaatactttcccaacggattatgttccaacagtatttgataactttagtgccaatgtggtggtggatggcagcacagtgaaccttggcctatgggacactgccgggcaagaagattataataggctaaggccactgagttatagaggagctgatgtgtttttgttggccttttctcttataagcaaggccagttatgaaaacatctacaaaaagtggatcccagagctaagacattatgc

SEQ ID NO: 205579 - DNA, 353 bp, Gossypium hirsutum
gacgtttccccacacgagttcgtcaaggcttatgccgcccatctcaagcgctccggcaagattgagcttcctccatggactgatattgtcaagaccggtaaactgaaggagcttccaccctatgaccctgattggtactatgtcagagctgcttccatggctaggaaaatatacttgaggggaggtcttggtgttggtgcctttaggaggatctacggaggagctaagagaaatggaagtcgcccacgccatttctgcaagagcagtggatctgttgctcgtcacatacttcagcaattgcaggatgtcaacatcattgatattgatcctgaaggtggtaggagaatcacatc

SEQ ID NO: 205580 - DNA, 396 bp, Gossypium hirsutum
aatttgagtactgtttcttgtgctctcttctctggcatgcaacgcaatggcgtctgatcttgagaccaaagccaaagaagccatatatcgatgaccacttcgagcttgcgctccatctctactctcaagccatgcaacttaatcctaaacacgccgagctctatgctgaccgtgctcaagccaacatcaaactcaatattctcactgaggctgtggcggatgcgaacaaagcgattgagttggatccttccatgtctaaagcttatctgcgtaaagccactgcctgcatgaagcttgaagagtatcaaactgctaagtctgcactggagactggcgctgctttggcacctgcagagtcaagattttccaaagtgataaaagaatgtgaagagcgaa

SEQ ID NO: 205581 - DNA, 362 bp, Gossypium hirsutum
caaagcattcgactttgcaaacagaaggggcgtcaaagaaccgtcttctctgcctctacggcaaccgtatattactcatacaaattgcaaagcaaaaccaagaaatccctcacatacaaaaatgggtgattcaaaggtcgaaaccatctccagattagctcaatggaggatcgacaactttagtccttgttcttacaaaaaatccgaccccttcaaggtcggtctttggaactggcacttgtctatagagaagaatcgatatatgtatattcgattatttcccgagccatctcgtgtgtctaaggagcagcctccttatgctaaatttatactcaggatctctaatgttggtgctaatcgta

SEQ ID NO: 205582 - DNA, 370 bp, Gossypium hirsutum
  unsure (1)..(370): unsure at all n locations
gttccatttcatctttttctgaaagattctctgatgagcaggctagcgccaccattagttctcaatcactggaagttacatcaaaagctgtacctgttgatgaagaaaataacaatgtgagatctctaacagagaaattatctgctgctcttatgaacatcagtgccaaagaagagttggttaagcagcatgctaaagttgcagaagaagctgtctcaggctgggagaaagctgaaaaggatgtagtagctttgaagcaacagcttgatgctgctatgaagaaaaatgcatcacttgaagatcgagttggtcatctggatggggcactcaaggaatgcgttagacaacttangcaagcaagggaagagca

SEQ ID NO: 205583 - DNA, 360 bp, Gossypium hirsutum
  unsure (1)..(360): unsure at all n locations
aggagttccttatggttatagctgcattctgggttctgtcaattgtgggaagttggtgcaacttcttgaccttgttctatatatgtttcgtattgctgcacacggtacctgtattatacgagaagtacgaggataaggtagatccatttgcagagaaggctgcaatcgaggttaaaaaacaatatgcagtttttgacgccaaggttcttagtaaaattccaatgggccctttgaaggccaagaaggtttaacaaggaaaggggggttcagtctccacctctccggcaacatttggctagttctgggatgtggttntatgtgctgaattcacattagctagaggcatttcgtcctcaaatc

SEQ ID NO: 205584 - DNA, 363 bp, Gossypium hirsutum
ccaccatcaccacctaaacacccctacaagtacagggccccacccccaccatcaccacccaagcacccttacaagtacaagtctccacccccaccacctccagtttacaagtataagtctccaccacctccacctccatcatcacccaagcacccctacaagtacaagtctccacccccaccacctccagtttacaagtataagtctccaccacctacacctccatcaccacccaagcacccttacaagtacaagtccccaccacctgcaccaacatcaccaccaaagcatccttacaaatacaagtctccaccaccaccaccatcctcacctaagcatccctacaagtacaagtccccacca

SEQ ID NO: 205585 - DNA, 376 bp, Gossypium hirsutum
gaaaaatacaagttgaatggacaattcagatggatatcgtcccagatgaaccgagtgagaaatggtgaactctatcgttatatttgcgacaccaagggagcattcgttcagcctcctatatacgaggcttttggcttgactgttgttgaggcaatgacctgtggactaccaacatttgcaacatgttacgggggccctgctgagattatagttcacggaaaatcggggttcaacatcgatccttataacggtgatttggctgccgagacccttgccaatttcttcgagaagtgcaaagcggatccatcttattgggatgagatctcccagtgagggttgaaacgcatacaggagaagtatacatggcagatttact

SEQ ID NO: 205586 - DNA, 375 bp, Gossypium hirsutum
ccaccatcaccacctaaacacccctacaagtacgggtccgcacccccaccatcaccacccaagcacccttacaagtacaagtcttcacccccaccacctccagtttacaagtataagtctccaccacctccacctccatcattacccaagcacccctacaagtacaagtctccacccccaccaccttcagtttacaagtataagtctccaccacctgcacctacatcaccacccaagcacccttacaagtacaagtccccaccaccttcaccaacatcaccaccaaagcatccttacaaatacaagtctccaccaccaccaccatccccacctaagcatacctacatgtacaagtccccaccatcaccaccacca

SEQ ID NO: 205587 - DNA, 373 bp, Gossypium hirsutum
gatggaaaggggttttattgttttggccttgacgggggtgttcgccgcgacggtggttacggcggctgacgagagtgggttagcgaatgagtgcagcaaagatttccagagcgtgatgacttgcttaagctttgctcaaggaaaagcagcgtcgccgtcgaaggagtgttgtaattcagtggcggggattaaagagaataaacccaaatgtttgtgttatattttgcaacaaacacaaacttccggtgctcaaaatctcaaaagcttaggtgttcaagaagataagctgtttcagttaccgtcggcttgtcaattgaagaacgctagcgtcagtgattgcccaaagcttcttgggttatctccgagctcacca

SEQ ID NO: 205588 - DNA, 390 bp, Gossypium hirsutum
ttggtattgaagtatataaaatgaaattgctttaaaaaaagcaatgcagcaaaacaagactgcattatggcaaatactatatattcttccacacatccctcaaaacacttttatttcaaaccatttggtcatcttcaaacaagaagagaccaaatcccacatcattttcccatccccagacactttcccatcacccaaacacaaaaaagaactctaaaaataaaacaaaaacctaaccatcatgaaatttcagtaaaacaagaaacaatcaaaccatccggatgctttttctttctcgataaaaactcattaactgtccccctcagtacctgtaatgaggaggcttgtaaggaccttaacaggcacactaatgtaatcagcttgatctta

SEQ ID NO: 205589 - DNA, 333 bp, Gossypium hirsutum
ccaagcaagcattttccttacaagtttgtttttcttgtgattaatcgatatggctagctcaatgtcccttaagcttgcatgtgtggcggtgttgtgcatggtggtgggtgcacccctggctcaaggggccgtaacctgtggtcaagtcacaagctccctcgcaccctgcattggttacttgacagggaatggtgctggtggcgttcccccaggttgctgcggcggcataaaatctctcaactccgccgcccaaacaacaccagaccggcaagcagcttgcaaatgcatcaaaagtgcggccgccggcatttctggcatcaactatggtattgc

SEQ ID NO: 205590 - DNA, 368 bp, Gossypium hirsutum
agaagattaaggatgaagaaggtgaggggtgtaatatatatggctttttagaagttaataaggtggcagggaactttcattttgcacctgggaaaagctttcagcaatcgaatgttcatgtacatgacttgctagcttttcaaaaggagagttttaatctaagtcacaggatcaatagattagctttcggagattacttccccggggtcgtgaatcctcttgatagtgttcattggactcaagaacagccaagtgggatgtaccagtactttctcaaggttgtccctaccgtgtacacagatgtgagtgggcacactatccagtcaaatcagttttctgtaacggagcattttaagggtgcagaagtt

SEQ ID NO: 205591 - DNA, 370 bp, Gossypium hirsutum
atttaacagatcgagagaaaaaagaatggcagaggagcatagatgccaagcgccagaaggccatcgtctttgcgtcaataactgcggctttttcggaagttcggcgacgatgaacctttgctccaaatgttacagagatctctgtctcaaggaacaggaagcttcttcgatcaaatccgctctttcctcttccccttcgtcttcatcaacggtcgtcgaatccatttctcaggttcctcttttggctctccatgaagtcaacagagaatcggcggttccggagattgcatcggcggccgaacagcgatcgcagcaacaaccgaatcggtgcatggtttgcaagaagcgggtcgggttgaccggattcaaa

SEQ ID NO: 205592 - DNA, 403 bp, Gossypium hirsutum
atttgggataaggcagatattgtcaaggttagtgatgtcgagctcgagttcctcaccggtagcaacaaagtcgacgacgaaactgccatgaaactttggcgacccaactttacactgctcttggtcacccttggtgaaaagggtagccgatactacaccaagaatttccgtggggcagtcgatgctttccatgtcaataccgtggacacaactggcgccggtgactcctttgttggtgcattgctatgcaagattgttgaaaacccaaccattcttgaggatgaagcaaaattaagggaagtgttgaaatttgcaaatgcatgtggagccatcacgacgaccaaaaagggagcaatccctgcactaccaaccgtggccgatgcccttgccttaatcaatggag

SEQ ID NO: 205593 - DNA, 391 bp, Gossypium hirsutum
  unsure (1)..(391): unsure at all n locations
cccannaagttctgttgttcaattgggctctatgtgtgcgttgcagcgtttggttnagtgctacancgctattctgaataaccaatntggtggttgaaggggctatgtgtactgtgatanncttgccgtgctggttttgaaancccctaagacttagaagggctagctgatgccatggttaagctggtatgctccgacaggaagaccggcggagttgttttcgagaaggagggatataccgacaaaaccggaaaataccagattcgtgtatccgaggatcacttggatcagatctgtgatgcagttcttgtgaagagcccccagcttggatgtgccacaatgtcccccggtcgtgaacgtgcccgtgttatcttgaccaactccaatggca

SEQ ID NO: 205594 - DNA, 373 bp, Gossypium hirsutum
gaaacaatggcgtcctcggatcttattggcaagctcgagactgatgtcgagatcgatatttctcccgaaaagttccaccatatgtggtgccacaggccgcaccatgtccaccacactagctctgaaaaagtacaaggatgcgatttacatgaaggtgaatttggaactcccggcgtcgttatctgctggagatatgtgcatgatggaaaggctaaaactgcaaagcaggtagttgaagttatggaccatgagaaaaagtcaataactttcaaaatgcttgaaggagatctgatggaggaatacaaaagcttcgtgattacaatccaaacttcccccaagagcgacggtaaaggcagtatagtgcactggactc

SEQ ID NO: 205595 - DNA, 379 bp, Gossypium hirsutum
ctccaagcaaccattttccttacaagtttgtttttcttgtgattaatccatatggctagctccatgtcccttaagcttgcatgtctgctagtgttgtgcatggtggtgggtgcacccctggctcaaggggacgtaacccgtgctgatggcgtagtcatccttccacgctgccttcctttattgatagggaatggtaatggtgctgatgctgatgttgatgccccagcttgctgcgacatcgtcaggggtctcttgagctcgctgctctgtggtggtgtttaggaaccgatctagcttgaaatcgggttcggattcgggtggagtttcaaattggtgtgttatggaatcccaacttaatcgtgtttaggggtgggatcca

SEQ ID NO: 205596 - DNA, 369 bp, Gossypium hirsutum
atcctatcttaaatcaactcgcttccgatccgctggcagacccgtcccagacccgccacgagtggactctcctcttaaccttccagttctgttacctaattttcctctttgccttctctcttttatcaacggctgcagttgtatttacggttgcatctctctacacgtcgaagccagtctctttcacttcaacgatctcagccatacccaaggtttttaagcgcctttttataaccttcacatgggtttctctcttgatgtttgtttacaatgccttgttgatcggtttcctggtcttgtttgtcattgccgttgattcccggaatgcctttttttccttcttctcatttatggtgatcttagtgctgt

SEQ ID NO: 205597 - DNA, 373 bp, Gossypium hirsutum
attctcaatgttcctcgcgatttgcgcaatcctggccgtccacgtggcttttacaacttcgtctccgacgttcgatttctccggcaaccatttcctcccgatcaaatcggaatgcagcggatccatcgctgagtgcctgatgcaaggcggggacgactcgtcggacttcgatgccgagttcgccatgggatccgagaccggcaggcgcattttagcggcgagacggtacatcagctacggtgcactgaggagaaacactgtgccgtgctcgcgacgcggcgcatcttattataactgccgacctggagctcaggcgaatccctactcacgcggatgcagtagaattacacgctgtcggcggtagatttatttt

SEQ ID NO: 205598 - DNA, 370 bp, Gossypium hirsutum
cagaacttgagtgggacttcaggctcccccttgtgaagagtattaatgttagtgggcataaatatggtcttgtttatgctggaattggttgggttatctggaggagcaaagaagacttacctgaagaactcattttccatattaactatcttggagctgatcaaccaactttcactctcaatttctccaaaggttctagccaagtcattgctcagtactaccaactaatccgtttgggatatgagggatacagaaatgtgatggagaactgtcatgaaaacgccatagtccttaaagaaggattggagaaaacagggcgttttaacatcgtatcaaaggacaatggggttccactggtggccttctccct

SEQ ID NO: 205599 - DNA, 371 bp, Gossypium hirsutum
caaatcctaagacaagaggaaggtacaatttactttttggcctgacatctggcggaccatataactacaatgggactcagaagtggcttcggagttttgatcaacgtttacgtgagagtatcgactatgctatttgcttaaatagtattggttcttgggataatgaattgtggattcatgtgtccaagcctccagagaatgcctacatcaagcaaatttttgagggtttatctaatgtagcagaggagttggacctcaaagttggcctaaagcacaagaaaataaatatttctaatcctcgagtagcatgggagcatgaacagttctcaaggctgagagtcactgctgccactctttctgaactttctgtc

SEQ ID NO: 205600 - DNA, 380 bp, Gossypium hirsutum
  unsure (1)..(380): unsure at all n locations
agagcacccaaaagaaaaaacactgatcaacgaaggatttctagggttttttttcggtatcagcaagcgatggcaatggctgctctcagacgcgaagggaggcgtttcgcccctctgatctctccccgtccaattactgctgtccgatcctctcctatcgttcccactcacgaagatgagggtccgattggtgttcgttatatttcaacccaagtcgttagaaaccggatgaagagtgttaagaatattcagaaaattacaaaggctatgaagatggttgctgcctcaaagttgagagcagttcaaactaaagctgagaattcccgaggcctctggcangccattactgcacttcttggtgatcttcccagtgttgatgt

SEQ ID NO: 205601 - DNA, 369 bp, Gossypium hirsutum
gtaacttcagcaagggagaacagaataagcaaaaagggtggtcgggctgctgaacatttcactcccagtaaagctagtggtgctgcactggacttgatgaagttattcagtttcaggtcaagtgttgtccggaaaagaaaggagtgggattattataaacccgttcttgaccttttatctaatgaggaagtagacgctctcgaagccaaagaagaaaggagtggccgaaataataatagcactaatcatggagtccaaacatgggagttggagactctcattaatgttgcttctggttatgcttgggttggcaaaagctgatatcaatcaagacaaaacagaatgtagtaatgagctagtagggctggc

SEQ ID NO: 205602 - DNA, 372 bp, Gossypium hirsutum
  unsure (1)..(372): unsure at all n locations
gagattttggttttgaaaaaaaaaaaaacagatatgagggaggtgattagtatacatattggtcaagctggaattcaggtcggaaattcctgttgggagctttattgtcttgaacatggaattcaacccgatgggatgatgcctagtgacaccacggtaggtgcttgccacgatgcttttaataccttctttagcgagactgggtcgggcaagcatgtaccaagggctatatttgttgatctagagcccactgtcattgatgcagttagaaccgggacttatagacaactgtttcatccggagcaacttattntccgaaaggaagatgctgctaataactttgctagaggacattatactgttggtagggag

SEQ ID NO: 205603 - DNA, 390 bp, Gossypium hirsutum
  unsure (1)..(390): unsure at all n locations
tttgaatcaggtttttgagtttaagtggcgagatctgagcaatggcagcaaattcatcaaatggggaacaacaaacaccctcaaagccaccacctttgccatctccattgcgtttttccaagtttttccagtccaacatgaggattttggttactggaggagctggttttatcggctcccacttagttgacaaattgatggaaaacgagaaaaatgaggtgattgttgttgataactacttcactggatccaaggacaatcttagaaaatggatcggtcatcctagatttgagcttattcgtcatgatgttactgagccattgttggtcgaggtcgatcagatttaccaccttgcatgtccagcttctccaattntctacaaacacaacc

SEQ ID NO: 205604 - DNA, 363 bp, Gossypium hirsutum
gttgcatgtggtgctgcagtccaagctgctatattgagtggtgaaggtaatgagaaagtgcaagatctcttgctcttggatgtcactccattgtcttccggtttggaaaccgctggtggtgttatgaccgttttgattccaaggaacaccaccattccaaccaaaaaagaacaagtcttctcaacctactccgacaaccaacctggtgtgttgatccaagtttacgaaggtgaaagaacaaggaccagagacaacaacttgctcggtaaatttgagctctctggcatccctcctgctcctagaggtgtcccacagatcactgtctgctttgatatcgatgctaatggtatcttaaacgtatct

SEQ ID NO: 205605 - DNA, 371 bp, Gossypium hirsutum
cggcacgagcaatcagataaaacatagcagaaaagaaatggaagaagagcgaagagtgcacccggattgtataaatgcatcaaatccgtatcatgaatgcgttgaatattgcttccggaagattgctgaggccaaagctagaaaggataaatcagtgacaggcttaactgttatacttgtaattcttaaattaatgtttttgtttaccctgccttttccttgagaactcattagacagtttaactttatcggcttaattgcaatttatgttgttatagaaactccgcaacctgagcatggccagcctgttacacctgctgcttatcaagaacaagatgtgcaacctggcattccaaaaccagaagaaagcc

SEQ ID NO: 205606 - DNA, 377 bp, Gossypium hirsutum
gtcgaatatccgaaaatacccgagtacaaggaaaaacaagatgagggcaaggaacataaacatgatgagtgccacgagtcacacgaatcgaaggagcacgaagagtacgagaaagaaaaacccaatttccccaaaggggaaaagcctaaagagcatgagaaacacgaagtcgaatatccgaaaatacccgaatacaaggaaaaacaagatgagggtaaggaacataaacatgagttccaaaagcatgaaaaagaagaggagaaaaaacctgagaaaaaggcagagtactctgagtggccaaagtacatgtttactcaatctggctcgggcactaagccttgaaccatatgacactggtgcatgtgccatcatcatgc

SEQ ID NO: 205607 - DNA, 374 bp, Gossypium hirsutum
acaacattggtctaggtgctaccagggaccctaaactggttaagaaaattggggctgcaacagcacttgaatctagagcaactggcattccatatgttttcgcaccttgtatagcggtttgccgagatccgagatggggccgatgttacgaaagttacagcgaagatccccatcttgttgacgcaatgacagagattgtaccaggattacaaggagacatacctgctaaatcttctaaaggcattccatttgttgctggaaataaaaatgttgcagcttgtgctaagcactacgtaggagatggtggaacaaccaagggcataaatgagaacaacacagtgatcaactggcatgatttgcttagcattcatatg

SEQ ID NO: 205608 - DNA, 375 bp, Gossypium hirsutum
atttcgaaggctttgaaaaaaaaaaaaatcgaacgaagaagaataatttgttaagcgatcgatctgtggattacaatggaagtgcctgtctcatgggatgctctacgcaaacaggcaaggaaacttgaagctcagttggatgagcaaatgaattcatatcgtaagttggtctccagtaaggcttcgaccaaaaatgactcggaagagaatgatattgaatctggtatcgaccgactactaaaacagctacaacaagtaaatatgaaaatgcaagactgggtctcatctggtggatctgaaatggtttctcataccttgactaggcatcaggaaattcttcaagatcttactcaggagttctatcgtcttcactct

SEQ ID NO: 205609 - DNA, 320 bp, Gossypium hirsutum
gcactggactttatacatgaaatgggatggcttcttcatagaaatcacttgaacaggaagctgggtgacatgaaccccaatctaaatctctttcctttcaggcggttcaagtggcttatggaattctccatggaccatgactggtgtgccgtagttaagaaacttctgggcattctctttgacagaacagttgatttaggggaccatagttctatggagtttgctttgttggatatgtgtctgctccacagagctgtccgaagaaactgcaggcccatggtagaattactattaagatatgttcctaataaaggattgga

SEQ ID NO: 205610 - DNA, 358 bp, Gossypium hirsutum
aaaaaaaatggggcttgaagaaaatctcaaatcaatgaacatcaacgaagaagagaacaagaaccctaaccctaacactaaagatgaagaagatggtgaacttgaagaaggggagatcgcaggtgaagaagatgatacgacgtcgtcttcgttaaagaaaggtgtcgtcgaacagcctcaccagttggagcattcatggaccttttggtttgataacgcttctgctaaatcaaaacaagctccttggggtagttctatgcgcgctatttacactttctccaccatcgaacaattctggagtctatacaataacatacatcatccaagcaaattggctgtggagcgggacttcattgtt

SEQ ID NO: 205611 - DNA, 91 bp, Gossypium hirsutum
gtggaactcatcaagtgtttgaggtctattaaagagtatgcttttgtagcctcagaatatccggttgtcataactctggaagatcacctta

SEQ ID NO: 205612 - DNA, 374 bp, Gossypium hirsutum
gctacctgtgttaagatctctactgatgcttccatcaaagaaatgatcccaccgggtgctcttgtcatgctcacacccctcgttgttggtatctttttcggcgtggaatctctttccggtgtcctcgctggatccctcgtctcaggtgttcagatcgctatctctgcatccaacacggggggtgcttgggacaacgccaagaagtacattgaggctggtgcttcaccacatgcaaaatctcttggccccaaaggttcagatccacacaaggcagctgttatcggcgacaccatcggtgaccctttaaaggatacatctgggccatcgttgaacatcctcatcaaactaatggcagtcgaatcactcgtcttcgc

SEQ ID NO: 205613 - DNA, 377 bp, Gossypium hirsutum
agatcgaagattatggggcgttttgctcttctcctcttactagctttcgcttcatttcaagccctttgcttcgccgctgatgatgatacggccttttatgactcatttgatgagccatttgatggacgatggatcgtgtccgataaagatgattacaaaggtgtatggaaacattcaaagagcgaaggacatgatgactacgggcttcttgtgagcgagaaggcacggaagtatgcgatagtgaatgagctcaatgagcctgtgagtctcaaggatggaagcactgtgcttcagtttgagactcgctttcagaatgggcttgaatgtggtggtgcatatttgaaataccttcgtcctcaagaggctggatggaaggc

SEQ ID NO: 205614 - DNA, 370 bp, Gossypium hirsutum
gagagtttcgatgaggccttacaacgagatgatgtgaaggccattgttgttgcaggtgcaaatggaaaattttctggtggtttcgatatttctgcttttggtggaattcaacagggagcagtgcagcagccaaagtctggctatgtatctgttgaggttctcaccgacaccatcgaagccgcaagaaaaccatcagttgctgccatcgatggcctggccttaggtgggggtctagaggttgcaatggtatgtcatgcccggatatcgacccctactgcacaactgggcctgcctgaacttcaacttggactaattcctgggtttggaggaacgcagcgacttccacggcttgttggtctcgcgaagtccc

SEQ ID NO: 205615 - DNA, 385 bp, Gossypium hirsutum
ttctaatccaaccattgcattggactccatttcaatttgcatgaattatttgaactgggacatgcaatttatgctaggcctgagtgcagctgccagtgttcgagtgagtaatgagctaggggcaggccatccaagggtagcaaaattttcagtgtttgtggtgaatgggacaagcatattgataagtattgtattcagtgcaattgttttgatattccgagttggattgagcaaagcatttacaagtgattctgaggttatagaagcagtttcagacttgactccactgcttgccatctctgttttcctaaatggcattcagcctatactctcaggtgtggcaatagggagtggatggcaagcaattgtggcttatgtaaacctg

SEQ ID NO: 205616 - DNA, 367 bp, Gossypium hirsutum
gaaagtttcaatggcaaccctcaaagttccagttcacgttccttctccttctgatgatgctgagcaacttcggaaagcttttgaaggctggggtacgaacgagcaattgattatcgacatattggctcacaggaatgcagcacagcgcaattcaattcggaaagtttatggtgaagcttatggggaagatcttctcaagtgtttggagaaggaacttacaagtgatttcgagcgggctgtgctgctttttacgttggaccctgcagagcgagatgctcatctggctaatgaagctacaaagaagttcacatcaagcaattggattctcatggagatagcttgcagtaggtcttcgcatgaactactc

SEQ ID NO: 205617 - DNA, 372 bp, Gossypium hirsutum
ctcgtatcttatcttttccgattgcctcgtaaatgcttcagatcttttttaggtttctaattttccaattccatgcataatttctgaattcttcgaaactatcttcatttccatctgtggaagtaaaagaaaatccaattcttggttatcgtgagatgaagatcgaggagttggatgaagtggagaatgatcggcgaaacgacggcgttaagcagctacagatagttagagtcgacgacgcgaagagagttctagtcggagcaggtgctcggatcctgttttacccgacccttttatacaatgttttcagaaacaaaatccaatctgaattcagatggtgggacgaagttgaccagtttcttttgctggggg

SEQ ID NO: 205618 - DNA, 367 bp, Gossypium hirsutum
attaccttgtccaaggctatgacgatgcagggcctagtgcctctcttttgtcaccatatctcactgacataattagttgtctgatttcaactgctgatcggacagatgggggtgactccaagcttaggtcttctgcttatgaaaccttgaatgaagttgtgagatgttctaacattgctgaaacatcttccgttatagcacagctactaccagtcatcatgaataagttgggccagactatggatattcagattgtgtcatcagatgacagggaaaagcaaggggacttgcaagcctctctttgtggtgttttgcaggttatcatccaaaaacttagcagcacagatgaaaccaaaacaatcatact

SEQ ID NO: 205619 - DNA, 320 bp, Gossypium hirsutum
gggaagaagttgttattgttcttagcatctttataataggattcttttcaacttatgcaaaactgtacccagcaatgaagccttacgagtacggtttccgcgtgttcacgttgacgtattgtttcataacggtatccgggtataggacaggggaattcgtccatacagcagtgacgcgatttttgctaatagcacttggtgccagtgttagtttagttgttaatataggcatttaccccatctgggccggtgaggatctgcacaactcggtggctaaaaatttcatgagtgtggcgaattctttagaaggatgtgttaaa

SEQ ID NO: 205620 - DNA, 326 bp, Gossypium hirsutum
caagcgccggaatctgaaaatgaggagcttcaagaagaaaacgatgatgaagaagaagaggaaagcaagggagaaggaagtcaaaatacaaggagaagtaaatctgataagaaagcgaagaaaagaggaggtggttttcagacagtgtgtagcctttctcctcagcttcaaagagtagtaggagagtctaaattggctagaactgaggttgtaaagaaactttgggcatatatcaaggagaaggatttgcaagacccaaagaacaagcggaatattatctgtgatgaattacttcgtgacatttttcgagtaaattctattaatat

SEQ ID NO: 205621 - DNA, 312 bp, Gossypium hirsutum
catcaggtacaccatgaatggacattcgtacttcaacatggtgttgataacgaacgtgggaggggcaggggatataacgtcagtgtccatcaagggttccagaacaggatggctacctatgtccagaaattggggccaaaactggcagagcaatgcttaccttaacggacaaagcctctcttttaaagtgactgccagcgatggcaggactatcacagcctacaatgtagtgcctgctggttggcaattcggacaaacttttgaaggaggccagttttaagacaatattatagtgtctgtctaatataaaac

SEQ ID NO: 205622 - DNA, 324 bp, Gossypium hirsutum
ttgaagaaaatccctcttaaaacagcctgagtgaaacgtagtgagagaggaaaagcaaagattttcagtggaagaaagctagcaatttgaatcggtgtcgtacggaaaatgttcaggaaccagtacgataccgacgtcactacatggagcccagctgggcgattgtttcaagtggagtacgcgatggaggccgtgaagcagggttcggcggcgatcggtctccgatccaagacccatgtggtgttgggttgcgtcaacaaggctaattccgaattgtcttctcatcagaagaagatcttcaaagtctacgaccacattggggtc

SEQ ID NO: 205623 - DNA, 303 bp, Gossypium hirsutum
ctggtcatcacctttctgccgctgctatcgttggtcatgatggcagtatctgggctcagagctctaactttcccaagtgtcagcccaaggagatcactggcatcatgaaaaatttcgacaaaccaggtcaccttgcccttacaggctggcccttgggggccccaaagttattggcattcaaggggaacccggggcctgcattcgtgaaaaaaagggatccggaagggtgactattaaaaaaacaacacaagcacttgtgtttgggatatatgaagaaccagtgactccggggcaatgcaacat

SEQ ID NO: 205624 - DNA, 332 bp, Gossypium hirsutum
tgcatgtatcaagaaatggcatccaagcccaatgtagagtatattgctggaggtgctactcaaaattcaatcaaagttgcacagtggatgcttcaaattcctggtgcaactggttacattggctgcattgggaaggacaagtttggggaggaaatgaagaagaactcaaaagctgctggtgttaatgttcaatatctcgaggatgaaactgcaccaacaggaacttgtgctgtttgtgttgttggtggtgaaaggtcactcattgcaaatctatcagctgctaactgctataagtctgagcatttgaagaagcctgagaattgggcgttggt

SEQ ID NO: 205625 - DNA, 325 bp, Gossypium hirsutum
aaatgatcctgttgcagctgatatgttcaaggaggtcacattttcttacaatatattgtctgatccagataaaagacaccagtatgatacagctggttttgaggctgttgaagctgaaaaccaagaattggaactagatctttcaagcttgggggctgtgaacaccatgtttgctgcactttttagtaaactcggtgtgcctattaagaccactgtatctgcgactgtcttggaggaggcacttaatggtgtggtcaccatccagacacttctgctggggcaacctgtttctaggaaggttgaaaaacaatgtgctcacttctac

SEQ ID NO: 205626 - DNA, 333 bp, Gossypium hirsutum
tgaattgtttgagctagctagctcttactcaaatggcaaccaaaacgatgatgttgcaaatattttcacttttcttctttttgttcagtatctgcaactccattttccttggtgctaatggagatgacaatggtggttggcaaactgcccatgccaccttctacggtggtgctgatgctaccggcacaatggggggagcttgtggttatggaaacctgtacagtcaagggtatggaacgagcacagcagctttgagcactgcacttttcaacaatggcttgagctgcggggcctgctacgagctccggtgcaacaatgatcctcaatggtgca

SEQ ID NO: 205627 - DNA, 328 bp, Gossypium hirsutum
gaaggtttccgtcaaaactctcaaaggcactcacttcgatatcgaagtcaaacccgaagatgcggttgcggatgtaaaaaagaacatagaaactgttcaagggactgatgtttatcctgcttcacaacaaatgcttatctataagggaaaagttcttaaagatgacacgacactggctgaaaacagtgtcactgaaaatagctttattgtgatcatgttgacaaagaataagggtacaactggtgagggttcagctgcttcaacagctcctacaaagaaagatcctgaggcaagtaatctgccaacagctccagcaccagcttctact

SEQ ID NO: 205628 - DNA, 222 bp, Gossypium hirsutum
ctctggaagcaaagcaactatcaactacgtttacctcagatctaaaacccctcgtctcagatccactaaattcaccatgtcttctactttcagcggcgatgaaacggctcccttcttcagcttcctcgtcttctcctgtatgggagctgcatatgggacggctaatagcggtgcgggtgtggcttccacgggtgtgatcaggcctgagctggtgatgaaatc

SEQ ID NO: 205629 - DNA, 332 bp, Gossypium hirsutum
acttttactcattactgtctcactaataatcggtagtcacaccgtctcgtcagcggctcgacatttattccagacacaaacaacctcatcagagctgccacaattggcttcaaaatacgaaaagcacaaagagtctgaatacaaacaaccaaaatatcacgaaaagtacccaaaacatgagaagcctaaaatgcacaaggaggaaaaacaaaaaccctgcaaacatcatgaagagtaccacgagtcacgcgaatcgaaggagcacgaagagtacgataaagaaaaacccgatttccccaaatgggaaaagcctaaagagcacaagatacacg

SEQ ID NO: 205630 - DNA, 330 bp, Gossypium hirsutum
ctactcaacaccagagaccattgctttctatattcatgtcggccatattcccactgatcatgaccttgccaaagatgaacatttgaacccaattaatgttaaaattgctgagctgagagaggctttggagtctgttacagcagaacaaaagtacttgaaagctcgtgatactcggcatcgtcacacgaatgagagcaccagaaagcgtgttataggttacacagttggagaataccttctgcttgttgctgcaagtgtacttcaagttatctatattcggcgtctcttcagcaaatcagttgcctacaatcgagtttgaacaatttcatc

SEQ ID NO: 205631 - DNA, 324 bp, Gossypium hirsutum
gtaccatgttgagtatgtaaccaaagtccaccaagcagatgatctgctagagacgggaatgaaggaggagtgcaaagtggtgggtgatcctagattctccaaatgtgacttagcactcaaagggttcccaaacgagatatatgacatagaatgggatctgatcatggttgatgccccaactgggttccatgatgaagcccctgggagaatgaatgccatctacactgcagggctgatggctaggaatagagaagaaggggagactgatgtgtttgtgcatgatgtgaacagagttgttgaagataaattctcaatggctttctt

SEQ ID NO: 205632 - DNA, 334 bp, Gossypium hirsutum
tctgtggaccctttggttagcatattgtttgtagcattgggtttttctcaaggaagaagaaggagaaagataagtaatgtttttgagaatgatggaatctggggttcctgtttgccacacttgtggtgaacatgttgggttgaatgttaatggtgaaccctttgtggcttgccatgaatgtaatttccctatttgtaagagttgttttgagtatgatcttaaggaaggacgaaaagcttgcttgcgttgtggtagtccgtatgatgaaaacctgttggacgatgtcgagaaggcccaccgcgatcaatcgacattggctgcacatttgagcaag

SEQ ID NO: 205633 - DNA, 329 bp, Gossypium hirsutum
ctgaattcgattccgttttctctgatcaatactgtttggttcttcgaaacgaagcggttaccatttggaagagattaggagaagcgattagagggatattcatggagttagagaatctaattcggcgtgacccagctaaagcagctgttcccggtggcggacttcatccgatcacacgttacgtaatgaactatctccgcgcggcgtgtcgatcacgacagacattggaacaagttttcgatgaaagtaatgcggttgttccatctaataagctagatgatcgacgggcatcttcgtcttcgatgtcggttcagatggcatggattatg

SEQ ID NO: 205634 - DNA, 327 bp, Gossypium hirsutum
aattcccacttgcttaccaccaagcttattgccaagaggatagtttccttgggaagaccatagcccttgcttgacatagcggttagcagccgaaaccttcctcaaaacgtcgagcagcaatcccaccgcggaatccgcacaatcagtggagaaaatggttccagcgccagccactgcgatgccacggcgtcggcactcggagcaatcgatgtggttaatgccctggctagtggtaacgaccaaacccaggtggggcaaaaggcggatagtatcagcggtgacagaaccgctagctgatgtgagaatggcttgtacggactgtgcatg

SEQ ID NO: 205635 - DNA, 330 bp, Gossypium hirsutum
gtgattgtggctcgtctagttatccttgctttctttcttcgctatcggattttgaacccggtacatgatgcaattgggctttggctaacttccgtgatctgtgaaatctggtttgccttttcatggatccttgatcagttccctaaatggttccctattgaccgcgagacgtatctcgatcgcctttccctcaggtatgagagggaaggtgagcccaacatgcttgcttctgttgatatttttgtcagtacagtggatccattgaaggaacctcctctagtaacagcgaatacagttctatcgatcttggccatggactatccagtggat

SEQ ID NO: 205636 - DNA, 326 bp, Gossypium hirsutum
caaacacagaaaaaagggatttgattctcctattctgaagaaccatgaatcctcgaagggacatgcgtaacagcagagttgcactctttgatggcatcgaggaaggtggcataagggcctcatcttcttactcacatgaaatcgatgaacatgaaaatgaaagagcaatggaaggattgcaagatagagtcaatctactgaagagactgtcaggtgatatacatgaggaggtcgatagccacaatcgcatgctggatcggatgggaaatgatatggatgcatctaggggaatactctcaggaactatggacaagtttaagatggta

SEQ ID NO: 205637 - DNA, 330 bp, Gossypium hirsutum
gttgaaacaatgctaaaaaggtggaaaggcaaagaaggcaaagagattgaagtgtatcaagaatttagattattgacttcagaagtgatatccagaacagcttttggtagcaattacttggaaggggagaagatttttgccatgttgaacaagttatcaataattatgggccgaaatctttttaatactaaaattcctttgatcagcaagttatggaaacctgctgatttgctagagtctgaagaacttgcaaaagaaataaaagattgtgtgattaagattgtcaggaaaagagaagataaagctgtaaatggagaagttgatagcttc

SEQ ID NO: 205638 - DNA, 329 bp, Gossypium hirsutum
tgagaagccacaactcaatttcatataaagaaaaaaaaagtgagatggatccagacgcagtagccaaggccttcgtcgagcactactactccacattcgatgccaaccgggccggtttagccaatctctaccaggaaggttccatgttgaccttcgaaggtcaaaagatccagggctctcagagcatcgtcgttaaactcaccagccttcctttccagcagtgcaagcacaacatcaccaccgtcgattgccagccttccggctccggcggcatgctcgtcttcgtcagcggtaacctccaactcgttggcgagcagcatgctctcaag

SEQ ID NO: 205639 - DNA, 326 bp, Gossypium hirsutum
cctaaaacaaatccgttggctgatattggagtcgacttcgatgctcttaatcggaaggaaaaaaggatggaaaaacctgccccaaatgcagtgacatctacagttacaatgggtaaagcaatgggatctgggtctgggattggtcgttctggtgctaccactcttagacctcccgcaaatcctatgatgggttctagtatgggtagcatgggcatgggcatgggcatgggaatgggtggtggacctgttggaggcatgggaatgggaggaggctatggtggtatgaatcaacaaccaatgggcatggggatggggatgaacaacat

SEQ ID NO: 205640 - DNA, 321 bp, Gossypium hirsutum
gttcctcgtgctgtgctcatggacttggagcctggtacgatggacagtgtccgaactggtccttacggccagattttcaggccagacaactttgtttttggacaatccggtgctggaaacaactgggccaagggccattacactgaaggagccgagcttatcgatgccgttcttgatgttgtgaggaaagaagctgagaactgtgactgcctgcaaggtttccaggtatgccactcattgggtgggggaactggttccggtatgggtacattgcttatctcgaagatcagagaggagtaccccgataggatgatgcttacg

SEQ ID NO: 205641 - DNA, 299 bp, Gossypium hirsutum
cagttcttaatactttatttgatttcatcaaaaaaaaatcccatcatgagagaaatcctccacgttcaagccggtcagtgtggaaaccaaatcggaggcaaattctgggaagttgttagcgacgaacatggcattgatcccaaagggaactacgtcggtacttctcgtgttcagcttgagagggttaatgtttactacaacgaagctagtggtggtcgttacgtacccagagctgttttaatggaccttgaaccaggaaccatggatagcttgcgtactggtccgcacggacatctttt

SEQ ID NO: 205642 - DNA, 331 bp, Gossypium hirsutum
tggttatgcgggaccctagtggaataagtaaaggatcagggtttgttgcgttttcaaccccagaagaagcttctagagctcttgcagagatgaatggcaaaatggttgtcaacaaacctctctatgttgcacaggctcaaaggaaggaagacaggagggccaggttgcaggctcagttttctcaaatgcgaccacttacaatggcaccttctgttgcaccacgaatgccaatgtacccccctggtggtccaggtcttggacagcaaatattctatggtcaagcacctccgattttcccccctcagcctggatttggatatcagcagcagct

SEQ ID NO: 205643 - DNA, 325 bp, Gossypium hirsutum
ctatttggttaaccatggctcataactgttgtcatcctttcttccttttccaacttttactcattactgtctcactaataatcggtggtcacaccgtctcgtcagcggctcgacatttattccagacacaaacaacctcatcagagctgccacaattggcttcaaaatacgaaaagcacaaagagtctgaatacaaacaaccaatatatcacgaatagtacccaaaacatgagaagcctaaaatgcacaaggaggaaaaacaaaaaccctgcatacatcatgaagagtaccacgagtcacgcgaatcgaaggagcacgaagagta

SEQ ID NO: 205644 - DNA, 330 bp, Gossypium hirsutum
ctcgtgccgagaaattttctttctcgattttctctttagccaaaaaagatgcagatcttcgtcaagactctaaccggcaagacgatcactctcgaggtcgagagctccgacacgatcgacaacgtgaagaccaaaatccaagataaggaaggcatccctccagaccagcagcgtctgatcttcgccggaaaacagcttgaggacggccggaccttggccgattacaacatccaaaaggagtcaactctccacctcgtcctccgtttgcgcggtgggatgcaaatcttcgtgaaaaccttgaccggcaagacaatcactctcgaggtcgag

SEQ ID NO: 205645 - DNA, 324 bp, Gossypium hirsutum
gcatatatcattgttgtctttgtcattgtttttccaagaaagcacaatgaatgtagacgaggaggtggagagactcaaggaagaaatccaaagactaggccagatccaatcagatggttcttacaaggtcacattcggggtgctatttaatgatgatcgctgtgcaaacatctttgaagcactagttgggacactaagagcagcaaagaaacgaaaagttgttgcatatgatggtgaactactgctgcaaggagttcatgacaatgtggaaatcattctcaaagctacaacaccagcagcagcccagagtagcaactaatgcag

SEQ ID NO: 205646 - DNA, 331 bp, Gossypium hirsutum
gttttactatgcatacaatatgaggaacacagcgaaggacgagaagatgggtgctaaactcccagcagctgataaaaagaagattgaagatgctattgaacaagccattcaatggctagacagcaaccaactcgccgaagccgatgaatttgaagacaagatgaaggagttggagagtatttgcaaccccatcattgctaagatgtaccaaggtgccggcggtgacatgggtggtggcatggatgaggatgttccggctggtggaagtggcgctggtcctaagattgaggaagttgactaaatcattgattctcttcacctgggttctcta

SEQ ID NO: 205647 - DNA, 307 bp, Gossypium hirsutum
tgaagaagctgcagatcgtgttgccactcctggagtatctgttgggcttgtttggacagcttttggaggagaggttcagtttgtggaggctacgtcagtggttggaaatggtgaattgcatcttacaggacaacttggtgatgttattaaagaatcagcacatatagctctgacatgggtaagagccagggtggaggatcttaagttagcagctgctgaggaaactgatctgctgcagggcatagatattcatatacattttcctgctggggctgtacccaaagatggaccttcagctggtgtgacc

SEQ ID NO: 205648 - DNA, 326 bp, Gossypium hirsutum
atcaaatcctcagccgctgcagccttctactggagatagtctttcagctccttcgtcaattagtattaatactgccaatggaaaaagcggaaatttggatctcacacaagaggatgagatggaggaggaggctcctgagacaaaccaaatgactgaacatggcttgggaagcttaagtagctttgggattggctcaaaccctaacccaactgctcctaagccaaacccatttggtgctccattcggagttgtggctacaagtgcagctacctcttcattcacctcaactgttaatcctggagagttgtttaggcctgcatctttta

SEQ ID NO: 205649 - DNA, 325 bp, Gossypium hirsutum
gttttgattattgattccaccactggtggttttgaggctggtatctccaaggatggtcagactcgtgagcacgcattgcttgcttttacccttggtgtcaagcaaatgatttgctgttgcaacaagatggatgccactacccctaaatactcgaaggctaggtatgatgaaattgtgaaggaagtctcttcctacttgaagaaggtgggatacaaccctgacaagattccatttgttcccatttctggttttgagggtgacaacatgattgagaggtctaccaacttggactggtacaagggccctactcttcttgaggctcttg

SEQ ID NO: 205650 - DNA, 325 bp, Gossypium hirsutum
cttttcccttttttcttaattctagaatctccgccatgagcaacaacggtaacaatagcaacagttccgatcccgatcgccctgtccgtgtttacgccgatgggatctacgatctcttccacttcggccacgctcgctccctcgaacaagccaagaaatcgtttcccaatacgtatttgctggttggatgttgcaatgatgaaacaacacacaagtacaagggcaaaactgttatgaccgaatcagaacgttatgaatcccttcgccattgcaagtgggttgatgaagtcattcctgatgctccatgggtgatcgatcaagaatt

SEQ ID NO: 205651 - DNA, 329 bp, Gossypium hirsutum
ttgtcatcctttacaagattgcatcaaacattggcctcaaaagccagttcgatacagggaagttgtggctacatatacgattgaagcaaagaaattgggattaaggatcctggagttagtgtcagaagggttggggctagaatctagatactttggggataaattaagtgaatctgagatactatcaatcaaccattacccaccctgtccagatccgagtttgactctaggagtagctaaacattgcgaccctaatctcttaacccttctccaccagggagatgtaagtgggcttcaagtcttcaacaatggggaatggattggcgtgg

SEQ ID NO: 205652 - DNA, 323 bp, Gossypium hirsutum
tgatccacaatcacttgacttttacagtcaaatatcacaaggatccattgtcaggctctgcaaggattgttggatttgaggtcaaaccattcagtgttaaacatgaatacgaaggtgagtggaatgagaagacccgtctgacaacctgtgatccccatgcaaaacgtgctgttactagttctgaatctcctcaagaggttgaagaaaaaaaggagatcatatttacatatgatgtctagttccaggaaagtgatataaagtgggcatcccgatgggatacctatcttctaatggctgatgatcagatccattggttctcaatt

SEQ ID NO: 205653 - DNA, 328 bp, Gossypium hirsutum
cttttaaggatttaagaactcaggctactcagcagaatcaaacagtggaaactgagttgttttcttgccctgtgtgctatgaaccactgatcagaaaaggccctcctggtttaaacttggatgctatctaccggtctggattcaagtgtaagaaatgcaacaagtcatactcaagtaaagatgtatttctggacctgactgtcactactggattgagaaactacactgaagtcaaacctgttaggacagagctattccggagtcctcttgtatcgtttctctatgaaagaggctggcgtcaaaattttaatctcagtggcttccctgg

SEQ ID NO: 205654 - DNA, 328 bp, Gossypium hirsutum
gagctgcttatcttgttcttcataaacttgagaaaaagaagtatgtgttgaagaagattcgcctggccaaacaaacagagaagttcaaacgtacagctcaccaagagatggaattgattgcaaaactaaataatccgtatattgttgagtacaaagatgcttgggttgataagggaaacagcatttgcattgtaaccagctactgtgaaggaggggacatggctgagcttattaagaaggcccgaggtatgcacttccccgaggagaaaatctgcaaatggatgactcaattactcttagccgtggactacctacactcgaaccgttc

SEQ ID NO: 205655 - DNA, 305 bp, Gossypium hirsutum
atcttcaacttggaataaattaatcttcaaatcaacacacaattaaacatgtaaaaaaataaaaaataaatcatagttctaataattactgattaagtcctctctttctctctattctcttcctttgaatgatgaaaattatatggttttttgggaagaagaagaagaagaaacaggggccaccttaggcacataaacaggatattcatcaatttcatcaatccatggactcttctcctttgctggattaatggtcttcaatgctttccatacagcactgttgcatttaaaccctgacccgaatg

SEQ ID NO: 205656 - DNA, 315 bp, Gossypium hirsutum
gttgactcgatgtctaaggttgctgagattgaagggggtgaaaaggaaaagatgagagagaaagtgaaaaagatcttaggacatgggattaactgctttgttaacaggcagttgatttacaatttccccgaagaactctttgcagatgcaggcatacttgctattgagcatgctgattttgatgggatagaacgtctggctttggtaacaggtggtgaaattgcttcaacctttgacaacccagagtctgttaagcttggacattgcaagcttattgaagaaattatgattggtgaggacaagttgatccacttt

SEQ ID NO: 205657 - DNA, 331 bp, Gossypium hirsutum
ctcaaacccgacaccgtcaccctcaccagcaccggcaccgacaccggcatacacaaatatcaaagacttactctctgtggcaggtccatatcacaagttcctgggctacctcgagtcgactaaattaatcgacacgttccaaatccaagccaacaacacggttgaaggcattacgattttcgtaccgaaagacagcgcattcaaggctcttacgaagccttcattgtcaaatctaactgatgatcagttcaaatcagtgctcctttaccatgccttgccacgatactatgcccttgcggacttcaatgacctaagagagaaaggccctatt

SEQ ID NO: 205658 - DNA, 328 bp, Gossypium hirsutum
gctgcaaattctcccaaatttttcagaaaatctaacacaagttgttatcaattagggaaaaaaatgagagagatccttcatgttcaaggtggacaatgtgggaaccaaatcggttccaagttttgggaggttgtttgcgatgagcacggcatagatccaactggaaggtacattggttcctcggatctgcagttggagcgtgttaatgtttactataacgaggcttcatgtggtcgctttgttcctcgtgctgtgctcatggacttggagcctggtacgatggacagtgtccgaactggtccttacggccagattttcaggccagaca

SEQ ID NO: 205659 - DNA, 327 bp, Gossypium hirsutum
gtttgaagaagcacgagcaatactcgaacaagaatgcggcccatgtcatcaagataccctgggagtatacagcaatcttgcagcaacttatgatgctatgggaagggtcgaagatgcaatcgagatattggagtatgtactaaaattacgagaagaaaaacttggaatagcaaatcctgattttgaagacgaaaagaataggctggctgagctcctgaaagaagcgggcaggccacgcaacagaaaagcaaaatcactggaaaatctcatcgatccgaactcaaagaggacggcgaagaaagaggggacgaaaaaatggggtttcag

SEQ ID NO: 205660 - DNA, 325 bp, Gossypium hirsutum
gtcggaggaggtgatgatgcttttaacacctttttcagtgaaactggtgctgggaagcacgtccctcgtgccgtcttcgtggatcttgaacccactgttattgatgaagtgagaactggtgcttaccgccagctcttccacccagaacaactcatcagcggcaaggaagacgcagctaacaactttgcccgtggtcactacaccattggcaaggagattgtcgacctctgtttggaccgcatcaggaaacttgctgataactgcactggtcttcaaggattccttgttttcaacgctgttggtggaggtaccggatcaagtcttg

SEQ ID NO: 205661 - DNA, 328 bp, Gossypium hirsutum
gaacttctcccctgctttcaagatcgggcagggtggattcggaacagtttataagggaaaacttgatgatggaactttggtcgctatcaaacgagctaaaaagagtgtatatgataagcatttgggtgtggaattccaaagtgaagtaacaacactggcacaagtggaacatttgaatttggttaggttttatgggtacttagagcatggagatgaaagagttgtggttgtcgagtatgtccccaatggaactctaagggaacacttggatggtgttaatggaaaagaacttgactttgcttcgaggcttgatatagccattgatgtg

SEQ ID NO: 205662 - DNA, 327 bp, Gossypium hirsutum
cgccaaccacctccactggtttaatcaactttatggctagttcgctccaagggatatttaagcttgaagacttcacttcagatcactctgaaaagtcggtgaaaggattcaaattcattgatacaagaagcttgtggctaaatttgaaagccattaaaaggcttgtagataccagtgcactgaatttggataacctttctactttaaagttatttgaaaattcaattggcatgtccattccccaatctcgttttcttcctttgaattccacatcagacttattccttctccagtcggacctttactcatttactgaaagcatgtttg

SEQ ID NO: 205663 - DNA, 336 bp, Gossypium hirsutum
cgatagagaggttaatattagtagaggacatttttgctggctttaattgtactttgcgaggaggaaatgtctcacatcatgaatacatccaggttgggaagggaagggatgttgggttgaatcaaatttcgatgtttgaagccaaggttgctagtgggaatggtgagcaagttctcagtagagatgtttatcgactgggtcacagattggacttcttccggatgttatccttcttttataccactgtaggattttttgtcaatacactgatggttattcttactgtatatgtttttttgtggggcagactttatcttgctctcagtggtgttgaga

SEQ ID NO: 205664 - DNA, 289 bp, Gossypium hirsutum
tgagttgctacatattacaattcaacagggtatggagatgagcttttatgggcagcaagctggctctatcatgcaacaggcgatcgatcgtaccttgactatgcgactggcgaaaatgggaaactgtttgcttcatggggaagtccaacctggtttagctgggataataaaaatgcaggaacccaggtcttgctttccaggttaagcttgtttggtgccaaaggagtctctgggaattctggccttggaaactataggagctctgctgaaggtgttatgtgtggtcttt

SEQ ID NO: 205665 - DNA, 330 bp, Gossypium hirsutum
tgtggcaatacggagaagctgttgaaccagatcatggacctcaaattcacctccaaatcgctgcaacgccaggccaagaagtgcgagaaggaggagaaatctgagaaattgaaggtgaaaaaggcgatcgagaaaggtaacatggacggtgctcggatctacgccgagaacgccatccgtaagcgcactgagcagatgaactacctgcgtctcgcttcccgactcgatgctgtagttgccaggctcgatacccaggctaagatgaccaccatcaacaagtccatgggaaatatcgtcaagtctctcgaatcttccttagccaccggcaat

SEQ ID NO: 205666 - DNA, 330 bp, Gossypium hirsutum
ggaatggctgtgcatgatgattgcaagctgaagtttttagaactgaaggctaaaaggacttaccgcttcatagttttcaagatcgaagaaaaacaaaagcaagttgttgtggaaaaggttggtaaacctactgatagttatgaggctttcactgctagccttccagccgatgagtgtcgatatgctgtgtatgactttgattttgtgaccgatgagaactgccagaagagcagaatttttttcattgcctggtctcctgatacatcaaaagtaagaagcaagatgatctatgcgagctcaaaggacaggttcaaaagggaattggacggt

SEQ ID NO: 205667 - DNA, 245 bp, Gossypium hirsutum
ggttattaaacaagggccctgggatttattattattacttggaaaagacaacatgcaaactgccttttttaataaaaacattcaagcagaaacccttcctaaagcgttctggcgagaagaaaaaaaacttttttcttttttttttaccagtgctttttggtggtgttgtgctcaatatgcatctgcattggaagaaacatgaaactgtttttgttatttgcaagccttgtcagccagggcaggtt

SEQ ID NO: 205668 - DNA, 383 bp, Gossypium hirsutum
gaggaaatgtcggttatttgggcattagggttgatgaaaccgcctgatactatccggccatattattggccccaaaatcacgggggtccaatgatggttgcatatggacatttgaggcttaatgtttcagagaatgtggatgattgtttcgggccattggatgctgatgataagcaggaccaagatttgattattgccagtgcaaaagttccgcttgttgttacgactggggaggcgttgcattatccaaatccaccaaatccatcaaaggttttgtatattaataagaaggaagctccagttttgagagtggaaagaagggttcctgtgaaagtttcggtgcagacaggtcatgatgttgctttgtatattacttctgatta

SEQ ID NO: 205669 - DNA, 386 bp, Gossypium hirsutum
ctaatttctttttcccttttttcttaattctagaatctgggccatgagcaacagcggtgagaatagcaacagttccgatcccgatcgccctgtccgtgtttacgccgatgggatctacgatctcttccacttcggccacgctcgctccctcgaacaagccaagaaatcgtttcccaatacgtatttgctggttggatgttgcaatgatgaaacaacacacaagtacaagggcgaaactgttatgaccgaatcagaacgttatgaatcccttcgccattgcaagtgggttgatgaagtcattcctgatgctccatgggtgatcgatcaagaatttctggataaacacaatattgactacgtggctcatgattcacttccctatgctg

SEQ ID NO: 205670 - DNA, 325 bp, Gossypium hirsutum
atccacagcttattgtgagcggtgaacttcgagcccttcaaccaatattccaaatatatggtcgtcgcccagtattctccggacctatagtcacacttaaagtgtttgaggacaatgtattgatccgagagttccttgaggagaaaggtaacggcagagttctggttgtagatgggggtggtagtttaaggtgtgccatacttggaggcaaccctgtagttcaagctcaaaacaatgggtgggctggaatagtggttaatggctgcgtaagggatgttgatgaagataaacggtgtgacattggggtgagagcgctttattctca

SEQ ID NO: 205671 - DNA, 357 bp, Gossypium hirsutum
ggatagttcatttcgctggacttaccaatgtttacgatgttgatttcttcaaagaacttagacaaattgaggtgtttggcacttggccaatggccctgctatcagcaaacgagagacgggttgtgattgaaggacctgtttgtgattcatcacaagttataggatggcacctaaggaagatgaataaccagacagatgcagaaacagatgctgatacgaaacctcctattcatatatcaagttttgcatttaacagttcaatcctttgggaccctgagagatggggacgtctcacatcggtccaaggcacttcacagaactcactgaaatttgtgaaacaaattgtaatggaagatg

SEQ ID NO: 205672 - DNA, 373 bp, Gossypium hirsutum
  unsure (1)..(373): unsure at all n locations
ctccgatggagtggtgttagcattgaggacttatggcgtaacgagcagttttgggtcatcggtggcgtttcagcccatctctttgccgtcttccaaggtttccttaagatgcttgcgggcattgacaccaactttactgtcactgccaaagcagctgatgatgcagattttggtgagctctacattgtgaaatggactacacttctaatccctccaacaacactcctcatcgtcaacatggttggtgtcgttgccggattctccgatgccctcaacaaagggtacgaagcttggggaccactctntggcaaagtgttcttttccttctgggtcatcctccatctttatccattcctcaaaggtcttatgggac

SEQ ID NO: 205673 - DNA, 389 bp, Gossypium hirsutum
gaagatgatcaagcatacatgcaaaagagatcgaagggcacaaaacgtaaaacccgacaggcgaaagcacttgaaaatgctaggaaggctcccagatcatttcttgagctcttacatgaggcaaacttagagtccttacctcctcatgttccatcctatttgagggcagcagtgggacctccaagttctacctcccgccggcatttttgcagcgtttgcggctttagtgcaaagtatacatgtgtgacatgtgggatgcgcttttgttcgtgccgatgccaaaatatacataacgatactcgatgcatgaaatttgttgcatgagtggtaatattaggaacccaaaaggattttgttgacattagcagacattcatcatatgccaaaaa

SEQ ID NO: 205674 - DNA, 389 bp, Gossypium hirsutum
  unsure (1)..(389): unsure at all n locations
tccatggcgctttttggaagagttggtggaggcatctatacgaaggctgctgatgtgggtgctgatcttgtaggcaaggtggaaaggaacattcctgaggatgaccctagaaacccagctgtgattgctgacaatgttggggataatgttggtgatatcgctgggatgggatctgatctttttgggtcctatgctgaatcatcttgtgctgcacttgttgtcgcttccatctcttcttttggcatcaatcatgaattgactccgatgttatatcctctcattataagttccgttggtatcattgtttgtttaatcaccaccttatttgctactgatttctttgagatcaangctgttaaggaaattgagccatcattgaagaggcaact

SEQ ID NO: 205675 - DNA, 374 bp, Gossypium hirsutum
tttctaatattagtattagaaataaaaatgaaaaagctttttgtgacttatcctccctctcacaagcatatgtattttacaaattatcacaaacccaagttattagtttttataaattcaaacctatccttcaatatcatggaacatctctttttcttaaaaatgaaataaaagattattttgaagaacggggagtatctcattccagattaagacatcattatgggttaagacagaaaattgtttggcattctggaatgaatgaatggaaaaactggttaaggagtcgttatcaatacgatttagttcagaatagatggctaaaattaggaccaggacaatggcgaaatagagtcaatcaacactatctggct

SEQ ID NO: 205676 - DNA, 281 bp, Gossypium hirsutum
cttgggcgatgccattttcaccgagaaaggatggagcaccaaggaaaaccagaacaacaactactacaacggcaacattaatggcgagaagcaaggcatgagcgatactaggtacttggagaatggaaagtactactatgacgtcaagagtgagaacagctattatccaaaccagctcgacaactcaagaggagttgcttccaggaacgagttcgatgagaatcgttacaacaacatgggaaggtaccaccagaaccaagaggagttcgaggaaagcgagg

SEQ ID NO: 205677 - DNA, 309 bp, Gossypium hirsutum
ggtacttgaattatcaaaagagagaaaggcgcgaacaaaaaaaaaaaaacatacaactaagtgaaaaacccgacaagagagaaaacaagaaaaatgggtgttctggatcatgtttcagatctgtttgactgttctcacagttccaagcacaagaaacgtaagctgttgcagacggtggaaatcaaggtgaaaatggactgcgaaggatgcgaacggaaagtgaaaaaatcagtggaagggatgaaaggggtgacacaagtggacgtggagcggaaggccagcaagttgacggtcgtcggatatgtggac

SEQ ID NO: 205678 - DNA, 361 bp, Gossypium hirsutum
  unsure (1)..(361): unsure at all n locations
ggaaaaagaaaaccctagctttacctttttgttctttgtgaaacatcaaatcgcagagatggatctttcatagatttcacctcagatctctttctctttgtaaaagaaaattgggtttacttatttatttgggtcggattgggttggtttggttttagaaaagaaggaaggcgatgtcaaccccagcaaggaagaggctgatgagagacttcaagaggttacagcaggatccacctgctggtattagtggggctcctcaagataataatatcatgctttggaacgctgttatttttgggcctgacgatactccttgngatggaggcacggtcaagttgactttgcagtttacagaggatta

SEQ ID NO: 205679 - DNA, 390 bp, Gossypium hirsutum
gagctctgggttggctatatttccgagaatggagacatacacaaacgtgtttgtgtagctggttatgatcctaaaatcgtggagtctcctactgagccgaagtggtcccctacaggagaactatttttcattacagatagaaaaaatggattttggaatctctataaatgggttgaatctaagaacgaggtgcttccactttatcctttgaatgctgagtttgcaagaccattatggatttttgggatgaattcttacgagttcgtcaagaacgaggctggaaaaaccttaattgcttgcacttataggcagaatgggaagtcgtatcttggaattttggatgatgttcagggttcattttcactgctcgatattcctttcacggatata

SEQ ID NO: 205680 - DNA, 395 bp, Gossypium hirsutum
  unsure (1)..(395): unsure at all n locations
gaagctgattgaaaagattgatgctcgcaatagcctggagacttatgtttacaacatgaaagaaccagattagcgataaggacaagcttgctgacaagcttgaatccgacgagaaggagaaagttgaaacggccgngaaagaagccctcgagtggctagatgacaaccagaatgccgaaaaggaagattttgaggagaagctcaaggaagttgaggctgtttgcaaccctatcatcacagctgtatatcaaagatccggcggaggtcctggcggtgctgcgtcaaatgaagaagaggatgattcacatgatgaactctaaaacaaaaatcttcgatggctactgccactgaaaagtgattgagtttattagagttaggtgtaatgaggatactgg

SEQ ID NO: 205681 - DNA, 409 bp, Gossypium hirsutum
tttgaatcccctctcgttaatcaaattagggtttcttgaagccaaatcgaccagacatgggaggaggcaatgcccaaaaatccaagatggctcgtgaaaagaatctcgagaaggctaaaaacgcagctaaaggcagccagctggaaacaaacaagaaagctatgacgattcagtgcaaggtatgtatgcaaacgtttatatgcacaacatcagaggtaaagtgcagggaacacgcagaagcaaagcatccgaaatccgatgtgtatgcttgcttccctcatctcaagaagtgatgtatttgaagcaagaaaatgccatatatatattatagaattgtttggaatatcttttcccttatcatgtaaaacctcagctatgatttttaaacccaggttgatgtgtgtggaac

SEQ ID NO: 205682 - DNA, 382 bp, Gossypium hirsutum
tctgctcgatatattatcgtgctcctgaactcatatttggtgctactgagtacgcaactgccatagatatatggtccactggttgtgtgatggctgagttgcttcttggacagccactgtttcctggtgagagcggggtcgaccaattagttgaaatcattaaggttttggggactccaacaagggaggagatcaagtgcatgaacccgaactacactgaattcaagtttccccagataaaaccacatccatggcacaaggtcttccaaaagcgtttacctccagaagcagtagaccttgtctgtaggttttttcagtactctcctaatttgcgatgcactgctttggaggcttgcgttcaccctttctttgatgaattgag

SEQ ID NO: 205683 - DNA, 387 bp, Gossypium hirsutum
gttgcccacatttttgcatcttttaatgacactttcattcatgtgactgatttgtctggaagagagactatggttcgtattacaggtggtatgaaggtgaaagccgacagggatgaatcttcaccttatgctgcgatgcttgcagcacaagatgtttcccagagatgcaaggaacttggaatcacggccctccacatcaaattacgtgctacaggaggtaacaaaaccaagacccctggtccgggtgctcagtcagctctcagggctcttgctcgctccgggatgaaaattggccgtatcgaggatgttacacccattccgactgatagcacccgaagaaagggtggtagaagagggagaaggctataaactagcacattatgttct

SEQ ID NO: 205684 - DNA, 385 bp, Gossypium hirsutum
atttaagaagccctaccatcatggccttccatcagatgaccttaagtgccaagaaggaaagccgcaggctgctgttgaccgcacactagatagtaaagcttttagagggtggacagaaacagataacccctggacatatgatgatgagactgataattctgagatgacatatgtgaaccttcaactgaacccggagcgctacactggctacactggtccatcagccagaagaatatgggatgctgtgtactcggagaactgtcccaaatatccagctgaagaattgtgccaagaggaaaaaatactttacaaattgatttctggacttcactcatctatttcgatccatatagcttctgattatctacttgatgaagccacaaac

SEQ ID NO: 205685 - DNA, 389 bp, Gossypium hirsutum
cttcaattttgggcccaaaccggccaaacccaaaattaagggggtgaaacctggaccaatagaaatactagaccgggtgaagatgaacaacacttttgaaacttcttgggccaccattaaaggtcttctgcaggttccaaaacaggcggagatgagtttcagtagggaaaatctaagaaaagttgaagatcaactcaagcgggctttcgttgaattttaccaaaagcttcgcctgcttaaaagttacagctttttgaataccttggcattctccaaaatcatgaagaagtatgataagatcacatcgagaagtgcatcgagatcttacatgaaaatggtggataactccaaccttggtagctctgatgatgttacaaagctgctggaga

SEQ ID NO: 205686 - DNA, 373 bp, Gossypium hirsutum
tttgagacataaggcaataaaaaaaaaggaagacagtgtggtatttttagtttggttttgagatggcgttctgctctatgatttgttgtgcgaaaggcgttgatcggaaagagaagggaaagcagcagccgacatggaggatattttcattgaaagaattacattcagctaccaataattttaattatgacaacaagcttggagaagggggatttggcagtgtatattggggtcagctatgggatggatcacagatcgcagttaagaggttgaaggtgtggagcaataaagcagaagtgcagttttcggttgaggttgagatattggcaagagttagacacaagaatctactgagtttacgaggatactgtgc

SEQ ID NO: 205687 - DNA, 388 bp, Gossypium hirsutum
tcgaatccaatgccgacgccggcgcctctaaaacctatcctcagcaggccggtactatccgcaagaacggctatatcgtcataaaaaaccgcccatgcaaggtttttgaagtttccacctccaagactgggaagcatggtcatgctaagtgtcactttgtcggaatcgacatcttcactggcaagaaactggaagatattgttccatcttcccacaactgtgatgttccacatgtcaatcgtactgattaccagttgattgacatttctgaggacggatttgtgagtttgctgactgacagtggagacaccaaagatgatttgaggcttccaactgatgacaacttgttgaaacagataaaggacggttttgctgaggggaaagacct

SEQ ID NO: 205688 - DNA, 385 bp, Gossypium hirsutum
gaaaaatggttctgctagagaaactttgggatgatgtaggggccggtgctcaaccggaacgtggcctcggccggctgaggaagatcaccaccaccccacccttgtccaccaaagatgaggcttcatcaatggcgatgccgacgagtccgacgacacctgggacaccatcgacgccggtgtcggctcgtacggacaacgtgtggaggagcgtgttcaatccaggtagcaaccttgcaaccaaaggtattggcgctgaagttttcgacaagcctcaacctaactctcctactgtttatgactggctatacagcggggagaccctgagcaagcatcaccgttgattaagcggtggctgactgcgggggatggtagcaaaaccactagc

SEQ ID NO: 205689 - DNA, 352 bp, Gossypium hirsutum
ctggaaaggtggaaaacgtgaagaaagcacaagatgctttccttgttaggtgcaaggctaactcggaggccaccttgggtacatacaagggtgatgcaaagattagtgagggtgctgcagagagccttcatgttaaggactacaaatactaagaatttagtcttgtggtctgtgtatcagagaaattttctgtattgatgatagacgtttagtgctgtttttgggggttgtccgtttcttctcatggaatttaggttgtgaaatcagactcaaataagcttggggggccttagttctcgctgagtgttcatggttttttgtttgcttcagtttaaaacaatattctcagcat

SEQ ID NO: 205690 - DNA, 391 bp, Gossypium hirsutum
agaagggtaggtctctattgtttaatttaaaggatcgtaacaaccctgaactcagggaaagagttgtgtctggcgaaattcccccagagcgattatgttcaatgagtgctgaggagctggcttctaaagagctttcacagtggcgacaagccaaagctgaagagcttgctcaaatggtaattttgcctgatgtagaagttgatattaggcgcctggtgaggaaaacacataagggtgaatttcaagtagaggttgaacaaactgacagttcttcagtggaagtttctgctggaacttcagttactcggcgacctaaaactgatgcaaaacaagctcctaggaataataaaactgttgcaaaggaacatgaatcaaatgccgtaggtgaaaa

SEQ ID NO: 205691 - DNA, 357 bp, Gossypium hirsutum
ccagccacatcattcgccgcacggcatcagtctcatcaggcggggaagaatgtctcacaggaagtttgaacacccaaggcatggctcccttggatttcttccgaggaagcgagcttctcgtcacagagggaaagtgaaggcatttcctaaggatgacccaagcaaaccttgcaagctcactgcctttttgggctacaaggcaggcatgacacacattgtccgagaggtcgaaaaacctggatctaagcttcacaagaaagagacatgtgaagctgttacgatcgttgaaacccctcctatggtgattgtgggggttgtgggtatgtcaagacaccacgtggtcttcgcagcttgaac

SEQ ID NO: 205692 - DNA, 389 bp, Gossypium hirsutum
  unsure (1)..(389): unsure at all n locations
gccatcttttaccttatggaaattgaccattatgatgagggtgaaagatcaatgttggtctctcaaacaagctttgaaaaaacttttggcttatcttcagtcttcattggatctacacttatggagaatggaggagtggctgaatctgccaacccttccacactaatgaaggaagcaattcatgtcatcagctgtggctatgaagagaagactgcatggcggaaagagattggatggatatatggctcagtcactgaggatatcttaaccggcttcaaaatgcactgccgaggatggagatcgattactgcatgcccaaaggccagcattcanaggatctgcacccatcaatctgtctgatcggttgcaccaggttcttcgatgggctt

SEQ ID NO: 205693 - DNA, 390 bp, Gossypium hirsutum
cttcaaagataaaaaagttagggttttaatttgaaatcggattcggtagagattaagcaatggctggagaaagggccttgttcaagttccttaagcctgggcaacgtctacagcccgccgacgttcaagctgccgccatgtggggcgtcgctgccacgaccggcgctctttggctcattcagccttttgattggttgaagaagacctttctggagaaaccagagtcggattagaagcaaatgggacatcttgcaactcattgcggttttgtttatcgggtttgctgatgaacaaatcatggaaagaataaaaataataatgtagtaagtgtaattttttgtggtttattgctaagagaacaagcctctttgcttttggtatcaattactg

SEQ ID NO: 205694 - DNA, 383 bp, Gossypium hirsutum
aaaatctataattgtttacctttttgcttcacttgattgttaaatctccatggctgccaaggtttttgcatattttgtcgctttggttgctgtcttcagcgtcgccaaatctgaccctgatctcctccaagatatctgcgtagccgatacatcttcaggggtgaaggtgaatggatttgcatgcaagaaggatgccgatgtaacggaaaatgatttcttctttagtggcttagccaagccggcggtggtcaacaactcggtgggatcggtggtgaccggagccaatgttgagaaaatcccagggttgaacacccttggggtgtcgctttctcgtattgactatcaacctggcggacttaacccaccttacactcacccacgcg

SEQ ID NO: 205695 - DNA, 363 bp, Gossypium hirsutum
caagtgtggtgatccgtttatcgtcgagcggaacccgcatatccatgaccctgacgatgttttccccggccttgttatcaagatcatcgcttcaactgataggaaattatagaggtagctgcttttacacattatacacacagaaaattttaatattgtatactgggttttggtcttcttttgtttcttagtgaaaagtctttgtaataagttgaagcctgtatactgaggcctttgatataggatcatatcatatcatatatatacatggagattggtttcttctccggagagatttcagctcttctgtaaatagctcttttatcagtatatggcataatgctagtttgggttcacaccagt

SEQ ID NO: 205696 - DNA, 384 bp, Gossypium hirsutum
ctaaaaagtttataaaataaaatatattattttattaaaggttttgtttgggggaaattgagagaaaattttgaaaaaaaaaaatccaagatgaagatcacatcgttagtagtgctgaagtgcaacccggaaggatccgatccgataatactagcgaacgctaccgatttgagccattttggttactttcaaaggtcaagcgtcaaggagttcatcgttttcgtttctcgaactgttgctaaacgtactccttctggtcagcgccaatccgttcagcacgaagagtataaggtacatgcttacaacagaaatggactttgtgccttgggatttatggatgatcattatccagttcgaagtgctttttcgcttctcaaccagatt

SEQ ID NO: 205697 - DNA, 369 bp, Gossypium hirsutum
  unsure (1)..(369): unsure at all n locations
atttttactttgctcatggtgcattgggggatgcttttaaaagctatgttcgaactcgcgattattgtactacgtcgaagcatattattcagatgtgtttgaatgcaattcttgtgagcattgaaatggttcaatttagtaatgtgactagctacgttagtaaagctgagcaaacacctgaagcacttgatcccccaactgttgctaagctatgttgagctgccgggttggctcatttggaggctaagaagtacaagcttgcagctcgtaagtttttggaagttggtccataattggtgaattcatacagcgaagttatcgctcctcaagatgttgctacctatggcgggctatgagcactngcaagct

SEQ ID NO: 205698 - DNA, 387 bp, Gossypium hirsutum
gttatctgggattttgttccaacttttttatggcttaatgggaagctggacagcataccttataagtttactttatgtggagtatagaacaaggaaagaaagagaaaaggttgatttcaggaatcatgtaattcagtggtttgaagttctggatggattgttggggaaacattggagaaacataggtctatttttcaactgcacttttctgctgtttggatcagtgattcagttaattgcctgtgctagcaacatctactatataaatgacaaccttgataagagaacttggacgtacatttttggagcctgctgtgcaacaactgtgtttattccttcattccataactacagagtttggtcatttcttggccttatgatgacttc

SEQ ID NO: 205699 - DNA, 352 bp, Gossypium hirsutum
gttctataggaagacgccctgttaactacacgaagttggctcgccgggattcttctccggtggaaggggtagtggtttacggagatgaagacgacgaggccgacctctcccgggtgatatgtaacgggtacgagacggattcggatttggttagtttgaagatcagtttgttaggtgactgtcaaattggaaaaacaagctttctgatcaaatatgttggggatgaagaagagaaaagcttacaaatgtcaggattaaatttagtaaacaaaacattatcggttcaaggtgccaggattgctttcagcatatgggatgtaggaggtgacagtaactcacttgatcatcttcc

SEQ ID NO: 205700 - DNA, 385 bp, Gossypium hirsutum
tctagattttcagaaaacatgccttctgataagaagaaaaatgtattggttgggattcgattagatagtgaaagcagggatttgcttagttgggctcttggaaaagttgctgaacctggtgattgtgttgtagcaattcatgttacccggaattcagatcatgctttgggacagaaattgttattagagggttatttagaagcatatgaaggcctgtgttctataaagaaggttgatcttaaaggccagattcataaaggaaattcgatacgaaaggttttaattcgagaagcaataaactatggtgctgtagctctagttgtgggtatagacaagaggagttctcttgggggctggacttccacggctagatactgcacgaagc

SEQ ID NO: 205701 - DNA, 339 bp, Gossypium hirsutum
cgcacctcttgagtctctttttgcgcagttctgtttacactcattatggtttggcaattgtagcatacgtgccattgcagtgttgtgggtagagtttgttcgagaaattcgttggtattgggaagagtcacagccattgcctaaaatgccagcccatggttcaattgacctaacatcttgtttaatcaaccataaactacaaatgcttgcaatatgcattgagaagaagcgtgaactcaatgaagaatttcaagactgtcttggaagtaatgatgatgtgtttgcacatatggaggttgaagatattcaagttggagaggagtctactagttttcttac

SEQ ID NO: 205702 - DNA, 255 bp, Gossypium hirsutum
cgagttttgttatggtgttttgaaaagattcttgcccgaggaaaatgttcagtcagtgcaaggtctgacccttaccgctgatggaatgggtgcagtttttgatgttgcacaagatgatgtggaagcatttcttactggtgctgaaaatgcagctaatgttaacttatatgtgttgaagaatgcgttgccacccttgcaacataaggacatgtcaagaggaagatttggtggtggacggcgcggttttggtgatag

SEQ ID NO: 205703 - DNA, 385 bp, Gossypium hirsutum
ctctgaaggtgtcttaataaacgccttcgatttaccttcgatttccatttacttctctattgctacgtttttgaatttttagtgagcgaaaatgagagagtgcatttcagtccacatcggtcaggctggtattcaagtcggaaatgcctgctgggaactttactgccttgaacatggaatccagcctgatggccagatgccaagtgacaagactgtcggaggaggtgatgatgcttttaacacctttttcagtgaaactggtgctggaaagcacgtccctcgtgctgtctttgtggatcttgagcctactgttattgatgaagtgaggactggtacttaccgtcagcttttccaccctgagcaactcatcagcggcaaggaagac

SEQ ID NO: 205704 - DNA, 384 bp, Gossypium hirsutum
aaactttcattctttcagccataattaagcttcttcccttcagaaaacatcgactgaagctgctccaagattaaagaagcttcaatttataatactctgccccttaaactagcaaagcctgatctgctgcataatcgtctaaagaaaaattgatggggataaataagttgctgtgttggtttgcagttttcttctttttgttgggtttctctgcttgcagttcgatttctgatggtgtttttgactctttcacttctactggaaggcacctccttcaagctaagaaagcttgccctgttaactttgagtttctgaactacacaattatcacaagccaatgcaaaggaccaaagtatccacctgaaagtttgtggtctgcattca

SEQ ID NO: 205705 - DNA, 379 bp, Gossypium hirsutum
cacttctgatcattgctgttggtctcccgaatgttggtccacactttgagacatggaatgccggtgttcttggcccagttacactgaatggtctcaatgagggaaggagagatctctcatggcagaaatggtcttacaagattggccttaagggagaagccttgaatcttctttcgctaagtggtagttcatccgtggagtgggcacagaggtcttttgtctcacaaagacaaccactgacatggtacaaaacaactttcaatgctccagctggaaattctccattggctttagatatgggtagtatgggcaaaggccagatttggataaatggaaagagcattggacgccactggcctgcatataaagcatctggaaa

SEQ ID NO: 205706 - DNA, 349 bp, Gossypium hirsutum
cttgttccttccttcgccggctattgcttttagttgcctcgatttcaagtgaatcagaatgggtaaggaaaagactcacattaacattgtggtcatcggccacgtcgattctgggaaatcaaccaccactggccacctgatttacaagcttggtggtattgacaagcgtgtgattgaaaggttcgagaaagaagctgctgagatgaacaagaggtcattcaagtatgcttgggtgcttgacaagctcaaggctgagcgtgagcgtggtatcaccattgatattgccttgtggaaatttgagaccaccaaatactactgcactgtgattgatgcacctggacaccgtgac

SEQ ID NO: 205707 - DNA, 389 bp, Gossypium hirsutum
ggacagttcctttggttttgagagaaaagagtagatcttggcttctctccttcgttcgattgcgcttaattatagcccgcgtttctctcagacgtgaaaaatggggctgtctttcacaaagctatttagccggcttttcgccaagaaggagatgcgtatactcatggttgggcttgatgctgcgggtaaaactaccattctttacaagcttaagttgggagagattgtcactaccattcccaccatcggtttcaatgttgagaccgttgaatacaagaacatcagctttactgtttgggatgttgggggccaggacaagatccgaccattgtggagacactacttccaaaacacccaaggacttatttttgtggttgatagcaacgatc

SEQ ID NO: 205708 - DNA, 405 bp, Gossypium hirsutum
aaaaaaacaccctaaagagacaatgagaaagctgctagcctttgcctgtcttttcttcttcgtttgggataaaacattagctcaaatagctccggcgccgccgataaaggtggacaacatcacttccatcctcgaaaaaggtggccaattcaccactttcatcaagctattgaaagccacacaggtggctgatcaactaaacaaccagctaagcacaccggaccctaacgacgggttaacggtgtttgcgccgagtgacagcgcgttctccggactcaaacccgggacgttaaactcactttccgacaaagagaagcttcagttggttcagttccatatactcccgacgttaatgtcgacgtcccagtttcaaacggcgagtaaccctttgagaaacccagctgg

SEQ ID NO: 205709 - DNA, 383 bp, Gossypium hirsutum
gaaaagccttctgcttatgcccgggaagcaagagagtttgtgagaacacgcctgattggagaacaggtgactgtagaaatggaatattcaaggaaggttcccatggcagatggtgctatagctgctgctgcacctgcagattcaagggtaatggatttcggctcagtcttcctaatgtctcctgctaagggtgatggtgatgatgctcctgccgcactcccatccacagctggtagtcagccacctggcttgaatgttgcagagttggtggttggacgtggctttggctcagtgataagacatagggattttgaggaaagatcaaactattatgatgcccttttggcagctgaattacgtgcgatttctgggaagaaaggaat

SEQ ID NO: 205710 - DNA, 396 bp, Gossypium hirsutum
ttccaatgtttcctgctcctcatcagcctgcacttcattgaattctgctacaggtaactcgcctggctgctcagcatcaacttgtgtctatggcatccaatatggagattcatctttctcgattggattgtttgctaaagaaaagctcactttgacatcaaacgttgtgtttgacaactttctatttggttgtggccaaaacaatcaaggcctttttggtggtgctgccggtttgctaggactaggccgaaataaactatcttttccatcacaaacagccataaaattcaagaaaatattttcctactgcttgccatcatctccaagctcaaccggcttcctaaaattcggcaatgatggtctctcaaagtcttgtaaattcacaacattatcaac

SEQ ID NO: 205711 - DNA, 349 bp, Gossypium hirsutum
aaaattcaataaagaactagaaatttattatcgctcacaggctctttgagaaagcccaatgattccctctctcatttttaattttggatatttttgttgccctagattttctctctgtaagctctacctagagaagaagccatggctaatgcagcgtctggaatggctgtgcatgatgactgcaaactgaagttccttgagttaaaggccaaaagaacataccgctacatagtattcaagattgaggagaaacagaagcaggttgttgtggaaaagcttggtgagccaagtcaaagctatgatgatttcacttcaagcctccctgctgacgaatgtcgggatgctggct

SEQ ID NO: 205712 - DNA, 278 bp, Gossypium hirsutum
tctagaatccttactgagcaaagagcgggacgccttgtccctgagggccgtggaaattatgatcaatgcattgaacaccactttactgcatctcgtgaatcattgtggtccgagttaaatcagcttctgcgcgatgactatgatgcaacatctgtttctaccccatacactgatgctgttttggaataccgtgttgtattttatgatcctgcaaatgcacctgtcaaggataagaactggaacaatgcaaatggccacactgtttatgatgctcaaca

SEQ ID NO: 205713 - DNA, 282 bp, Gossypium hirsutum
ttttctagcatggatgtatgaggataaggggcttaaagatctatggggggttcatatactccttatctgcacactgagagggttcattcatcaactatggagctcttacaacaacatgtttttcttaactcgcaaccgttggatcaagcaacaaggtgttgatttcaagcaaatcgacgatgaatgggactgggataatttcataatccttcaagctatgttagcttcaatggcctgtttgatattcccatctttaaatacacttcctttatggaacctaaa

SEQ ID NO: 205714 - DNA, 278 bp, Gossypium hirsutum
gagagagagagagagagagagagagagagagtctcagagagacaacctattgggacatcagcccagacagacaaggactacaaggagccaccagcagcacccttctttgagcctggtgaactcaaatcatggtctttttacagagctggtattgccgagtttgtagccaccttcttgttcctttacatcaccgtcttgactgtcatgggtgtgtctcagtctaaaaccaaatgtgcaaccgttggtattcaaggcattgcttgggcttttggtggcat

SEQ ID NO: 205715 - DNA, 276 bp, Gossypium hirsutum
caagaatgtgaaaaaccttgagaaaggttgtgctgatttggttcgtggtgccaaggataagagactgagggttaaggggccagtgagaatgcccaccaaggttcttcacatcacaacaaggaagtctccctgtggtgaaggaacaaacacatgggatagatttgagctccgtgttcacaagcgagttattgatcttttcagctcccctgatgtggtcaagcagatcacatctatcaccattgaacctggtgttgaggtggaggttactattgcaga

SEQ ID NO: 205716 - DNA, 278 bp, Gossypium hirsutum
gaaagtttcaatggcaaccctgagagttccagttcacgttccttctccttctgatgatgctgagcaacttcggaaagcttttgaaggctggggtacgaacgagcaattgattatcgacatattggctcacaggaatgcagcacagcgcaattcaattcggaaagtttatggtgaagcttatggggaagatcttctcaagtgtttggagaaggaacttacaagtgatttcgagcgggctgtgctgctttttacgttggaccctgcagagcgagatgctc

SEQ ID NO: 205717 - DNA, 294 bp, Gossypium hirsutum
ttccaacattttgaagaaacaaagaatcaaacatgtcgaaggaagtgagtgaagaaggggtgagccgaaaggactatgtggatcctccaccggcaccgctcatcgacgtggctgagatcaagctttggtctttttacagagctctcatcgccgaattcatcgctactctcctcttcctatacgtcaccatagccaccgtcatcggccacaagaaacaacacgatgcatgcgatggtgttggtcttttgggcattgcttgggcttttggtggcatgattttcattcttgtttact

SEQ ID NO: 205718 - DNA, 228 bp, Gossypium hirsutum
gagaggtgcaatagggaagtttggattgtcagggaaagcgcaagtgatgccgatgaagaacctatctgatggacagaggagtcgagtcatcttcgcgtggttagcatttcgacaaccccacttgctgctgctagatgagcccactaaccatttggatatcgagacgattgattcactggcagaagcattgaacgagtgggatggtgggttggtattggtgagtcacga

SEQ ID NO: 205719 - DNA, 278 bp, Gossypium hirsutum
ggacgctccgttttgcagattctctcatcccgtatttcgattcttcttcgattgacggtgcaatggtttacgtaacatcgtgggacgaattcgtcgagcgaaccgtgcagttgttccgtgccagtcctgaatctacgcggtattgcatgaagtaccggcattgcgatggaaaattggttttgaaggttactgataacaaagagtgccttaagttcaagacagatcaagcacaggaggccaagaagatggagaaactgaacaatatattctttaccttg

SEQ ID NO: 205720 - DNA, 277 bp, Gossypium hirsutum
tgagtacagtggatccattgaaagagcctccattgattactgccaatactgtgctttccatccttgccttggactaccctgtagataaggtctcttgttatatatctgatgatggtgcggccatgctgacatttgaatctctagtagaaacagccgactttgcaagaaagtgggttccattctgcaaaaaattttccattgaaccacgggcacctgagttttacttctcacagaagattgattacttgaaagataaagtgcagccctcttttgtaaa

SEQ ID NO: 205721 - DNA, 236 bp, Gossypium hirsutum
cacatggtgctgtaataccggtggtaggtcttcttgatggtaagaattacatgcttcatgaggctgtttcaagagctcttgtgaagttagggaaagacaggcctgcttgtaagatggaaatggtgaaagctggggtaattgaaagcgtacttgatatccttcatgaagcgccagatttcttatgtgctgcttttgtggaattgcttcggatactgacaaataatgctactatagct

SEQ ID NO: 205722 - DNA, 279 bp, Gossypium hirsutum
gagaaatggcgagcggagggaaagtgtcttttaaagtcactcttacctctgatcctaagctccctttcaaagtgtttagcgtgcctgaagcagccccttttacagccgtcttgaaattcgcagccgaggaattcaaagtccctcctcaaaccagtgctatcatcaccaatgatggcgtgggaatcaatcctcagcaaagtgcaggaaatgtgttcctcaaacatggatcggaacttcgcttgattccccgtgacagggtgggagccttttgaaataaca

SEQ ID NO: 205723 - DNA, 255 bp, Gossypium hirsutum
aaacaaccaaagccactactgggtggcaaagcaactttcgattaagcaaaaacacatttaaacagactataccagacatgagctattgtccattaacatatcagacgccccacttcatcatcacatcacattgaacctaccactaccatcatggcctaaaagatgattagaaaaaacaaaaaaccaatacatttgcctaaaaataaacaatagtttcttctttctaagcgactgatccacacacatggaaattaa

SEQ ID NO: 205724 - DNA, 277 bp, Gossypium hirsutum
tgcacatggtgctgtaatacctgttgtaggtcttcttgatgggaagaattacatgcttcatgaggctgtttcaagagctcttgtgaagttagggaaagacaggcctgcttgtaagatggaaatggtgaaagctggggtaattgaaagcgtacttgatatccttcatgaagcgccagatttcttatgtgctgcttttgtggaattgcttcggatactgacaaataatgctactatagctaaaggaccgtctgctgcaaaagtggttgagccccttttt

SEQ ID NO: 205725 - DNA, 278 bp, Gossypium hirsutum
cccactgcaaaataaatctgatgttccatcttatgtgatgttgggaattcccaaacatgaggaagggcctcctactcctcagcaccctctgtctccaatgggtgatgcctgttcgaggatggatctgactgctattcatcaaattttgataatgacacattataaagatgatgaaggaacaaatgagctatccttccaagagtggacccaacaaatgagagatatgttggaggcaagaaagcgtggagatgtagcatttcgtgacaaagattttaaaa

SEQ ID NO: 205726 - DNA, 277 bp, Gossypium hirsutum
cgaagtcgaatatccgaaaatacccgaatacaaggaaaaacaagatgagggtaaggaacataaacatgagttccaaaagcatgaaaaagaagaggagaaaaaacctgagaaaaaggcagagtactctgagtggccaaagtacatgtttactcaatctggctcgggcactaagccttgaaccatatgacactggtgcatgtgccatcatcatgcagtaatttcatggtatatcttaattatatggttaataaaaaaaagatggtgagtgaataatgtg

SEQ ID NO: 205727 - DNA, 273 bp, Gossypium hirsutum
atcaaagttgcacagtggatgcttcaaattcctggtgcaactggttacattggctgcattgggaaggacaagtttggggaggaaatgaagaagaactcaaaagctgctggtgttaatgttcaatatcttgaggatgaaactgcaccaacaggaacctgtgctgtttgtgttgttggtggtgaaaggtaagtttgagaatgaccttatttttccttgtttcttataagctgctatttttattgttgtacttatgtttgctccaaggattatgat

SEQ ID NO: 205728 - DNA, 272 bp, Gossypium hirsutum
gttggaccgagtgaagaacttaactgggctcgtagagttctatgccaagaacagccggctgagggaactggttaacttggttgtagtaggtggagataggagaaaggaatccaaggacttagaagaaaaggctgaaatgaagaagatgtatgaacttatcgaaaaatacaagttgaatggacaattcagatggatatcgtcccagatgaaccgagtgagaaatggtgaactctatcgttatatttgcgacaccaagggagcattcgttcagc

SEQ ID NO: 205729 - DNA, 277 bp, Gossypium hirsutum
tggaagcatcatgagcttaaggtgaaggactcaaagacccttctctttggtgaaaagcctgtcacagttttcggtatcagaaaccctgaggaaatcccatgggctgaggctggagctgagtatgttgttgagtctactggtgtttttactgacaaggacaaggctgctgctcacttgaagggtggcgcgaagaaggttatcatttctgctcccagtaaggatgctcccatgtttgttgtgggtgtcaatgagaaggaatataagcctgaccttaaca

SEQ ID NO: 205730 - DNA, 276 bp, Gossypium hirsutum
aagatttgatgaagttaaaattagtagctagaaggcagaaacagaaactagtcctccaccacttctcatcatcttcttgaattcatcaaaattaaccattccatctccatcaatgtctactttccttatcattgctttgcaatcttgcaatttgttcccttctttcaaacccaaagaaaacagcacagatcccagttcctcaaacgaaatcaacccatctttgtctttgtcaaacacatcgaaagcctctttcagttcctcttctccattcatccc

SEQ ID NO: 205731 - DNA, 275 bp, Gossypium hirsutum
attccaactccaactctaaggtgaacatagccatcatacacccagatcttggcataggtggagctgagagattgattgttgatgcggctgttgaattggcatcccatgggcacaatgttcatattttcacagctcatcatgataaaaatcgatgctttgaggaaacccgtgccggtatctttccggttactgtgtacggagacttcctgcctcgacatattttctatcgccttcatgctgtatgtgcatatcttcgctgcatttttgttgcactt

SEQ ID NO: 205732 - DNA, 277 bp, Gossypium hirsutum
ctggcttctgaatctgtcatcaagcaaatccctcgtcttttgggtcctggtctcaacaaagcaggtaaattcccaacccttgtcactcaccaggaatccctagagtcgaaggtgaatgaaacaaaggcaatggttaagttccagctgaaaaaggttctatgcatgggagttgctgttgggaatgttgcaatggaggagaagcagatcttccaaaatgtgcaaatgagcgtcaatttccttgtttctttgttgaagaaaaattggcaaaatgtgaggt

SEQ ID NO: 205733 - DNA, 275 bp, Gossypium hirsutum
ctaaggttgaaagagaggctgagatcccacctgagcaacaaatggaagataaaccggcaccggatgcttcccagcccctctcgactataattccaatcccgaaaagcagacttgcaccataccgaaccgtgatcattatgcgattgatcattcttggtcttttcttccattatcgagtaacaaaccccgttgacagtgcttttggactgtggctcacttcagtcatatgtgaaatctggtttgcattttcctgggtgttggatcagttccctaag

SEQ ID NO: 205734 - DNA, 273 bp, Gossypium hirsutum
cttctttgtttctggttttgactttggtttctgtttttgtttgtgggtttggaaaaaggataccaattctgtcatttgatgaagggtatagtcagttgtttggagatgataatctagttctccatagagatggtaaagctgttcacttgtctttgaatgagagaacagggtctggatttgtgtctcaagacctttacttgcatggttacttcagtgcctcaataaagttacctgctgattatactgctggagttgtggttgctttctatatgt

SEQ ID NO: 205735 - DNA, 280 bp, Gossypium hirsutum
cgcacacggagtgatagtcgcagcacgcgataaaaatggaggcagccagaaccgttaaagacgtttccccacacgagttcgtcaaggcttatgccgcccatctcaagcgctccggcaagattgagcttcctccatggactgatattgtcaagaccggtaaactgaaggagcttccaccctatgaccctgattggtactatgtcagagctgcttccatggctaggaaaatatacttgaggggaggtcttggtgttggtgcctttaggaggatctacggagg

SEQ ID NO: 205736 - DNA, 278 bp, Gossypium hirsutum
gtctgatagagacagtgaagatgaagttgatgatgacatcgctgaccttgaagatcgcaggatgctcgacgattttgtggatgttagcaaagacgagaagcaacttatgcatctttggaactcctttgttagaaagcaaagggttctggctgatggtcacgtttcctgggcatgtgaggctttctctaaactccatgggccggatttggtcaagtcacctgctctcttttggtgttggaggttattcatgataaaactttggaatcatggtcttcttg

SEQ ID NO: 205737 - DNA, 276 bp, Gossypium hirsutum
catcaatgctcttatattttcagatggaaagaacttgaaattggcaagttaggcacaggatatggtctattgcagctcccttctatgcctgaggtaaagcaccattcgctttccactgagggtttcactccagttgagaacatcaatatggacgatatcaagtttaaggataaatctcgtgagaaacagaggaagaaaaatttacaaacaaagaaagaacgagagcaacaagaatcaaaacctgagaaacccgaaagggccacatacgctgccgcc

SEQ ID NO: 205738 - DNA, 276 bp, Gossypium hirsutum
gctgatgagtgcatggttcttgataatgaggctttatatgatatctgcttcaggactcttaaattgactactcctagctttggtgatttgaaccatttgatctctgcaaccatgagtggagttacttgctgtctaagattccccggccaactcaactccgacctccgaaagcttgctgtgaacttgattcccttcccccgtcttcactttttcatggtcggatttgctccactgacctcccgcggttctcagcagtaccgagctctaactgtccct

SEQ ID NO: 205739 - DNA, 284 bp, Gossypium hirsutum
tcgtggatacaaatacaaatcaaaggaaggctgcaggatggaaagcaatgcctttcgtcttagggtgtggcttttcctgagtgcaggaaatgaaacgtttgagagattggcatcattcgggttgatggcaaactttatggtgtatttgcagagtgagtatcacatgaaccaggttaaggctgcaacactccttaacacctggtctgctgcttccaattttgctccggttattggtgcctatgtctcggatgcattcatcggcaaattctggaccattgctttcg

SEQ ID NO: 205740 - DNA, 285 bp, Gossypium hirsutum
ttcttgtagaaatcttgccaaacaaagggaggaaaggaaaaatggagttgtgccctacaattaagaacatccttcttttggattccgaagggaaacgtatagctgttaagtattactcagatgactggccaacgaatgctgctaaggaagcttttgagaaagctgtgtttaccaaaacccagaagactaatgctcgaactgaagctgagataacaatgtttgacaactatattgttgtatacaagttcgttcaagaccttcactttttcgttactggaggtgaaa

SEQ ID NO: 205741 - DNA, 276 bp, Gossypium hirsutum
cttcctcaccaaaactcttctgtatgtctatcctcttcctttttgccctcttctccatgcaaatccatgctagagagtacttcagcaaattcccaagagttaacatcaatgagaaagagacaacaaccagagagcaaaagcacgagaccttcgttccccagaccacccaaaagccagaagaacaagagccaaggttcattcctgaaacccaaaatggttatggcctttacggccacgagtcaggctcaggctcaggctcaggctcaggctcaagcc

SEQ ID NO: 205742 - DNA, 270 bp, Gossypium hirsutum
gttctcttcatggttgatgctattgatgagtatgcagttggtcagctcaaggaatttgagggcaaaaagcttgtgtctgcaaccaaagaaggtttgaaacttgacgagagcgaagatgagaagaaaaagaaggaagctttgaaggaaaagtttgagggtctctgcaaggttatcaaggatgtattaggcgacaaggttgaaaaggttatagtatctgaccgtgtggttgattctccttgctgtttggtcactggtgagtatggttggact

SEQ ID NO: 205743 - DNA, 277 bp, Gossypium hirsutum
ctcgggttcagcagagagtaaggtcacaagaggaggagccatctttttgcaaagatttctaacaacatcagtgctagtgataagttccatttgttgaagaatcatcttaacagctgaaagtacaacagcgcaattagcatgttgaagccgtggcgtaactctttccacaatgttttctgcttcacgtgcatcagatgccttgtatctggagagagcgtcaagtataaaaacttgaccccactctgtgcattcattaagagcagtaagaagctttgta

SEQ ID NO: 205744 - DNA, 275 bp, Gossypium hirsutum
ggttcatgaaatggaaaatgggttcaacatatggtcctttaatggcaggctactttatcggatactgaaggatcatttcttccagttcttgtggcgtccaaggccaccatccttcttgacacctgagaaggaggaagagattgcaaggaacttgaagaagtatagcaagaagtacgaggcagaggaccaggatgtatcgatgttattgagcgagcaagatcgagagaagagaaggatgttgaaggaggaatgggaaaagtgggttagtgaatgga

SEQ ID NO: 205745 - DNA, 278 bp, Gossypium hirsutum
tggggatcgaaaagaatataaccctcagaaattgccatctgttcatttagcagtggaggaaacagggatggttagctctgagattgggaatttgatacgatggaggaagaattttggaaatatcgtgttaatcatgttctgcaatggtcctgtggaacgtactgccctggagtggagactgctttacgggcggatatttaaaactgtggttattttttctgcgcagaagaattcggatcttgccattgaagaaggtcaattagatcaaatttacaagc

SEQ ID NO: 205746 - DNA, 275 bp, Gossypium hirsutum
gtcggctgtcaccgtgcaaaactgggtggaaaggggttattctgttgtgaatgttcaatgcaaggaccgaactaaactcctgtttgatgttgtttgcacattgacagatatgcaatatgttgtgtttcatgccactatcaaaacatcaggcgataaagcatatttggaattttatattaggcacagagacggaatactggttagttcagaacccgaacgacatcgtttaatccaatgtttacaagctgcagtcgaaagaagagcatccgagggtg

SEQ ID NO: 205747 - DNA, 282 bp, Gossypium hirsutum
ctctgaatggaaagaaatttgatgataaggagtggtatgttgggaaagcgcaaaagaaatctgaaagggagcttgatctgaaacttcaatttgagcagtcaatgaaagaggcagcagataagtttcaaggagcaaacttgtatgttaagaatttggatgacagcataagtgatgaaaaacttaaagagctattctctcaatatggtaccataacgtcatacaaggttatgcgagatccaagtgggataagtaaaggatcagggtttgttgcattttcaactc

SEQ ID NO: 205748 - DNA, 282 bp, Gossypium hirsutum
gacgatgaaggcaaagtttgcggtgtcacatctgaaggtgaaactgccaggtgtaagaaagttgtttgcgacccttcctacttgccaaacaaggttaggaagatcggcagggttgctagggcaattgctattatgagtcacccaattccaaacaccaatgattctcattctgcgcagattatcctgccacaaaagcagatgggtcgtaaatcggatatgtatgtcttctggtgttcatattctcacaatgttgctgcaaagggcaaattcattgcatttgtt

SEQ ID NO: 205749 - DNA, 311 bp, Gossypium hirsutum
actagagcccccccctgctgaatacagccgagttcttagtcttaggatctctgccttccacagaggcttttccactgttctaaacgatctgaaatatgcggcttgtcatgagtgggtgaaggttgagggtaactctgccactattggtattactgatcatgctcaagatcatttaggtgatgttgtgtatgttgaattacccgaagtgggagctgctgtaaagcaaggtgaaagttttggagcagttgaaagtgttaaggctactagtgatgttaattctcctgtttcaggaaaagtggttgaagttaatg

SEQ ID NO: 205750 - DNA, 275 bp, Gossypium hirsutum
tagatatgggtgatgttcttattggtgacaaaccaactggattttgtgctggcggctgtgcggcaattgcagattctggaacttctttgctcgcaggaccaacgactgtgataaccatgataaaccatgcaattggtgccactggagtagttagtcaggagtgcaaggcagtggttcaacagtacgggcaaaccatcatcgatctacttttagctgagacacaaccacagaaaatctgctcccaaattggattgtgcacttttgatggagctcat

SEQ ID NO: 205751 - DNA, 277 bp, Gossypium hirsutum
ttcctctccaattttccgtcactttcccgagaaaatgagagaaatccttcacatccaaggtggccaatgcggcaatcagataggagccaagttctgggaagtcgtatgtgccgaacatggcatcgattcaacgggtcgatatggtggtgactcggagctccagcttgagcgaatcaatgtttactacaacgaagccagttgtggccgttttgttccccgcgcagttttaatggatctggaacccggtaccatggatagcgtaagatccggtccttac

SEQ ID NO: 205752 - DNA, 275 bp, Gossypium hirsutum
agcgaacaaaaaagagtaaggaaaagcagtactttgatcgccagccctagaagttaacccatgcaccagctgcttgtataaaaagctttacattttgcaaaagaagggatttcagcacgaaattgaagttgtttttaaaaaccatggttgccacggctgtgacatcggcgtttttctcagtcacttcttcacctgactcctctgactcgaaaaacaagaagctcggaagcatcaagtcgaagccatcggtttcttctggaagtttgcaagtcaag

SEQ ID NO: 205753 - DNA, 291 bp, Gossypium hirsutum
aagcccgagcgccaatcctctactttcccgcattttctttttccctctttagattaaaattctgaaaccctccaatttggatacatcgtcatggcttctacgggtcggaaaatcatactaaagagctcagacggcgagaacttcgaggtggacgaggcggtggctctcgaatcacaaacgattaagcacatgatcgaggacgattgcgccgataacggcatccctctacccaacgtcaccagcaagatcctctctaaggtaatcgagtattgcaagaaacacgtcgaagca

SEQ ID NO: 205754 - DNA, 280 bp, Gossypium hirsutum
aaacggcccttccttttcctttaatatcaacggttctcattcacttattctcctctttataaaccacatttcacttccacctgcttgcttacctatttgttgcgataatctcgaagcttccctttccgttttagatctcaaaattcaaaaggctctctttttcatctcatggctgctactattgtctccgtcaaagctaggcagatcttcgacagccgtggaaatcctacggttgaggttgatgtggaaacatcgaacggtataaaggctagggccgcag

SEQ ID NO: 205755 - DNA, 280 bp, Gossypium hirsutum
cggtacctcaaacacaaataccgtcacggaaatcaatgctcagtattatcaacaagaatcagccaagttgaggcagcagattcaaatgctacagaattctagcaggcatctaatgggagattcgttgagttccttgacagtgaaggagttaaagcagctagagaatagacttgaacgagggattactagaatcagatcaaagaagcacgaaatgctgctagctgaaattgaatattttcagaaaagggaagttgagctggaaaatgaaagtgtatgtctc

SEQ ID NO: 205756 - DNA, 278 bp, Gossypium hirsutum
ggcgaatctcagagaacttttatatacataaaggatgctattgaagctgttctcttgatgattgaaaatccagatagggccaatggccatattttcaatgtgggtaacccgaacaatgaagtcacagttaggcaacttgctgaaatgatgactaaggtctatgccaaggttagtggagaaactgtgctggagtctccaacagttgatgtcagctccaaggaattttatggtgagggttatgatgatagtgacaagagaattccagacatgaccataat

SEQ ID NO: 205757 - DNA, 276 bp, Gossypium hirsutum
gatttaactcagatccatctgtatcgggtcttctaaattcgagatctttacttttctcgagtaaaggaagaaagaggaagggagagatgagagagattattagcgtccacattggccaagctgggattcaggttgggaattcatgctgggagctttactgtcttgaacatgaaatccaccctgatggaacaatgccgagcgacacctctatgggcgtcgcacacgatgctttcaacactttcttcagcgaaacgggttcgggaaagcatgtgccta

SEQ ID NO: 205758 - DNA, 278 bp, Gossypium hirsutum
gtcactcccaagtacagtttgaagcctcttgtgccaaggttatctgaactccttggagtcgaggttaaaatggcaaatgactgtattggtgaagaagttgagaaaatggtggctgcattaccagatggcggtgtattgctgcttgagaatgtgaggttctacaaggaggaagagaagaatgatcctgaattcgcaaagaagctagcttctctcgctgatctctatgtttatgatgcatttggcactgagcacagagcccatgcttgcacagagggagt

SEQ ID NO: 205759 - DNA, 283 bp, Gossypium hirsutum
tgagacttcatcctgataagaaccctggtgatgaggaagccaaagagaaatttcagcagttgcaaaaggtcatatcgattctcggtgacgaagagaaacgggctgtctatgaccaaacaggttgcgttgatgacactgatcttgctggggatgttgttgagaatttgaaaagctttttcaggactatgtacaaaaaggtcaccgatgctgatattgaagagtttgaagcaaattatagggggtctgattcagagaagaaagatttgattgatctttacaggaa

SEQ ID NO: 205760 - DNA, 284 bp, Gossypium hirsutum
gtataatggagaaagaaaatgagcatgcagatggcaagatgcaggcactggtggaagaattaagtattaccaaagaaatgctccaggcttctgagaaagaaattgctagtttgaagtttgagaagaagcaatcttctgaaaaaattcaaaagttgcagggtcagcttgatacggctcaaagagagataatcacatggaaatccaaactgaatacagagagaagagaggtctccaagctgcaggaaagaattgcaatgttgaagaatagtttatcagacagggat

SEQ ID NO: 205761 - DNA, 399 bp, Gossypium hirsutum
gaacactgttgatatcgaagataagggaggaatacccagataggatgatgctgactttctcagtcttcccatctcctaaggtctctgatacagttgtggagccttacaatgccactttgtctgttcaccaattggttgaaaatgctgatgagtgtatggttctggacaatgaggccttgtatgacatctgtttccgcacacttaagctaaccactcccagctttggtgatttgaaccatttgatatctgcaacaatgtctggagttacatgctgcttgcgattccctggtcagctcaactccgatctcaggaaacttgccgtgaatctcatcccctttcctcgtcttcactttttcatggtgggttttgctccactcacttctagggggtctcaacagt

SEQ ID NO: 205762 - DNA, 363 bp, Gossypium hirsutum
ccttactttataacccggatctcggccctttttggctggggttggcccgagacaggatggcttctggagagggtcccactaaagctttggactatgcgattcgagcagcgaagtctttcgagagatgcgccgtggaaggcgagcccagtttggatctggcgatgagcttgcacgtgctggcggcgatttattgcagcttggggaggttcgatgaggcggttccggtgctggagcaggcgattcaagtaccggatgtggaacggggcccggatcacgcgttggctgccttttcggggcatatgcagctgggggatacgtactcaatgctgggtcaagcggagaagtcaattgggtgctatgagc

SEQ ID NO: 205763 - DNA, 368 bp, Gossypium hirsutum
gcagtagatgcagatggtaatgcgtacgtgaccgatgtgaaaggcagtaagatttggaaggtaggtgtggatggtgagttattgtctaccctcacaaacccactcttcactccaaaagagtggtacaaaagcttgcttggattaaacggaattgtctaccacccagatggctacttaattgtaattcatactctcagcggaaatttgtttaagattgatctagccaagggagatgaagtgaagttgattgaagttgccggtggtccactagcatttggcgatggtttagagctgatttctcctactaagcttgtagttgccgccggaaacccttctgggagattggtggagagcaccgatggatggga

SEQ ID NO: 205764 - DNA, 375 bp, Gossypium hirsutum
gagtaatgaaaaatcaaatggtgatgaaagggtagaagaacatgagggtcctgaagtggcagcggctgggagttcacaaagcagtcctggaattgccgttgaacaaagagcggctgctaaaattcagaaggcatttcggtcttacagggcaagaaaagcagtccgccggctgagagatgcggggagattcaagaacatattgatacagggacatacagtgaagaaacaaacaagaagcacgctaagctatttacattcatggtgcaatgtccagtctcaaatccgagctcggagaatatgtatggttacagaaggcaggcttaagcaaaagaaaatggaaaaccagatgaagcttgaggctaaactccatgaact

SEQ ID NO: 205765 - DNA, 398 bp, Gossypium hirsutum
gaaacatttatgttttgggtgtgtctctattcctcgggttatcgattcctcaatactttgtaatgaacacaaccggtgacggtcatggacccgtgagaacaaatgccggatggtttaacagtatattgaacaccttcttttcatcgcctgcaaccgtggccatcatcgttgggaccgtgctcgataacacattagaagcaaaacaggtggacgatagaggaatcccatggtggaaaccgttccaacacagcaaaggcgattctcgaaccgaggaattctacagctatccgttaagaataaatgaatatattccgacccggtttctctaaagcattattactaaattgtttttatattagctacaaagtacagggcatattttgtgttccatatgcatg

SEQ ID NO: 205766 - DNA, 377 bp, Gossypium hirsutum
gacagatgaggatacttgtatggatggatttgctgggaacaacatgaatggatatgcaaagacaatggcgaggaaacgtatcattaaagttgcacatttgacaagcaatgccttggctctcattaataattatgcctcaactcaaggttactatttaccttaatttctcatgaaaacttcaaagagaaaaaagatcaatatgtatataggtatatcttaggttcgaattcgggattggtgtcaaccaaagattagatatcaactgtgactcggtcgactaggctgcttttatgtttattttgctttgggtgttgtatgcttatcatcaaacaaacagggcaattagaaaaatgttgtctcaaactaagatggtagga

SEQ ID NO: 205767 - DNA, 405 bp, Gossypium hirsutum
gagtaatgtaaaatcaaatggtgatgaaagggtagaagaacatgagggtcctgaagtggcagcggctgggagttcacaaagcagtcctggaattgccgttgaacaaagagcggctgctaaaattcagaaggcatttcggtcttacagggcaagaaaagcagtccgccggctgagagatgcggggagattcaagaacatattgatacagggacatacagtgaagaaacaaacaagaagcacgctaagctatttacattcatggtgcaatgtccagtctcaaatccgagctcggagaatatgtatggttacagaaggcaggcttaagcaaaagaaaatggaaaaccagatgaagcttgaggctaaactccatgaactggaggtagaatggtgtggtgggtctgaaac

SEQ ID NO: 205768 - DNA, 360 bp, Gossypium hirsutum
ccttactcgataacccggatctcggcccttttttgctcaagttggcccgagacaccattgcttctggagagggtcccactaaagctttggactatgcgattcgagcagcgaagtctttcgagagatgcgccgtggaaggcgagcccagtttggatctggcgatgagcttgcacgtgctggcggcgatttattgcagcttggggaggttcgatgaggcggttccggtgctggagcaggcgattcaagtaccggatgtggaacggggcccggatcacgcgttggctgccttttcggggcatatgcagctgggggatacgtactcaatgctgggtcaagcggagaagtcaattgggtgctatg

SEQ ID NO: 205769 - DNA, 360 bp, Gossypium hirsutum
ggaaatcttgcatatccaaggaggccaatgtgggaaccagatcggggctaagttctgggaagtcatatgcgatgagcatggaatcgacaacactggaaagtataacggtgactccgatctccagctggagcgtatcaatgtctactacaatgaagccagtggcggtaggtatgtccctcgcgctgttctcatggatcttgaacctggcactatggactccgtcagatccggtcttttcggccagatctttcgtcccgataactttgtcttcggtcagtctggtgctggcaacaactgggccaagggtcattataccgagggagctgagctcattgattctgttctagacgttgtcagaaa

SEQ ID NO: 205770 - DNA, 85 bp, Gossypium hirsutum
cagcttcttatcaatggacaatttgttgatgctgcatcaggaaaaagcttccctacagttgatcctaggacaggtgatgtaattg

SEQ ID NO: 205771 - DNA, 298 bp, Gossypium hirsutum
agagcaatagcaatttgtaaggtaaattcagggaaagtccgaaatgaggatcaatgcctcaaccaccacaaaaaaaacacattgttaaatttggcttattacatcgggaaattttcaacagacattaggttccaaggaaagatctcaactacaaaaattaaagtttcccagaaggttgtttctgtttcacctttaattcctgcttttcaacttctaattctttttcaccgtcgcagccttgatgatatcaacaaactcgggctttagagaagctccaccaaccaaaaagccatcaaca

SEQ ID NO: 205772 - DNA, 375 bp, Gossypium hirsutum
  unsure (1)..(375): unsure at all n locations
gcggcacgagtaacttttccatgnccaccttctacggtggtgcgtgatgtctaccggcacatatggggggaggcttgtggttatggaaancctgtacagtcaagggtatggaacgagcacagcagctttgagcactgcacttttcaacaatggcttgagctgcggtgcctgctacgagctccggtgcaacaatgatcctcaatggtgcattagtcgaaccataaccgtgacagccaccaacttttgtccacctaactatgctttatctagtgacaatggcgggtggtgcaatcccccacgagaacactttgatttggccgaaccggcattcttgcggatagcagaatatcgagctggaatcgtccctgttatgtt

SEQ ID NO: 205773 - DNA, 371 bp, Gossypium hirsutum
tggatgcacagagtattgcatgatataaaaccattatacaagtaccttcatgcaactcatcacatctacaacaagcagaatacactttctccatttgctggtttggcttttcacccagtggacggaatactgcaggcagtacctcatgtgatagcactcttcattataccaactcattttacaacacatgtcggactgctgttcctcgaggccatctggacggcaaacattcatgattgcatccatggcaaactatggcctgtgatgggtgctgggtaccacactattcaccacactacgtatcgccataactatggccattacaccatttggatggattggatgcttggaaccctacgtgaccctagtga

SEQ ID NO: 205774 - DNA, 391 bp, Gossypium hirsutum
ctatcctggttgtactaacatggcatattcaaaagctattcaagatggtgtagatgttcttgactgtcctgttcaaatgacaaaggatggaatacctatttgcttgggctctataaatcttatagagagcaccgacattgtccgaacaggctttagcaatcttacaacaactgtgccagagattatgcagagcagtggaatatttacctacaacctgtcatggagtgatattaaaagtttgaaacctgtaatatcaagcccacagtcacagtacaaattgtttcgaaatccaaagttccaaaatgctgggaagtacttacagttatctgaatttttaagaatggcaaacaccactagctctctaatggtgtcttaatcagcatagagaatg

SEQ ID NO: 205775 - DNA, 394 bp, Gossypium hirsutum
taacagtccttcaaccccgactgggcctcgggcgtggatcctgctagtacttattccaacctcagcaccaagtccaaatcgggctccatcacaaaatcgagtgcttgcattatgaaatactgcagcactgtcaactccatgtaagaaaatttcagcaacttcatgattttcagtgacaatgcaatcagtgtgagaacttccatgttgatgtatatggtcaatagcagcctgcacatcatccacaatttcaactgtgcaggccattgaactgtactcatgatgaaatgaatgtgcctcaggaatatttaacaaggaactcgctcttggtccaccataaagggtcacaccttcatgttggagttccttggtaagtgtattgagcaaaccattacta

SEQ ID NO: 205776 - DNA, 381 bp, Gossypium hirsutum
gcatcttttatgagagatttggaatcaagagaagacgcagatctttgtgaaaacccttactggtaagaccatcacccttgaggtagaaagttctgatactatcgataatgtcaaggctaaaatccaagacaaagaagggattcctcctgaccaacaaaggcttatctttgccggaaaacaacttgaggatggccgaactcttgctgactacaatatccaaaaggagtccaccctccacctagtgcttcgtctaaggggtggcatgcagatattcgtgaaaactcttactggcaagaccatcaccctcgaggtggaaagttctgatacaattgataatgtcaaggccaagatccaagacaaggaagggatcccaccagacca

SEQ ID NO: 205777 - DNA, 328 bp, Gossypium hirsutum
agaatggctgtttctctctaaataactgtcatgattgtggcatcctggccactcaaggtgggaagcataagctatgctcaacattgcactgatctctacctttaaccatggccaaagcagaaagtatcagtaagaaaaaaatggaaataactaatatcacagaataagcgccattgcgcaaagacaagttccccaggacggcatagaacgactatgcatcaggtgcagaggaccaatacactcataaagcaaatctaaatgcacggtctagaaaactgctgctaccactcattattactggagagggcaagatggacatgaccaccac

SEQ ID NO: 205778 - DNA, 391 bp, Gossypium hirsutum
  unsure (1)..(391): unsure at all n locations
ctccagattcgcttcccataatatatgaaagaggtctatttggcatgtatcatgattggtgtgaatcgtttagcacctatccaaggtcttacgatcttctccatgccgaccatctattctcaaagcttaacaagaggtgcaatttggtggccattgttgcagaggttgacagaatactaagaccagaagggaaacttattgttcgagacaacgttgagaccattaacgagctcgagaatatgttgaagtctatgcagtgggaagtgcgtatgacatactcgaaggacaaggaaggcctgctctgcgtccagaaatccatgtggcgacctaaggaggtagagacgatcaaatatgccattgcttangcaaatgctatctgttaattgatgat

SEQ ID NO: 205779 - DNA, 367 bp, Gossypium hirsutum
gtgatctttacgactcgttgacaatcactcaagctgctattttctgcactacaaaacgaatggtcgattgtctaactgaaaagatgcgtaccagtatctttactgcatcctcaatgcatggagatatgccttagaaggaaagagatgcgattatcgctgaattttgggatggtgcaacccgtgttcttatcactacagatgtttgggccaggggacttgatgttgatcacgtgtctctggtgatcaattacgacctgccgaacgatctagagctatacattcataggattggacggtctggtcgattccgacgaaagggtgttgctattaattttgcgaaaagcgacgacatcgatattcttagaga

SEQ ID NO: 205780 - DNA, 406 bp, Gossypium hirsutum
aagaacttatcttactttgttgaatggatcccgaacaatgtgaagtccactgtttgtgacatccctccaatcggcttaaagatggcatccacatttattgggaactctacttcaatccaagagatgttcaggagggtgagtgaacaattcactgccatgttccgtaggaaagctttcttgcattggtatactggagaagggatggatgagatggagttcacagaagcggagagtaacatgaatgacttggtttctgagtaccaacaataccaggatgcaactgcagatgatgaagagtacgaggaagaggaggaatacgaggcagaggcttaaaatctaatggaataatttggatgttttttgttgtgttttggattgggctagtggagtgtgctggtgcaatttc

SEQ ID NO: 205781 - DNA, 344 bp, Gossypium hirsutum
cattgaggaggttgaggactgcttgtgagagagcaaagaggactctttcatcgacagctcaaactaccatcgagatcgattcattgtacgagggtattgacttttacaccacgataactcgtgcaaggtttgaggagctcaacatggatctttttaggaagtgtatggagccagttgagaagtgtttgagggatgctaagatggataagagcagtgtccatgatgttgttcttgttggtggttccactcgtattcctaaagtgcagcagttgttgcaagacttcttcaacgggaaggagctctgcaagagcattaatcctgatgaggcccgtgcttatggtgct

SEQ ID NO: 205782 - DNA, 394 bp, Gossypium hirsutum
ctttcacctcttaaatcagagctttggaaggacatgggttggcaagggccagatccttccacagattttcggggtggggggttcatatcattggagagtctcatattttttgctaagaaatatccggaatcttttcaaaggttgttgcacaaacaagatggaaaccgagctgattgggaatatccatttgctgtagctggtatcaacatttcatttatgttaacacagatgttggatctgcaatcaggaaaaccatcttccctggctggaattcgattcttaaaactactgggggaagacgaaatggcattcgatgatctttattgtgtagcctttcagatgatggatgcacaatggcttgtgaaacgggcttcgtacatggaattcaacgatg

SEQ ID NO: 205783 - DNA, 372 bp, Gossypium hirsutum
gaaaggttggatcagaagtagctcggcgagccaaggggcttggcatgcatgttattgcccacgatccttatgcctcagctgatcgagctcgtgctataggtgtggagctggtgaactttgaggaagccatatccactgcagattttatttctctgcacatgcctctcaccgctgctactaataaaatgctcaatgatgagacatttgctaagatgaagaaaggtgttcgcattgtcaatgttgctcgtgggggagtgattgatgaagaggctcttgtgagggcattggatgctggaattgtagctcaggctgctcttgatgtcttcactgaggagccaccgaaacaggacagcaaattggtgcagcacgaga

SEQ ID NO: 205784 - DNA, 391 bp, Gossypium hirsutum
tctatggttacattgtgctcagtggtggttcaactatgtttcctggtattgctgaccgaatgagcaaggagatcactgcccttgctcctagcagcatgaagattaaggtagttgcaccaccagagagaaagtacagtgtctggattggaggatctatcttggcatcactcagcaccttccagcagatgtggatttccaagggcgagtatgatgagtccggtccatccattgtccacaggaagtgcttctaggttttataagttctttgatggtgagttacattttcatttacttggctttttcgtgtcctgtgtcaaaattgaaatcaaggtccggtttatatggggaaagtgttgaaggtgggatcacttgaggaggatgtactttgatc

SEQ ID NO: 205785 - DNA, 399 bp, Gossypium hirsutum
  unsure (1)..(399): unsure at all n locations
ggaggcctttagcctgttcgacaaggatggagatggttgcattactaccaaggagttgggaactgtgatgcgatcacttgggcagaaccccactgaggcagaactgcaagatatgattaatgaagtcgatgctgatggaaatgggaccattgattttcctgaattccttaacctgatggcaagaaaaatgaaggatacagactctgaggaggagcttaaagaggcattcagggtgtttgacaaggatcagaatgggttcatttctgcagccgagctgcgccatgtcatgacaaaccttggtgaaaagcttacagatgaggaagtcgacgagatgatccgcgaagccgatgttgatggtgatgggcaaatcaactacgnaggagtcgtcaaagtcatgat

SEQ ID NO: 205786 - DNA, 377 bp, Gossypium hirsutum
  unsure (1)..(377): unsure at all n locations
cgaagattgtcctttggggataaccctttaccaggagtgccggaatgttgctcgtcgcccccgccgacgtcgccgagtggacgtacagacgattcggttgtgtggatgacggtacggaggcgaaccacctagtgaatagaaccaagttcaattccatgttttgaaacctgaactcatttcaaaatacaaaaagcaaaacggaagaggaattaccgatcaaagacagcaaattctgagacaagagacttgtaaacggcaaccatttcagggtcaaatccattcatgacattctgagacatagtggtagataggtccatggagtaagcttgttgggcgaagccattcatggggggagggatggcggangtgtcattaga

SEQ ID NO: 205787 - DNA, 358 bp, Gossypium hirsutum
ttcttccttttccaactttaactcattactgtctcactaatgatcggtagccacaccgtctcgtcagcggctcgacatttattccacacacaaacaacctcatcagagctgccacaattggcttcaaaatacgaaaagcacgaagagtctgaatacaaacagccaaaatatcatgaagagtacccaaaacatgagaagcctgaaatgtacaaggaggaaaaacaaaaaccctgcaaacatcatgaagagtaccacgagtcacgcgaatcgaaggagcacgaagagtacgataaagaaaaacccgatttcccaaatgggaaaagcctaagagacgagaacacgagtcgatatcgaaata

SEQ ID NO: 205788 - DNA, 339 bp, Gossypium hirsutum
cgccctttatgttttcagtgaggtgaagaaaaatgtcttgctgtggtggaaactgcggttgcggctccggttgcaagtgcggcagcggctgcggcggttgcaagatgtaccctgagatgaactttgctgagcaaaccacaaccgggacacttgttcttggcgtggcaccccggaaagtgcactttgatggagctgaaatggaaactggggctgaaaatggctgcaaatgtggagataactgcacttgcaacccttgcaattgtaaatgagaaaaaaaagctaagcatattatggaagctgatctaaataatatatgatgtatttgggtttttactatta

SEQ ID NO: 205789 - DNA, 390 bp, Gossypium hirsutum
ctagtctcgagttttttttttttttttttttttggttggttttttttcttacttggcttgtctctgcaaatgacagagcttttcttttaagctctgcttctctcaattgtttatatggcatctcaagccagtctcctccttcaaaagcagctcaaagatctttgtaagaatccggttgatggtttctcagccggattggttgacgagaacaatatctttgaatggagtgttacgattattggaccacccgatactctttatgaagggggattttttaatgccatcatgagctttccacctaattatccaaacagccctccagcggtgaaatttacgtcagaggtttggcatcctaatgtttacgcggatgggcgtggttgcatatcaatt

SEQ ID NO: 205790 - DNA, 387 bp, Gossypium hirsutum
aattttgtttcaaatcagaacctgagtctcgccattgcgacaagtccatagagatgaagtttttcatctcagttttgtttctttttgtcctcttttcttatgcagctgcatatgatcctttggatccaaatggaaatgtaacaatcaaatgggatattgtgtcttggacgcctgatggctatgtggcagtggttacaatgaacaattttcaaatgtatcggcacatcatgagtcctggttggaccttggggtggacatgggctaagaaagaagtaatatggtccatggtaggggctcaaactactgagcaaggtgattgctcaaagttcaaaggaaatatacctcactgctgcaagaaaacccccacggttgtagacttgctccctg

SEQ ID NO: 205791 - DNA, 364 bp, Gossypium hirsutum
gatttgctttcgcaagtacttgctggtggtggtgtcgggtggcatgaatcaacagaggaatcagattgtggatgctgttgttattgctaggattctcggcgctgctttggttgttcctgtcttgcaagtcaatatcatctggggtgatgagagtgaattttctgatatattcgatttgggtcatttcaagaaagttctagccgatgatgtacgtatactatcctcattgccttctacacttgtaatgacaaggccagtagaggagaaacgtactccacttcatgtctcacctcaatggattcgttcacggtatctcaagcggataaacaaggaaggagttttgcttttacgaggtctggattct

SEQ ID NO: 205792 - DNA, 371 bp, Gossypium hirsutum
cagggcactggaggaaaaaattgtgccttactgtgatggtattatgacacaacttctcaagaatttgtcgagcaaccagttgcatcgctctgtgaagcctcccatattttcatgctttggtgacattgcattggcagtgggagagtattttgaaaagtatctaatgtgggccatgtctgcacttcagagcgctgcagagttgtctacccatatagcaagtgatgatgaattggtagagtacacaaactcccttagaaacggaatcctggaggcatattccgggatttttcaagggtttaagaactcttccaaaacccagctgctgattacttatgcacctgacatccttcagtttttggatgcatatacat

SEQ ID NO: 205793 - DNA, 368 bp, Gossypium hirsutum
atgtaaccttagctctcataaaagctaaaattcagttgcatcattaattataagtatagagtaagtaaaattctttcctaataaaagctcctaccacaagcaacaatatatttacatgcaaattatcattacatactaaatcccactctcttatttttataagagtaatacttagcactgcatattatacataccaaaggggtgtaactgttgaagtgattactttatgtagcctctgcaaatccaatttgcatgtttccatagtcgaaaaccgtatggaacttacccataaacacgtcgcccaagatccagagtggtccgcgaggaggcggtacatcgagagcaccgaatccgctaatgcattgagc

SEQ ID NO: 205794 - DNA, 387 bp, Gossypium hirsutum
ctttcttcttcttcttattcctttattgctttttagaattttgcttaatcgaaaatgagagagtgcatttcgatccacatcggtcaggccggtatccaggtcggaaacgcttgctgggagctttactgtctcgagcatggaatccagcctgatggtcagatgccaagtgacaaaactgtcggaggaggtgatgatgcttttaacacctttttcagtgaaactggtgctgggaagcacgtccctcgtgccgtcttcgtggatcttgaacccactgttattgatgaagtgagaactggtgcttaccgccagctcttccacccagaacaactcatcagcggcaaggaagacgcagctaacaactttgcccgtggtcactacaccatttgc

SEQ ID NO: 205795 - DNA, 390 bp, Gossypium hirsutum
gctgagagcaacttgtcaacgtccgaacattagggaggggaatattacaaagatggtccaggtcaataattttgaggtggaggagcttgttactaaagaatttggaatgcatgttcgcaaagaacttgcattgattaatgcacgagttctgaatcctccagtgctaaagtatcacgatagtggacgtgacaaaattgttaatcctagctgtgggcaatggaacatgatcaacaagaaaatggtcaatgggggtaaagttgatttctggtcttgtgtgaacttctcctctgaatattggaatatgtcagaagacttctgtgcggggctggtgaatatgtgtaacagcaaaggaatggtgtttcgccaaactccttcaattgcaatgcgatc

SEQ ID NO: 205796 - DNA, 392 bp, Gossypium hirsutum
cacccaacttatgtaaccagagttattcctgtctttgtgctagcattggctgatgttgatccggaacttatgatggaagatgaaagctttgtttggactggaaatgatgttgtcatagtacttgagcaccaaagtccaaatatacctctgagttatgtttctgagactgagagaaggcatgctattccatcacaagcacagcgccatattatagcagggcttgcttctgctgtgggtgggttgagtgcaccatatgaaaaagcttcccatgtacatgaaaggcctgttgtgaattggctctgggctgcgggttgtcacccgtttggaccattcttgaatacatcttgaaatagtcaaatgctttaagatgttgcactgagaaatacgattta

SEQ ID NO: 205797 - DNA, 310 bp, Gossypium hirsutum
aagcataacatacagtaaaccatgtcaagtttttaacaggcttgaaagaataaaacctggcataacacggaagcaacaggtaataaaagacatcatacgcacactcaatcacaggtacttcttagtactcatcatcttcaccctcatcaccctcagccgactcagcaccaacttcttcataatccttctccaatgcagcaagatcctcacgagcctctgagaattctccttcttccataccctcaccaacataccagtgaatgaaggcacgtttggcatacataagatcaaacttatggtcaatgcgaga

SEQ ID NO: 205798 - DNA, 307 bp, Gossypium hirsutum
tgcaagcttgtcttaaaggaaaagtcatcatatggattgatccactacttcgaccgcagatcagctgctcttgccatattatctctaaatggaaggcatttatttggacagcctatcaaggtcaattgggcatatgctagtggtcagagagaggatacatcaggacactttaacatttttgttggggatctcagtcctgaggttactgatgcaatgctgtttgcgtgcttttctgtctatcctagttgttcggatgcgagggtaatgtgggatcagaaaactgggccgtcaagaggatttgggtttg

SEQ ID NO: 205799 - DNA, 387 bp, Gossypium hirsutum
aaaaatcttaaaaagattaatttattattttttgagtaaaaagaataaaatgcaatctgaagggcttcgatcttataattttaccgtgcactttattcatagaaaataccaaaaactagtacattatccgaggtattcaaccctgaaaacacacatccaaaatcaacaagaaaatacatcacagtagcaaacggataacggtacatccctcaatactcctcctcatccccttcgtctccttcaccagactcagcgccaacttcttcataatctttttccagggcagcgagatcttcacgtgcctcggaaaactctccttcctccatgccctcaccaacataccagtgcacaaatgcacgcttggcatacatgagatcaaattatgat

SEQ ID NO: 205800 - DNA, 373 bp, Gossypium hirsutum
  unsure (1)..(373): unsure at all n locations
aagacagttcattcaaggctcttacgaagccttcattgtcaaatctaactgatgatcagttcaaatcagtgctcctttaccatgccttgccacgatactatgcccttgcggacttcaatgacctaagtgagaaaggccctattagtacacttgctggtggccaatacactttgcaattcaacgatgagtctggtaccgtccgcctcgattccggatggagcaaaacaaaagtcactagcgcagtacatacgtccaagccagtcgcagtctatcaaatcgataaggtccttcttccggaggccattttcgggaccgacatacctncgacacctgcacctgccccggctcttggtattggcccatcagctgacac

SEQ ID NO: 205801 - DNA, 346 bp, Gossypium hirsutum
aagtttaccttcgatttccatttacttctctattgctacgtttttgaatttttagtgagcgaaaatgagagagtgcatttcagtccacatcggtcaggctggtattcaagtcggaaatgcctgctgggaactttactgccttgaacatggaatccagcctgatggccagatgccaagtgacaagactgtcggaggaggtgatgatgcttttaacacctttttcagtgaaactggtgctggaaagcacgtccctcgtgctgtctttgtggatcttgagcctactgttattgatgaagtgaggactggtacttaccgtcagcttttccaccctgagcaactcatcagc

SEQ ID NO: 205802 - DNA, 337 bp, Gossypium hirsutum
aattcctgttggacgatgtcgagaaggccaccggcgatgaatcgacaatggctgcacatttgagcaagtctcaggatgttggaattcatgcaagacatatcagcagtgtgtctacattggatagtgaaatgactgaagacaatgggaatccgatttggaagaacagggtggaaagttggaaagaaaagaagaacaagaagaagaagcctgcaacaactaaggttgaaagagaggctgaaatcccacctgagcaacaaatggaagataaaccggcaccggatgcttcccagcccctctcgactataattccaatcccgaaaagcagacttgcaccata

SEQ ID NO: 205803 - DNA, 407 bp, Gossypium hirsutum
ctcaacgcgacaaaacaagggttttaggagaacatctctggtagtagcttccatggctgatctcagcactgtgctcgtcactggagccgctggcagaacaggtcagatagtttacaagaagctgaaagagaggtcggatcagtttgtcgtgagaggactcgttagaactccagaaagcaaggagacaatcggtggagcagatgatgtgtttgttggggatatcagggataccacctctctggttcctgccatgcaaggaattgatgcactcataattcttactagtgctgttcctagaatgaaacctgggtttgatccgacgaaaggcggaaggcctgagttctattttgaagatggagcatatcctgagcaagttgactggattggtcagaaaaaccaaatagatg

SEQ ID NO: 205804 - DNA, 353 bp, Gossypium hirsutum
  unsure (1)..(353): unsure at all n locations
caagaagtttntttgcacaacgtgaggatggtggcttgcacgacactagacaaaattggtttgaagggtcttacaatctacaagctgccaccattggaagaacagacacattttatcttcctgatgatgacaacgtacacaatactgaactgagggaactcttaagcaggagaagtgtgtctacccttcttcgtagtggttttcgtgagagccttgaccaattgatacaatcatatgtggaaaggcaaaatcatgcatctattgactgggatctgaatgaagcagttcctactcctgaatcccttgaacaagatatagaacagcaaagcatggatcagaatgagggtcagagt

SEQ ID NO: 205805 - DNA, 364 bp, Gossypium hirsutum
ctcgtgccgaaatggaggagttacttttccagcgccagaagaggatagctgagaggagtgctgccggtggtcttaatccggttacttcccggaggagctccgccgaaagtaaaacttcagcagcttcaacgaagagccaaccatcaactcaagacactaagaaatcgccgaagccagtccttagaagttccaccatagaacgccttgcaaccgcacggaatacttcaaaggtctcttcggctgaattgaaatcgagccagccgaaaaagccaacattgaaggaaatcagttcttcaacaactcagaaggctgctcctgctaaggataagaaatcaagcacaaacaaagccaaagcttcagatat

SEQ ID NO: 205806 - DNA, 372 bp, Gossypium hirsutum
ccctgactggctttaccatcaccctcgaagtcgagagttccgacacgatcgacaacgttaaggcgaaaatccaagacaaggaagggatcccaccagaccaacaacgtctcatcttcgccggaaaacagctcgaagatggccggaccttggccgattacaacatccagaaggagtccaccctccatctcgtcctccgtctacgtggtggcatgcagatcttcgtcaaaaccctgaccggcaagaccataactttggaagtcgaaagctctgacaccattgacaacgtcaaggcaaagatccaagacaaggaaggcatcccaccagaccagcaaaggctcatatttgccgggaaacaactcgaggacggtcgca

SEQ ID NO: 205807 - DNA, 389 bp, Gossypium hirsutum
cttgcgtactggtccgcacggacaactttttagacctgataacttcatttttggtcaaaatggagcagggaataactgggctaagggtcattacactgaaggagctgaattgattgattcggttcttgatgttgttcgtaaagaagctgagaattgtgattgcttacaaggcttccagatttgtcattctttgggaggtggaactggttcggggatggggacactgttgatatcaaagatcaaggaagaataccctgatcggatgatgctgactttctcggtttttccgtcgcccaaagtgtctgatacggtggttgagccctataatgcgactctatcagtgcaccagcttgtggaaaatggtgatgaatgcatggtgcttgataatg

SEQ ID NO: 205808 - DNA, 385 bp, Gossypium hirsutum
tggaattcagtcctggaaagtattaatggaggtgtgcctatgatctgcaggccattttttggagaccaacaattgaacactcgtactgtggaggttgtatggggatttgcgttgggcttagaaggtggaacattgacaaaaggaggagcaaagaaagcattgaagttgatattgtgcagccaagaagggaagaaaatgagagagaaaattagagttcaaaaagagctggtttgcaaggctgttaaacccaatggtagttctattgaaaatttcaaaacactggtgaaacttctccaacacttaccaccaagttgattgaaccaagtacacaaaacaagtaaacacaagtgctaggatgataaagttgttaaggatttatgtcatg

SEQ ID NO: 205809 - DNA, 365 bp, Gossypium hirsutum
  unsure (1)..(365): unsure at all n locations
ttttatttttctgtttccgnttctttcaatatggaaaggcgtttcaaagcgagtggttggttttttttttcttttaagaatttgtgtggaaaaaaaaaagaaaaaaaaatggctgagcacgaagagaagaagcacgaggaatctttgatggaaaagatagcggagaagatccatggtcatgattcatcgtcatcgtcgtcggattccgatgacgacaagcaatcggaatcttcgatcaaggacaaggtgtttcgtctctttggaagagaaaagcccgtccaccatgttttcggtggaggcaaaccggccgacattttactgtggaggaacaaaaagatctcaccaggagcgcttggtgttgcaac

SEQ ID NO: 205810 - DNA, 355 bp, Gossypium hirsutum
  unsure (1)..(355): unsure at all n locations
ggtctttgtacctccaaaccctccccaaacccttctgattctacaaatgcctctatcaatacccggaataacgatatccaccgcaagcctaactctgtttcggcttctcctttacctgatggtgtaaactccaaggaagatcaaggtaaacaaggagaagaagaaaaagaaagctccaattccaacaatgaaggcaagaaatcgccgtttttcccgttttatagtcccagtccagctcaatacttgttttccaaaaagtctccggcgagatcttcaaccaattccactccaaaacggtttttcaggaggccattccctccgccgtctccggcgaagcatattanggcagtgcttg

SEQ ID NO: 205811 - DNA, 404 bp, Gossypium hirsutum
ggtaccattacactctttacgtccattccgaaaggcaattttacagagaatgtgacatctacgggaccgttgattggatattcggcaacgcagccgttgtgtttcaaaactgcaacatatacgcacgcaatccccctaataagaccaacacggtgacggctcaaggccggaccgacccaaaccagaacactggaattataatccacaactccagagttacagcagcttccgatttgaagccagtgcaaagctcggtgaaaacatatctagggaggccatggaaacaatattcgaggacggttttcatgaaaacgtatctggatagcttgattaacccggccggctggatggaatgggatggtaattttgcacttaagacgcttgattatgcggagtatatgaac

SEQ ID NO: 205812 - DNA, 326 bp, Gossypium hirsutum
gcttatgcaacgattcttcattcggctcatgtatacgtatgtggagctatagctgttgctcaaagcattcgcttgtctggctcaacccgagaccttgtgatacttgtggatgagatgatcactgcgtaccacaagagtggacttgaggcagcaggatggaaagttaggacaattcaaagaatcaggaatccgaaagccgaaaaagatgcatacaacgaatggaactacagcaagttccggttatggcaactgaccgattatgacaagatcatattcatcgatgcagatctacttatactgcgcaacattgatttcttattcgcaat

SEQ ID NO: 205813 - DNA, 351 bp, Gossypium hirsutum
attgttttggccttgatggtggtttccgccgcgacggtggttacggcggctgacgagagtgggttagcgaatgagtgcagcaaagatttccagagcgtgatgacttgcttaagctttgctcaaggaaaagcagcgtcgccgtcgaaggagtgctgtaattcagtggcggggattaaagagaataaacccaaatgtttgtgttatattttgcaacaaacacaaacctctggtgctcaaaatctcaaaagcttaggtgttcaagaagataagctgtttcagttaccatcggcttgtcaattgaagaacgctagcgtcagtgattgcccaaagcttcttgggttatcttcgagc

SEQ ID NO: 205814 - DNA, 373 bp, Gossypium hirsutum
gttaaatcattttcaatcatcacttccagttcacaaacattttaatcttacaaaacctccacacctaaaagtaaatgaattgaacatgtcacttggtactcgctgatttagctaagtttatgacatcttcaatagatcatatgtaaaaaaaaaaacatatggttctcacacctaacagactaaatgcatgcttttagtgtcaatgtaatagtaaaaggaactatatatatgatcgcatacgaggcctaactattgactgtgccccatcaacgaatatggttgttcctgtcatatagcgtgaaccatcactgattagatagatgacagttgaagccaaatcttttttaacatccaaccatctttgcaatggagc

SEQ ID NO: 205815 - DNA, 395 bp, Gossypium hirsutum
cttgtgtctatggtatccaatatggagattcatctttctcgattggattgtttgctaaagaaaagctcactttgacatcaaacgttgtgtttgacaactttctatttggttgtggccaaaacaatcaaggcctttttggtggtgctgccggtttgctaggactaggccgaaataaactatcttttccatcacaaacagccataaaattcaagaaaatattttcctactgcttgccatcatctccaagctcaaccggcttcctaaaattcggcaatgatggtctctcaaagtctgtaaaattcacaacattatcaacaatctccggaggggaatccttttatggcattaccattattgctatgagttgtggtggcaagaaactattaaatctcgca

SEQ ID NO: 205816 - DNA, 388 bp, Gossypium hirsutum
ggtgatgctagatggcaccccatggcccggaaataacactcgtgatcatcctggaatgattcaggtctatctaggaagtgccggtgcactcgatgtggatggcaaagagctgcctcgacttgtctatgtttctcgtgagaaacgacctggttatcagcaccataagaaagccggtgctgagaatgctctggttcgagtttctgcagtgcttactaatgcacccttcatattgaatctggattgtgatcattacatcaacaatagcaaggccatgagggaagcgatgtgctttttaatggatcctcagtttggaaagaagctttgttatgttcaatttccacagagatttgatggtattgatcgtcatgatcgatatgctaatcgaaat

SEQ ID NO: 205817 - DNA, 404 bp, Gossypium hirsutum
aagagtactacgaatcacgtgaatcgaaggagcacgaagaatacgagaaagaaaaacccgagttccccaaacgggaaaagcctaaagagcacgagaaacacgaagtcgaatattcggaaatacccgagtacaaggaaaaggaagataagagtaagaaacataaagatgaagagtgccaggagtcacacgaatcgaaagagcacgaagagtacgagaaagaaaaacccgatttccccaaatgggaaaagcctaaagggcacgagaaacataaagccgaatatccgaaaatacctgagtgcaaggaaaaactagatgaggataaggaacataaacatgagttcccaaagcatgaaaaagaagaggagaagaaacctgagaaaggcatagtaccctgagtgggtaaa

SEQ ID NO: 205818 - DNA, 398 bp, Gossypium hirsutum
cagatgcattgtacaagtctactatgctattggtgtgcctgagcccttatctgtctttgtggacagttacggaaccggaaagattcctgacaaggaaatactccaaattgtgaaggagaacttcgactttaggcctggtatgatcaccatcaacctggacctcaagagaggtggcaatggtcggttcttgaagacagctgcttacggacactttggaagggacgacccagacttcacctgggaagttgtgaagcccctcaagtgggacaagccccaatcttaagttcagccctgctgcctgtctcagtgcctgcttatccatagtactgaataatattgccttgctgctcacctatactctattctcatccccagaatgcttctaatctcattcatat

SEQ ID NO: 205819 - DNA, 382 bp, Gossypium hirsutum
aatatctttcatccctctttgatttctcaaacacatcaaaccatggtgttatctaagacagcatctgaaactgatgtctcagttcactccacttttgcctctcgttatgtccgaacctcactgcccaggttcaaaatgccagaaaactccataccaaaagaggctgcttatcagatcatcaatgatgaactgatgcttgatggcaacccaaggttgaaccttgcctcttttgttactacatggatggagcctgaatgtgataagcttataatggactccattaacaagaactacgttgacatggatgaataccctgtcaccactgagcttcagaatcgttgtgtgaacatgatagcacatcttttcaacgcaccattgggag

SEQ ID NO: 205820 - DNA, 344 bp, Gossypium hirsutum
gtaaagagtgggcttaattttgtcgaggttaagccacagggtgtaagcaagggtctagttgcaaagcgcctactctccacaatgcaagagaggggtatgttgcctgactttgttctctgcataggagacgacagatctgatgaagacatgttcgaggttatcataagttcagtattggggccgttgatcgatcccagagcagaagtgtttgcttgtactgtgggtaaaaaaccaagtaaggctaagtactacctggacgatacggtggaaatctgtaggttgatgcagggtctggcttctgtttcagatcaaatgcattcggtgttggcttagctagcgaaggg

SEQ ID NO: 205821 - DNA, 383 bp, Gossypium hirsutum
agaaactccggccggagtttttcaagatattgccatgaagtgcggagccaaggtggaattcagaccagctttggttgctagcatggacctgcaattctccattgaggcttggtttgctggggagaaagttggtgaaggtactgggagaacaagaagagaagcgcaacgtcaggctgcagaggattctataaaaagcttagctaatacatatttgtcacgaattaagcctgatactgggtctgcacaaggggatttaagtaggtcggccaacacaaatgagaatggctttcctggtaatttgaatttgtatgggaaccagcaatcctctaaagaggaatctatgccattttcaaatgcaccggaaccatctaggcttcttgatc

SEQ ID NO: 205822 - DNA, 380 bp, Gossypium hirsutum
tagaactatgccgcatccctcggacgagttcggcacgagattttattcaatcttttcttcaagttcccattttccccaatggccagtgttgaggttcaatcagctgcaacaacattgccagagaacgagacaacaccagaggtaaccaaggttgtggaaacgccaaaagaggagccagcggccgcacctgtagaagctgagccggagacaacatcagatgctccggctgcggaggaaaccgaagtttccatagccgaagctccagctgaagtcgataccaaagaagtggtagaagaagaagcgaaggctgctgaagaatcggagaaagcaaaggaggaaggtaaggatgagaccccggaggtgcagacagaaacagttac

SEQ ID NO: 205823 - DNA, 376 bp, Gossypium hirsutum
aagttctgttgatctccttcaaggtggaaaagcttgtgataactgccattccgaatgttgtggaaacatggaccaagggtttcggtttcaagctggtggaggaagaggaaagaaaagcacttaataagatcaacttgatggtgtttccaggaacagtattgctgtcgaagtccttgtatcaatcccaaaaaacaggtggacaatcagaaaccggcaatacatcatgtttgcaacaagataactcaattgaacatttgagacgcgaagaattaaccaacataggcattcaagctgtaggagatcaattagccaattcattacagcacaccatttatgcaaaaaaaacttgtgcaaaaatagtaaccgagtttgttgg

SEQ ID NO: 205824 - DNA, 351 bp, Gossypium hirsutum
caaaaaattttgggtgatctgtgttgaaaaagaaataaaatatggcgacattccaaggaactcaacaaaaatgcaatgcatgcaacaagactgtttatctggtggataagttgacggctgataatagggtttttcataaggcttgcttccgttgccaccattgcaagggtaccctcaagcttagcaactacaactcatttgaaggggtgctatactgcaggccacactatgatcaactcttcaagagaactggcagtcttgacaagagttttgaaggaacaccaaaggttgtcaaacctgaaagacaaatcgatagtgagagtgcactgaaagtgatgaactcgtttggtg

SEQ ID NO: 205825 - DNA, 248 bp, Gossypium hirsutum
ctcgtgccgttcgatttttttttttcacagaatccggaaaacagcaatggtgtctttgaagctgcagaagcggcttgccgctagcgtcctcaagtgcggacgcggcaaggtctggctcgatcctaatgaaatcaacgaaatctccatggccaactccaggcagaacgttaggaaacttgtgaaggatgggttcatcatcaggaagcctactaagattcactcccgctctctcgcacgtaggatgaagg

SEQ ID NO: 205826 - DNA, 267 bp, Gossypium hirsutum
tagcggtcatcttttttttcatcttctggggctcaaacgctggcatagggggccataattcattggtggctgttccatatgagacaatgtttgctttggtcgacatgtggtttggaattatagttccacttgttattgctggtggttacattggtttcaagaagccagctattgaagatcctgtgaagacaaataaaattcccaagcaaatccctgagcacgtcttgcttatcaacccaattttcttcattctgattgtatgaatac

SEQ ID NO: 205827 - DNA, 222 bp, Gossypium hirsutum
gcaaacgtgatagcactgtatagaagggctcaagcatacatcaatctggcagatttggatttggcggagcttgatatcaaaaaagctcttgagcttgaccccgataatagggaggtgaagctcgaatccaaagctttgaaggagaagaccagggattttaccaggagggagcccaattcttttggcacctggttggccagaagaaataaaaggaatctgggg

SEQ ID NO: 205828 - DNA, 373 bp, Gossypium hirsutum
ggcttcaatttttcctcacaacaatggtctaagggctacgagggaccctaaactgggtaagaaaatccgcgctgcaacaacacttgaatctagagcaaccggcattccatatgtgttcgcaccttgtataacggtttgccgaaatccaacatggggcctgacgttaacgaaagctacaatctaatatccccatcttgtccacgcaaagacagatattgtaccaggattacaaggagacatacctgctagatcctctacaggcattccatttgttgctggaaataaaaatgatgcagcttgtgctaagcactacgtacgagatgggggaacaaccacaggcataaacgagaacaacacattgaccacctgggat

SEQ ID NO: 205829 - DNA, 298 bp, Gossypium hirsutum
  unsure (1)..(298): unsure at all n locations
ancctcattttttcccgtaacttcttcccctgacggctctgactcaaaaaacaagaagcttggaagtggatctactaacctcggaggcatcaagtcgaaaccatctgcttcttctggaagtttgcaagtcaaggcaaatgctcaagcccctccaaagataaatggtaccactgttgtaacttctccggctgaaggtttcaagaacgaagatggtgcaggttcccctcatcctcggacctttatcaatcaattacctgattggagcatgcttcttgccgctatcacaaccaattttctg

SEQ ID NO: 205830 - DNA, 397 bp, Gossypium hirsutum
atagagctttccacacccgcgggagaggtcccccgggacctcctcggggctgctataactatgtcccttcctcatcacgcgccaccaccaccaccagaaaaagcagtgcaggtcctggagtcacccccaccgatgatgacgatgacgccatctcagctaccggcgctttataagcagcgctcgttgtcgccagacattttccgcgacgaggcatggcttagaaggaaagggaacagcaagaacagagggagcaagagcgtgacggacgaagaccttgatgaactcaaggcttgtattgagttggggttcgggttcgagtttgactcacccgaggtggatcaacgtttgtccgacactttgcctgctcttggcctctactatgctgttaacaagaact

SEQ ID NO: 205831 - DNA, 183 bp, Gossypium hirsutum
tagcgagttttttattttttttgtttaaagaaatatttctttgcgctgtggaaattaaatggaaccaacgaaatcataggagactttttacaaacaagataaatcccttttagaatcacagcaaatcaacagtagtggcaaaaagggaaaattacataataagaaaggtttggtaaacaccat

SEQ ID NO: 205832 - DNA, 335 bp, Gossypium hirsutum
agattatattcactttcccataagcaaaccacaaaggaaagcttggagagagacccaaaaacaatgtctaaggaagtgagtgaagaaggacagggtcgtaaggactatgtgtaccctccaccggcacctctgattgatatggctgaactcaagtcatggtctttttacagagccctaatagctaattttatagccactctcttcttcttttatgtcactgttgctaccgtaatgggtcacaagaaacaacaggatgcatgtgatggtgttgctctctggggtatggcatgggctttcggtggcgagatctttatccattgttactgcactgccga

SEQ ID NO: 205833 - DNA, 312 bp, Gossypium hirsutum
gtcaggttatggctcttgctaatgttaaaattgttcaggcagctattggtgggtggcattgtttggctgttgatgatgaaggcagagcttatgcctggggtgggaatgaatatgggcagtgtggtgaagagcctgagcggaaagatgatactggtaggcctttgagaagggacattgtgattcctcagcgctgtgcgccaaagcttgtagttcgccaggtagctgctgggggtactcattctgtagtgctgacacatgaaggatatgtttggacctggggtcaaccttggccacccggagacataaaacaaa

SEQ ID NO: 205834 - DNA, 383 bp, Gossypium hirsutum
ctctcccattttgattttttgattttgatcagacggtaaggatgcggttcagaaacatagccgctggccggcctgaagaagctactcatccagatgctcttaaagcagctttagctgagttcatatcaacgttaatcttcgtttttgctggatctggttcaggcatggcttttaataagctgaccgacggcggtgcaacaactgcggctggtctcgttgccgcctctctagctcacggatttgcgcttttcgtcgctgtctcagtcggtgctaacatctccggtggccatgtgaatgccgccgatacattcggtgctttcgttggcgggaacattactctattacgtggtatcctttattggattgctcaactccttggctca

SEQ ID NO: 205835 - DNA, 379 bp, Gossypium hirsutum
gtatggtattttgatcccatataagcaagcttggcgtgcaaaggaacggggacttgctgctatttatggctcttcagaagaaggatactgcatgcttcccacattttgtgagcaaataaagaaaacaaaccctggaagtattgcagaggtattcaccactggtgcagataaccgtttccagcggctgtttatttcctttcatgcatccatatgtggattcttgagtggatgcttgcctattgttgggcttggtggaatccagcttaaaagcaaataccttggtactttgctttcagcaactgcttttgatgctgatggtggtttatttcctcttgcatttggcattgttgatacagaaaacgatgatagctggatctgg

SEQ ID NO: 205836 - DNA, 332 bp, Gossypium hirsutum
aaggggggccccgacaagagaatgttgctggagtgaaacttcccaagtttgagtatttcactgaaggtgagaccaagaatgatctgactggtttggccagaggtgggcaacaggttcaacagtgtcgtgctgcttatgtgaaagcaattgaggttctagttgagcttgcttctcttcagacatcattcttgacacttgacgaggcaatcaagactacaaatcgcagggttaatgctttggagaatgttgtgaagccaaggttggagaataccataagttacatcaagggagagttggatgagcttgaaagggaggatttcttcaggttaaag

SEQ ID NO: 205837 - DNA, 374 bp, Gossypium hirsutum
gcgtaaaaatattttctccggaagcaaagcaactgtgagcggcgttttcctcagatctaaagcccctcgcatcagatccactaaatgcaccatgtcttctactttcagcggcgaagaaacggctcccttcttcggcttcctcggcgccggcgccgctctcgtcttctcctgtatgggagctgcatatgggacggctaagaacggggtgggtgtggcttcaatgggtgtgatcaggcctgagttggggatgaaatccattgatccaaaagtaatagctggtgtttcggggctttatggaatgattattgctgctattattagtactggcataaatccataagccataatctataatatctttgatggctatgctc

SEQ ID NO: 205838 - DNA, 396 bp, Gossypium hirsutum
taaatatgttaatttcattcaaagagaaaccatacatagatgcaaccggtaaacaaagactagaaattatttaaaaggccatcaaagggcacaatccttcacgtaaaaccagaaaacccacattaaggaagaccttaaggcttagaacccaccacgaagacgaagaacaaggtgaagagtggactccttttgaatattgtaatcagccaaagtccttccatcttccagctgtttcccagcaaaaatcaacctttgctgatctggtggaattccttctttgtcctgaatcttcgctttcacgttatcaatcgtatccgagctctccacttctaaagtaatggtcttaccggtcaaagtcttgacgaagatctgcatcccacctcgaagacgtagaac

SEQ ID NO: 205839 - DNA, 399 bp, Gossypium hirsutum
tgcaaatatttgacgccattgcttggtttaacgacctcggcggcaacaaactgcgtgcctggctgcaccaatgtggcttgtggcactgcccaagtggacgacgctaaaaaagtagctgcctcagctgatgcaactgtacttgttatgggcatcgatcagagtcaagaaagggaaagctttgacagagttagccttcttttaccaggacaacaaccacttttaataactgaagttgcaaaagctgcaaagggacccgtgattctcgtcataatgtccggtggaggctttgacatatcgtttgcgaaaaacgatgataaaatcacaagcattctttgcgttggttaccccggcgaagcctgaggagccgccattgccgatgtgatatatgggtattataat

SEQ ID NO: 205840 - DNA, 389 bp, Gossypium hirsutum
cccacatcctcaatgctaactatgatatgaagaaaagtcatatacttgtcactgcagaagatgaatctgggatacacatatgggatcttagaaagcccaaaagtcctgccaaagagcttcctggacatacacactggacatgggctgtcacttgtaaccctgagtatgatgggctaattctgagtgctggcacagactcaactgttaacttgtggcaggctcctatatctgcagaagataaagcaacatctgaaagcataactgaaccactcaatcaacaggccgacccattgcttaattcctacagtgattatgaagacagtgtatatggccttgcttggagttctcgtgagccttggatatttgcttctctatcgtatgatggcagg

SEQ ID NO: 205841 - DNA, 390 bp, Gossypium hirsutum
cctacttggtttggtgactctcaccactcccacatttggtgcctatgagtcaccaaattatgggaaaccccctactcctgtattcaagcctcccaaggtgaaaccaccaccatatgaacctaagccaccagtgtatgaaccaccaaaaaaggagaagcctgaacctaagccaccggtttatgcacctccaaagaaagagaagcatggacccaaaccaccaatgtatgaacctccaaagaaggagaagcctgagccaaagccaccagtttatacacctccaaagaaagaggagcctaaacctaaaccaccagtatatgaacctccaaagaaggagaaacctgagccaaaaccaccgatttatacacctccaaagaaagagaaacctgaacc

SEQ ID NO: 205842 - DNA, 305 bp, Gossypium hirsutum
cctttttgttttttgtgaaacatcaaatcgcagagatggagctttcatagatttcgcctcagatctctttctctttgtaaaagaaaattgggtttacttatttatttggatcggattgggttggtttggttttagaaaagaaggaaggcgatgtcaaccccagcaaggaagaggctgatgagagacttcaagaggttacagcaggatccacctgctggtattagtggggctcctcaagataataatatcatgctttggaacgctgttatttttgggcctgacgatactccttgggatggaagcac

SEQ ID NO: 205843 - DNA, 376 bp, Gossypium hirsutum
gttaaattttcaatgggtctatttgagaacccattagcagataacagcttagttgaccaacttggcagtcaggaacatagagagttggctagagaagcagtgagaaaatcacttgttttgctaaagaatgggcactctgccgatcagccattgcttcccttacctaagaagacatcaaaaatacttgttgctggtagtcatgcagacaatttgggttatcaatgtggtggatggactattgagtggcaagggttcagtggcaacgaccttacaaatggtacaacagtcctaaaagccatcaaaaacacagttgattcaagcacgaatgttgtgtatgaggagaatccggatcccaaattcgtcaagtccaacaact

SEQ ID NO: 205844 - DNA, 224 bp, Gossypium hirsutum
  unsure (1)..(224): unsure at all n locations
gctntgaaggatgctcgcatccctgagtttcttgcatcgctaaatgcacttcaatacagacggatggactttgatgagttctgtgcggctgcattaactgttcaaaagctggaggctcttgatcggtgggaacagcatgcacgttgtgcttacgaaatctttgagaaggaaggaaacagacctattgtcattgaagagctagcttcggagctcggactgagccc

SEQ ID NO: 205845 - DNA, 392 bp, Gossypium hirsutum
gtcgaactattgcctttgatggttcagccgtaggtgctgggaactacaccaatgccgaatcttttatgcaatacactgttgacaagaactataccattcacggttgggagttaggaaatgaattgtgcggaagcggggtcggaactcgggtctctgcagaccagtatgcggctgacacagcagctctgcaaagtatagtgcagaagatataccagaatgttgatttgaagccgttaattatcacaccgggagggttctatgactcggattggttcacggaatatattgataagacaaacaagtccctcgatgttgtcactcaccacatatacaaccttggaccatgagttgatgaccatcttgttggaaagattctcgatccatccgttctt

SEQ ID NO: 205846 - DNA, 390 bp, Gossypium hirsutum
aaaaagggtgtgtggatcaaattgcctattcagcatgtcaatcttgttgaagctgctgtcaaggaaggattttggtttcaccatgctgagccaaattacttgatgctttgttattggattcctgaaggtacacatattcttcctgcaaatgcttcacaccggataggcatcggtgcatttgtcatgaacgaaaagagagaggttttagtggttcaagagagcactggacggtttcgaggtacgggtgtgtggaagttccctacaggagttgtgaatgagggagaagatatctgcgcagctgcggttcgagaagtcaaagaagagacagcagttgataccaaatttatcgaaatactgtcattcagacaaagtcacatagcattcttcgat

SEQ ID NO: 205847 - DNA, 328 bp, Gossypium hirsutum
cttcattcttttcaaagggtcctaattcattgtaccagacattctaaagcccgatataagtgcaccaggagtggatatattggctgcatattcaccggtagcttcaccatcgataactacaaccgatccaaggcgagttaaatacaacataatatcaggaacctcaatgtcttgtcctcatgttgctggtgtagctgcatacgttaagacttttcacccgcattggtctccctcagccattaaatctgctcttatgactactgcttttccgatggatgcaccgaggaatcaaagaactgaatttgcttatggatcaagacatataacc

SEQ ID NO: 205848 - DNA, 349 bp, Gossypium hirsutum
tataagcaccttcccataagcaaaccacaaaggaaagcttggagagagacccaaaaacaatgtctaaggaagtgagtgaagaaggacagggtcgtaaggactatgtggaccctccaccggcacctctgattgatatggctgaactcaagtcatggtctttttacagagccctcatagctgagttcatagccactctcctcttcctctatgtcactgttgctaccgtaattggtcacaagaaacaacaagatgcatgtgatggtgttggtcttttgggtattgcatgggctttcggtggcatgatctttatccttgtttactgcactgccggtatctcaggtggacacat

SEQ ID NO: 205849 - DNA, 378 bp, Gossypium hirsutum
tagcttttatcttttctccagtctcaaaccctttcttgaatgggatgaaatgaatcacattaaagaaaaaaaagcctgctgaaaaccactaaaagaatggcgactccagacgaaagtcctgcagctaagagatggcttcctctcgaagctaaccccgatgtcatgaaccagtttctttggggtctgggtcttccagagagtgaggcagagagctgcgatgtttatggcttggatgatgaactcctatcaacggttccacagcctgttcttgctgtgctttttctttatccaatgacttctcagactgaagaagagagattgcagcaagataatgagaaaagagatgttagcagtaaggtttatttcatgaaacaaact

SEQ ID NO: 205850 - DNA, 340 bp, Gossypium hirsutum
gggaaagaaattattttagagtattgagaaggggagtttggcggtttctttaaagcctgcagttttcaatttcctagtccatcaaaatcacaaattgaacaaatgtagctttaatttacaaagaaattcgatttctcaagtttcacacataggtaacacacctactgctgatgttcagggtcagtctcaatttcatgagccaattctcgggtcagcttgtctgcacgatcatcatgtccgcctgcaaatgtgtaaacccggaaagcgaattggaatgccctccacagcattttactgcacactttctttggcgcttcacctttggtcttcgacttttcat

SEQ ID NO: 205851 - DNA, 311 bp, Gossypium hirsutum
ctggcatcgtgatctttgcagggtgtgcgagaatattcctattgttctatgtggtaacaaggttgatgttaagaacaggcaggttaaggcaaagcaggttacattccacaggaagaagaatctgcaatactacgaaatctcagccaagagcaactacaattttgagaagccgttcttgtaccttgcccggaagcttgcaggtgatcctaatcttcactttgtggagtcgcctgctcttgctccttcttgagtacacatcgactttgctgcacagcaacaacatgaagctgagcttgcagcagcagctagcc

SEQ ID NO: 205852 - DNA, 391 bp, Gossypium hirsutum
gggtgttcgtttaccgtggatgatctccggcgccaggcaaattctcaagcttcaatcttttattacacgagaaaaggccgatgttgtcccgaaaggccacgtcgcggtttatgtcggggagacactaaggaaaaggttcgtagttccaatcatcgtattgaaccatccttcattcaaggacttgttgaagcgagccgggaaagagttcgggtttgatcaaccgatgggtggtttgccgagaagatgcctttgtgaatctcactttagggttgcattaaaatggagtttgttagttaagagtaacaatcataaattttgaaaaaaattataaaacggatatagagattacttttgtaaaaaaaaaaagtctatccttcacaattttggtttt

SEQ ID NO: 205853 - DNA, 268 bp, Gossypium hirsutum
  unsure (1)..(268): unsure at all n locations
tatgggctcattttttacgatgaaaatttcattgccaaacacactggtcctggtttgctgtcaatggcaaacagtggaccaaacaccaatggttgtcagttttttatcacatgtgcaaaatgcgagtggcttgataataagcatgttgtatttgggagggtgctcggagatagtcttcttgttgttcggaagattgagaatgtggctacaggaccgaacaatangccaaaactaccatgcattatacccgagtgcggggaaatgtaaa

SEQ ID NO: 205854 - DNA, 381 bp, Gossypium hirsutum
  unsure (1)..(381): unsure at all n locations
aaaacccttttttgtttcctggttattctcctcagatgggcaggcccccagagtctattccctcatctacccccaaatatcctcacattatgtctctggtggccaacgaatattttcagcacattttacgtgtgctgaacaccaacgttgatgggaagcagaagattatgtttgcattgacctccatcaagggtatcggaaggcganncgctaacatcgtttgcaagaaggctgatgtcgacatgaacaagagggctggtgaattgactgcacaggagttggacaatctcatgaccattgntgcaaaccccaggcagtttaaaatccctgactggtttttaaataggcagaaggattacaaggacgggaagtattcccaag

SEQ ID NO: 205855 - DNA, 385 bp, Gossypium hirsutum
gaaaatagattccatttattatcattattattttcttcgagttttgccttcagattcttcctctttgtaagttcaaatctaaaaagccatggcaaatgcagcttctggaatggccgtgcatgatgactgcaagctgaagtttctagagctaaaggctaaaaggacataccgcttcatagtattcaagatcgaggagaaacaaaagcaggttgtcgtggaaaagcttggtgagccaagtcaaagctatgacgatttcactgctagcctccctgccgatgagtgtcgatatgctgtatacgattttgactttgtgactgctgagaattgccagaaaagcaggattttcttcattgcatggtctccggacacatcaagggtgagaagc

SEQ ID NO: 205856 - DNA, 311 bp, Gossypium hirsutum
ctttcatgattcaaggtccatcagtgggagaatatcaatcagatcagttaaggatcggtataggcatggttcctgaactcgaagctactcaacaagaacatagcaattcggaaaatgtatcgaaggctgctccagtttcgtatgaaccagatgacctttacatggtgattgggcgtggttcagcagaagagactgccatgacatcttggactccagagattgactacgaaatgaacgcattatctgctgaagccaccagcaggcatgctgatgttgaaataaccggggccaatgataagggtcctgatgct

SEQ ID NO: 205857 - DNA, 338 bp, Gossypium hirsutum
  unsure (1)..(338): unsure at all n locations
ataatcccaatttctcacggggaaaaactcatccgaattggtaagcttgttcaatggagataatgggtttttcgttgctcttcaagttccttctcttgctctctggctttggggtttcaatggcgttacaagaaaccccattggtggctaaaaacttgggtcaaatcagntctaactcggngcctgnggcccnnggagacncgcattatacggagcttgctgaattagtggagaaagctttgntgntacaaagcttagaagagtctgtgggaaagcataatattaccatttttgctcctaagaatgaagctcttgaaaggaatctagaccctgaattc

SEQ ID NO: 205858 - DNA, 390 bp, Gossypium hirsutum
gctgaagcttatggaaggagaatgatggtaggacctaactgatggctgaatagatggaacactggcaagagaatgagcgtgagaagccggtggagatgtccatgccgctgtgtcaatttgtatggatgatgatgatgctatccgagatctaacacatgatagcacagaggacactgagcttgggctggttgaaagcaatggtgtactttctgaagctggtaaatcacctacggtggttcttgcatctcgcttgcaaacagggcaaaatgttctccatgttgtaagccaagaatcaatgcagaaggcatgaaacttgtgatgacatggaagaatcctgagcttctctccaatggtataatcttcaagacatactgcacacgttcttgaagt

SEQ ID NO: 205859 - DNA, 329 bp, Gossypium hirsutum
  unsure (1)..(329): unsure at all n locations
gaacaagattcttgctcgaaaacctatactctctgatagctctcttcttcgagccgctaggtcgactgtttagcttcaagtctctcttttttgaaagttcctagttaatactggataatgggtaaggagaaggttacatcaacattgttgcattggccatgtngacttggaagtcaaccacaacgggtcacttgatatacaagcttggaggtattgacaagcgtggatcgaaggtttcgagaggaagctgctgagatgaacaaaggtcattaagttgcctgggtgctcgacagttgaagctgagcgtgagcgtggatcaccattgatat

SEQ ID NO: 205860 - DNA, 392 bp, Gossypium hirsutum
gagagagctttcatttgaaaaaaaaaacgaaaaaagaaagaaaagggagaaaggaaaactagaaaatgaatagaaagagaattcattcagttctgtaattccgttctaaaccgaagaccaaaaagaaagtgtgaaatttgaaatacagaggtcgttgcttccccatttccaaagatgaacggcggcccctctggtttcaataatgctccggtgaccaaaacctttgtaattgcatctgccctcttcaccgtattctttgggatccaaggtcgttctttcaagctcggtttgtcctatcaggatattttcacaaaacttagcatatggaagttaatcacatcagtctttgccttttcatctacaccagaactgatgtttggactttatctact

SEQ ID NO: 205861 - DNA, 380 bp, Gossypium hirsutum
acacgaatgtgtgtatgatgagttcgtaaagaaagcaaaggctcgagcactgaaacgagtagtcggggatcctttcaagacggggatcgaacaaggccctcagatggataatgaccaattcaggaggatcctcaggtacataaggcttgccatggaaggtggacctcctctggattctggaggtgaacaatttggctccaaaggctactatattcaacccactgttttctccaatgttcaggatgacatgttgatagctaaagatgagatatttggtccagcacaatccatctcaaagttcagggatcttgaagaggtggtacaaagggcaaacgcatcttcatatggatcggctgccggagttttcactcagaatatcg

SEQ ID NO: 205862 - DNA, 213 bp, Gossypium hirsutum
  unsure (1)..(213): unsure at all n locations
ggaagagcttttggtcgtcaagcacttctcagnngaggggcaacttgagttcaaggctgtcctctttgtccccaagagggctccttttgatctctttgatacaaggaagaagcccaacaacattaagctctatgtgagacgtgtctttatcatggacaactgcgaggagttgattcctgaattcctcagctttgttaagggttttgtcgactc

SEQ ID NO: 205863 - DNA, 324 bp, Gossypium hirsutum
catatgcatttcatgatgatgcacaacacatcagatggcggcatgaacatgacgaagcaccataagatgatgatgcatatgaccttcttttggggcagcgacgccgagattctcttctccggttggccgggaaccagaaccagcatgtacgtcttggccctcatagttgtcttcctgcttgctttcatggtggaggggatttctcactctcggttggtgaaacccggttccacccaccacgtgaccgccggtctggttcagactttgttgcatgctctgagggttggactcgcgtatctggtgatgttggctatcatgtctttc

SEQ ID NO: 205864 - DNA, 315 bp, Gossypium hirsutum
  unsure (1)..(315): unsure at all n locations
caatatatgtcatctgcaggcgttctttggacattgaacgacccacttatacgaatcttaaccgccttgtctctcaggttatctcatctcttaccgcatctttgaggtttgatggagccctgaatgtggatgtgactgagttccagactaacctggtcccatatcccaggatccactttatgctttcttcttatgcccctgtcatttcagctgagaaggcttaccatgagcagctatcggtggctgagataaccaacagtgcttntgaaccctcttcaatgatggccaaatgtgacccacgccatgggaagtaca

SEQ ID NO: 205865 - DNA, 379 bp, Gossypium hirsutum
gccaattattgatgctttgagtcgaagaaactggaacttgacttatatattgaatacccaccaccatcacgaccacactggtgggaacgcagagttaaaagcaaggtatggtgcaaaggtgattggttctggaatagacaaggataggattcctggaattgacattgttctaaatgatggggaaaagtggatgtttgcaggtcatcaagtgcatgtcatggagacccctggttatacccgaggccatattagcttctattttcctggttctcgagcaatttttactggagacactttgttcagcttatcatgtggcaagcttttagaaggcactccggagcagatgctttcttcccttcagcggatcatgtcactacct

SEQ ID NO: 205866 - DNA, 392 bp, Gossypium hirsutum
gtttgatatttctcattcaagcagaaaagcccaggaccggacctaaaactcctgagctgattgccataaataatgggaacacaagacaccattcaaagtttataattactctcacagacggcagactctgaaaaacacaaaagcctcaccaccgtctatcaagaacccagttctgtgaacaacatcctcgacaagatggtgatgacttaaaactattaccatcaaaacacacaactaatcgtccaatgatggctgacctactaatgagaagcaatgttttattgtagtaaccataaaatagtttggttggatcaactgaaacccacacggttcacttcccacccttcttggcagcagacttcgtcaccttggctccagatggatctttcttc

SEQ ID NO: 205867 - DNA, 361 bp, Gossypium hirsutum
  unsure (1)..(361): unsure at all n locations
ggaaaggcagtggaggaaagtgggtcaagatggataaatatggcttataaggttgagtgcactacaatcttcaatcccacacaatttacgcgcttgaccactacgatttgatgtnttgcttccaagatgggcgttcgcctcctgatgaagaatttgatcaaggaaagcgaggaaaagctaggcaaagttctggatatttatgaggagaggctgtcaaagaacaagtacttggccggtgatttcttcagccttgctgatctgagccacctaccatttactcagtacttggtgggtcaaatgggaagggaatacatgataaccagcaagaagcatgtgagtgcttggtgggatgatattaata

SEQ ID NO: 205868 - DNA, 370 bp, Gossypium hirsutum
tagcttcctctttttttttttttatggtacttcgcggggttgggtggggtttgtttatagtgatggcgacaaacaagggcgaaggggctaaagatgtatcgaaaacagagacaaaacctatagaggaaatggttttggggtgtatcattgggaacctcaccgacaagaaggacctgtttacaaaagctgataagatacatattaagagctcggatttgcaactggttaaacacttaaacaaggctcggtctagggacaaatatggttcgcttgttactaagaaagaagagtgtgaaaacgatttggttaaccttgatataatacatgttgtagctcatggaacttatggcatagtctaccgaggtgttta

SEQ ID NO: 205869 - DNA, 319 bp, Gossypium hirsutum
gaaccgcatttagatatcaaagtacctctttcaagagggtgtttggtacgccaaaaaagattacaacttggcaaaacacccagaaatcgatgttccaaatcttcaagtaataaagctgatgcaaagcttcaaatccaaggaatacgttcgtgaaacttttgcttggatgcattattactggtaccttaccaacgatggcattgaatttttaaggacttaccttaatctcccctctgagattgttcctgctactttgaagaagcaaactaggcccggcggtggtcgtaccatgggtccttctgatagccatccacgtggt

SEQ ID NO: 205870 - DNA, 391 bp, Gossypium hirsutum
catcatcttttgtgttactgggcttgttggaagagagctaaccagaaggctcatctcaaaatctaagtggaagatctatggtgtagctcgacaacctgaaataatacccatcaaaagttctagctaccatttcataccctgtgacctgttagatccatttgaaaccaagcagaagctatcaatactgcatgatgtgactcatgttttttgggtcacttgggcttcccagtatccattggatactgctgagtgttgtgaggaaaacaaggcaatgttgtccaatgtcttgagtgccatcctccccatagcaaaggggatgaagcattttgtccttcaaacagggatgagtcattatgtacccatagctgtgaatgggaaaacaacccatttg

SEQ ID NO: 205871 - DNA, 194 bp, Gossypium hirsutum
caggccggtttccatgtcgaacgcctgctgggagcttactgcctcagcatggaatccacctgatggtcagatgccaagtgcaaaactgtcggaggaggtgatgatgcttttaacacctttttagtgaaactggggctgggaagcacgtccttcgtgccgtttttgtggttctggaacccattgtttttgataaa

SEQ ID NO: 205872 - DNA, 385 bp, Gossypium hirsutum
catttatccttacaatggcattgaatctgatgaaaaagaagagttcaactgatttaacatgtagcattcctgagcagcatattgaaccaacgtacaaggaggaaactcgtccaccttctcctgctccaaggtttactgaggcagacgtcctgtcatctgttgtaagaaggctgggtgatctagaagagaagattgagatgctgcaatcaaaacgatttgagatgcctcatgagaaagaggagttgttgaatgctgctatgtatcgtgtggaaatgctagaagcagaactaattgctacaaagaaggctctccatgaagctataattcggcaggacgaactccttgcacgcatacaaagtgaagtagtagtcaaacctgggagaag

SEQ ID NO: 205873 - DNA, 378 bp, Gossypium hirsutum
  unsure (1)..(378): unsure at all n locations
gggttatgatttgatgtctgngccaatggcaatcgcattgtctggtcaactgcttcttggtcaacctgtgatggttaaaccttcagaggccgaaaagaatcttgttcagtccaatacttctggtgcaggcgcaggtggtgttgctggaccatatggagctgttgatagaaaactatatgtagggaacttgcattttaatatgacagaaatgcagcttagacagatatttgaaccttttggacctgtggagcttgtgcaactaccacttgaccttgagactgggcagtgcaaaggttttgggtttgtccagtttgctcaactttaacatgcaaaagcagctcaaagtgccttgaacgggaaactggagattgttggtcg

SEQ ID NO: 205874 - DNA, 259 bp, Gossypium hirsutum
  unsure (1)..(259): unsure at all n locations
cagagaggttgttctttataaagtctcttcaccattgtttgaacatgaaggtttgtaataaaaatttgtttctatcaccattgctttgcattgctattgcaggagttttgggtcaagctcctagtaatcctcctacgtctacgccggcgccacccacaccaccggnttctactgctcctgcgacgactcaaccaccggctacaccaaccgtcactccggcaccggtttttacttctccttccactttattaccgccccc

SEQ ID NO: 205875 - DNA, 388 bp, Gossypium hirsutum
ctcttggtggctaccctggacctcaaggtccttactattgcggtgttggtgtggacaaagcctatgggcgtgacattgtagattctcattacaaagcatgtttatatgctggggattaatatcagtggcatcaatggagaagtgatgcccggacagtgggaatttcaagttggtccggcggttggcatttctgccggagatgagttgtgggttgcacgttacattttggagaggattacagagactgctggagtggtgctctcctttgatcctaagccaattcagggagactggaatggtgccggcgctcacacaaattacagtacgaagtccatgagaagtgatggaggctacgaggttatcaagaaagcaattgaaaagcttgggc

SEQ ID NO: 205876 - DNA, 391 bp, Gossypium hirsutum
gtgatttccttagtctggtttatgtggggagagttagggatcattgtaggatggagtacttgatattgacgtattattattttagcctttcaccgtatcaccaccatgtaagatgatgggtcctatggagatggcggtgggcggacaattggtgcttaattccttccttataatccatctttgaaccatgttgcttaaaaggatgtttggagctggagactggattgtggtgcttttttattttattttattatttaatattcaagggttttgagaacattaatgttcatagctattattgtacgagattttttttgaaaaattagagtcagtttgcggtcaaacttctacggaaattatatttaatatctggttttggaatattgtgaat

SEQ ID NO: 205877 - DNA, 390 bp, Gossypium hirsutum
  unsure (1)..(390): unsure at all n locations
tagatactttttttcttctttgatctctgtgacctgttgccttgtccattgtgataatctgttttttattttctcatcctatctgctttgcctatcgtcgcctnccaattggtggaaagatacttgagcttacccctgagcagtacattctaaaagttggtgacggagagctagctcaatgcattagcggattcggtgctctcgatgtaccgcctcctcgcggaccactctggatcttgggcgacgtgtttatgggtaagttccatacggttttcgactatggaaacatgcaaattggatttgcagaggctacataaagtaatcacttcaacagttacacccctttggtatgtataatatgcagtgctaagtattactcttataaaaata

SEQ ID NO: 205878 - DNA, 393 bp, Gossypium hirsutum
actgaactgtgcgacaagcaaaagaaagagatcgccaagtggttcctcctcaatgctcccgcaggcgaaatccagtacgttgccaaagatttaaaatccgttttaataagtgatgacgtctacgatgaggcggcatcggaagcatttcctgtttataacaaatctcacatgatttgcctcgaaatgcctggtagattcggagatgtgctggttacatcatatggggagcttcagggtaatgagtatctagaccccaagactgcccaagttgctatagttgaccatgtcaaacaggtttgtacagaggttagacctgccactgatgaggaacttcccactccatatgttgaggaataccgatgtgctctggaagcagaaatgctgaagtatgtt

SEQ ID NO: 205879 - DNA, 395 bp, Gossypium hirsutum
tcaagtttctacatcagttgtagagccttacaacagtgtgctgggcactcattcactccttgagcacactgatgtcgctgttcttctggataacgaagcaatatatgaaatctgcaggcgttctttggacattgaacgacccacttatacgaatcttaaccgccttgtctctcaggttatctcatctcttaccgcatctttgaggtttgatggagccctgaatgtggatgtgactgagttccagactaacctggtcccatatcccaggatccactttatgctttcttcttatgcccctgtcatttcagctgagaaggcttaccatgagcagctatcggtggctgagataaccaacagtgcttttgaaccctcttcaatgatggccaaatgtgacc

SEQ ID NO: 205880 - DNA, 341 bp, Gossypium hirsutum
  unsure (1)..(341): unsure at all n locations
gaccgaaagatgctcactnnctctgtgttcccttcccctatggtgtctgacactgttgtcgaaccttacaatgctactctctctgttcaccagcttgnnnnnnnnagatgaatgtatggttttggacaatgaagctttatatgatatttgcttccgtacactgaagctcactactccaagctttggagacttgaaccacttgatttctgccaccatgagtggtgtgacatgctgccttcgtttccctggtcaattaaactcagatctacgcaagcttgccgtcaatctcattccattccctcgcctgcatttctttatggttggctttgctccccttactt

SEQ ID NO: 205881 - DNA, 280 bp, Gossypium hirsutum
ttgtggactccaagggattgattgataaatctcgaattgactcacttcagaatataaaaaagccctgggctaacgatcatgaaccaatcaagaaacttgtcgatgctgttaatggaatcaaaccaacagtgttgattggaacatcaggagtaggaaggacattaactaaagaagtggaagaggctatggctgctttgaatgaaaaacctattatattctcactttctaatccaacttcacaatctgaatgtactgctgaagaagcatatacatggagtga

SEQ ID NO: 205882 - DNA, 407 bp, Gossypium hirsutum
  unsure (1)..(407): unsure at all n locations
aaaattcaaaaaagaactagttatttattatcgctcacagtctctttgagaaagcccaataattccctctctcattggctaattttggatattctggctgccctagattttctctctgncgcgtctacctagagaagaagccatggctaatgcaccgtctgtaatggctgtgcatgatgactgcaaactgaagttccttgagttaaaggccaaatgaacataccgctacataggattcaagattgaggagaaacagaagcacgttgttgaggaaaagcttggtgagccaagtcaaagctatgatgatttcacttcaagcctccctgctgactaatgtcagaatgctgtctatgattgcgactctgtgactggtgagaattgccaaaaaagcaggatgttattcattg

SEQ ID NO: 205883 - DNA, 269 bp, Gossypium hirsutum
catacaagaataaaacagaacatcagccggcaggtcctgttattataaatactaagcgttgtagtagctcaattgttgggaatggctagtcgatgggagcattctaccgtggcttacccaaaggtggatgacctgaatagtgaccgcatggtggctcatgtgccggaggctcataaactggtggtttaggttctggctcttcttcctctggtggcgcataaactggtggcttacgtggttttggctcatatattggtgggttgttggga

SEQ ID NO: 205884 - DNA, 276 bp, Gossypium hirsutum
gtctattcaatggcccgggaccatctgccacaagactcgccattgctgctcctccaatgcctgctgccgaggctcgaactctccaactgaatttaccattcatggatagcggccggattataatgatggaacctggccttcctgttgatacagatctcagtttgatgtcaaagagatttcaacattgcttgatgcacttgagaagtactggccatcggtatattgtggcaaatcatcaacctgcttcagtggaaaagggttattttgggctcatga

SEQ ID NO: 205885 - DNA, 386 bp, Gossypium hirsutum
aaccagtgcttccttctgaaggacttactcgtcaaggaagtggaatcattggcacattcgggcagtctgaggagctacgatgtgttatagttgttattcgccatggtgatagaactcccaagcagaaggtgaaattgaaggttactgaggaaaaattgctaaacctgatgctaaagtacaatgggggaagacccagatctgagacaaaacttaagagtgctgttcaattgcaagatttgttggatgcaacaagaatgcttgtaccccgttacagaccaggtcgtggcagtgacagtgaagcagaagatattgagcatgctgaaaagcttcgtcaagttaaggcagtacttgaggagggagggcatttttctggtatttatagaaag

SEQ ID NO: 205886 - DNA, 282 bp, Gossypium hirsutum
tggtcatgaagagaagcttccttggtaccgtgggaaggaatggagttacttaaggggaggtcttacaacacttgaccgtgactatggatggatcaacaacatccaccatgatattggaacccatgtcatacaccatttgtttccacaaatcccacattaccatttagtagaggcgactgaggcagcgaggccagttctcggaaaatactatcgagagccggaacaatcagggcctttacctttccacctcatcggaagtttgatgagaagcttgaagaaaga

SEQ ID NO: 205887 - DNA, 371 bp, Gossypium hirsutum
gagatatatttgtttgaaaagaaaaatggttctgctagagaaactttgggatgatgtagtggccggacctcaaccggaacgtggccttggccggctgaggaagatcacaaccacccccacccttgtccaccaaagatgaggcttcatcaatggcgatgccgacgagtccgacgacacctgggacaccgtcgacgccggtgtcggctcgtagggacaacgtgtggaggagcgtgttcaatccaggtagcaaccttgcaaccaaaggtattggcgctgaagttttcgacaagcctcaacctaactctcctactgtttatgactggctttacagcggggagacccggagcaagcatcaccactgattgggcgat

SEQ ID NO: 205888 - DNA, 393 bp, Gossypium hirsutum
  unsure (1)..(393): unsure at all n locations
ctattttgtttaccatggctcataacattcgtcaccctttcttccttttccaactttttctcatttgtgtctcaccaatgatcggtagccacactgtctcggcnncccgtcgacgtttattcgagacacaaacaaccttatcggagctgccacaattggcttcaaaatacgaaaagcacgaagagtttgaatatgaaaagtcagaatacaaacagccaatgtatcacgaagagtaccccaaacatgagaagcctgaaatgcacaaggaggaaaaaaaaaaaccctgcaaacaacatgaagagtacgagaaagaaaaacctgagttccccaaacaggaaaagcctaaagagcacgagaaacacgaagtcgaatatccgaaaatacccgagtaca

SEQ ID NO: 205889 - DNA, 393 bp, Gossypium hirsutum
  unsure (1)..(393): unsure at all n locations
acacattctttaaccccttcaacaatggcgattacgaagcaacatttgatcccgcttttcgctatctcatttctcttgttttcccagctccattgctnaacaacatcaggcccaaggctccggctcagtctcccgcaccacctggtccaccagacgtcgccaaaatcctgcaaaaagccggccaatactccgtcttcgttcgtcttctcaaatccacccaagtctccgaccgtctcattggcgagctcaaagatacagatgatgggaagaccatttttgcccccactgataaggctttctccgccctcaaatctggtgccttgaattcactcaacgatgaacaaagggttcagctggtgctatttcacgtcgtcccagattatatcccatttt

SEQ ID NO: 205890 - DNA, 283 bp, Gossypium hirsutum
aaaagctttacattttgcaaaagaagggatttcagcacgaaattgaagttgtttttaaaaaccatggttgccacggctgtgacatcggcgtttttctcagtcacttcttcacctgactcctctgactcgaaaaacaagaagctcggaagcatcaagtcgaagccatcggtttcttctggaagtttgcaagtcaaggcaaatgctcaagcacctccgaaaataaacggtaccgtggcggtgacgacttccgtggaaggttccaagaacgatgacggtgcaagtt

SEQ ID NO: 205891 - DNA, 368 bp, Gossypium hirsutum
tacaatatatgtttccatggtgcttcacagctacattctttccgttctcttttctgtgttacaggttcttgcacttgcttactacgctatctcttacttccctgtggatctgccgggctgaaatttctcacatcggctcttacctcttcaataactacctgttttggcaggtgacctggccaccttccacctttgtttttgacttgtatacttgttttgagtcattaaagggtcttagttacatgttttgttgcttccatgctgtcattttcttgtattttctgaagaaaaactgcaaaaagtgtaccttttatctgcatcaaaatttggatccattaatagatgaattcacttagttttggttcgtt

SEQ ID NO: 205892 - DNA, 395 bp, Gossypium hirsutum
  unsure (1)..(395): unsure at all n locations
gaggaagctccgatctaaatgagtcagatattggaataataacaccatatcgccagcaggttctcaagatcaagaaagtgctcgaaacctgggacttgctanatntaaaagtttgggcagtgttgaacaatttcagggccaagaaagggaagtcattattgtgtctacggtaagatcaacagtcaaacacaatgagttcgacagaacttactgtctgggatttctgagcaatccaaaaaggtttaatgttgtgattacccgggccaaatcattgctcatcattgtcggaaatccacacatcgtttgtaaggatccttactgggaaaaactgttttggcattgtcatgaaaataactcatatcagggctgccccccaccagaaagggtgaaccatg

SEQ ID NO: 205893 - DNA, 237 bp, Gossypium hirsutum
gccatcatcatgcagtaatttcatgggatattgtaattatattgttaataaaaaagatggtgagtgggaaatgtgtgtgtgcattcatccatgtagcaatgctgaatctctttgcatgcatagagattctgaatggttatagtttatgttatatcgtttgttctagtgaaattaattttgaatgttgtatgtaatgttaacatcacttggcttgatttatgttttaatgaagcggca

SEQ ID NO: 205894 - DNA, 274 bp, Gossypium hirsutum
catccgattcaacgccagaaaagccatcatcttcatctgagccttcaagcgtcctaacctttcattcatcacccagatggcaacttcacttcaactctgtcaaagaaacctcacagcttatggttatagatttctcagcttcttggtgtgggccatgtaaattcatggaacctgttttgaatggcatggctgctaagtttactgaagttcagattgtaaaacttgatgttgatgaactgcctgatgtggcgcaggaatttggggttcaaggaat

SEQ ID NO: 205895 - DNA, 283 bp, Gossypium hirsutum
acatgtggatgctgctagtggagggttcattgctccctttgtttacccgcaactcgaatgggatttccgcctgccgttagtaaaaagcatcaatgtcagtgggcacaagtatggccttgtatatgctggtatcggttgggtcgtgtggagaagcaaggaggatttgccagatgatcttgtgtttcacatcaactaccttggatctgatcagcccacattcaccttaaacttctctaaaagctctagtcaaatcttagctcaatattatcagcttattcggctc

SEQ ID NO: 205896 - DNA, 394 bp, Gossypium hirsutum
  unsure (1)..(394): unsure at all n locations
acttcgtcttatgtatcccgaacaacgtgaaatccagtgtctgcgacatcccacctagatggctatcaatggcatcaaccttcgtaagaaactcgacctcnntcctaaaatgttcaggcgagttagtgaacaatttaccgctatgttcaggaggaaagctttcttgcattggtacaccggtgaaggtatggacgagatggagttcaccgaggctgagagcaacatgaacgatctcgtgtctgaatatcaacaataccaggacgctaccgctgacgaggaaggcgaatatgaggatgaggaagatttggatgaagaacacatgtgatgaaagcgaaaaccaaacgaagttgtcggtaatgcagcatatacaggtatgtgattcgagctttgtgtt

SEQ ID NO: 205897 - DNA, 387 bp, Gossypium hirsutum
  unsure (1)..(387): unsure at all n locations
gaaaaaaggttagtggaagctgggaagaaagatggacttgctgcattggaagctttttcctctgttagcgctgctcgcttctttccttttctttttctcntncagattcttccaagtcatctcaaagcggttgtagtctttttcctcacagtcactattggattgcaagcaagcgcattgtgacaccacaagggattatttctggtgctgttgagataaagggagggagtatcgtatcaatagttaagaacaaggattggagtggcaaatttaaacaagtagttgattatggcaatgcagttgtcatgcctggcttgatcgatgtgcatgcacatttagatgatccagggagggcagaatgggaaggatttccttcagggactaaag

SEQ ID NO: 205898 - DNA, 394 bp, Gossypium hirsutum
  unsure (1)..(394): unsure at all n locations
agaaaaatttacaatcatcatcagatctattgttcttagactgatgatgataatgaggctttacgctcttcttctcctattagctttcgcttcgctgcaactccnnnncttcgtccgctgatgttgacgaggtgttctatgattcatttgaagagtcatttgatggacgatggatcgtttctgataaagatgattataaaggcgtgtggaagcattccaagagcgaggggcatgatgactatggtcttctcgtgagtgagatggcaaagaagtatgcaatagtgaaagagcttgatgaggctgtgaatctcaaagaaggtaccactgtgcttcagtttgagactcgcctacagagtggactggaatgtggaggtgcatatttgaaatatcttcg

SEQ ID NO: 205899 - DNA, 276 bp, Gossypium hirsutum
ttaagaagctatgagaatcctaagaacaagatcactgcagtgcctgctgaagaagaggagatatggggtgctaaattcaaggtggaagggccagctgttgttgctgccacagagtagtcctttgctttctccttctaaatctatggatccatggaattataggagctgcacatgcatagcatatggatcagtctccatatgaaagtacttgtcgagtgggaaatgaaaagaagaaaaagaactgtttggttatgagaaatggtagtcactttctgt

SEQ ID NO: 205900 - DNA, 393 bp, Gossypium hirsutum
  unsure (1)..(393): unsure at all n locations
ctgaatgcaacccggaaggatccgatccgataatactagcgaacactaccgatgtgagccattttggttactttcaaaggtcaagcgtcaaggagttcatnnnnnntgttttctcgaactgttgctaaacgtactccttctggtcagcgccagtccgttcagcacgaagagtacaaggtacatgcttacaacagaaatggactttgtgccttgggatttatggatgatcattatccagttcgaagtgctttttcgcttctcaaccagattctagatgaatatcagaaaaattttggggagtcttggagaaatgcacaagctgatagcactcaaccttggccgtatctgaatgatgctttgaccaaatttcaggaccctgcagaggcggataaa

SEQ ID NO: 205901 - DNA, 393 bp, Gossypium hirsutum
  unsure (1)..(393): unsure at all n locations
tgcagtttctgtctctgtgaaagaaaccatgtctcatgaagatcatgatgaagaagttgggaaactggccgtccgccttgcctacgccgtggtacttncnnnnnnctgaaatcnagccttggagctgaacataattgacacaatcttagccgctggtgacggcgcgtttctgtcaccttcccagattgcgagtgcccttccttcaaagaatcctgactcaccagtgctactagatcgaatgctacgcctgttggccagccattccattctcaaatgcgcagtaaaagcaaaggaaaaagaagaaattgaaagactgtacggtgcaggcccactatgcaagttccttgttaagaatcaagatggagggtcgattgcacctctccttttgttgca

SEQ ID NO: 205902 - DNA, 277 bp, Gossypium hirsutum
ctcttatacttttctacttcaccccagctttctgtgatctttctcaatctgggattgtcccttctggatttaattatgctttggttctcaattatggatctgctttttctattttcctaggcttgttttatgtagttttggataagaaagctgggtctttggccgctttgctgtgcttagcttgctgggttggagctagtttcatcgctgcaaaacttggctattctctggcctggaaggttgtgctggtatctcaattgctttgttggacaggaca

SEQ ID NO: 205903 - DNA, 398 bp, Gossypium hirsutum
  unsure (1)..(398): unsure at all n locations
gatcccccnnctgcataattcgcccgaggtcttcaccttctctttcatttgtcgagatgctcaatgactacgtccagcatctctttttctcccttttgaactttctttctcctgattaacgcctccaccnnnnaaggatataccagagtttggatctttcgagaatagatcggatcattcgctgctctcttcgatctcaaggactgccggtggcagcaatagagccagttcccgagagttgcgtgtcctctgtagaggagagaacgatggaggaaagggaaaggtggtggaagatgggattgaaggctatatcggaaggcaaattggctgttttgcttctatccggtggccagtggactcggcttgtaagttcagatcccaagggatgtttcaacatt

SEQ ID NO: 205904 - DNA, 287 bp, Gossypium hirsutum
ctgtatatgaatgtcatagttgctccgatcttgctgctgaaatggctgctgctttggcttctgcttccatcgttttcaaagacaacaaagcatactctcaaaagcttgtccatggtgcccgaacactctttaagtttgctagggatcaaagaggcagatatagtgctggtggttctgaccctgccctcttttataattcctcaagttactgggatgagtttgtttggggtggagcctggttatactatgccactgggaattcatcctatcttcagttagctactcat

SEQ ID NO: 205905 - DNA, 397 bp, Gossypium hirsutum
  unsure (1)..(397): unsure at all n locations
cctgtggtggttatttttaaaaaatggagatgcctctagtttttgaatcaacggctatcgtcgccattgccaatagcttccccttcgcgagtcctgaaactgnnnnnnnccaggttcaacgcctctcattgctaaagaaatcttcaatgcagccaccactcaacccgattttcgtcactcttactcttccttcctcatcctcattctcaaacttgaccgttccatgcacttctctcttatcgatgaccttctcgttcgtctcaaattcgatcaatatcaggtaaccccgactctctttttttacctcatcaaaatctacgccgaagctgatttacccgagaaagctctcaatgtgttctacaaaatgcttgacttcaacgttaagcctttacccaga

SEQ ID NO: 205906 - DNA, 241 bp, Gossypium hirsutum
atagaatggtagaggagaacgtagaaatcctcgaaatcgatgacaggttcgagtttgaccctgaagagtgcgatattggtaaaggtaagtgggtgttcaaccgctctatcaagccattgtacacagatacaagttgtccatacctggacaggcaattttcttgcgtcaaaaatggccggcttgattttgactaccatcactgggagtggcagcctgaggactgcaacctgcctagatttca

SEQ ID NO: 205907 - DNA, 392 bp, Gossypium hirsutum
ttctaagcttatagtgccatttttatttggttccaataatgcaaactgctccttcaagtaaaacagctcatccacagtcaaagttttagacagggcccttaaagcagccttccgaagagatgaagagcgcagataagccttcacgagtttgaatatcagtatatccaagggcactttcacatcgttatacttttttatccagggatgactcaaagcttgggctgcagtcaatcttttccttgggtccttattcagtaaacgcttcacaaaatccctagcctcagaagatagagatggccaaggtgcttcatcaaaacttggatcagcttttagaacagctccaaaaatcccagactctgttcgagcccaaaatggacggctaccacacaaaa

SEQ ID NO: 205908 - DNA, 379 bp, Gossypium hirsutum
  unsure (1)..(379): unsure at all n locations
aagatccgatcattgtggagacactatttccaaaacacgcaaggacttatttttcggggtgatagcaatgatcgtgaccgtgtggttgaagctagagatgagttgcacaagatggtgaatgaagatgagttgagggatgctgggctgctagtatttgcaaacaagcaagaactttccaatggtatgaatgctgctgagattaccgacaaggttggccttcaatctcttcgncagcgtcactggtatatccagagtacatgcgccacatctggtgaaggactgtacgagggactggactggctctcaaacaacattgcaaacaaagcatagatggcgtaattgacttgtctgtctcagaaaatgccagcccctttcggaa

SEQ ID NO: 205909 - DNA, 315 bp, Gossypium hirsutum
  unsure (1)..(315): unsure at all n locations
ccttcctgaggctgatgggtttatttttggcttcccaacaagatttggcatgatgtctgcccaattcaaagcatttatggatgcaactggtggtctatggagaactcaacaacttgctggaaaacctgctgggatattctatagcactggatctcaaggtggcggacaagaaactacaccgttgactgcaatcactcagcttgttcaccacgggatgatttttgttcccatcggatacagctttggtgctggcatgtttgagatggagcaagtgaaaggtggaagcccttacggtgcaggaacctatgcntggga

SEQ ID NO: 205910 - DNA, 253 bp, Gossypium hirsutum
attccttttatatttttcctctccaattttccgtcacttgcccgagaaaatgagagaaatccttcacatccaaggtggccaatgcggcaatcagataggagccaagttctgggaagtcgtatgtgccgaacatggcatcgattcaacgggtcgatatggtggtgactcggagctccagcttgagcgaatcaatgtttactacaacgaaaccagttgtgggccgtttggtcccccgcgcaggtttaaatggatc

SEQ ID NO: 205911 - DNA, 382 bp, Gossypium hirsutum
acgaagttttaggggtggtggggaagaaaggaagagtaacagaaaccgatctggatcaacttcaatacctgaagatggttttaaaagagactctaagactgcatccacctgcgcccatgctgatcgccagagaagccatctcacacttcaacatcaatggttaccacatttatcccaacacacttatccaaatcaatgtatgggccattgcaagggacccaaagtactgggaaaaccctcaagaattctccccagaaaggtttatcgataacgccgttgacttcaaaggacagcattttgagctgttgccatttggaggtggcagaagagggtgtccggggctgtacatgggaaccgtcacaaccgagcttttactcgcaaa

SEQ ID NO: 205912 - DNA, 319 bp, Gossypium hirsutum
caccataccggtgatttatatgacttagatttatcaaaccttgatgttaaagacgatgaagctttagccatcaactgtgttggcacattacattcgatcatggatactagtcgggacatcgttatatcgagcttccggcgattaaaaccgagggtaatcaccgtcgtagaagaagaagccgacctcgatatcggtgtcgatggggtcgatttcattaaaggtttccatgaatgtttaagatggttcagggtttattttgaagctttagatgaaagtttcaatagaacaagcaacgaaaagttgttgcttgaacgagccg

SEQ ID NO: 205913 - DNA, 386 bp, Gossypium hirsutum
atggaatccaccagagtttcttccaatggccgataactccaccccagcctttgtaatttctctgaactaaccatatcttcctcccctccctcagtaaagcttttaggataattgtattgaggaaacatacttctcaacttatcaacaagatcacgtgccttgatcgtgtgagctgtgcatatgtaccttccttcagccgctggcttctcatacaccagaagcagtgcctgagctacatggcgcacatcaactatctttcgaattttgttttccagagagtcatattccccttttaaaagattaatgagaaccttgctactagcattgatggtggactgcagaagtggccccaatatcagtgtaggacaaacagtaacaacatcaag

SEQ ID NO: 205914 - DNA, 255 bp, Gossypium hirsutum
  unsure (1)..(255): unsure at all n locations
ctgaaacggttataattattaccaagacgcagatgattaccctgaaatgtgctgcatgtggatttgtttccgatgttgacatgcgagataagcttacaacattcattcttaaaaacccacctgaggcaaagaagtcaacgaaagacaagaaagcgatgaggagagctgaaaaggagagactcaaggagggtgaggctgctgatgaagagctgaagaagattaaaaaggaggcanaaaagaaaggttcctctacta

SEQ ID NO: 205915 - DNA, 375 bp, Gossypium hirsutum
gaaatttataccgacaaatccagctggtctaattgagtacagggcacatccctactggatgcaaaagtactgcccctctcatgagcgtgatggcactcctcgctgttgtagttgcgaaagaatggagcctgtagatgtaaaatatatatcacttgatgatggtcggaggctgtgcctagagtgtctagattctgcaattatggatactcatgaatgccaacctctctaccttgaaatccaagaattttatgaaggattaaatatgaaagttgaacaacaggttcctctccttctggttgagaggcaagctctaaatgaggccatggagggagaaaagaatggccatcatcacttaccagaaactagaggactctg

SEQ ID NO: 205916 - DNA, 385 bp, Gossypium hirsutum
gttcatcgacgcagcctcgttcagattcaactatagaagcgaaatggctggttccagggttgctcatgctaccttgaaaggaccaagtgttgttaaggagatagttatcggaataacacttggcctttgtgctggtgggctttggaagatgcatcactggaatgagcagaggaaagtgagagcattctacgacatgctcgagaaaggtgaaatcagtgtcattgcagaagaataaatgttcttttagtcttgtgaaagtgtggacagcttcagctgtgtttcgttatatgcattctcttcatttggctcttagatagaagatgagcaaaacacaatttggagcttctaagaataatgtcatcattttgggatcttgatttcatat

SEQ ID NO: 205917 - DNA, 387 bp, Gossypium hirsutum
ccgaactcttaagctcactactccaagctttggagatctaaaccacttgatttctgctactatgagcggtgtaacatgctgcctaaggttccccggacagctgaactctgacctccgaaagttggctgtgaacctgatcccgttcccacgtcttcacttctttatggttggttttgcaccacttacatctcgtggttctcagcagtacgtttctctcactgtcccagagctaactcagcagatgtgggatgcgaagaacatgatgtgtgctgctgaccctcgccatggtcgctacctgacagcgtcagccatgttccgaggcaagatgagcaccaaagaggttgatgaacagatgatgaatgtccagaacaagaattcatcttactt

SEQ ID NO: 205918 - DNA, 380 bp, Gossypium hirsutum
cccaaacgcctcgctctaagaaaaaaacaattatggcaagcaaagaacccgaacacgagcacagagaagatgaagaagctcctgccgccgaggatgaagacactggagctcaagtcgcccctattgtcaagttagaggaagtcgctgtcagtacaggcgaggaaaatgaagatccgatcctcgatctgaagtcgaagctgtatcgatttgataaagaagggaatcaatggaaagagagaggtgctggtactgtgaagctgttgaagcacaaagagacaggaaaagttcgccttgttatgaggcaatctaagactctcaagatctgcgccaatcatctagtgttgccgacaatgacagtgcacgagcacgctgggaatgat

SEQ ID NO: 205919 - DNA, 352 bp, Gossypium hirsutum
cggacacgaaattcctctttttccccagatctggacccgtcgccggtcttagcaacctccgatccaatcatttcacctattgatttcaattcattaaacgtgtgacgcgacccactggatcgaagatgccggtggccgcttctgccatctacttcttgaatcttcgcggcgatgtcctcatcaatcgtctctaccgagatgatgtcgggggaaatatggtggatgccttccggatgcacattatgcaaacaaaagaactcggaacttgtcccgtgagacagattggaggttgctctttcttttacatgagaatcagcaacgtatacatcgtaattgttgtcagcagtaatgc

SEQ ID NO: 205920 - DNA, 388 bp, Gossypium hirsutum
ggcatttcttcctcagaagacccgtcaaacagaaatgaagttcaacattgcaaatccgactactggttgccaaaaaaagctggaaattgatgatgaccagaaacttcgagccttttttgacaagaggatctcacaggaagtcagtggtgatgccctcggtgaggagtttaagggctatgtattcaagatcatgggaggctgtgataaacagggttttccaatgaagcaaggagttctcactcctggacgtgttcgtcttttgcttcacagaggtactccctgcttccgtgggtatggtaggagaaatggagagcgcaggaggaagtcagttcgtggatgcattgttagtcaggatctttcagttttgaacttggttattgtgaaaaag

SEQ ID NO: 205921 - DNA, 387 bp, Gossypium hirsutum
cgcatattcatgttcagcatcaggcgccggtttccggtccaaatggcgtggctccgggagcttccggaggagcgcaattcatgcttacgtctctctatgtcggggatcttgatgttaccgttaccgatgagcagctataccaactgtttagccaggtggctccggtcgcatcagttagggtttgccgggacttggcgagcggccgctctcttggctatggctatgtcaattataacaaccttcgcgatgcggctagggcaatggatctactgaatttcacaccactgaataataagcctatccgaatcatgtattctcagcgtgatcctagtcttcgtaagactggtaccgcaaacatatttatcaagaatctggacaagtctattg

SEQ ID NO: 205922 - DNA, 363 bp, Gossypium hirsutum
tgcaattcattaatggcaacagtcagaaacaacagtgatgaaccaatgcacacaacttctttcatcatccaccgaaccaaattatgtcatgacctatcttaatcgcagtttccctcaacaccgccaatatctgtgtgctggtgcatggatattgatgcaagggcatcctgaaaacattaacagtggaaacttggcacgggtattgagagaattttcacctgaagaggtgacatccaatatctatacaatggtggatgtattacttcatcacattcacatagagctgcagcatgggcattccttgcaggaccttttactgaaaacttgcgcaaacttgcctttttttgtttggacccatgagct

SEQ ID NO: 205923 - DNA, 387 bp, Gossypium hirsutum
  unsure (1)..(387): unsure at all n locations
atgtgaaggtccaggagaactgtattgatcttgttggccgtatcgctgatcgaggtgcagagtttgtaccagctagggagtggatgaggatttgttttgagcttcttgagatgcttaaagctcacaagaagggtattcgaagagctactgtcaatacctttggatatattgctaaagccattggcccacaagatgtcctggcaactctattgaacaatctcaaagtgcaggaacgccagaaccgtgtttgcacaactgtggctatcgcaattgttgctgaaacatgttcaccttttacagttttgccagcattgatgaatgagtaccgtgtgccagaacttaatgtgcagaatggtgtcttgaagtctctttccttcctttntgagt

SEQ ID NO: 205924 - DNA, 328 bp, Gossypium hirsutum
caagcttcttgaaagcttcattttggttcaaaactggaggccgctgctgtgatggctccaccaattgaaactacagtcaagtcctctgactctcactgcgctccacatcctcctttgaatgaaaggatcctttcgtcaatgaccaggaggtccgtcgctgctcacccatggcatgatcttgaaattggacctggagctcctacggttttcaactgcgtgattgaaattgggaaagggagcaaggtgaaatatgaacttgacaagaaactggtttgatcaggttgatcggtgcttattcatcagtggtatctacactatggtcattctc

SEQ ID NO: 205925 - DNA, 386 bp, Gossypium hirsutum
ctgagggctagtatggatcgggttatggaggtaggacagagactgaatacgggtccgggtatgagaggaaaccaagttatggtagatccgaggaagaggaagaaggatataggaagccaagttatggtagatccgaggaagaggcagaaggatataggaagccaagttatggtagatccgaggaagaaggatatggccgcaagaaacatggcgatgacgacagtgatgatgatgatgaagagaagcgtcaccaccaccgctataaggcccaccaccataagcgccatgatgactatgacgactagtcagactggccgttccctctacaaatggaaatctgcagtaatagctattaaataaatgatcgaggcatgccacctttgatc

SEQ ID NO: 205926 - DNA, 392 bp, Gossypium hirsutum
cctcaagatattccaaaccccgactactttgagcttgagaagcctgactttgagcctattgctgctgttggtattgagatttggacaatgcaagatggcatattgtttgacaatattttgattgccaaaaatgacaaggttgctgagtcatacagggagaccacatggaagcctaagtttgaggttgagaaagaaaaacagaaggctgaggatgagtccactgattcagatggattttcagccgtccagaagaaggtctttgatgtcctttacaaggttgctgatattcctttcttaagtgaatacaagcttcaaatccttgatctcattgagaaggctgagaaacagccaaacatcaccattggtgtcatcgtctccattttggtgattat

SEQ ID NO: 205927 - DNA, 393 bp, Gossypium hirsutum
tctccacatcgctgttgatctagtgaatgagactaagctagacgatgaaatcaaatcgtggctcgcatttgctgcccagaaagttgttgaagtcaatgcacttgccaaggcattggctggtcaaaaggatgaggccttcttctctgccaatgctgctgctcaggcttcaaggaagtcctccccaagagtgactaacgaggctgttcaaaaggctgctgctgctttgaagggctctgatcaccgtcgtgcaactaatgttagtgctagactcgatgcccagcagaaaaagcttaaccttccaatcctccccaccacaaccattggatccttccctcaaaccttggagctcaggagagttcgtcgtgaattcaaggctaacaagatctctgagga

SEQ ID NO: 205928 - DNA, 403 bp, Gossypium hirsutum
ttatggtctcctaatgtttatttcttacttttggcaagacttttggatggttttggggttggtttggcagtaactctggtcccagtttacatatctgaaactgcaccacccgaaataagggggttgctaaatacccttccgcagtttactggttccatcggaatgtttttgtcttattgcatggtttttggaatgtcattatcggaattaccgaattggagattgatgcttggagttctttctattccatctcttatatattttatattaaccattttcttcttgcctgagtctccaagatggctcgtaagtaaaggacgaatgattgaggcaaaaaaagttttgcagagactacgtggcaaggaagatgttgctggtgagatggcattgttagtggagggac

SEQ ID NO: 205929 - DNA, 387 bp, Gossypium hirsutum
gattatctttattcaccagtagtcgtgaggcgccagaggatcgatctccggcgaattttgtccggctacgaaattccttatttttataataatgggagggggaacgcatcgtccgacgatggatctgctgcgatcggagccaatgcagttggggcaactcataatcccgattgagtcagctcatcgttccatttcttatctcggtgatctcggcttctttcaattcaaagaccttaattcagagaagagccctttccagagaacgtatgctacacagatcaagagatgcggggaaatggcacgcaagctacgtttcttcaaggaacagatggtgaaggctggtttatcaccctcgactagatctgcaattagtgatgatgttgattt

SEQ ID NO: 205930 - DNA, 396 bp, Gossypium hirsutum
ctttaacctactaaaatcggaactcaactcaactgggagaagacagtttcccaaaaccttaaaatccacgaaaaaacataaaaaacagacaccatgtatagagttgctctttcacgtttcagggctctcaagggccgttccggtaatttagcagctgcacgttatgctacttcgagtgccgttgctcctctggacacaccatcagacagcgtttcccttccgccaccactacctgattacgtagcacctagtgaaactaagattaaaaccctatccaatggtgtgagaatagcctcagagcaattaccgactcctgctgcctcgatcggcttattcattaattgtggttccatttacgagacaccaatatcatctggtgcctcccacttgctagag

SEQ ID NO: 205931 - DNA, 380 bp, Gossypium hirsutum
gtgctttttcaaccatccttgattggtatggaagctgcgggcatccatgagactacatacaattcaataatgaagtgcgatgtggatatcaggaaggacttgtatggtaacattgtccttagtggtggtacaaccatgttcccgggtattgccgacagaatgagcaaggagctttcggcactcgctccgagcagcatgaagatcaaggttgtcgctccacctgagcgaaagtacagtgtctggatcggaggctcgatcttggcttccctcagcaccttccaacaaatgtggattgcaaaggccgagtatgatgaatcaggtccagcgatcgtccacaggaaatgcttctaaatgttattggtatggggataggatgaaag

SEQ ID NO: 205932 - DNA, 371 bp, Gossypium hirsutum
aacacttccatgtttattcgaataaggagcataagagtacaaaaatcttaaaaatggatagaccatcttttcagttattattcttacaatccaatacacacaaacaaatttagaaaagcacaacaatgtgtaggtgtttgatgagggattactataattcagaaggctatttttgttgtcttaaagactctgcaatcttctttgacagacaataagcagtggactggacagtgatcattggatttacaccaacagcacttggcaaaatacttgcatcacaaacaaacaatccttcagcttcccaactctctccattttcatcaactgcaccttccttttcatttatccccatcctacagcttcccatctgg

SEQ ID NO: 205933 - DNA, 392 bp, Gossypium hirsutum
ggttgaggtaaatttcattacagcaactggtccaggccgtttcgttcgtctttacggtgcttccctccgtttgaacacttccagatctgaagaaaaatgcctcccgccgctcctcgatccggagatgcgatcttcgccagcgtagaacgcgtgaatgcagaactattcactttgacttatggagcaatagtgcgtcaattgcttactgacttggaggaggttgaggaggttaacaaacagcttgatcaaatgggctataatataggaattagactaattgatgagtttctagcaaaatcaaatgtgtccagatgtgttgactttaaggagacagcggaaatgattgccaaggtgggtttcaaaatgttccttggggtcactgcatctgtcat

SEQ ID NO: 205934 - DNA, 387 bp, Gossypium hirsutum
attttgttttccaaagcaagtcaagtattccctgactggtctgcgatggtcagaaaacttcgtgccatggcttacaatgctgaagaccagattagggcacggaagaatgaagagtcatatcttgttcaacttgctggaaggactacccctaagggccttcactgcctctctatgcagctgacagcagaatatttttcccttcaacccgaggaaagggagttccctaaccaaaaaaatttgaatgatccggacctttatcactatgcagtattttctgacaatattctggcttgtgcagtggttattaattccacaatttcatctgcaaaggagccagagaaaattgtttttcatgtggtgaccaattacctcaacctcccagcaatg

SEQ ID NO: 205935 - DNA, 397 bp, Gossypium hirsutum
  unsure (1)..(397): unsure at all n locations
aagtcatttaagacagtaagactgcatggaggactgatgaagaatttgccagagaaatgctggctggagttaaccctgttataatccgtcttcttcaagaatttcctccaacaagcaacctagatcctaaagtatatggtaatcaaaacagtgccataaccaaggaacacattgagcacaacctagagggactaacagtagaagaggcactgagaaccaacaggttattcatattggatcatcatgattcacttatgccgtacctgcggaggataaacactacgacaaccaagacttatgcgtctcgaaccatcttgcttttacgcaatgatggcactttgaagccattggtgattgaattgagtttgccacatccgaacggngatcaattaggtgc

SEQ ID NO: 205936 - DNA, 396 bp, Gossypium hirsutum
aatacacatcatatacttcattaaaacataaatcaagcgaagtgatgttaacattagatacaacattcaaaattaatttcactagaacaaacgatataacataaactataaccattcagaatctctatgcatgcaaagagattcagcattgctacatggatgaatgcacacacacatttcccactcaccatcttttttattaacaatataattacgatatcccatgaaattactgcatgatgatggcacatgcaccagtgtcatatggcttaaggcttaatgctcgagccagactgagtaaacatggacttcggccattcaggcattttaacccactcagggtactctgcctttctcaggtttcttctcctcttctttttcatgctttgggaactc

SEQ ID NO: 205937 - DNA, 388 bp, Gossypium hirsutum
gaaatgttgtgatctctgtacctcttccagctcttcgggaggcaccaaatgtcaggcagattgatggtgaatggaggtatgatcccagaaattccatcttagaatggtccatacttctgattgataactctaaccgcagtggatctatggagtttgtggtgcctccagcagactcatcagtgttcttcccaatatctgttagattttcagccactagtttatacagtgacctgaaggttgtgaacattattcccctgagaggtggagctactcccaagttctcgcagaggacaaatttgagtacagagaattaccaagttgtgtgaatgttaatatcaatattccaagtgtactaataataggttgcgacactttttggtgaactttg

SEQ ID NO: 205938 - DNA, 384 bp, Gossypium hirsutum
cagatccttagtaagtgagactccatttacctttatccaatagccatggattctgcaactcgaagaagaagtcaaggaggcctcttcgaaggtctctacagagtcatcatgcgacgtaactctgtatacgtcacctttgtcatcgccggcgcttttctcggagaacgcgctgtggattatggagttcataggctctgggaatacaacaatgtcgggaaacgatatgaagacattccagtgctaggacagcgacaatcagaggaatgaaatcattatgccctttctggatgttttgaagaagtcattgaggattgggccagagcatatatctaattaggtagctatgctcattgttgcaataaactgttaattgtttttggttct

SEQ ID NO: 205939 - DNA, 286 bp, Gossypium hirsutum
tttcgatggtattgatagacattatctatatgccaatcggaacacagttttgtttgatattaacatgaaaggtctagatggtatacaaggccctgtatatgtcggcacggggtgtgttttcagaaggcaagctctttatggttatgaacctccaaagggacctaagcgcccgaaaatggtaacctgtggttgctgcccttgttttggacgccgcagaaaggacaaaaagcactctaaggatggtggaaatgcaaatggtctaagcctagaagcagccaaagatgac

SEQ ID NO: 205940 - DNA, 373 bp, Gossypium hirsutum
gtaaattttaggaccgactaatgaatcctgttctgatggacaagattgagaagcttaagcatgagctgaaccagagtctatcagcggctccaaattacacaatccttaaatataaacttgacatgttgaaggaggtttcgacagccaagagtctctccaaggctgctacaatgaagcaggaagttagtaagaaattaagtgaaatcatgggtcggcctgagataaaggagaagcttgaagcattagaagctgaggttcaaagttctggttcatcaagctttattgatttagatgaaggggtgaaggacaaaatactgaagttgaagagcgagatagaattggaaatgattagtgctctggagtctttgagttt

SEQ ID NO: 205941 - DNA, 389 bp, Gossypium hirsutum
tgataatttatcagaaggttgcaataaaaagggagattgtttggatgaagtaataggagacattgggaaagaagcatttttgacgaaggaattcgtgccttaccttctgtttgggctactccttgctactgtcgagacgatttcacccactgtcactttggccaccatgtatctactggacaacccatcggctttgcaacaattaacagaggagcatgaggaaattctaaagaacagagaagatgccaattctggacttgtatgggaggaatacaaatccatgacgttcactcgttacgtgattaatgaaacacttaggttagaaaatgttcttcctgggatgttgaggaaagttatagctgacattcacgtcgatgaatatacaatac

SEQ ID NO: 205942 - DNA, 309 bp, Gossypium hirsutum
gttatgattactacaaatacacctacccttgcactcctggagtttcttaccatggccggggtgccttgcctatctattggaactacaactatggagaaacaggagacgcattgaaggtggacttattgaaccaccctgaatacatagaaaacaatgcaaccttagctttccaggcagcaatctggagatggatgacaccggtgaagaaacaccaaccgtcggcccacgatgtgtttgtcggcaactggaaaccgaccaagaacgacacgttggccaagcgggtcctggggttcggagctacccataatg

SEQ ID NO: 205943 - DNA, 382 bp, Gossypium hirsutum
aatatgattattgctatacttcccatgtcagctgagtggaattggaacccagcaactgttggtttaatacagtcatcctttttctggggttatctcctcactcagattgctggtggcatatgggcagacactgtaggtgggaagacggttttaggctttggtgtagtttggtggtccattgctactgctcttactcctgttgcagctaaattggggttgccatttctacttgtcgttcgtgctttcatgggaattggcgagggtgttgccatgcctgccatgaataatattttatccaaatgggttcctgttgctgaaaggagtagatcattagcattggtgtatagtggaatgtatcttggctcagttactggtttggcat

SEQ ID NO: 205944 - DNA, 396 bp, Gossypium hirsutum
cggaaaactcaccgtaaattcatcatgtgtacattggagaaacgcggcaacgtctttattttaacatttaccggcgaagaccagcaccggtttaatcccaatctcatcggctcccttctcagccttctctctcaggtcaaggctgaagccactcgtggctcagctcttattacccaagcccaaggtaagttcttctccaacggcttcgatctcgactgggctcaagccgccggatctgaacaaggagccgcggaacggttacaccacatggtggctttgtttaagcccgtcaccgcggctcttctgttcctcccgatgcccaccgtcgccgccatcaccggtcacgccgctgccgctggatttctcctcgcgttgtctcacgattacctgatcatg

SEQ ID NO: 205945 - DNA, 370 bp, Gossypium hirsutum
aatctatcttatcgtctaaaccaagtccttcgatgggcgctcggttctgttgaaattttctttagtcatcattgcccagcatggtatggtttcaagggaggaaagctaaaatggcttgaacgattcgcatatgtcaacacaaccatctaccccttcacatctttaccacttctcgcctattgtaccctaccggcaatctgtttacttaccgataaatttatcatgccaccgataagcacctttgcaagtctattcttcattgccttgtttctttcaatctttgcaactggtattctcgagcttaaggggagtggagtaagcattgaagaatggtggaagaatgaaccattttgggtcatcggtggcattt

SEQ ID NO: 205946 - DNA, 391 bp, Gossypium hirsutum
ctttcatgtttcttttcgattcgttgtctgaaacggctgagttcgcgaggagatgggttccgttttgtaagaagcataatgttgagcccagggcgccggagttttatttcaatgagaagattgattatttgaaggacaaggtccatcctagctttgttaaagaacggagagccatgaaaagggaatatgaagaatttaaagtaaggatcaatgcattagtagcaaaagctcagaagaaaccagaagaaggatgggtgatgcaagatggcaccccatggcccggaaataacactcgtgatcatcctggaatgattcaggtctatctaggaagtgccggtgcactcgatgtggatggcaaagagctgcctcgacttgtctatgtttctcgtga

SEQ ID NO: 205947 - DNA, 392 bp, Gossypium hirsutum
cacacagttaacctcaccactcccttgcacttaagctggaaataatccataaaaaataaataaaacccaccgaaaattttgaagctttagacctgttgctttcgaacaaaccccagaaaaaagatgcaagcttggttctcagggagcagtagtgtaggtgatgggcagggaaaagaaggatcatcgcttttagctgattggaaccttatgcagctgcaagagaatcagaagatggctctgcgtttgggttcgatcttgagtctgctatgaggtctgccaatgatactgtctctggtaccttcaacgtcgtttcaaaaggtgtgagagatattcccggaaacttccaatccgccacgagtagtgtcccttcaggaaaagcacttctctatttt

SEQ ID NO: 205948 - DNA, 394 bp, Gossypium hirsutum
ttttaatgtctcttctcgaatctcagaagctcccttgctttgctcttccaccaaaggccacccttagatctcccaagttccatgatctccaccattccttctggctccaaagaggttgggaatctgaaaaagcctttcacgcctccaaaggaggtgcctgttcagatcacccactccatgccgcctcacaagattgagatctttaaatctttggagggctgggctgagaacaacattctgactcacctcaaaccagttgagaaatgttggcaacccgccgactttcttccagatcctaattctgatggatttcatgagcaagtcaaagagcttagggaaagggcaaaggagatcccagatgattactttgtagttttggttggtgatatgatca

SEQ ID NO: 205949 - DNA, 397 bp, Gossypium hirsutum
ccatcggttccacgagggccggttcagttgataagaagatcaactcatcgggaggattaactcgcaacctttcgtggttggcagtggaggagaatgatcagcaagagcaagagatggtagcaacagtgtgcatgagatgccacatgttggtgatgctttgcaagtcatcacctgcatgccctaactgcaaattcatgcacccaccagaccaaggccctccgaaactattcaagcaggggcttagcctcttgtgctagtaaggacaatcaagttttttatgtttaggataacaaattcaccccaacgtgtgttgattaaatctgtatttcttaattcgtcttgaaaagctaaatagtggtgctttaaaggttttagctgatttttatatatatacata

SEQ ID NO: 205950 - DNA, 387 bp, Gossypium hirsutum
cattcacctttgtggatattttcatcgtgacctaaagcgagagaatttgttggtttctagagacataatcaaaattgctgattttggtcttgcacgtgaaatcagttcacatcctccatacacagaatatgtctcaacacgctggtatcgtgcgcctgaaatacttcttcaatcatacctgtatacttcaaaagttgatatgtgggcgatgggtgctataatggccgagttgttcaccttacgtcctctttttcctggtgccagtgaagcagatgaaatctacaaaatctgcagtgtattaggtactccaactaagtatacgtggtctgacgggcttaaccttgcaagatctataaactaccaattcccaaaggtccctggtgtgca

SEQ ID NO: 205951 - DNA, 391 bp, Gossypium hirsutum
cggcacgttctttttgctagctaagctactgtgggagttattgttcttcagaacagcttctgcagtagctaataataacgttatatattatataaattttatacatcctttttaccctacgactccatatataagcaagtaaaaataaatatggctcgctctgtttcttcctttaagttccttggtgcttctgtttttgatgctctttatgtctccatatcaaggagaggttactcaggtgcaccgccggcggcagtgacggctagctttggtaggcctggagcgatggggaaagtggaacgaagatatgcgatgaaagagtcgtcgtcgtcggagacaagggcttattcttcagcttgggcgcctgaccctgttacggggtattaccggc

SEQ ID NO: 205952 - DNA, 398 bp, Gossypium hirsutum
tgaacctattccaccggtttatgcacctccaaagaaagagaagcatggacccaaaccaccaatgtatgaacctccaaagaaggagaagcctgagccaaagccaccagtttatacacctccaaagaaagaggagcctaaacctaaaccaccagtatatgaacctccaaagaaggagaaacctgagccaaaaccaccgatttatacacctccaaagaaagagaaacctgaacccaaaccacccgtatatgaacctccaaagaaggagaagcccgagccaaagccaccggtttatacacctgcaaagaaagagaaacctgaacccaaaccaccagtgtatgaaccttcaaaaaaacctccaatgtacgaacctaagccaccaaaaccaccggtttatacac

SEQ ID NO: 205953 - DNA, 396 bp, Gossypium hirsutum
aaagaccctgtgtttagcatattgttcgtagcattgggttttggtcaaggaagaagaaggagaaagataagtaatgtttttgagaatgatggaatctggggttcctgtttgccacacttgtggtgaacatgttgggttgaatgttaatggtgaaccctttgtggcttgccatgaatgtaatttccctatttgtaagagttgttttgagtatgatcttaaggaacgacgaaaagcttgcttgcgttgtggtagtccgtatgatgaaaacctgttggacgatgtcgagaaggccaccggcgatcaatcgacaatggctgcacatttgagcaagtctcaggatgttggaattcatgcaagacatatcagcagtgtgtctacattggatagtgaaatgac

SEQ ID NO: 205954 - DNA, 395 bp, Gossypium hirsutum
cttctgtttctaaagatgatccgtatggtggccagcaggatcgggtgcaacaaaatcctccaccgcctgtgaatcaatccagtgcagtgcctacaaagccctcacctccaccagttacagcatggcgtcctcaggcaatgccaccgcctccacttttcatgagcagcagtggaggttctggctctaattattcaggttccgagaacccacttccaccaccttcacctggtattgtgttaggtttctccaagaacagatttacctatgaagaattagcaagggcaacagatggcttctcagatactaaccttcttggacaaggtggtttcgggtatgtgcaccgtggagtactccccaacgggaagcaagtagcagtcaagcaactgaaggctgga

SEQ ID NO: 205955 - DNA, 391 bp, Gossypium hirsutum
cttgctggttttgttgctgttgagatcaccggtgggcctgaaattccattccatcctggaagagaggacaagcctcacccaccacctgagggtcgtcttcccaatgctactgagggagctgatcacttgaggcaggtgtttagtaatcaaatgggtcttagcgaccaggacattgttgctctttctggtggccacaccctgggaaggtgccacaaggagaggtctggatttgagggaccatggactaccaaccctcttatcttcgacaactcttacttcaaggagctcttgactggagagaaggacggcctgttacagttgccaactgacaaagttctcctttccgaccctgttttccgtccattggttgagaaatatgcggctgatgagg

SEQ ID NO: 205956 - DNA, 361 bp, Gossypium hirsutum
ggcaaccgttaccttagtggattacgatagaaccaaagagttgaagcaattcgacgacacaaaagctggtgttaaaggactcgtcgacgccggaatacttaacatccccaagattttcgttcgaccatccgaggaccttgccgccgacgaactgaattccagtcagaaaaccattgaagtcccgatcatagatgtaagcaacatcggagacagtatccggcgacaggagatcgtaaacgaagttaagattgcatcaggggaatggggtttcttccaagtgataaaccatgggatcccattaagtgttttggatgaaatgattgaaggcatacgtttgtttaatgaacaagatttggagctg

SEQ ID NO: 205957 - DNA, 395 bp, Gossypium hirsutum
tttggtaatgcgatacaaccagaaacaggcgctgagaaagaaaccatgtctcaagaagatcaagaggaagaagttgggaaactggccgtccgcctagccaacgccgtggtacttccaatggtcttgaaatcagccttggagctgaacataattgacacaatcttagccgctggtgacggcgcgtttctgtcaccttcccagattgcgagtgcccttccttcaaagaatcctgacgcaccagtgctactagatcgaatgctacgcctgttggccagccattccattctcaaatgcgcagtaaaagcaaaggaaaaagaagaaattgaaagactgtacggtgcaggcccactatgcaagttccttgttaagaatcaagatggagggtcgattgcacc

SEQ ID NO: 205958 - DNA, 395 bp, Gossypium hirsutum
gaaaaccctagctttacctttttgttctttgagaaacatcaaatcgcagagatggatctttcatagatttcacctcacatctctttctctttgtaaaagaaaattgggtttacttatttatttgggtcggattgggttggtttggttttagaaaagaaggaaggcgatgtcaaccccagcaaggaagaggctgatgagagacttcaagaggttacagcaggatccacctgctggtattagtggggctcctcaagataataatatcatgctttggaacgctgttatttttgggcctgacgatactccttgggatggaggcacgttcaagttgactttgcagtttacagaggattatgcaaataagcctccaactgtccgtttcgtctcacgaatgt

SEQ ID NO: 205959 - DNA, 386 bp, Gossypium hirsutum
ggaatgggtagtatcgagacattgtacgacagtttatcaagggtacagatgggctttctggggcttttgctgaatgcctttgtggaagcccaaacttatatcaggaaggaggagggaaaccatggaacagtgtcaactttatatgtgcacatgatggttttactttggctgatctagttacctataacaacaaacacaacttagcaaatggggaagacaacaatgatggagaaagtcataactatagctggaactgtggacacgtatatgaaattggcacggaggatagaatttgtccagcttgatggcttgaattggaaacactaccattgtcagtatccattagatacatgttatgatttacaaaccactcccccccccccccc

SEQ ID NO: 205960 - DNA, 363 bp, Gossypium hirsutum
tggaaagaagctttgttatgttcaatttccacagagatttgatggtattgatcgtcatgatcgatatgctaatcgaaacgtcgtcttcttcgatatcaacatgttgggattagatgggcttcaagggcctgtatatgtaggcacagggtgtgttttcaacaggcaggcattgtatggctacgatccaccagtctctgagaaacgaccgaagattacatgtgaatggctgccctcttggtgttgctggtgttgcagaagttctaggaagaaatcaaagaagaaaggcgaaaagaagggcttactcggaggtcttttataccggaaaaagaagaagaagattattggccaaaactattttaaaaa

SEQ ID NO: 205961 - DNA, 390 bp, Gossypium hirsutum
aaatagactttgaggaagctgctagcctgggcctatcatttctgcttctgttgggataaaacataaactcaaattgctccggcgccgacaataaagggggacaacatcactggcattctcaaaaaaggcggccaatacaccactttcatcaagctattgaaagccacacacgtggctgatcaactaaacagccagctaagcacaccggaccctaacgacaggttaacggagaaagcgccgagtgacagctcgaacttcggactcaaaccctggacgatgaactcactgtccgacaaagagaacactgaacgggttcaattccatatactcccgacgatgatgaaaacgaaccagactgaaacagcgagtcaccctttgagaacccaagct

SEQ ID NO: 205962 - DNA, 301 bp, Gossypium hirsutum
aaatactctgcaacttgcagattatttaagtaccaagaactggtttcggctacatcgaatttcttggctgaaaacttgattgggaaaggaggcagcagtcaggtttacaagggttgccttcgagacggcaaggaactcgcggtgaaaatcctaaagccttcagaagaagtgttgaaggagtttgttatggaaatcgagatcattactacattacatcataagaacattatatccctcttgggattctgctatgaggataataaccttctcttggtttatgatttcttatcaagaggaagcc

SEQ ID NO: 205963 - DNA, 297 bp, Gossypium hirsutum
gggacctgaagatcatttacatctagagggctttgcattgaatgtctttggaaaggcagacaaacaagatcgtgctggacgagcagacctgaatacggcaaagacattttacgctgccagcattttcttcgagattataaaccagttcggtgaacttcagcctgatcttgagcagaaacagaagtatgcggtttggaaagctgctgatattaggaaagctttgaaagaaggaaggaagcccatcccgggccctccaaatggtgatgaagatttgtcaattccatcagctacatctgg

SEQ ID NO: 205964 - DNA, 302 bp, Gossypium hirsutum
taggcatggtctcctggagaagcttcgccgggcagatagcagcagctccagctcttcaagcgacgaggaagaaggtgaaggagaagagaagaagaagaagaaaaagaaggagaagaaggggctgaaagaaaagattgaagagaagttagaaggagaaaagaaagaagaggacacctcagttccagtagagaagtgcgatgagccagtagtccagccagagacgccagagaagaaaggtttcctcgagaagatcaaggagaaactccctggacaacacaagaaagctgaagaggccagtagcc

SEQ ID NO: 205965 - DNA, 304 bp, Gossypium hirsutum
ttttagtagagtttgatggagggaatgggaaagcggaaaagaagaaaaaaaagaaggttttgcttgggaagggaactagtgttattgtggagatgataaaggataggttgatgagtaagggagagggtttagagaaaatagttgaggaatttttatcatttttagatccaaaaagtgcagattttgatgggttgttgaagaaggtgaaggagattttggagagcaatgaaagtagaagaatccccaagacccctaagggtactcgggattttgcgaaagagcaaatgacaataagaaagaaagc

SEQ ID NO: 205966 - DNA, 290 bp, Gossypium hirsutum
gtggcagatatgtgcctagagctgtgttaatggatcttgagccaggaactatggacagtttacgaacaggtccttatggaaaattgtttagaccagataactttgtgttcggccaaaatggagctggcaataactgggctaagggacattatactgaaggagctgaattgattgattcagttcttgatgttgttcgtaaagaggctgagaattgtgattgtttacaaggttttcaggtttgccattcactgggaggtggaacagggtcagggatggggacattgttgata

SEQ ID NO: 205967 - DNA, 311 bp, Gossypium hirsutum
  unsure (1)..(311): unsure at all n locations
tcgagacnnttgatcgataccctttggcagtgnntctgtgaatnntggatttannatcttcaacttccataagggcctattatatanttggatnngaactcttacttgctggtgaaccttcaagnagtcgagcaagaaaactgttgcacgtttaatagctgcacaggattcactggtggagaccgcgaaagagcaggccagttccattagcaatataattgcacaggccacaaagtaggttatgaccgagagtggttgcggattgccatttgtattgggggtggttntggtgtctcatctgttgtgagaac

SEQ ID NO: 205968 - DNA, 297 bp, Gossypium hirsutum
gttccccagaccacccaaaagccagaagaacaagagccaaggttcattcctgaaacccaaaatggttatggcctttacggccacgagtcaggctcaggctcaggctcaggctcaggctcaagccggcccagtttcaccaccaaagaaacctatgaaccctatgtcacccctgttagattccaccctgatgagccctataacagcatccccgaatcctccaacaataaagacacttactactacaacaagaatgcctacgagtccactaagcagcaaaacttgggcgaggccattttc

SEQ ID NO: 205969 - DNA, 300 bp, Gossypium hirsutum
cttgagtgggctaaaatgcctgaatggccgaagtccatgtttattcaatctggctcggtcactaagccttgaaccatatgacactggtgcatgtgccatcatcatgcagtaatttcatgatatatagtaattatatagttaataaaaaagatggtgagcgggaactgtgtgtgcgcattcctccatgcaccaatggtgaatctctttgcatagagattctgaatggatatagtttatgttatattgtatgttctagtgaaattaattttgaatgttgtatctaatgttaacatcacttgg

SEQ ID NO: 205970 - DNA, 302 bp, Gossypium hirsutum
tgaagttggatgaagtggggggaaaggatgaagaactcgatctcaatcataagaaattgcaagaacagatcattgaagctgagcagagatacagtttacagctaagcaatttgcaagaggctttgcaagctcaagagacgaaacagaaggaactcactgaagtaaaagaagcatttgatggtctcaatattgagatcgaaaactcgagaaagaggatgcaagagttggagcaagatctgcagagttccgttgaagaggctcggaagtttgaagaactgcacaaacaaagtggttcacatgct

SEQ ID NO: 205971 - DNA, 290 bp, Gossypium hirsutum
taagaatgtgaaaagccaatgaggcaaggagttctcactcctggacgtgttcgtcttttgcttcacaaaggtctgtggactttgaaatatttttcagagcattgcactagagctgtgtatactgctccaattaaaacaattagcaaccagaagtatagagatttctatgggaagtttgatgttggccttctcacaggtgatgttagtttgagaccagaggcttcttgtctcatcatgacaactgaattgttaaggtcaatgctttatcgaggtgcagatattattcgtga

SEQ ID NO: 205972 - DNA, 292 bp, Gossypium hirsutum
gtcggatctaacttggaactgcgtttggtcttcttaccgctattcccgacctatctctaaccccctcaatttctctcaggctccaatccaggtagatattccttgtgttcaagcgtcttcatggcttcaaagcggattttgaaagaacttaaggatttgcagaaggatccaccaacttcctgtagtgcaggtcctgtagcggaagacatgtttcattggcaagcaacaattatgggcccctccgatagcccttttgcaggaggtgtgtttttggttaatattcattttcctc

SEQ ID NO: 205973 - DNA, 300 bp, Gossypium hirsutum
ttgttttgctttgcttaaaaaatcttgaatctgcactgtcctacttccctcgttatcgtcaatggcttcggacaagaagattaagatcgggattaacggatttggaagaatcggacgtttagttgccagagttgctcttcagaggaacgatgttgaactcgtcgccgttaacgatcccttcatttccaccgattacatgacatacatgttcaaatacgacagcgttcacggtcaatggaagcaccatgatcttaaggtcaaagactctaaaacccttctcttcggcgaaaaacccgtcac

SEQ ID NO: 205974 - DNA, 289 bp, Gossypium hirsutum
ggaacaactcctattgcttctgactctgatcgggcgtaaagtcttcaaccccaagtggaagccttatatcccagacttcaagctggcgtttgagcacttctgcatccatgctggagggcgagcagtgatagatgaactgcaaaagaacctgcagctgtcagcagaacacgtagaggcatccaggatgacattgcacagattcggaaacacctcctcctcatccttgtggtacgagatgagctaccttgaggcaaaagggaggatgaaaaagggagataggatttggcag

SEQ ID NO: 205975 - DNA, 288 bp, Gossypium hirsutum
ttctacttaatagttttgttgcattgtacccaaaactgatacatgaaacttataattaaagaaaggagagtgctgcacttaaattatgaagtgaacaaaaaatagtgtttggatgccaggaaaattatgaaaaaacaaaatcaagcaacaacttcttgttgtttagtagcaagctcgttctggatatgttgagggacgacatcaaacttggccagttgcatggtgtaggatgcacgacctttcgtcatacctcggagagtgctgacgtattggaacatctccgcaagc

SEQ ID NO: 205976 - DNA, 294 bp, Gossypium hirsutum
tgcattgggtccctgtggaccggatgatatgctccaacctctggtctgccgagctatcaaaacttgctgccaatgccttcttggcgcagagaatctcttcggttaatgctatgtccgcattgtgtgaggcaaccggtgctgatgtgagccaagtgtctcatgctgttgggaaagacacaagaattggacccaagttcttgaatgcgagtgtgggtttcggtggatcgtgtttccaaaaggatattttgaacctggtctacatctgtgagtgcaatggcctcccagaggttgcaa

SEQ ID NO: 205977 - DNA, 289 bp, Gossypium hirsutum
ggggttctgccacggaaagaaacaaaaaattttgggtgatctgtgttgaaaaagaaataaaatatggcgactttccagggaactcaacaaaaatgcattgcttgcaccaggactgtttttttgggggttaattgaccggtggttattgggtttttcataagggttgctttcgttgccaccattgcaagggttccctcaagcttagcaactacaacttatttgaaggggtgctatactgcaggccacactatgatcaactttttaagagaactggcagtcttgacaagag

SEQ ID NO: 205978 - DNA, 248 bp, Gossypium hirsutum
gtttcatacaccgccaaagagggagaggcctgaacccaagccaccgatgtatgaacctccaaagaaacctgcgagggatgaacctaagccaccgaagccaccggctattacacctccaaagaatgaaaaaccataacccaagccaccaatggattatcctcccaggctcataaagaaattagagggaatcagggttaaacaccagtctatgcaccaccaacggacgaaaagccttgacctaaaccacc

SEQ ID NO: 205979 - DNA, 302 bp, Gossypium hirsutum
atatggcatctggttggggaatcaacggcaccaagggcaggtgctacgatttctgggttgacttcagcgagtgtatgtcccgttgcagagagcccaaggattgtgctctccttcgcgaagactatctcgagtgtctccaccattccaaggagtttcaacgaagaaaccgaatttataaggaggagcaacgtaaactaagagccgcagcacgaaaggacaaggaaggtgaagccggtgttcatcatcatagatagtgagaatttgttgatccttttaaattcccaagaataatagaatgtcat

SEQ ID NO: 205980 - DNA, 293 bp, Gossypium hirsutum
tctagccaaatactactcctggaacggtcttcaatttgttagcaaccccgttagaacccaagctggtcaggatttcggcctcaacgtcactggcctgaacaaccaggttaacgtctcaagcggggttgtcgagactcagattaacaacgcattatatcaaaagaaacctctggcaatttatcaagcggacaaggtgttgttgcctgaagagttttttgaagctaaatccccagcggctgcaccttcaccggcgacaaagaaatcattgacagggtcttaatcgaactcaagag

SEQ ID NO: 205981 - DNA, 297 bp, Gossypium hirsutum
ttcgagcttaactgcatctgcatatgctgccgctcctggtccaaaagaagttgaaacaaaggatgataacaagggtgatccatatgaagtaggggaagcagaaacttctcatgctttattcatgtctggtcactttgtcttcccccctagcgagcatgagaatttgccattggaacccgagaatagtagtgaacgtgtaggcaaggacgtggtccatgaattaggtgttgtagaagaaggtggtagatctaggacaaaggaagaagaagaagattggtctttgagagggttgaatgt

SEQ ID NO: 205982 - DNA, 302 bp, Gossypium hirsutum
ttcgaggtttttttttttttttgttttgcaccatctaaatatgaacactcccttttaataatgatgataataatagtaatataataataacaaaatttgatcctaatttatcttaagcatgcaagtgccatgcattattacttaccataagctttacataaatatattcaaaaacagaagagatataattgaaagaaaagaaaaatggttctgctagagaaactttgggatgatgtagtggccggtcctcaaccggaacgtggccttggccggctgaggaagatcaccaccaccccaccctt

SEQ ID NO: 205983 - DNA, 287 bp, Gossypium hirsutum
ttcgagaacaaaggagaagataatcatggaaccaagagtgggaagaagaacagcaacaagaaaaacaataacaacaacgacaataacaacgaaaacaaggatgggaaaagtgctgctgataaaaggtttaagacactgccaccatctgaatcattgccgagaaatgaaactgtcggcggctatatttttgtctgcaacaacgataccatggaggagaatctcagaagacagctctttggtttgcctccacgttaccgtgattcagtccgggcaataacttcgggcct

SEQ ID NO: 205984 - DNA, 296 bp, Gossypium hirsutum
taaagtttgatagtactttattttgataaaaataaaatgccgatttctcgaattgcagtcgggtctccggccgaagccggccaagcagatgcactcaaggcggctttagccgagttcatttcagtccttatttttgttttcgccggtgaaggctcgggcatggctttcaacaagttgaccgacgatgactcgtcgacaccagcgggtttagtagctgcggcattggctcacgccttggcgttgtttgtggcggtttcggtcggagctaacatttccggcgggcacgtaaaccccgc

SEQ ID NO: 205985 - DNA, 298 bp, Gossypium hirsutum
ttcgagttggagtctaccacagagattggaaggctgaaaatcttttacttgattcccaaggaaatttaaagatttcagattttggccttagcgcgttgccataacaaggagttagcctacttcggaccacgtgtggaactcccaactatgtagcaccagaggttcttagtcacaaggggtatgatggtgctgtggcagacgtctggtcttgtggggtcatcctttatgttctgatggcaggttatcttccatttgatgagcttgatctcaccacactatacagtaagattgagagagc

SEQ ID NO: 205986 - DNA, 301 bp, Gossypium hirsutum
tataatcattatcgttcttcaggcaaacgccacgctattgcttttgtttgcatacacaatcaggaaagggtatggcagccgaggacaatttggacttgtcaactctgcaatctcagcttagtgaaactcatgaactgtggaagcaggagattgaaaatcgtcgaggccaagtagacgtgttacaagccaaaattatggaggtaaaggcttctatacaagggtcggaagaggagtcgaagaaggagttagatgttctttggcgaagggtagaaactaccgcgaccttattgacttacttgaa

SEQ ID NO: 205987 - DNA, 291 bp, Gossypium hirsutum
aagaaatccaagttgggtttcgctgtctacccatcaccccaggtctccacatctgttgttgagccctacaacagtgtcctctcaactcactcccttttggagcacactgatgtggctgttcttcttgacaatgaggctatctatgacatttgcaggcgctctcttgacattgagcgacccacttacaccaatcttaaccgtcttgtctcccaggtgatctcctctttgactgcttcacttaggttcgatggtgccttgaacgtggatgtaacagaattccagaccaacttg

SEQ ID NO: 205988 - DNA, 291 bp, Gossypium hirsutum
gtactccgatcaagcattgggtgcggcagtttactctcccacccataagtctgctgttttaaatcaattccagcagcagcaaagcatgttatcacctataaacacaaatttttctcctaaaaatattgaacatcctttgttgcaggcttctctatctggtaggatgtctccacgaaacgtagaacctatctcgccaatgagctctcgggtttcaatgttagttcaacgcgagaagcagcaacagttccgcagcctaagctctagggagcttggttctggctcctctgccac

SEQ ID NO: 205989 - DNA, 291 bp, Gossypium hirsutum
ccttatctctccattctttaggctattgctgccaaaagtctcctcctttctccctcaaatcttcttttctctcaaaacccacaaaaacccagttttcttttgccttcaaaactaccgagaagaggcctttttcgcatatagtctcaatgagcatggaagcaggcattggagtaatgggcacaaagcttggaatgatgagtttctttgaaactgatggcacagttgttccagtgactgtagttggttttagagaaggaaatatagtgacccaagttaagacatcggctactg

SEQ ID NO: 205990 - DNA, 301 bp, Gossypium hirsutum
ttcgaggtttgagctagctagcgtcttactcaaatggcaaccaaaacgatgatgttgcaaatattttcacttttcttctttttgttcagtatctgcaactccattttccttggtgctaatggagatgacaatggtggttggcaaactgcccatgccaccttctacggtggtgctgatgctaccggcacaatggggggagcttgtggttatggaaacctgtacagtcaagggtatggaacgagcacagcagctttgagcactgcacttttcaacaatggcttgagctgcggtgcctgctacg

SEQ ID NO: 205991 - DNA, 296 bp, Gossypium hirsutum
agacgaaggttcacaagagtatgctgagtttcttcaccttcctaagagaagattcactgattttggggcggtccggaatgaaattcaggaggaaaccgatagaattactgggaagaccaaacaaatttctcctgttcctattcatctcagtatctactctccaaatgttgtcaacttaaccctgatcgatttgccgggcttgacaaaagttgctatcgagggacagccggaaactatagttgatgacatcgaaacaatggttaggtcttatgttgagaagcctaattgtatcatac

SEQ ID NO: 205992 - DNA, 291 bp, Gossypium hirsutum
aagtaggcatccagtaccaatgtctctagctgtgagaacttccttaataaacaagtactccagaagctttgaaacgggttcaacacaaggtgggcttttctccaaagcaatggagatcgcttctttaacaacctcagggtggtatgctggagattttagttcctccacgcactgtaatgcttcatctagtagcctaacgctgaaatattcctctaacaatgcccgtgtttttctctgaagatcatctgtattcagccttgcagcctgagttagtggtttctccaccggagc

SEQ ID NO: 205993 - DNA, 301 bp, Gossypium hirsutum
tatcaagtggccgtctcgttgggatgcttatttgaagatggaaggatcgaaagttcattggttttcgatcttgaattcccttatggtgatcactttccttgctggtatagttcttgtgatctttttaaggactgttaggcgggatctgactcggtatgaggagcttgacaaggaggctcaagcgcagatgaacgaggagttgtcggggtggaagttagttgtcggggatgttttccgtgccccgtcccatcctgctcttttgtgtattatggtcggtgatggagttcagatccttggtatg

SEQ ID NO: 205994 - DNA, 278 bp, Gossypium hirsutum
ttcgaggtggacaatgtgggaaccaagtcggttccaagttttgggaggttgtttgcgatgagcacggcatagatccaactggaaggtacattggttcctcggatctgcagttggagcgtgttaatgtttactataacgaggcttcatgtggtcgctttgttcctcgtgctgtgctcatggacttggagcctggtacgatggacagtgtccgaactggtccttacggccagattttcaggccagacaactttgtttttggacaatccggtgctggaaac

SEQ ID NO: 205995 - DNA, 287 bp, Gossypium hirsutum
gatcaatgtccaaaacaagaactcttcgtattttgtggagtggattccgaacaatgttaaatcaagtgtttgcgacatcccaccaaccgggttgacgatgtcatcgacgtttatggggaactcgacgtcgatacaagagatgtttcgacgtgtttcggaacagttcacagtgatgtttaggaggaaagcatttttgcattggtatacaggggaagggatggatgaaatggagtttactgaggctgaaagtaatatgaatgatttggtttctgaatatcaacaatatc

SEQ ID NO: 205996 - DNA, 307 bp, Gossypium hirsutum
tttcgcttgaaacctggcaatggtttctttgtcgacttggggtcgatacttggttcacaagatcgagtactccttcactctcggctggaagagctataagagagggcaaatcagtgaccgggaattacaagatgcagtttggaaaaatgtgtttcagggaaaattgacttacttacactggagtaaaggagaggcaatggccccaactattggagaacaagggggtactcttctcgtacggaagattccatctgcagacccaggtcgagtttttgttggggatgtcattgtcatgaaggaccctgac

SEQ ID NO: 205997 - DNA, 302 bp, Gossypium hirsutum
ttcgagggaccgaccaccagcctatcgaggaagcagctcttggaaatattcctaccattgctttttgtgacacagactcaccaatgcgatatgttgacattggtattcctgctaataacaagggaaagcacagcattggttgtcttttctggctgttagctaggatggttcttcagatgcgtggtacaattgctcctggacagaagtgggatgtgatggtggatctatttttctacagggagcctgaggaagctaaacaacaggaagaggaggaagcagttgctgctcctgattatggactc

SEQ ID NO: 205998 - DNA, 288 bp, Gossypium hirsutum
ttcgagcgagtcttatcaagggggcgttgagatgataagaagggatttactcactggccattggaaaccctatcttgaacgtgcaatcacgatgaaaccatgttatgagggaggaattaatggtggtgaggaggcagctaacatattgcaagagaccgttattggcaagaattatgcttaacacaagttgagtggggatcgaaggatacctgatgctataactcttgtgtatcaactgcaaagggtcctaggcggagatgaaactatccctgaatggtacacacatgc

SEQ ID NO: 205999 - DNA, 298 bp, Gossypium hirsutum
ggcgagcggaggaaaagtgtcatttaaagtcactcttacctctgatcctaagctccctttcaaagtgtttagcgtgcctgaagcagccccttttacagccgtcttgaaattcgcagccgaggaattcaaagtccctcctcaaaccagtgctatcatcaccaatgatggtgtgggaatcaatcctcagcaaagtgcaggaaatgtgttcctcaaacatggatcggaacttcgcctgattccccgtgacagggtgggagccttttgaaataacaaaaacttcatttgttatctctgagtg

SEQ ID NO: 206000 - DNA, 296 bp, Gossypium hirsutum
gttgaaagagaggctgaaatcgcacctgagcaacaaatggaagataaaccggcaccggatgcttcccagcccctctcgactataattccaatcccgaaaagcagacttgcaccataccgaaccgtgatcattatgcgattgatcattctcggtcttttcttccattatcgagtaacaaaccccgttgacagtgcttttggactgtggctcacttcagtcatatgtgaaatctggtttgctttttcctgggtgttggatcagttccctaagtggtatcctgttaacagggaaacata

SEQ ID NO: 206001 - DNA, 296 bp, Gossypium hirsutum
atggaatgtggagcttgaacagcagtggaatttggtagagttaaaaggctttgaatccgagaaagaactgaaggaatcttcagagaaaatatctgaacttaccaacaagttgggggaggtcatggaagaaaagaatcagctgaacaatcaaatgcaggaatatcaggagaagataaatcagctcgaatcagctctaaatcagtcaacaacacagaacttggagctcgcggaagagttgaaggttgctttagagagaagtgctcaccatgaggacagagctaatatgagtcatcaac

SEQ ID NO: 206002 - DNA, 307 bp, Gossypium hirsutum
ttcgaggtgatatggattttgtttgaaatgctggaataccaccttctaacactagtgtgtcatttgttgatacttgctcttgcattactcttcttgtggtcaaatgctgctaccttcattaacaagtctccaccaagcatccctgaagttcaaattcctaaggacccagttatggagtttgctcaggcactttggtttgagatcaaccgggcttttgctgtcctacgggatattgcatcaggaagagatctcaagaagttcctatctgtgatcgccggcttatgggtcttgtctattgtcggaagtt

SEQ ID NO: 206003 - DNA, 297 bp, Gossypium hirsutum
ttcgagtttacctctatatcagaaggcgttgtgtggtctgactgctggtgctattggagcctgtgttggcagcccggctgatttggcacttatccgtatgcaggctgatgctactttgcctgttgctcagcgcagaaattacaccaatgcattccatgcactctatcgtattgttgtggatgaaggggttttggctctttggaaaggtgcaggccccaccgtagtcagagccatggctttgaacatgggaatgcttgcctcttatgatcaaagtgttgagttttgcaaggattccct

SEQ ID NO: 206004 - DNA, 290 bp, Gossypium hirsutum
tccgaagacattattgacgtcgtgcggaaaatagaaaaggagcaaattgatgaacatggtcatgcttggctcaccaaaaatcatatcaaggcagtacttttgaacatgttcttgggcggcgttgacaccagcgcgcttatagtgatctgggcaatggcggagctggcgagaaagccaacatttatgaagaaagctcaggacgaagttcgaggggtggtggggaagaaaggaagagtaacagaaaccgatctggatcaacttcaatacctgaagatggttttaaaagagac

SEQ ID NO: 206005 - DNA, 292 bp, Gossypium hirsutum
gttcacttgtctttgaatgagagaacagggtctggatttgtgtctcaagacctttacttgcatggttacttcagtgcctcaataaagttacctgctgattatactgctggagttgtggttgctttctatatgtcaaatggtgatatgttcgagaagaaccacgatgaaatagattttgagttcttgggtaacatcagaggcaaagattggaggattcagaccaatatttacggcaatggaagcaccagtgttggcagagaagaaagatacaatctttggttcgacccggctg

SEQ ID NO: 206006 - DNA, 296 bp, Gossypium hirsutum
tccaagttttgggaggttgtttgcgatgagcacggcatagatccaactggaaggtacattggttcctcggatctgcagttggagcgtgttaatgtttactataacgaggcttcatgtggtcgctttgttcctcgtgctgtgctcatggacttggagcctggtacgatggacagtgtccgaactggtccttacggccagattttcaggccagacaactttgtttttggacaatccggtgctggaaacaactgggccaagggccattacactgaaggagccgagcttatcgatgccgt

SEQ ID NO: 206007 - DNA, 299 bp, Gossypium hirsutum
taaaacacaccctaaagagacgatgagaaagctgctagcctttgcctttcttttcttcttcttttgggataaaacattagctcaaatagctccggcgccgccgttaaaggtggacaacatcacttccatcctcgaaaaaggtggccaattcaccactttcatcaagctattgaaagccacacaggtggctgatcaactaaacaaccagctaagcacaccggaccctaacgacgggataacggtgtttgcaccgagtgacaacgcgttctccggactcaaacccgggacgttaaactcac

SEQ ID NO: 206008 - DNA, 297 bp, Gossypium hirsutum
ttgagaatgatattagtgatggcctagaccttacttttagcattgatgctgacgaggagaagttgatattgtatgaaaggacacaggtgactgactatgagctgattcccggtgggcggaacattaaagttactgaggagaataaacaccaatatgttgatttagttgctgagcatcgtttgacaactgctattcgtccacaaatcaatgcatttttggaaggattcaatgaattaattcccagggaattaataactatttttaatgacaaggagctggaattactgataagtggtc

SEQ ID NO: 206009 - DNA, 284 bp, Gossypium hirsutum
ttcgagctagaactcagaaacatacctggatagagttggtcgatcaggaaggtttggtcatcttggattggctgtgaatttgatcacttatgaggaccgctttaacttgtataggattgaacaagaacttgggactgaaattaagcaaattcctccacacatcgatcaggcaatttactgccgatgatatatgcaggatatttcctgctttgcctatggtggtgaacaacgggtcaatggagctgatctatcaaggtgtttgccctggcaaatgggtgtgcgtt

SEQ ID NO: 206010 - DNA, 303 bp, Gossypium hirsutum
  unsure (1)..(303): unsure at all n locations
cgccttctttttaccttcgatttccatttacttcgctattgctacgtttttgaatttttagtgagcgaaaatgagagagtgcatttcagtccacatcggtcaggctggtattcaagtcggaaatgcctgctgggaactttactgccttgaacatggaatccagcctgatggccagatgccaagtgacaagactgtcggaggaggtgatgatgcttttaacacctttttcagtgaaactggtgctggaaagcacntncctcgtgctgtctttgtggatcttgagcctactgttattgatgaagt

SEQ ID NO: 206011 - DNA, 335 bp, Gossypium hirsutum
gagaacagaggacccccggctgcatgaattccctttagtttagaagaggattggacaaaattggtgaataaacaccaatcactcaatgaggaagatctattgcgctattgtttttcttcagcatattttgtggccttgcttcacgatagccttgaaattgcttagcatgattaaaggatcagctttgctaatcatgtcaaccatataccattagattgggccttgggagctttcatattgcaaagcacatccatctcagatgtgcaacaaactgactggataactattattatgagcagtgattcatccacactaatttcaatcaccgatatttc

SEQ ID NO: 206012 - DNA, 257 bp, Gossypium hirsutum
gtagcacatgcggttgggttctgggattaccattccttcattactgctgctgctcagtatcagcctcatggatttggtaccaccggggaaaagctccagaatatgaaggaagtcgctgcttttcttggacatgtcggcagcaaaacttcatgtggctatggagtcgctaccgggggaccattggcttggggtctttgctacaacaaagaaatgagccctaacaaaatatattgcgatgattactataaatacaccta

SEQ ID NO: 206013 - DNA, 300 bp, Gossypium hirsutum
gaaagccggtgtttgtgaaagtagatcagctaaaaccagggacaaaaggccacaccttagtcgccaaggtattgtcctctaacatggtccttcaaaagggtcgagccgcttctcgaaatctccgccaaacccgcatcgctgagtgccttgtaggagacgagaccggcactgtcctcttcactgctcgtaatgagcaagttgacttgatgaagcccgatgacactgtaattcttcgtaatgcgaagatcgatatgtttaagggttctatgaggctggctgtcgacaaatggggccgcatcg

SEQ ID NO: 206014 - DNA, 302 bp, Gossypium hirsutum
cagcaaacaaaaacctgggagtgatctccggttttatttagatttcattttggatcagatcttggcttatcttcacatttcggcatcgtcttcggctgccgttcgagttgatgattgggaatccaactggggaaacgacaagttcccggagatggcaagggcgtccgtggcattgtctctggtagcattcattgccttggctttaagctcacttgtctctggttataatctttgtacttccaaatctatctagccaataatataccttctggggtatatatatacatataaatatagctttg

SEQ ID NO: 206015 - DNA, 297 bp, Gossypium hirsutum
ttcgagttcgaaggaagtatgctgctgggtcagatagatgctcagcatttgcttctcaattacttgatgagcagttgacggcagtcatatatttacaatctgtaatccgtgggtggttggcccggagacatttcaacaacatgcataatttgaaacagtcaaaccgtggaagtgtaaaatctagacgaaagatgggtaggaagatttttgaagcaaaggacatgctccatgaacaacagattcaagttctaccttctgtaatggcagaactccaaagaagggttctcaaggcaaaaa

SEQ ID NO: 206016 - DNA, 303 bp, Gossypium hirsutum
ttttaatcgatatggctagctcaatgtgccttaagcttgcatgtgtggcggtgttgtgcatggtggtgggtgcacccctggctcaaggggccgtaacctgtggtcaagtcacaagctccctcgcaccctgcattggttacttgacagggaatggtgctggtggcgttcccccaggttgctgcggcggcataaaatctctcaactccgccgcccaaacaacaccagaccggcaagcagcttgcaaatgcatcaaaagtgcggccgccggcatttctggcatcaactatggtattgcaagcggac

SEQ ID NO: 206017 - DNA, 305 bp, Gossypium hirsutum
gtgtggtttcatggggaaggttgggaatctggcactacagtttcttaaacaaaagctggatgatgacgaaggatacggtaaaccggcacttgagactgaagtgagtagcaagcaagaggcttatgcaggagctggtaagcactctcttcctgacagtggaattcttatcagcggctgccagaccgaccaaacttcagcggatgccagcccatcagggaatgcaagcaaagcttatggagcacttagcaatgctattcaaaccataattgccgactcagatggctcaattactaataaagagcttg

SEQ ID NO: 206018 - DNA, 300 bp, Gossypium hirsutum
ttcgagcttttctctctctctctctctgtctctctctctctctcgcctcggacgtttgttttcttttcatttctttaggagggtggtcaatatggggtcttcgattttgccagatctcggagctgagatcttgatccccgtttgcgccgctattggaattgtcttttctcttgcacaatggcttcttgtttccaaggtgaagctctccccgggtcgagactcgggttcccccggtaacaacggtgcgggtgggaaaaacggctattccgattacctcattgaagaagaagaaggtcttaa

SEQ ID NO: 206019 - DNA, 290 bp, Gossypium hirsutum
ggttgtcaaggttcaggaatgaaagtctccatcagacaccttggtccttccatgatccaacagatgcagcacccttgcaatgattgtaagggtactggtgagaccatcaacgataaggaccgttgcccccaatgcaaaggtgagaaagttgttcaggagaagaaagtcttggaggttaatgttgaaaagggtatgcagaacggacagaagattactttccctggagaagcagatgaagcacccgacacagttactggggatattgtatttgtcctccaacagaaagatca

SEQ ID NO: 206020 - DNA, 299 bp, Gossypium hirsutum
gtttctatttctagttgcactaccaattgtgtagctccagtggccttggtggtccatgaggaattcgatatcgaagagggtttaatgacaactgtccacgcaactacagcaactcacaagactggtgatggccctacaatgaaggactggataggaggtagaggagctgtccaaaatattatccctagttcaactggtgctgcaaaggctgttggaaaagttcttcctgaacttaatggaaagcttactggaatggcattacgtgattgtacacccaacgtcactgttggggatttaac

SEQ ID NO: 206021 - DNA, 389 bp, Gossypium hirsutum
ggatgattttcggaagtatgttaatactgggcgccgaggcctttacaaccaaatccggtaagaaagtcagcaaggctcccaaaattcagaggttggtgactcctttgaccctgcagaggaagcgttgcagaattgcaaaaaagaagaagagagttgcaaaggccaaggctgatgctgctgagtaccagaagctgcttgcccagaggttgaaggagcagcgtgagcgcaggagtgagagcttagccaagaagagatccaggctctctgctgcttctaagccttccattgcagcttaactgtggtttggcattttggtcagtagttgaatgtttgattctgaaactttttttatttgtcgaggtcattttgattattccaatttttagagt

SEQ ID NO: 206022 - DNA, 199 bp, Gossypium hirsutum
tcagcccgctggtcggattgttatggagcttttcgcacattgcgctcctcggactgctgagaacttccgtgccctctgtaccggcgagaaaggcgtccgccgcatcggtaagcccctgcactacaaaggctcctctttccatcgtgtgatccctaactttatgtgccaaggaggtgacttcacggccggaaacggtacc

SEQ ID NO: 206023 - DNA, 395 bp, Gossypium hirsutum
cttctctttactctcatcgcggtggttctcgcttcctgtgtgtccatcagcctccgcctctcctcctcatctctgttcgttggcctcacctcatcatctctgcctcctcttctctatcggtcgaccgtcgtccttaccaagtctgtattttgaagtaaccctaaaaaattagcagccacagtcctattaaggttgttggttatgctgttggaggagggcatgttttacatatggtttgtgatctgaccattgctgcggataatgctattttcggtcaaactggtcccaaggtgggaagttttgatgctggttatggaagtaacataatgtcccgtttggaagttggtggaaatgcgacacccatattttatggaactgaagaagggaacgagggg

SEQ ID NO: 206024 - DNA, 198 bp, Gossypium hirsutum
ctaacatttgaaattcggtgaggaaggaaacgggcatttccggcacgcaacagggcaactatatgccatctctacagatttagcctcctatatatcaattaaccagcatgtgctgcataagtatgccaatgaacatgttaccttgggatcgtggttcataggcgtggatgtccatcatatagatgatcgaggcctctg

SEQ ID NO: 206025 - DNA, 240 bp, Gossypium hirsutum
gaaaagatttaacctttggggtcgatagtgggggcacgagttctgcctatcttgcgacctatgcatctatccgagcattgcagccagacctaatcataaatgctggcactgccggctgctttaacgaaaaaggagctgcgatcggtgatgtttttctcgcatctcatgttgcattccatgatagaagaataccaatcccggtttttgatctatacggtgttggtttgcggcagacctact

SEQ ID NO: 206026 - DNA, 367 bp, Gossypium hirsutum
ctccaaccttctctaaacactcttttgttgtggtccctgggaacagctgagccaagacgcgagtaatggcggtggcaatgagctttcgtagattgtcttcctccatcaagtccccaaccagacctctcttcagtggcagctccctctattatatgtcaacagctgcggcagagaaagagaaagctcgtgctaatcggatacatcagttgaatgctccgctagaggaaatcgatcctgaaattgctaccataatcgaactcgagaaagctaggcaatggaagggactagaacttataccatcagagaattttacatccctatcagtaatgcaagcagtgggctttgttatgatcaacaagtacagtga

SEQ ID NO: 206027 - DNA, 348 bp, Gossypium hirsutum
tcaacccgctggtttgattgttatggagcttttcgcagattgcggtcctcgcactgctgagaacttccgtgccctctgtaccggcgagaaaggcgtcggccgcagcggtaagcccctccactacaaaggctcctctttccatcgtgtgatccctaactttatgtgccaaggaggtgacttcacggccggaaacggtaccggaggtgaatccatctacggatccaagttcgctgacgagaactttatcaagaagcacactggtcccggtattctcttaatggctaacgctggtcccggaactaacggatcttagttcttcatttgcacggcttaaactgagtggctcga

SEQ ID NO: 206028 - DNA, 360 bp, Gossypium hirsutum
cctgatttttatgagagtggtaagagctgtgtttgcagaggtagcacaagcagtggtgtgagcgatgaaagtacgtgtagcagcttaagtagtagtatcaacaaacctcataaggcaaatgatataaggtgggaagccatacaggctgtccgagcgaaagatggtgtgttgggtttgaaccatttcagattactgaagagattaggctgtggggatattggaagtgtctatcttgcagaattaagtggtacaaagtgttattttgcaatgaaggtgatggacaaagcatctttagctagttgtaagaaacttcttcgagctcaaacagagagagaaatactacaatccttggaccatcct

SEQ ID NO: 206029 - DNA, 374 bp, Gossypium hirsutum
gaaacaaattattttgggtgatctgtgttgagaaagaagataaaatatggcgacattccaaggaactcaacaaaaatgcaatgcatgcaacaagactgtttatctggtggataagttgacggctgataatagggtttttcataaggcttgcttccgttgccaccattgcaagggtaccctcaagcttagcaactacaactcatttgaaggggtgctatactgcaggccacactatgatcaactcttcaagagaactggcagtcttgacaagagttttgaaggaacaccaaaggttgtcaaacctgaaagacatatcgatagtgagagtgcactgaaagagatgaactcatttggtggcaccagagaaaaatgtg

SEQ ID NO: 206030 - DNA, 248 bp, Gossypium hirsutum
catggctcataacttccgtcatcctttcttgggtttcgaacttttactcattactgtctcactaatgatcggtagtcacaccgtctcgtcagcggcttgacatttattccagacacaaacaacctcatcagagctgtcacaattggcttcaaaatacgaaaagcacgaatagtctgaatacaaacagtcaagatatcacgaagagtacccaaaacatgagaagcctgaaatgcacaacgaggaaaaac

SEQ ID NO: 206031 - DNA, 397 bp, Gossypium hirsutum
gacgcgtgtgcagacacttgggatttattacatactcgagaacgtatgatgttctggtgcagatcatctcttctcgagtattcagaacaggtgcaagttggttgcggtaattgcagaagttgatcgaatcctgaggccataagggaagctgattgtacgagacaaagccgaaacgataagcgcaaggtagagcatggctaaatctctacaatgggagatccgaatgatttattcgaaagactgtgaaggattgctttgtgttcgcaagaaattctggcgtcccaccgtggaagaacctataaagcctgccattgtttgaacacgatgcttaacattactcgtggtgttttcacaattaggcataatattttacagattctttttcgattcacaagca

SEQ ID NO: 206032 - DNA, 359 bp, Gossypium hirsutum
  unsure (1)..(359): unsure at all n locations
gtcgnnactttacagcatcagccatgttccgaggcaagaggagcaccaaagaagtggatgaacaaatgatcaatgtccaaaacaagaactcttcctacttcgtcgaatggatcccaaacaacgtgaaatccagtgtctgcgacatcccacctagagggctatcaatggcatcaaccttcgtaggaaactcgacctccatccaggaaatgttcaggcgagttagcgaacaatttaccgctatgttcaggaggaaagctttcttgcattggtacaccggtgaaggtatggacgagatggagttcaccgaggctgaaagcaacatgaacgatctcgtgtccgagtatcaacaataccaagac

SEQ ID NO: 206033 - DNA, 287 bp, Gossypium hirsutum
ctaacctcaaggcttaaagctagcaggagcagagctgcggcatttcttcctcagaagacccatcaaacagaaatgaagttcaacattgcaaatccgactactggttgccaaaaaaagctggaaattgatgatgaccagaaacttcgagccttttttgacaagaggatctcacaggaagtcagtggtgatgccctcggtgaggagtttaagggctatgtattcaagatcatgggaggctgtgataaacaaggttttccaatgaagcaaggagttctcactcctgggcg

SEQ ID NO: 206034 - DNA, 290 bp, Gossypium hirsutum
ccaaaatcctccctatctacaaggaggtgatatctgagcttaaggctgctggtgcttcctggattcagtttgatgaacccacccttgtcttggaccttgactctcatcaattgcaagctttcactgcagcttatgctgatctggaatctactctctctggtttgaatgttctgatcgagacctactttgccgatcttacttctggtgcatacaagaccctcattgaattgaagggtgtcactgcttatggtttggatttggttcgcggaacaaagaccattgatttgatc

SEQ ID NO: 206035 - DNA, 284 bp, Gossypium hirsutum
ctaactttgctgctttgttctgttcttctatgttcttcagtttttgcaccaacaatggctcagcctcgttcacctttttgtgaagggaaatgcaaagggaggtgcaataaagcggcggtttgggatcggtgcttcaaatattgcggcatatgttgcgaggagtgtcaatgcgttccgtccggtacttacgggaacaaacacgagtgtccttgctacagagataaggtgaacaacaagggcaaacccaaatgcccttgaaaatgaaatatattcgagttcgggat

SEQ ID NO: 206036 - DNA, 297 bp, Gossypium hirsutum
  unsure (1)..(297): unsure at all n locations
ttcaaacttttgaagactacaggttctatgctgtgggagctgagttcccagaagtcaacaacaaagataagactctagtcttccaattttctgtcaagcatgagcaaaagcttgattgtggtggtggctacatgaagttgctcagcggtgacattgaccagaaaaaatttggtggtgaaaccccatacagcatcatgtttgggcctgatatctgcggctatagcactaagaaagtgcatgctattctcacctacaatgggacanaccacttgatcaaaaaggaagttccttgtgaga

SEQ ID NO: 206037 - DNA, 298 bp, Gossypium hirsutum
tttttcgaggaatatccataaattaccatggaatcaaaaagaccagactcttggttcttaacagggggcaaaaaagagtttccaaacatgagaatcgaaacaaaatcacaactcggttaaaatagaatgtgagatcctgccctacaccttaatggcatacttcctcattgggaagtacatttccttcttcttctccctttcggacttcaaagatgcctgcaaagcaaaataacagatgctcaatgattcgggtagttcctatagaacctgatgctgacacgtattaacagatattact

SEQ ID NO: 206038 - DNA, 289 bp, Gossypium hirsutum
gaaagttaaaacaaaaagagggaagaaaattctcaatccagaatagggttagggttatccctgatccggataacgatttccacgctcgagtcttccaactgaaaaattaaacatgggcgccaattcgtcaccaacagacttgaccaccgatctcgatgagcagatctcgcagctcatgcagtgtaagccactttcggagcagcaggtcagagcattatgtgataaggcaaaggaaatactgatgaaagaaagcaatgtccagcctgtgagaagcccggtgacaatttgt

SEQ ID NO: 206039 - DNA, 286 bp, Gossypium hirsutum
cagcagttttccggcattaatggagttctctactacactcctcaaattcttgaagaggcaggtgttgaagtgcttctttcaaacttgggccttggttcagattctgcatcatttcttattagtgcatttacaaccttgctgatgctgccctgtataggtgtagccatgaaactcatggatatatcaggcaggaggcggctgctactcaccacgatcccggtgcttatagtgtcactgatcattctagtttttagtgaacttgtggatttgggcacggttgtgaatg

SEQ ID NO: 206040 - DNA, 290 bp, Gossypium hirsutum
ctgatattggtgctccatttactggtgatgagaagagagtgagagatgctattgcaatggaggaatgtaattctgtctgtgtagtgaatgagtatgatgatttggggttcatagatttaagaatcaatggaggaagtgtgagatggagttccagaagtaggttgctcaaggggaaaatgcctgatgagccttgctaccccaaattggcattgcataatgggcagttgttttcatcaatgaatgactccatctcagtgttctgtggtcctgattgggttctaacatcaagg

SEQ ID NO: 206041 - DNA, 246 bp, Gossypium hirsutum
tcgttccttcttggaaacgggcaatgggggtttggaatttattcgaaatcatcctgatattgctcattgagaaagaggaagatatgtaataaccattcgaatgagtccagccatgagccactggtctgttttcaaacatgaaagaaaacattactacattccatacaagaataaaacagaacatcagccggcagttcctcttattataaatgctaatttttctagtaactcaattggcgggaatgg

SEQ ID NO: 206042 - DNA, 248 bp, Gossypium hirsutum
  unsure (1)..(248): unsure at all n locations
ttattctttgttaataccaaaaactantacatcgtcggaggtatggaggccggtggacacatatccaaaatcaacaagaaaatacatcacagtagcaaacggataacggtacatccctcaatactcctcctcatccccttcgtctccttcaccagactcagcgccaacttcttcataatctttttccagggcagcgagatcttcacgtgcttaaaaaaactttctttcctcaatgccttaacaaacat

SEQ ID NO: 206043 - DNA, 283 bp, Gossypium hirsutum
aaagaaccagttcgcgtcctcggtactggagctgcaggacaaatcgggtatgctcttgtacccatgattgctaggggagtcatgttgggtgctgaccagcccgtgatccttcacatgcttgatatcccacctgctgcggaggctttgaatggtgtcaaaatggagttggtggatgctgcatttcctcttctaaagggtgttgttgctacaactgatgctgttgaggcatgcactggagtcaatgttgctgtcatggttggtggtttcccaaggaaggaaggaa

SEQ ID NO: 206044 - DNA, 284 bp, Gossypium hirsutum
  unsure (1)..(284): unsure at all n locations
aaacaatgtaggcagtgtaaggaaactgaagtgcttgggagtcattgcaaagccttcaaatcaaaacatcacaaaggaacttcatatagaagccaaagtaacaatatcagcatgtggggcacttttgacacctcttttaatgcattctagtgggctgaagaatcgaaacatcggtcaaaaccttcatcttcatccggtcctaatggcgtggggttactttcccgactccgattccaagttcaaaggggaaagcttatganggtggaataataacatcagtacat

SEQ ID NO: 206045 - DNA, 198 bp, Gossypium hirsutum
atgctgcttctattgaggggcggtatctaaaagcctgatgataccctcaccgtgaaaaccatcaccttttaggggggaagttctgataccttcaacaatgtgaacgcccaaatccaagacaaagaacgggtcctaccataccaataagagctcatctttgctggcaaatcattataggacggccgaactcttgctgac

SEQ ID NO: 206046 - DNA, 285 bp, Gossypium hirsutum
aaattttcagagagaaaaacagaaaaacactcccgaaatggcacgcaagaagatcagagagtacgattccaagagattgttgaaagaacatttcaagaggctttccggtagagatttgccaatcaaatctgcacaaattacggaatcaactgatttcaatcagctagtagagaaggagccatggctttcgtcacagaaactggttgttaaacctgatatgttgttcggtaagcgtgggaagagtggtttggttggcttaaatctggattttgctcaagttattgc

SEQ ID NO: 206047 - DNA, 306 bp, Gossypium hirsutum
tttattcatagaaaataccaaaaactagtacatcgtccgaggtattcaaccctgaaaacacatatccaaaatcaacaagaaaatacatcacagtagcaaacggataacggtacatccctcaatactcctcctcatccccttcgtctccttcaccagactcagcgccaacttcttcataatctttttccagtgcagcgagatcttcacgtgcctcagaaaactctccttcctccatgccctcaccaacataccagtgcacaaatgcacgcttggcatacatgagatcaaatttatgatcaatgcggg

SEQ ID NO: 206048 - DNA, 297 bp, Gossypium hirsutum
  unsure (1)..(297): unsure at all n locations
actgctcgacaaaaggtatttccagaatttatgatttttttggtgatagaatcaaaatgattcatntcttacagacttaatcctgcttaaatgacgaccgatgaagatgatctatatacatctagtggtaagatgaagaaccccattttcatttttttcaaggatgtcagacatgttttcaaactggacgaactgggatcagagatagcacaaattgctttgcctgcggcactggctttgacagccgaccctattgcttttctggttgacacagcattcattggccaaataggtgct

SEQ ID NO: 206049 - DNA, 284 bp, Gossypium hirsutum
ggctccttccaaagacacggggtggtgatttggatacgctctaacatttgtccgtacagataattcatactaaagatttaaccggaaaccaaagccatggaaatgtccaacgatctcgataggttgctctttttcgagcaagctcgtaaaatttccgaggctacttacgcttccaatcctatcgatgccgataatttgaccagatgggccggagctttactggagttgtctcagtttcaaagcgttccggattctcagaaaatgattcaagatgctatttcgaa

SEQ ID NO: 206050 - DNA, 286 bp, Gossypium hirsutum
gaacaattcaaggcttgaagtgcatttggagaacagaaggttttcgcggattattcaaaggcaatggtactaattgtgcacgcattgttccaaactcggcggtcaagttcttcagctacgagcaagcttcaaagggaatcctatatctgcatcaacggcaaactggcaatgaagatgctcaactcactcctcttttacgccttggagctggagcatgtgctggaataattgccatgtctgcaacttaccctatggacatggtacgaggcaggatcaccgtacagac

SEQ ID NO: 206051 - DNA, 283 bp, Gossypium hirsutum
cagcttcagcaaatgtctgacgatcccatgaatcaagtttcccaggtattcgagaagtcactgcagtatgtaaaacgcttcagccgttataaaaatccagattctgttaggcaagttcgagaaattttgagtagatatcagttagctgaattcgagctttgtgttcttggcaacctgtgtcctgaaactgtggaggaagcaatcgctatggtgccttccatcaagactaaaggacgggctcacgacgacgatgccatcgagagaatgctaaatgacttgtccc

SEQ ID NO: 206052 - DNA, 288 bp, Gossypium hirsutum
cggagttgccacaattagcttgaaggtacgaaaagcaggaagagtctgaatatgaaaagccggaatacaaacagccaaagtatgacgaagagtacccaaaacatgagaagcctgaaattcacaaggaggaaaaacaaaaaccgtgcaagcaacatgaagagtaccacgagtcacacaaatcgaaggagcacgaagagtaccagaaagaaaaacccgagttccccaaattggaaaagcctaaagagcacgagaaacacaaagtcgaatatccgaaaatacccgagtaca

SEQ ID NO: 206053 - DNA, 290 bp, Gossypium hirsutum
tgaacctccaaaaaaacctccgatgtatgaacctaagccaccgaagccaccggtttatacacctccaaagaaagaaaaaccagaacccaagccaccaatgtatcaacctcccaacaacccaccaatatatgagccaaaaccacctaagccaccagtttatgcaccaccaaaggaagaaaagccaaaacctaaaccaccagtttatgagcctccggcacatgagccaccatacggtcactatccaggacatccacctttggggaagcctcaatagaatgctcccatcgact

SEQ ID NO: 206054 - DNA, 280 bp, Gossypium hirsutum
gtgaggttgcctccatattcctaagagcagcattgggtatacccgagggcctgattccagttcaacttctctgggttaatcttgttacggatggaccccctgcaacagctttgggattcaatcctccggacaaggatatcatgaagaagcctcctcggagaagtgatgattcactcatcactgcttggattttattccgctatctggtaattggactttatgttggagtagcaactgttggcgtcttcatcatttggtatacacacagttccttcttgtg

SEQ ID NO: 206055 - DNA, 225 bp, Gossypium hirsutum
gggatattgaaactcatggggggatcccatacagaggaagcccgaacctaacatgcacagctcgctatgcaagtgtgaacactcaccttggaaacgagcaaagccggaaagatgaagcggaatccattggctatgtgctcttgtatttactgagaggaagccttccttggcaagggttaaaaacgggtactaaaaagcaaaaatatgataggagcactgaaaaga

SEQ ID NO: 206056 - DNA, 280 bp, Gossypium hirsutum
cccaaaccaaactagggtgagggttatccctaatccggatgaagatttttttacacgctctattcttgctacttaattatcaaatatgggcgcaccaacagactcagcccttgatctcgatgaacagatctcgcagctcatgcaatgtaagccactttcggagcagcaggtcagagcattatgcgacaaggcaaaggaaatattaatggaagaaagcaatgtccagcctgtaaaagcccctgttacaatttgtggtgatattcatgggcagtttcatgat

SEQ ID NO: 206057 - DNA, 277 bp, Gossypium hirsutum
gtggtcgggattccgaacaatgttaaagggggtgtttgcgacatcccaccaaccgggttgacgatgtcatcgacgtttatggggaactcgacgtcgatacaagagatgtttcgacgtgtttcggaacagttcacagtgatgtttaggaggaaagcatttttgcattggtatacaggggaagggatggatgaaatggagtttactgaggctgaaagtaatatgaatgatttggtttctgaatatcagcaatatcaagatgctgtggatgatgaagatg

SEQ ID NO: 206058 - DNA, 287 bp, Gossypium hirsutum
ttgatgcagaggaattccgatggggacagatatgtggtcttaacattattatacaggtggatgacttggaagaagttagtgaatactatcaaaataggggatgtttcaatgagttgatctctctcatggagagtggtttaggattggaacgtgtacacatggggatctttactgagttgggagttctttatgccagatatcgttatgagaagcttatggagcacattaaattgttctctactcgtctcaatatccccaagctgataagagcctgtgatgagcagcag

SEQ ID NO: 206059 - DNA, 200 bp, Gossypium hirsutum
aacttacgaatgccctaggggggagtcgaggcgatgggtatctacatggtctgcctcaactgaatttcattcatcctgatccttatccatcaaaaattcttgacggtgatgatatgcgtgccaacgatgaagattatgcctcggtccaactagctcctgtgcatggcaaacactctatcgaaactcggctagtgagcacc

SEQ ID NO: 206060 - DNA, 232 bp, Gossypium hirsutum
ataattcacccgaacggtaccggggtaaaaaggtaggttaggagcggttcatccgtacgggtcaaccacccgtcatttctctcggatgggaagttattggtattcactacggattacggtggaatatcaacatagccaatctcaaacccacatcactaccaaccatatggtgagatattcacgatgaaattggacggttctgatttgaagaggacgacccacaattcttatg

SEQ ID NO: 206061 - DNA, 295 bp, Gossypium hirsutum
tcgagttttttttttttttttttgactgcaagggggaaaaacatatttatgcaatgccatagaaccttgaaacctaaagaacaactaaaagcgttgataaaagcaattatttttactcgtaagcttccccagcctagtggccagctcacattagcatacgacccacacacatacaaacttaacacatcaacaataactggacaggtgttcggcaccacacttaaaagccaccgcggaggcgaaggaccaggtgcaaagtggattccttctggatgttgtaatctgcaagggtcct

SEQ ID NO: 206062 - DNA, 289 bp, Gossypium hirsutum
tggtgttgctgttgttgcggaggtgtctaggaagaaatcaaagaagaaaggtgaaaagaagggcttactcggaggtcttttatacggaaaaaagaagaagatgatgggcaaaaactatgtgaaaaaagggtctgcaccagtctttgatctcgaagaaatcgaagaagggcttgaaggatacgaagaattgtagaaatcgacattaatgtcgcagaagaatttcgagaaacgattcggacaatcaccggttttcattgcctcaactttgatggaaaatggtggccttcct

SEQ ID NO: 206063 - DNA, 286 bp, Gossypium hirsutum
ctcgtgccggatatttattttggagctagcattccgataaatggatcaacaactagggaagagaaatggggctgactttcaccaagctttttagccggctttttgccaagaaggagatgcgaattttaatggtgggtcttgatgcagccggtaaaactaccatcttgtacaagctgaagcttggagagattgtcaccactattcccaccatcggatttaatgtggagactgttgaatataagaacatcaggttcaccgtgtgggatgttggtggtcaggacaagat

SEQ ID NO: 206064 - DNA, 201 bp, Gossypium hirsutum
gacttacaattgccctaggtgtgactcgaggcgatgggtatctacatggtctgccacaacagaattttattcatcctgatcttaatccatcaaaaattcttgttggagatgatatgcctgccaacgttgcagattacggctcgcgccgactagctcctgtggattgcaaacacactatcgacactgggctagcgtgcacct

SEQ ID NO: 206065 - DNA, 283 bp, Gossypium hirsutum
cagagcatccatggctctaaatgagtactgagagatgtgccagtagatgaaagagtgaccctgactaggtggtcgaagaagcatagagctcgaaacactgggaagagctcagaaattgttgatgattggagaaagaaagttgtagatacttgtacatcaacatgggatgttacagagacaggaaagagcatttccaagatgaaaagagaagaagccaaaatcactgcctgggaaaatctgcagaaggctaaagccgaggcagccataaggaaactagagatga

SEQ ID NO: 206066 - DNA, 284 bp, Gossypium hirsutum
aaaataatggccctctgcaaggcggattctaggttggtcctagcactggccatggcattggtggcagctacggtgcctgtttatgggcagagaactatcaacactccatgcaccccatcggcacttaacatcttcactccttgtatgaacttgcttaccaatagcagtgccaatggtacttcgcccactgcagattgttgcaactcgcttaaaacgctcacatcgagcggcatggactgtttgtgcctcattgtcacccggagtgtcccgttccgtttacctat

SEQ ID NO: 206067 - DNA, 284 bp, Gossypium hirsutum
ctttcccactgtattttccgggtgttgcttcccaaatgctgatttcaacgccagaaaaaatgagtaacgatgacgcatccgatctcggcgtcgccctccccgccgccgctgccgctttgagtgctgaggaacgcgccggcctggttaatgagcttaagaataagcttcaaaatttagcgggagaacatgctgatgtgctagaaacactatcaccaaatgtcagaaaacgtgttgaggttcttagggagatttagagtgaacatgatgaactggagaagaagttt

SEQ ID NO: 206068 - DNA, 281 bp, Gossypium hirsutum
  unsure (1)..(281): unsure at all n locations
gctggatcaacttatgtagggggggcgaattgccatttgaaatcanacagcaagcatgaaacagctcaagcttatgttgatgctgctcattgttataagaaaacagctacaaaggaggctatatcttgcttgcagcaagcagtgaacttgttttgtgatattggaaggctaagcatggctgcaaggtattataaggaaattgctgaattatacgagtctgaacagaacattgagcaggccatggatttattttgaaaaggctgctgatttcttccaaaatg

SEQ ID NO: 206069 - DNA, 280 bp, Gossypium hirsutum
tgcacctcttccagcaatgatgactgtgaagcgctggtctcaaaatcccaatgccgcgtcaattggaaaacctgctatacatccagctactgtagatttgaaaggcaaagcatacgagatgctgagacaaaatgcagcaaggtttttgctggatgatatctacagaaatcctggacccctccagtttgatggtccaggtgctgatgctaaggctgtgacattatgtgttgaagaccaggattacatgggccgcatcaagaaactgcaggaataccttgac

SEQ ID NO: 206070 - DNA, 298 bp, Gossypium hirsutum
ttcgttccttttactccgatcaccttcttggaccgcggcgcggttatctacccagactctgtctcccttgtccacggtgatgtcaagtatacctggaaacagactcgtcagaggtgcgttcgtctcgcttctgcgcttgcccagctgggaattgcccctcgtcatgtggttgctgtattagccccaaatgttccagcgatgtatgaacttcattttggtgttccgatggctggggctgttctatgtacactcaatatacgtcatgattcctcaatggtggcagtgttattgaagcatt

SEQ ID NO: 206071 - DNA, 291 bp, Gossypium hirsutum
tcttgagaattgtcaaacagcttcaagggattgcaagtgatgaaatggacaataagcttcttcaactatatgcatatgagaaatcaaggagatctagaagatttgatgttgtttatcatgaaaatgctcgtgttctccttcacgatgagaatatatatcgaattgaatgttcatcaactccaacgtgtctatccatccaacttatggactatggacatgataagcctgaagtgacagctgtttccatggaccctaaatttgctgcatatttgcacaatgacttcctctcag

SEQ ID NO: 206072 - DNA, 281 bp, Gossypium hirsutum
acatcggtcaggctggtatccgaggcggaaatgcctgctgggagctttactgccttgaacatggaatccagcctgatggccagatgccaagtgacaagactgtcggaggaggtgatgatgcttttaacacctttttcagtgaaactggtgctggaaagcacgtccctcgtgctgtctttgtggatcttgagcctactgttattgatgaagtgaggactggtacttaccgtcagcttttccaccctgagcaactcatcagcggcaaggaagacgctgccaac

SEQ ID NO: 206073 - DNA, 298 bp, Gossypium hirsutum
tgttttttttttgttaatcacaaatccgttgccgttggagtgaatgaaaatcgttaaaacatctgctaaattggaagaaataaaaataaaaacgaatgaatgttgaagctcttatcatcatctccattctttcttaagctttgcttgtaggacctcatgcgttgtgaagaactagaagcacttcctgtgcacaatagatgggccagattcatcatactctgccttagcaatccacatctgctggaaagtactgagggatgctaagatagagcctccaaatcagacactgtatttcctt

SEQ ID NO: 206074 - DNA, 283 bp, Gossypium hirsutum
cggaaatcacccgaagcaggagggagcgaaattgttgaaattccagtttctccgagagaagccaaggacaacgaacatgcagcttttcaggagctgatgttggcatcctactcagggagacaaaaacccggggaactaaccccgagtcagagcattgttagaagtaagctgtccattgcacacgtaattcatcatggagatggatatacacaagagaacagatggtcaaatcacaaagcagtttccattgccgaaaagctcgaacaagagaacctgagactcg

SEQ ID NO: 206075 - DNA, 247 bp, Gossypium hirsutum
ttcttgagtcgagtttttttttttttgggggtttttatttagaaatactcaatttttttatttttttatttgtacatctgaaagcattgctaatggctattagcgtttaaaaaaataaaaatagaaaagataggagcttgaaaaacaaaagtcaccatatttaactggaattgacgggcgcacaaccccatgttcaaacaatgcctgcgaaaaaaggaaaaggaaaagacaagatgaaatacaaagg

SEQ ID NO: 206076 - DNA, 287 bp, Gossypium hirsutum
ttgttatctgaaggagcaacctcattgcggttcaccgagtaccagggtgttggcattttcatggctgcttttgcaatcttgattttccttttccttggctcggtagagggtttcagcacaaagagccagccttgcacttatgacaaatctaagatgtgcaaacctgctcttgccactgctatattcagcacagtatctttcttgctcggtgctgtcacttcagtagtttctggctttcttgggatgaaaattgctacctatgctaatgctcgaaccaccctggaggc

SEQ ID NO: 206077 - DNA, 256 bp, Gossypium hirsutum
gccttctcgatatccgacgagggtatcatgatggacactcgccacgccattaacaatcggcctccgtacaaggagatcggcctcgctgtcgctcttctcgtctttggcacccttgggatcatcctgggtattttcatggccgtcaacaaagtcggcggtgaccgcgcccatgggcttttctttgcaatactcggatccattttgttcattccaggcttctattatacaaggattgcatattatgcatttaagggat

SEQ ID NO: 206078 - DNA, 284 bp, Gossypium hirsutum
gggctgacaagcatttagatgagctgcaagcaaaaatagctgagggagctgcacctggtcttgcaattttgaagaacaaagctccaagatggcatgaacatttacagtgctggtgtttgaatttccacggtcgggttacagttgcatctgtgaaaaactttcagctggctgcaactgtagatccaagtcaaccaggagggaaaggagatgaagaaaaggttctcctccagtttgggaaagttggggatgatacattcaccatggattacaggtcacccttgtcc

SEQ ID NO: 206079 - DNA, 285 bp, Gossypium hirsutum
gaatgaatgcaggaacaccggagagaggagcacggagagcccatgcctccatggcgttggttcaactcatcaatggagggtatcatgtaattaccaaagtagccctcaatgttggtgtcaaccagcttgtcttctgcgtcttccgtgatcttcttgccctctctcttcttgcccccctcggctatgttcgtgaaaagaaaagacaagaaaagaaaatggtgacaggggggcttgctccggggctgtcgcgtaaactgaagaggtattggaatgccggactgatac

SEQ ID NO: 206080 - DNA, 288 bp, Gossypium hirsutum
gaagaaacaagcaaagttgctagaagtaaattgtaaccttaacaatgcagcttccaaattgaagcacaaagattacaagcaggctgcaaaactgtgtactaaggtattggagcttgatagcgggaatgtgaaagcactctacaggagggctcaagcatatattcaacttgttgacttggatttggcggaggctgatatcaaaaaggccttggagatcgaccctgataacagggatgtgaaattggagtaccgagtcttaaaagagaaaatcaaggagtacaacaagag

SEQ ID NO: 206081 - DNA, 227 bp, Gossypium hirsutum
ttagagtacctacatatgatggggattgtttaccgtgatctaaagcctgaaaacgtgttggttcgatcagatggtcacattatgctcacggatttcgacctttcattgaaatgcgatgagtccacatcaacgccccacattgtttccgatcaaaaaccgccggtaccaggtctgcggaatgactatcctaaagatcatcctcctttcacatcggcttcttgcatcat

SEQ ID NO: 206082 - DNA, 350 bp, Gossypium hirsutum
tgctttctttctagtcatctatgcttctcttctattgcgaccatcttcttctctttatttccaaaatgcagcatctcttgttagatgctcatttcgtgagtgccatcacaagttgggaaaaggggtgaaaatggagaaaattttggagccaattaagaagaatttgaccatgttagaggtaccaagttttgttgatgtatttggtggagggttgaagattgggatggtgaactttgaaggtgatcaagatcttagccaatggagaaaacaaggtgagacgatcccagtccatttcgatcgagttcccgaggctctcaaatggcaagacttgttccctgaatggattgatg

SEQ ID NO: 206083 - DNA, 378 bp, Gossypium hirsutum
ctcgaaatagccggtcaattcaccctcttcattcgtcgtgtaaagtccactcaagtggccaaccagctgctcggtcagctcaacaattccaacaatggtatgaccgtttttgcaccaacggacaatgctttctccagccttaaatcgggcacattgaattcactcaccgatgaacaaaaagtggagctggtgcaattccacatcgtcccaacatacctcacctcgtctcagttccaaaccattagcaatcctttgagaacccaagctggtgatagtggcgatggcaagttccctctcaatatcaccacttcggggaactccgtgaatataacaacagggttgacaaacaccagtgtttccggcactatttacactgat

SEQ ID NO: 206084 - DNA, 368 bp, Gossypium hirsutum
taattttctctcttttgctctcatttcctgcaactccgatcgataaaattccatcgttggttggaaagagcaagagaggaaaattaaatcaaagataaaacgattattagcaataaaggacgacaatgaagaactgtgaaagactcgctaatttagctttagcagggttgacgttggcaccacttgttgtgaaggtggaccctaacttgaatgttattttgactgcatgcctcgcagtatatgtgggctgctatcgttctgtcaagccaactccaccattggagacaatgtctaaagagcatgctatgcgttttccgttcattgggagtgcgatgctgttatcacttttcttactgttcaagttctta

SEQ ID NO: 206085 - DNA, 341 bp, Gossypium hirsutum
gcaggtagggataggagatacatctggaggaagttcaggccgaaatgatcattattgctggatgcgccctgaggacattgattacccccgtcctgtatatgaatgtcatagttgctccgatcttgctgctgaaatggctgctgctttggcttctgcttccatcgttttcaaagacaacaaagcatactctcaaaagcttgtccatggtgcccgaacactctttaagtttgctagggatcaaagaggcagatatagtgctggtggttctgaccctgccctcttttataattcctcaagttactgggatgagtttgtttggggtggagccttgttatactatg

SEQ ID NO: 206086 - DNA, 408 bp, Gossypium hirsutum
tttcttttttcttatttgtattttgatttgcgagtaaagaaaagaaaatggataagaaaaagattgctgtcccacttgtatgccatggccattcacgtcccgttgtggatctcttttacagtcccgttacccctgatggttttttcctcatcagtgccagcaaagattccagtcctatgctgaggaatggtgaaactggagattggataggaacctttgaaggacacaaaggtgcagtttggagtgtttgcttggatacaaatgccttacgagctgcttccgcttctgctgacttttctgcgaaagtgtgggatgcactaacaagtgatgtcttgcactcatttgaacacaagcatatagttcgagcttgtgctttttcagaggatacacaccttctattgactgggg

SEQ ID NO: 206087 - DNA, 373 bp, Gossypium hirsutum
ggaggattatggtccgaggtggaaatgtgaagtggcgtgcgcttgaggcttgacacaggaaactactcctggggaagtgaggctgtgactcgtaagaccagaattttggatgtggtgtacaatgcgtctaacaatgagttggttcgtacacaaactctggtgaagagtgctattgttcaagtcgatgctgctccattcaagcaatggtatctccagcactatggtgttgacattggccgcaagaagaaagcagcagcagcagccaagaaagaaggagaggaaggtgaaactgctactgaggaagtgaagaagagcaaccatgtcttgaagaagctggagaaacggcagcagagtcgcacacttgacttccata

SEQ ID NO: 206088 - DNA, 342 bp, Gossypium hirsutum
gttgccggtcgtcggtggaagacacgtggtcattccgacgacgaatgcggaggtatcggaggccgaaatgtccgaaatagaattgatgaaggaaaggtttgctaaacttttgcttggagaagatatgtcaggtggagggaaaggagtttgtactgctctggccatctccaatgccattacaaatctttctgcttctgtgtttggggaactatggaaattagagccattatcaccacaaaggaaaatgatgtggcgtaaagagatggactggcttctgtgtgtaagtgattccatagtggagcttaaaccgtcattgcaagagtttccaggaaggggaacctt

SEQ ID NO: 206089 - DNA, 406 bp, Gossypium hirsutum
ttctttttgtagcttctcataacttagctttttgaagggttcttgcagagggtggaagtttgaagctctctcttaaagataggaccgtcgttttggcccttgcacgagtggatttgctggctttttttggttattctgtttcttcacatgcttagaccaacaaagtaatgctggcagtatgggaaagaaaggaagttggttttctgcaattaaaagggttttcataccacactccaaggaaaagctaagtaatgaatcggataaacgaagtggtaaagaaaagaagaagaaaggcctaggaaaattaaggcatggagaaaccaattcctttattcccctctttagagaacccagcagtattgagaaaattcttggggaggctgaaagagagcataaactagtattc

SEQ ID NO: 206090 - DNA, 382 bp, Gossypium hirsutum
gaactagtccttgtttttttcttttttttttcttggggaaaatctcattgtttagacgctgagaatcaatctcaattctcaggtatttatttttgttgataataatggcgggtcagaggaatagctatgggaagcgggctcattctcagtctgactattctgagaatggatcaaataagaggagaaatgcaggtgatgacagggaacaatttgttattgattcagatgataccgtttataggtatttgtgccctgcaagaaagataggaagcattattggaaggggaggggagattgttaagcaattaagagcagacactaaatcaaagattagaattggtgagacaattcctggttctgatgaacgcgtggttactatcta

SEQ ID NO: 206091 - DNA, 359 bp, Gossypium hirsutum
catacataatcagcatgaaatgtatttaggtacaatattatatatcataaacattagaacgggtaaaatctgcagactgatgtagtttcatttaatgtaaatatcaatgaaatatgtatagttcatagcattgtttaggaaaattacacactgctaagaataaaatgggtacaaactgttcaaaacttagtcaatagacatgtttcagtccacttacttgcaatgatttcaattctaagaaacacataatatcatcaacaatcaatggaaatgcagctctgtgacacggtggtgctatcggcggtgctgacaaacgggttgatccgaacccaaacaagagagaagacagaagccaacaa

SEQ ID NO: 206092 - DNA, 396 bp, Gossypium hirsutum
gagaaaaggcgtaaagtggccgactccgactcgccgctcggacatttacgcaacgcaacgcctcattgaacaacgaaagcggcggtggtttagggttttagtagagcaaaaacatagaaaagaaggaagtaggtaggcatggtgaagctcacggccgacttgatttggaagtgtcctcacttcttcaatgccctcaaagagcgagaattggatcttcgaggtaacaaaattgctgtaatcgaaaacttgggtgctaccgaggaccaattcgataccatagatttatctgacaatgagattgtgaagctggacaacttcccttatcttaaacgcttgggtactttacttataaacaacaaccgagttactcgtatcaatcccaatattggggagttc

SEQ ID NO: 206093 - DNA, 348 bp, Gossypium hirsutum
tcgccccaagcaaagttgttcagtggatgcttcaaattcctggtgcacggggtacattggctgcattgggaaggacaagtttggggaggaaatgaagaagaactcaaaagctgctggtgttaatgttcaatatctcgaggatgaaactgcaccaacaggaacttgtgctgtttgtgttgttggtggtgaaaggtcactcattgcaaatctatcagctgctaactgctataagtctgagcatttgaagaagcctgagaattgggcgttggttgagaaggccaagtacttctatattgctggatttttccttactgtatctccggactccatacagcttgttgctgaaca

SEQ ID NO: 206094 - DNA, 402 bp, Gossypium hirsutum
tggatttttggtttttggaataattcctcttcgtttggggtatcgtttcatagacaacaatggcctccctcgaaactggctatttgttgggatgattcccacgttacttctcaacatccgtcgccctcatgataaagttgcccaaatcctcagacgaagcaatggtaccttcttttatagaggactttggtttactaacaccagcttcttagccacctccgatcctgagaatgtgcgtcatgtattgagctccagttctgtttatttgaaaggtcctgaatggctgaaacagtttgatatcttcggcgaagcacttttcaattccgacggtgaagcatggaaatgtcaccgcagagttttccatgctttcttgaatcaccctcagttccggcaatcactttc

SEQ ID NO: 206095 - DNA, 380 bp, Gossypium hirsutum
aagtcacatttttagtagtactgaagtgcaacccggaagggggcgatccgataatactagcgaacactaccgatgtgagccattttggttactttcaaaggtcaagcgtcaaggagttcatcgtcttcgtttctcgaactgttgctaaacgtactccttctggtcagcgccagtccgttcagcacgaagagtacaaggtacatgcttacaacagaaatggactttgtgccttgggatttatggatgatcattatccagttcgaagtgctttttcgcttctcaaccagattctagatgaatatcagaaaaattttggggagtcttggagaaatgcacaagctgatagcactcaaccttggccgtatctgaatgatgctttg

SEQ ID NO: 206096 - DNA, 348 bp, Gossypium hirsutum
gactgcaaaatgcaggggcatatttattcaatgccatagaaccttgaaacctaaagaacaactaaaagcgttgataaaagcaattatttttactcgtaagcttccccagcctagtggccagctcacattagcatacgacccacacacatacaaacttaacacatcaacaataactggacaggtgttcggcaccacacttaaaagccaccgcggaggcgaaggaccaggtgcaaagtggattccttctggatgttgtaatctgcaagggtcctcccatcttcaagttgcttcccagcaaaaatcagcctctgctggtctggggggattccttccttatcctggatcttg

SEQ ID NO: 206097 - DNA, 397 bp, Gossypium hirsutum
gcgacattccaccaaccgggttgacgatgtcatcggcgtttatggggaactcgacgtcgatacaagagatgcttcgacgtgtttcggaacagttcacagtgatgtttaggaggaaagcatttttgcattggtatacaggggaagggatggatgaaatggagtttactgaggctgaaagtaatatgaatgatttggtttctgaatatcaacaatatcaagatgctgtggttgatgaagatggtgaagggtatgaagatgaagctgaggaaaattgacgggatccttttcaactttttatagtaatggcctagagaaaaaaaatcaaatgtggtgttcattttgatggttttaaataaggaggccatgttttttcatttgtgttgggatttttagtaat

SEQ ID NO: 206098 - DNA, 394 bp, Gossypium hirsutum
cttgaatttatttttttgaagatggagggtaaagaagaggatgttaagctaggagcaaacaagttctcagagagacaacctattgggacatcagcccagacagacaaggactacaaggagccaccagcagcacccttctttgagcctggtgaactcaaatcatggtctttttacagagctggtattgccgagtttgtagccaccttcttgttcctttacatcaccgtcttgactgtcatgggtgtgtctcagtctaaaaccaaatgtgcaaccgttggtattcaaggcattgcttgggcttttggtggcatgatctttgctcttgtttactgtactgccggcatttcaggtggtcatattaaccctgctgtgacctttggattgtttctagcaa

SEQ ID NO: 206099 - DNA, 374 bp, Gossypium hirsutum
gaaccacatttacatccaccaaaggagcagctgcccaacatttcttactgcattacaagtccacctccatggcccgaggccatccttcttggtttccaacattatcttgtgatgcttggaacgacagtgatcattccaacttcacttgttccccagatgggaggtggaaatgaggagaaagcaaaggttatccagactctactctttgttgctggtttgaacacattattgcagtcactgtttgggtctagattgcctgctgtgatcggagggtcttatacctttgtcccaacaacaatctcaattattcttgctggtcggttcagtgacagttcagatcctattgagagatttaaaaggataatgcgggcaac

SEQ ID NO: 206100 - DNA, 386 bp, Gossypium hirsutum
aaatattcctttgtttagccagggcagctcgtaaaatctctgggttacttactcgttcactctctgtttcatcttcatctgtttctactttgttttcatctctagggaaaaacagtggcagaaatggaattgggaaaaggttcagcacagctgcagctcttgaggatctgattgttccaccggttcaaatagcttacactcagaatttaattgatgggaaatttgtagatgccgcatctgggaaaacatttccaacttatgaccctcgtacaggggatgtgattgccaatgttgctgaaagtgatgccgaggatattgaccgagcggttgccgccgctcgcaaggcattcgatgagggaccgtggccgaaaatgactccctatgaa

SEQ ID NO: 206101 - DNA, 387 bp, Gossypium hirsutum
gaaatgaaacgatggggtcctttcatgaataaacataaaatgttattctcatatgccatttcaagatgcaggcatcgaaatgacaccggcaaataggaaaaataaaaacaaaattcaattagcaagagggttcttaacaatcagaaacttgaaaacaacagtggagaggagatcaggaaagtggaatagctttatttaaattcaggcttttctgggtatgtgcatccagacctttggatgataacgttggatgcatagcaaccagcccttacgcaatcatcaatggacttcccttgaaccaattgtgaaagaaagcctccaacaaaagcatcacctgcaccatttgtatcaacaagcttttccttgggtaacaaaataacagggaat

SEQ ID NO: 206102 - DNA, 363 bp, Gossypium hirsutum
ctacctgtttactgaaggctaagaatagcctggagaggggcgagcccatgcagatatcgagctctctcatggtgagtcatgtcaaattcatggacaacagaagcagaataggaaacctgaagctgttgatattgatcgttggctacagaggaatgaagcccttggagctgcattcatacatgctgaagaggttggagcatactgacaacggcaatggtattcaaagcttgtcaaagctgatataaatggaaacgatcaggaaggctattcaattaaactacctggagatcctaagctaggagaagggaaacctggaaaccagaaccatgctattatcttgacacgacgggaagctattcaaac

SEQ ID NO: 206103 - DNA, 391 bp, Gossypium hirsutum
aaacaatgatgcatctcacttgcaccaacatgcctgtggagaaaattgaccatgctcttgagaccattaagtctaatggcattcaaaatgttcttgcccttagaggtgaccctcctcatggtcaggacaagtttgttcaagtcgaaggcggcttctcttgtgccctcgatttggtgaaacatattagagctaaatatggtgacttctttggtataacagttgctggttatccagaggctcatcctgatgctattggaagtaatggtgtagcaacaccggaagcttatcagagtgatcttgcttacttgaagaagaaggttgatgcgggagctgatcttattgttactcaactgttttatgatactgatatctttctcaaattcgtcaatga

SEQ ID NO: 206104 - DNA, 391 bp, Gossypium hirsutum
gcgtcgtggtactgttccgtaaccttattggccttaatattgatagggtcaatcagggcaaactccgtatcagatgaaccagtgagaggtagccagctccggaaccgaccctgcgatgaaatctatgtcgttggcgaaggtgaaacccttcactccatcagcgacaagtgtggcgatccgtttatcgtcgagcggaacccgcatatccatgaccctgacgatgttttccccggccttgttatcaagatcatcgcttcaactgataggaaattatagaggtagctgcttttacacattatacacacagaaaattttaatattgtatactgggttttggtcttcttttgtttcttagtgaaaagtctttgtaataagttgaagcctgtatact

SEQ ID NO: 206105 - DNA, 356 bp, Gossypium hirsutum
ggatcattataccactagtggaattaatggccgactgggggtcaaacatggttgacaagtcggctttcgttatgagcgtgttggtacccgtaccggaagctaaaacggcattagtcgaagaaggagggattcccgttttagtggaaatcatcgaagtcggatcgcaaaggcaaaaggaaatcgccgtagcaatcttattacagatttgcgaatatagtgtgctgttccgtactatggtggcccgcgaaggagccattcctcccttagtcgctttgtctcagtccggcaccaatcgcgccaagcaaaaggcggagacattgatagagcttctacggcaaccaagatccggcaacgcc

SEQ ID NO: 206106 - DNA, 392 bp, Gossypium hirsutum
tggaagtataataaaagccattggaagtaaagcaaaataccatatggggtgaatcaaagaagatgtgggcgattgcaggccctgcgattttggtatcggtctctcagttctcaatcggtttcgtcaccgtcgccttcgccggtcatttgggcgagctcgaactcgctgcggtcaccataacaacgaacgtgatcgaaggcttcgttttcggtatcatgttaggaatgggaagtgcactcgagacactatgcggtcaagccgtcggcgccggccaacacaacatgctcggaatctacctccaacgatcatggatcattaccggaataaccgctttatgtctaacaccatgttacctcctcgccacaccgatactaaacctactccgacaagac

SEQ ID NO: 206107 - DNA, 377 bp, Gossypium hirsutum
cggattctatcttccatggcttccaatggcgcttctacggaacagggagttagggatgcgacggagaacagtttggaaaagatcaaacggcagctggcctctggctctggtaggaacttgctacaaggtccacttctcaagcgatctgaaaccttgaggaaatggaatgaacgttgggtgatattagaccccacaacagggaaaatggaatacaagactaggaggaatgagccaactgttaagggaatcatgacgttcaatgaaaacagcaccattgccatatctcctgttaactttcatggacttccaaagtacgaaggctgctgtttctatattgggactccccagaaaaatgactactttctttgtgcggagac

SEQ ID NO: 206108 - DNA, 424 bp, Gossypium hirsutum
ccccggcctgaagaaattcgcctctagctttgctttgtttttcgttaaccatggctcataacacgtcggaccctttcttccttttccaacttttactcattagtgtctcactaatgatcggtagccacaccgtctcgacagcggctcgacgtttattcgagacacaaacaacctcatcggagttgccacaattagcttcaaaatacgaaaagcaggaagagtctgaatatgaaaagccggaatacaaacagccaaagtatgacgaagagtacccaaaacatgagaagcctgaaattcacaaggaggaaaaacaaaaaccgtgcaagcaacatgaagagtaccacgagtcacacaaatcgaaggagcacgaagagtaccagaaagaaaaacccgagttccccaaattggaaaagccctaagagca

SEQ ID NO: 206109 - DNA, 374 bp, Gossypium hirsutum
gacgaaatggcgcatagagtagatcacgagtacgattgccttttcaagatcgtattgatcggcgattctggagttggaaaatcgaatattctctctaggttcacgagaaatgagttttgtttggaatctaaatccactatcggcgtcgagttcgctacgagaactgtccaggtggagggaaagactgtcaaagcacagatatgggatacggctggtcaagagaggtatcgagctatcactagtgcttactacagaggagctgttggtgcacttcttgtctatgacataaccaagaggcaaacctttgataatgtccaaaggtggctacgtgaattaagggaccatgcggattccaacatcgtcctcatgatgac

SEQ ID NO: 206110 - DNA, 397 bp, Gossypium hirsutum
gaaaactttacttcaatcctactggtatcaataccatgggtcaagtgaacgacctcaagaattcacctggacctggtaaaaaggaactcagacaagctaccaaccaagcccttaacttgcttcaagataactatcccgaatttgtggccaaacaagtgttcatcaacgttccatggtggtacttggctttcaataggatgatcagtcctttcctgactcagagaaccaagagcaagttcgtatttgcaagtccagccaaatctgctgagaccctcttcaaatatattgctccggagcaagtaccagttcaatatggtggactgagcagagagggtgaacaggaatttagcgtggccgatgccgtcacagaggttacaatcaagccagcagcgaagca

SEQ ID NO: 206111 - DNA, 409 bp, Gossypium hirsutum
tcggcccaaaaaaaaaaggattagagtctcttggaatagtttgatcactgggtatgagcaaaatggtccagctagtgcagctcttcaggttttcttgaggatgatggattgtggaattgaaccagatgaactcacatatgccagtgtggttagtgcttgcgctagcttgtcggcaatcaagtcaggcaagcagattcatgctcgtgttgtgaaatgcaataagttgagggatgatcttgtcctgggaaatgcattggttgatatgtatgcaaaatgcaataaaatcaatgaagctagatgtatttttgataggatgccagttaggaatgtagtgtctgaaacctcaatggtaagtgggtatgcgaaggtagccagtgtgagaactgcgagatcaatgtttgcaaagatg

SEQ ID NO: 206112 - DNA, 381 bp, Gossypium hirsutum
aaataaacaaaacccagaacgacaaaaggatcaagaggtataatctatctgaaaacatatgcatataagtttgtgtggaattggtggtgggagaaggagagagtgaatatgattggtgaagcaaaagttgggaatgaagacttgaacttatgctttgagaagctgatgatggttgcagctgggaatagtgagggagttaagatgaatggtgtggggatcactgagtggaaagatatccctgtggagctgctgttgagaatcgtttcactactcgatgatcagactgctatcgttgcttccagtgtctgtagtgggtggagggatgccgtttgcttgggtctcacacaactctgtctctcatggtgtagaaagaacatgaac

SEQ ID NO: 206113 - DNA, 293 bp, Gossypium hirsutum
aaaccacaagccagatatgtttcaattttcaaaattaaaaaaaatatttatatatatatttaaattttctccttcactgtttgatggttttttattgatgacaaagaatttttttttcaattatttacactcgagactggctttaaaccaagtttgagagcagcttcccatacaagatcaatcctatccacatcaattgctccaacttcatggtgactccaaccttctagctgatgaactacacctcctgcatggcatgcatgcaccactcctcgctccattgtatactcaca

SEQ ID NO: 206114 - DNA, 397 bp, Gossypium hirsutum
tacctatatgcagccagtgaaactcaaatccatgaagacccgaatgtggctcttttctttctggaaaaggatatgcaccccggggcaacaatgagcctgcatttcactgaaaatacagagaaatcagctttcttaccttatcaaactgcccaaaaaataccgttttcatctgacaagttgccagaaattttcaacaagttttcagtgaaacctggatcactgaaggcagagatgatgaagaacacaattaaggagtgcgaacagccagcgattgaaggagaggaaaaatattgtgcaacctcactggagtcaatgattgactatagcatttccaaactaaggaaaagtgatcaagcagtctcaacagaagtggaaaaacaaacccccatgcaaaagt

SEQ ID NO: 206115 - DNA, 370 bp, Gossypium hirsutum
gaaagatctaaagtcaccattctcgcctaaaacaatggatttcagagtcatgggtttcgattcaccactgttccataccctccaccacatgatggacctcaacgaagacggcgataacaagaacaaccccaacgccgcgtcaaggacctacgtacgagacgccaaagccatggcggtgacaccggcggacatcaaagaggactcgaagtcgtacatgttcgttgtcgacatgccagggctaaaaccgggggacataaaagtgcaagtggaggaagagaatgtgctgttgataagcggagaacggaagcgagaggaagagaaagaaggggcgaagtatattcggatggaaaggagggtggggaagttgatg

SEQ ID NO: 206116 - DNA, 358 bp, Gossypium hirsutum
cttggatcgtatccgaaagcttgctgataattgtactgggctccaagggttcttggttttcagtgctgttggaggtggtactggttcaggtcttgggtctcttctccttgagcgtctctctgttgactatggaaaaaagtcgaagcttggtttcactgtctatccttcacctcaggtttctacatctgttgtagagccttacaacagtgtgctgtccacacattcactccttgagcacactgatgtttctgtgcttctcgacaatgaagcgatatatgacatctgcaggcgttcccttgacattgaaaggcccacttataccaatcttaaccgcctcgtctctcaggttatatcatct

SEQ ID NO: 206117 - DNA, 384 bp, Gossypium hirsutum
catggacctcctggaaccggaaaaactacaacagtcggggaaattgtactacaagaagtgaagcgaggatcaaagatacttgcttgtgctgcttcaaatattgctgttgacaacattgttgagcgacttgccactcacagagtaaagatggtcagattggggcatcctgctcgattattacctcaagttttggacagtgctcttgatgcaaaggtactacgaggagataatagctctcttgcaaatgacattagaaaggaaatgaaggcactaaatgggaaattattgaaaaccaaagacagaaatacaaggagagagatccagaaggagcttagaactctttcaaaagaagagcgtaaaaggcagcagcttgctgttactgat

SEQ ID NO: 206118 - DNA, 393 bp, Gossypium hirsutum
actccctttcttttttttctgcatctgcttttatttctggacagctcaaaattaataattataaatcaaatcaagtctctttcttccttatcctttcgatctgctaatcaagtcatttcaagattctttttctgaacaagaaaaagaaaaatagtaggacaatgccgtccttggaggatgagctgtttccgtcgacgccagggaagttcaaggtcgacagagcacacaatatgaaccgtcaattccatcgttgcttcgcttcaaccagcaccatgtttttatgggctcttttcttgatcgcattgacggcgtcgtatttgcgcttccagagtttcgttgattctggtagccgatatttcagtgcttcatggggtggtatccaatgggaaaaac

SEQ ID NO: 206119 - DNA, 407 bp, Gossypium hirsutum
tgcacatttattcatcgatacgtgaaatccaaccctcgggaagttgaaaatgctacatggatgctaacagtattccattgttttggtcagtatttctgcctacactttgaagccttccagttgggaatggctccagtttacatggcatttatccgtttcatgggtgacgagacggaagctaggaactatagctacagccttgaagtcggagcaaacggacggaaacttatatgggaaagcgccccacgtagcatccgtgatagtcaccggaaagtcagggacagccatgatggtctaattatccaacgaaacatggcacttttcttctccggtggggatagaaaggagctgaaactgagggttactggacgaatatggaagggacaacaaaattcagatgccaacat

SEQ ID NO: 206120 - DNA, 356 bp, Gossypium hirsutum
ttatctttttgtttcaatcattgttctcttatccgccggtgttgtctcaggttcgggttcggtcgggattaactacggtcgtgtagcaaacaacttaccgtcaccggaaaaagtcgtggaactattgaaatcacaaggaataaacaaagtgaagctttacgacaccgacgcgacggttttgacggcgttagcggattccggtataaccgtggtcgtcgcacttcctaatgaactactttcatccaccgctgctgatcagtcgtttgcagacaactgggttgaagcaaacataacaaagttttacccaaagacaaaaatcgaagccatagctgtcggtaacgaagtgtttgtcgatc

SEQ ID NO: 206121 - DNA, 340 bp, Gossypium hirsutum
tgtctattctcttcctttttgccctcttctccatgcaagatccatgctagagagtacttcagcaaattcccaagagttaacatcaatgagaaagagacaacaaccagagagcaaaagcacgagaccttcgttccccagaccacccaaaagccagaagaacaagagccaaggttcattcctgaaacccaaaatggttatggcctttacggccacgagtcaggctcaggctcaggctcaggctcaggctcaagccggcccagtttcaccaccaaagaaacctatgaaccctatgtcaccccttgtagaatcccacctgatgagccctataaacagcatcccg

SEQ ID NO: 206122 - DNA, 418 bp, Gossypium hirsutum
cccaaacatgagaagcctgaaatgcacaaggagaaaaaaaaaaaaaccctgcaaacaacatgaagagtacgagaaagaaaaacctgagttccccaaacaggaaaagcctaaagagcacgagaaacacgaagtcgaatatccgaaaatacccgagtacaaggaaaaacaagatgaggataagaaacataaacatgaagagtaccacgagtcatacgaatcgaaggagcacgaagagtacgagaaagaaaaacccgagttccctaaatgggaaaaatctaaagagcacgagaaacacgaagttgaatatccgaaaatacacgagtacaaagaaaaacaagatgagggtaaggaacataaacatgagtttccaaagcatgaaaaaaaaaaaaaaaaaaaactcgacggcacgagggggggc

SEQ ID NO: 206123 - DNA, 371 bp, Gossypium hirsutum
tctagggaagttgttagctctgacacaatcgataatgttaaggcgcaaaattcaagataaggaagggatccctccagaccagcagaggctgatatttgctggaaagcagctagaggatgggaggacccttgcagattacaacatccagaaggagtccaccctccacttggttctccgtctccgtggcgggatgcaaattttcgtgaagaccctgactggaaagaccatcaccctggaagttgagagctcagacacgattgataatgttaaggccaagatccaggataaggaaggaattcctccagaccagcagaggctgatttttgctgggaagcaacttgaagatgggaggacccttgcagattacaaca

SEQ ID NO: 206124 - DNA, 315 bp, Gossypium hirsutum
cgaggtttcaacattactcatctctttcgacgacggaggaggctaattttgctgcggcaatggcagggacccgacaatgcgggatattatatttggccaatcctcttgacgcctgttcggatttgagtaataaagcagacaaagggtccaatattacttccctctttgcgctggttattcgaggagggtgcatttctgatgactaagcagggagagtgcacaaagcaagataccaacccgctatcgactatgacaatgatgatggtttctcggttgcaatggcaaggaatgctggtggcataaatatacatgctg

SEQ ID NO: 206125 - DNA, 322 bp, Gossypium hirsutum
catctttgttagctttcatttttattcacttcaagcgggttacacagtttacagccatagaagcaacaacaatgtggagatcaatcataactttcattctcttcgcctttcttttcttccctatttcagcgacgaagataacactctacaacaaatgctcacatccagtatggccagggattcaacccagcgccggcaagccaattttagcccgcggtgggttcaaactcccaccaaacaaagcctactccatgaatctacctccgttatggtccggtcggttctggggtcgacacggttgttcctttgacgcctcgggtca

SEQ ID NO: 206126 - DNA, 394 bp, Gossypium hirsutum
tcagtcttttgtttgtgacaatgggactggaatgggcggggctggatttgctggagatgatgctccaagagctgtattccctagcattgttggtcgcccacgtcacactggtgtgatggtcggtatgggccaaaaggatgcttatgtgggagatgaagctcaatcgaaaagaggtattttgactttaaagtacccaattgagcatggtattgttagcaattgggatgacatggagaaaatctggcatcataccttctacaatgagcttcgagttgcccctgaggaacatccggttctcctcacagaagctcctcttaacccaaaggccaatcgtgaaaaaatgactcacaatatgtttgagacattcaatgcccctgctatgtatgttgctatc

SEQ ID NO: 206127 - DNA, 331 bp, Gossypium hirsutum
attcgtccaatctctaaatgcttaccaacttattctgatgtcaatgaatgatcgatcaaaaataaaatcacatttacattgcacttgacaatggataggtcattattcgcactagctccaccaaactgtttcacaaagtagcaccatgaacaagtccgaacatagcagttgttcactcggattttatttcatcactgtcccgaaaacatagcacttgttctttttgttcaaccttccaatgccgatgctccggatataatctcaatcaattcagtggtaattgatgcttgacgggttctgttatatgtaagagttaaagcgatcaagcatg

SEQ ID NO: 206128 - DNA, 413 bp, Gossypium hirsutum
aaaaaagaggggacccccgggcctggggaatttcggcccaagtccaaatctattccaccaccacggttgagggcattacggggttcgtaccgaaggacagcgcattcaaggctcttacgaagccttcattgtcaaatctaactgatgatcagttcaaatcagtgctcctttaccatgccttgccacgatactatgcccttgcggacttcaatgacctaagtgagaaaggccctattagtacacttgctggtggccaatacactttgcaattcaacgatgagtctggtaccgtccgcctcgattccggatggagcaaaacaaaagtcactagcgcagtacatacgtccaagccagtcgcagtctatcaaatcgataaagtccttcttccggaggccattttcgggaccgacata

SEQ ID NO: 206129 - DNA, 377 bp, Gossypium hirsutum
aggtttcatcaaagcctgcgtgggtgtaagcagtacaccgcacatcctccaccgattccaattccatggctgctaccgtccccgcccccaagtgggctcagaagaccgtaactcttcctccccttcggcggggctgccatctcgttacgtctcagatattgaaggaaattaggccagatttatcagaatttaagtgtggccttgctcatctattcctgcaacacacgagtgcttctcttactatcaatgaaaattatgactcggacgttcgtgacgacaccgagacgttcctcaacaaaatagttcctgagggaagatctgcgccttggaagcatacgcttgaaggccctgatgacatgccagcccatatcaaatca

SEQ ID NO: 206130 - DNA, 367 bp, Gossypium hirsutum
acagagcccccggctgaggaattcgatcgaggagggacttttttaacttggaaaagaaattgggacagggggccatttttgtgacttcaacactgatggaacaagggggtgtccctccttcttcaagccctgcagctttgctcaaagaagccattcatgtaattagctgggggtatgaagacaaaacccaatggggaagcgagcttggctggatttacggctcgagtacagaagatatcttaacacgattcaagatgcattgccgaggatggagatcaatatactgcatgccaaagttgcctgcattcaacggttcagctcccatcaatctatcggatcgactaatccaagttcttcgatgggcact

SEQ ID NO: 206131 - DNA, 410 bp, Gossypium hirsutum
ccccctgttgttaactcgttgtgattgtgaagctttctttaaaagaatcctagttaactcgacgcgtttacccagaaagaggtgaagatgtcaactcctgcaaggaagagattgatgagggattttaagaggttgcagcaagatcctcctgcaggaattagtggtgcacctcaagataacaacattatgctttggaatgctgttatatttggacctgatgacaccccatgggatggaggtacgtttaagctgactcttcagtttacggaggattatccaaacaaaccaccaactgttcgttttgtatcccgaatgttccatccaaatatttatgctgatggtagcatctgtttggacattctacaaaatcagtggagtccaatttatgatgtagctgcaatactgacatt

SEQ ID NO: 206132 - DNA, 354 bp, Gossypium hirsutum
agttgaattagctgctgagatgttgtatggtcttatacatgtacgttacatattaactagcaagggaatgtctgctatgttggagaagtacaaaagctacgattttgggagatgccctagagtttattgctgtggacaatcttgtcttccagttggtcagtcagatattcctcgtgccagtaccgtgaaaatctactgtgcaaagtgtgaagatgtatattatcctcggtccaagtatcaaggcaatatcgatggagcatacttcggggcgacatttccacatctatttctgatgacgtatggacacctaaagccacaaaaggcaacgcaaaactacatccccagagtatttgg

SEQ ID NO: 206133 - DNA, 273 bp, Gossypium hirsutum
tcaaggttgtggacatcgtcgacactttcagacttgaggagcaacctgcttttgacaagaagcagtttgtgaccttcatgaagaggtacatcaagaacttgacacccaaattagagcctgaaaagcaagagtctttcaagaagaacatcgagggggctactaaatttttgatgtcgaagcttaaagatctccaattttttgtgggtgagagcatgcatgatgatggtagcctagtgtttgcatactacaaggacggtgccaccgatccaacct

SEQ ID NO: 206134 - DNA, 363 bp, Gossypium hirsutum
  unsure (1)..(363): unsure at all n locations
tctacttcacttctccaatagaaaaagaaaaaaccctagcggctacactcttccctcactttctaaactaacagaagaaaacaatcacggaaatggagttttctcaagccgacttcgatcgccttttagtcgccgaacacacccgtaaaacctctgaagtcaactacgccaaggaccctcttgatgctgagaatttaaccaaatggggaggggctttactcgaattagctcaatttcagactgtttcagatgcaaagcagatgataaatgatgcaatttcgaaattggatgaggcgttgatgataaatccatccaagcacgaaacttttgtggtgcatgggaaacgctctntccactactgca

SEQ ID NO: 206135 - DNA, 362 bp, Gossypium hirsutum
ccgagttggagattgatgcttggagttctttctattccttccctcgcatattttgggttaactgtattctacttgcctgaatcaccaagatggctagtaagtaaagggcgaatgaatgaggcgaaagcagttttgcaaaggctacgtggcagggaagacgttgctggtgagatggctttgttagttgagggactgggtgttggaggtgaaacatcaatagaggagtacataattggcccagcaaatgacgacattgaagacgaagatatatctgctgataaagatagaatcaagttatatggacctgaagcaggtcagtcctgggtggccagaccagtcactggacatggtagcagtatagg

SEQ ID NO: 206136 - DNA, 357 bp, Gossypium hirsutum
gttcaatgtacacctttgtgttcctttggactcctgctttgagccccaatgatgaagagatccctcacggttttatttttgccacattcatgttggcttctatgctgggaagctcccttgcatctcgattgatggctcgctcatcacccagggtagaaagctacatgcagattgttttcgtgatttcctctgcctctctcctgcttcccattataactaatttgttggtgcctccttcaaaggagaaaggcggaagcatctcatttgctggctgtcttcagcttcttggcttctgtacttttgaggcatgtgtagggatattctggccatccattatgaaaatgagatcccagtaca

SEQ ID NO: 206137 - DNA, 361 bp, Gossypium hirsutum
ctcaagggtattccataatgttttctgacatgttccctttcatgttagcatctcagggatctttggacgaactgaacaagcttctgaaggagcctgtacccatgaaccgtttcagacccaacatccttgttgacggctgtgaaccgttctctgaagacctatggactgagattaaaataagccaattttcatttcaaggtgtgagactatgctcccgctgtaagggggcctacaatcaatcaagaaaccgcaattgctggtccagagccgaatgaaactcttatgaaatacaggtccgataaggtcttgcgaccggacaagaaacaacaaggaaagatctattttgggcagaacatggttt

SEQ ID NO: 206138 - DNA, 364 bp, Gossypium hirsutum
gttttatatatatttgttgaaattggaatggggcaaatggattactatgagaatgactttgaggctactatgctcaaagatactgctgcctactactcaaggaaagctgcaaattggatcgtagatgattcttgtccggattacatgttgaaatctgaggaatgtttaaaatgtgagaaggatagggtctcccattacttgcattctagtagtgagccaaaactgctcgagaaagttcaacatgagttgttatctgtatgggaaacccgacttctcgataaagagcactccggctgccatgcattgctcagagacgacaaggtggatgatttgtcaagaatgtttagactcttttctaaaattc

SEQ ID NO: 206139 - DNA, 363 bp, Gossypium hirsutum
ggaaacatttgggccaagggccattacactgaaggagccgagcttatcgatgccgttcttgatgttgtgaggaaagaagctgagaactgtgactgcctgcaaggtttccaggtatgccactcattgggtgggggaactggttccggtatgggtacattgcttatctcgaagatcagagaggagtaccccgataggatgatgcttacgttctccgtgttcccctcgccaaaggtttccgatacggttggtcgagccatacaatgctactctttcggttcatcagcttgttgagaatgctgatgagtgcatggttcttgataatgaggctttaatatgatatctgcttcaggactcttaaattga

SEQ ID NO: 206140 - DNA, 361 bp, Gossypium hirsutum
gaagaaagcatttttgattcactgggtgcggttagatcaatattcttcagttgatgaggcctataatgatggcatgaaacgattggaaactttagtatctagagtacatgatatagatcccccaaagctgcctgcaggttcaatcaagttgtatactcgtctttttggcccaaaattggagatttcaagcatgacaagtgatgcatacacagaggctgtgttgcgggctaaagagcacattctggctggtgatattttccagattgtattaagtcagcgttttgaacgtagaacatttgctgacccatttgaaatatacagagccctcaggattgttaatccaagcccatacatgacatat

SEQ ID NO: 206141 - DNA, 363 bp, Gossypium hirsutum
cgatcctagttgccgccatcctcgtaacggctttttacggcggcgcggcgacatcggcgcacgcaccggcagctgatccagcgatggccatgtcgccgtccgccatggcaccgacgccggactgtatgacgaacttgctcaacttatcggattgtttgacgtacgtggaggccggaagcaacttgacgaagccggacaagccttgctgtccggaattggctgggctagtggaaagtagccctcaatgcttgtgctatttgatggataagaatgcgacggcgaactatgggatcaacattgacatggaaagagctcttaagctgcctaatgtttgccatgtcaaaacccctcctgttagtcttt

SEQ ID NO: 206142 - DNA, 362 bp, Gossypium hirsutum
caaaatcaagtttcttggtgtttctcgacatttttgtgaatctcatagtttgtataagcctttactctggtgctgtacaggaagatagaaaggtttacattgcatacttgggatcacttcctgatggagactacattgcttcatctcaccattgcaatatgcttcaagcactttctaaacacagctctgtggaaaattacttaatccgaagttacaaaaggagcttcaatggatttgcagctaagctaactaatgaagaggcaaagaaactttcaagctttaaaggagtggtttcggtttttccaagtaaagtttaccacctgcatacaacaagatcatgggatttcttgggactcaatcaa

SEQ ID NO: 206143 - DNA, 338 bp, Gossypium hirsutum
ctgaggaggaggaggcaccaaagcccaaaccaaagaatcctcttgatttgctgcctccaagtaagatggtactggatgactggaagaggctttactctaacacaaagaccaatttccgagaggttgcaattaaaggattctgggacatgtatgatcccgagggatactcactgtggttttgtgactacaagtacaatgaggagaatacagtttcatttgtcacaatgaacaaggttggaggattcctgcagagaatggatttggcccgcaagtatgcatttgggaagatgttggtgatcggtgctaaccctccattcaaggggaaaggactatggctt

SEQ ID NO: 206144 - DNA, 366 bp, Gossypium hirsutum
acttaataaaaatccaaaggaaagtagaacattagaaacttaacagtaatatttgcaaaaattcccaactcatcatcgccaaaaaacaaaacacaccaaccaaaaaacaggttatggaagagattcaaactgtagttgtgaaataatacagatgatgaccaaatgatatgtgtgttaaaataaataaacagccgtacggaagaagtaaaattcacccataggtatgtatccaagaaaatgaaagaatataattctttttccccccaaaggaaagctgagttttcaattcaaatagatctcacttatgctcctgagtgcgacactggggtagtttcaaattgaccatccttaaatacatggatatac

SEQ ID NO: 206145 - DNA, 365 bp, Gossypium hirsutum
cttttgtcggctgatgggatcccttaccataagtcttgcttcaaatgcagtcattgcaaagggacactaaagttgggtaattactcctcgatggaaggtgtcgtttattgcaagcctcatttcgagcaactgttcaaggagtcggggaatttcaacaagaatttccagtcacctgcaaggtcagctgagaagttaactcccgagctgacaagatcacctagcaaagccgccagcatgttttccgggacacaagaaaaatgtgctacttgtggcaaaactgcttatccactcgagaaggtaacagtggaaggacagtcgtaccacaagtcatgtttcaaatgctctcatggtggctgccctataac

SEQ ID NO: 206146 - DNA, 354 bp, Gossypium hirsutum
cttaagcagaatgctcgaagagaaagacaggctgcaccttgcctttattgaagagacaaggaagatgcaaaggcttgctcgagacaatgttcgaaggattttggaagaacaggaaaagctgaatcatgaactggaaacaaagaaaaggaagatcgacaactggaccagggaactgaataaacgtgagacgctaactgagcgcgaaaggcaaaaacttgatgaagagaagaaaaagaacaatgaaagaaataattcacttcagctagcttccatggagcagaaaaaggctgatgagaatgtgttaagattggttgaagagcaaaaagagggagaaagaagaggccctgaaaaaga

SEQ ID NO: 206147 - DNA, 361 bp, Gossypium hirsutum
aaccaatcttgtgccatatcctcggatccatttcatgctctcttcttatgcgcctgttatctcagctgagaaagcataccatgaacagatatcagttcctgagatcacaaacgctgtgtttgagccctcaagcatgatggccaagtgcgatccaaggcatggcaagtacatggcttgctgcctgatgtatcgaggagatgtggtgcccaaggatgtgaacgctgctgttgctaccatcaaaacgaagaggaccgtgcagtttgttgactggtgcccaactggtttcaaatgcggtattaactatcagcccccagctgttgtccctggaggagatcttgctaaggtgcagcgagctgtttgt

SEQ ID NO: 206148 - DNA, 362 bp, Gossypium hirsutum
tggagctccgcagttccttctttgtctgcttcctgataggaaaaactctgatctttatgggccatggaagcggaagaatctttctgagtatggcatcgtgactcagtgtatggcaccagctagggtgaacgatcaataccttacaaatcttcttctgaagatcaatgctaagcttggaggtcttaattcaatgctaactattgagcaaacaccttcaatccctatgatttcaaaggttccaactatcatccttggaatggatgtatctcatggttctcctgggcagtctgatgtgccttcaatagctgcggtggttagctccaggcaatggccattgatttcccgctatagggcatcagtcc

SEQ ID NO: 206149 - DNA, 361 bp, Gossypium hirsutum
attccttcttatttcctctcctaagtttcgactcaaaacattcacaaacaaagaactttaaatacttgtctagctcattctctcttttccatcatttcttttaacatggagacgatcactcaaaatggtcaccacaaggggtctttggagagcttttgcactgcttcaaagggtgccggtggagccgttgatcctttgaattggggtgttgcagctgagtcactcaaggggagtcatttggatgaagtgaaacgcatggtggctgaatacaggaacccattggtgaagcttggtggggagaccttgacaatttctcaagttgcaaccattgctacacgtgacttgggtgtcaaggttgagc

SEQ ID NO: 206150 - DNA, 355 bp, Gossypium hirsutum
gtctccaatcccaatcaatattatgttggccatcagtcactcaatctttgtcaatggtgattgcaccaacttcgagatcgatccatcattcggatacgaagcttctgagctctaccctcaagtgaaatacaccactgtggaagaaggcctcagtcgttttgtttgagaaagctagaaatcaaatcagatcattgttgttattaaactgataccagtaataattcaaaaactgtcactgagagatttgtgcagaggacttggggattctgtgtgtatgcatgtgtgtgtttatgtcataaatttctcgttactatcattcaacataatgccaaacatgctattcttcttgtgtcgt

SEQ ID NO: 206151 - DNA, 192 bp, Gossypium hirsutum
  unsure (1)..(192): unsure at all n locations
agactagcttatataaacaccattgtctatcctttcacatcccttccactcattgcctattgttcactaccagcaatctgtcttctcacaggaaaatttatcataccaacgctctcaaacctggcaagtgttctctttcttggccttttcctttccattatcgtgactgctngtctcgagctccgatggagt

SEQ ID NO: 206152 - DNA, 354 bp, Gossypium hirsutum
attaaagatgaggaaagcaaaaatcctcccgaagtgaacaagcaactcaatgatgagaagcagtctatgatcaaagaactgaattcgtatgtagctatgaggaaaacatacatgaatacccttggtaacaagaaaattgaactctttgatatgggagctggagtcagtgaacctacagctgatgaaaatgttaaaatggcatcatcaatgtcaaaccaagagcttgttgatcatgggatgaagacaatggatgagactgatcaggccattgaacgctcaaaaaaggttgttgaacaaaaaaattgaagtaggaactcaaactgctggtactctaaaaggacaaactgatcaaat

SEQ ID NO: 206153 - DNA, 358 bp, Gossypium hirsutum
tttatgtctggacaatatcttgaatattgtgatacgcaagagtgatgaagacgagcatatggagaccagtgatgattttatcaggcacatgcaagaacaatttaaagaaaaagctcgcaaatctgagtcagtttattatgcagccacagatgtggtgattctgagattcatggttgaggcaagctgggctcctatgttggctgcgttcagtgtgcctcttgaccaaagtgatgatgaagcagtaacagcattgtgtattgaaggcttccgctgtgcaatacatgtcactgctgtgatgtccatgaagactcatagagatgcatttctgacttcattagctaagtttacttcactccac

SEQ ID NO: 206154 - DNA, 355 bp, Gossypium hirsutum
cttttgtcggctgatgggatcccttaccataagtcttgcttcaaatgcagtcattgcaaagggacactaaagttgggtaattactcctcgatggaaggtgtcgtttattgcaagcctcatttcgagcaactgttcaaggagtcggggaatttcaacaagaatttccagtcacctgcaaggtcagctgagaagttaactcccgagctgacaagatcacctagcaaagccgccagcatgttttccgggacacaagaaaaatgtgctacttgtggcaaaactgcttatccactcgagaaggtaacagtggaaggacagtcgtaccacaagtcatgtttcaaatgctctcatggtggct

SEQ ID NO: 206155 - DNA, 359 bp, Gossypium hirsutum
tttaaagatgaagttcttggaagcagcactccgatactatgacatatctcaaattgagaagcgacaaataggagatgaaacaattgatgaggatgcactggagcaagctctatctgctgctgtaacatgtacaatattagctgctgcaggtcctcaacgctctcgtgttcttgccaccctttacaaggatgaacggtgctccaagctgaagatttatccgatattacaaaaggtttatttggagagaatattaagaaaacctgaaattgatgcattttctgaagaactgaaaccacatcagaaagcactgcttcctgataattatactgtgctggaccgtgccataatagagcataatc

SEQ ID NO: 206156 - DNA, 364 bp, Gossypium hirsutum
tactactccaagcaagcattttccttacaagtttgtttttcttgtgattaatcgatatggctagctcaatgtcccttaagcttgcatgtgtggcggtgttgtgcatggtggtgggtgcacccctggctcaaggggccgtaacctgtggtcaagtcacaagctccctcgcaccctgcattggttacttgacagggaatggtgctggtggcgttcccccaggttgctgcggcggcataaaatctctcaactccgccgcccaaacaacaccagaccggcaagcagcttgcaaatgcatcaaaagtgcggccgccggcatttctggcatcaactatggtattgcaagcggactcccaggcaagtgcgg

SEQ ID NO: 206157 - DNA, 364 bp, Gossypium hirsutum
tttttgtttacaacaacaatggctggacacacagtttacaccctctcagaagtgtctcgacacaaatccaagaacgactgttggcttgtcatcgatggccgagttctgaacgtgacaaagttcatggaagaacatccaggaggagaagaggtgttgttggaatcagcagggaaggatgcgacgaaagaattcaacgatatcggacatagcaagtcagctcagaatttgctcctcaagtatcagattggtgttctccagggtcacacttcaaagaataatgaacaggttggttcaaccgaggagcccaaaaagaaagagatgagtgcattcgtgatcaaggatgacctgacgcctaaatatgcgg

SEQ ID NO: 206158 - DNA, 235 bp, Gossypium hirsutum
gaaaacttgtaacgagcttcgtgggtggagcttgttttcgttgcgtttattattatttttttgatattcccaacacagagaaaggaaggaatggagagcgattcagcgatggtggcatttccattgctgactacgcccatcgaatccaactacagggcatgcaccattccttacagattcccttccgataatcctcgaaaggctacccctactgaaatggcctgaatcgaccttt

SEQ ID NO: 206159 - DNA, 365 bp, Gossypium hirsutum
ttctcattcaaaggaaaaagaggatccttaagcagaggttgaaagtcccaccagcactgaaccagtttacaaagactcttgataaaaaccttgcaacaagtctgttcaagttgctcctcaagtataggccggaggacaaggcggccaagaaggaacgtctcctgaagaaagcccaagctgaggctgaaggaaaagctcccgaaacaaagaagccaattgttgtaaaatatggactcaaccacgttacctacctcattgagcagaacaaagcacaattggtagttattgctcatgatgtggatcccatagagttggtagtatggctccctgcattgtgcagaaagatggaggttccatactgcatt

SEQ ID NO: 206160 - DNA, 356 bp, Gossypium hirsutum
ctattctcgagttttttttttttttttttttggatttgaaatcatcaggatattgctcattgagaaagaagaagatatagaataagcattcgaatgagtacagccatgagcaactggtctctcttcaaacatgaaagaaaacattactacattccatacaagaataaaacagaacatcagccggcagttcctcttattataaatactaatttttctagtagctcaattgttgggaatggctagtcgatgggagcattctattgaggcttccccaaaggtggatgtcctggatagtgaccgtatggtggctcatgtgccggaggctcataaactggtggtttaggttttggcttttc

SEQ ID NO: 206161 - DNA, 356 bp, Gossypium hirsutum
ttctttttgaacccaggcgacgatgaagaaggctatcggtcaaactgttagagagcttaagagagaggttaataagaaagttctcaaagttcctggaatagagcagaaggttcttgatgctaccagtaatgagccatggggtcctcatggatcacttcttgcagatattgcaatggctacaagaaactatcatgagtatcagatgatcatgacagtgatctggaaacgtctaagtgacactggaaagaattggcgtcatgtctacaaggctctgactggtctggagtaccttgttggtcatggatcggagcgtgtcatagatgacataagagaacatgcttattaaatatcggctt

SEQ ID NO: 206162 - DNA, 356 bp, Gossypium hirsutum
cgctaaacgtctgatcggtcgtcgattctctgacccagcggtgcaagccgatatgaagcattggcctttcaaggttgttgccggccctggtgataagccgatgatcgtcgttaattacaagggtgaagagaagcagttcgctcctgaagaaatttcttccatggtgttagtcaagatgaaggaggttgccgaggcctatatgggtcaaaccgtgaaaaacgctgttatcaccgtgcctgcttatttcaatgattcccaaaggcaagctacaaaagatgccggatccatttccgggcttaatattttaaggattatcaatgagccaacggctgctgcaattgcgtatggcttggaca

SEQ ID NO: 206163 - DNA, 350 bp, Gossypium hirsutum
agctcttctcagtggtggtgattgttgtaacaatcattgtgtggttacttctaatgggattcttaacaacccaaatactcgttttcatttcatctcagctcttacttgtggcattcatgtttggtaacactgcaaagaccgtatttgaagccatcatattcgtatttgtgatgcaccctttcgatgtcggtgatcgctgtgtaattgacggaatacagatgatcgttgaagagatgaacattctgactaccgtgtttctgagatacgacaacgagaaaatattctatcctaattcagttctagcaaccaaaccgatcagtaacttctataggagtccagagatgagtgat

SEQ ID NO: 206164 - DNA, 362 bp, Gossypium hirsutum
ccttatttttgcacaaccatacaagcaaactaaccccatctaggtgtcttcaacattgaaaaatgggaaagagctggctcctcctggcttttatactttggcagataattccaaatgaagcggccatcgctgtgggcggtggtgttggcattggtatcggtaatgcagggggcgttggtggcggaggtgtttggattggtggaggaatcggcagcaacaccccaactccttcagtcccttcagtgtcaaagctgagcagtgcttacactgctctccaagcatggaagtctgcaatcgctgatgacccaatgcgaattttggagacttgggttggctcagatgtgtgttcttataaaggggtg

SEQ ID NO: 206165 - DNA, 368 bp, Gossypium hirsutum
cacatttagctattgtcatggagtatgctgccggcggtgaactcttcgagagaatatgcagtgcaggtcgatttagtgaagacgaagctaggtttttcttccagcagctaatatctggtgtcagctactgtcattccatgcaaatttgtcacagggatctgaaactagaaaacacactcctggacggaagtccaacaccacgtcttaaaatatgcgactttggttactccaagtctgcagtgctgcattcacaaccaaagtcaactgtaggaacaccagcatatatcgccccggaagtcctatcacgaaaggaatacgatggaaagattgcagatgtttggtcttgtggcgtgacattatacgtgatg

SEQ ID NO: 206166 - DNA, 291 bp, Gossypium hirsutum
ccatctttcatgacatacagataccatcagaggtgataatatgcaggctcgagaaagcttatattggctcctctacactacgaagagccgcattgggggctcttgcatagacgttgactatcccacaggttgcttatcttcgggaacaattgttaatggtagggcctaaccaaagggggattactctgacgcagaagtttaagacggcgatgacggagaactctactgatgctatgaaggattcgcgggtccttgattatgtcaacatgattagttgtattcaatatagaa

SEQ ID NO: 206167 - DNA, 368 bp, Gossypium hirsutum
aaatgcatcgtcgatgtctccaacagctacgcagtgcctttcgaggaagatgagaaggacccgagcatatggtttctcgaccacaactaccatgaatcaatgttttcgatgttcaagaggattaatgccaaggagcatgttgttggttggtatagtaccggcccaaagttgcgggaaaatgacctagacattcatagattgttccacaactatgtcccgaatcctgtcttggtcatcatcgatgtccaacctaaggagttgggtatccctactaaggcctactatgatgttgaagaggttaaggagaatgccactcaaaagagccaaaagattttcgttcatgttccttcagaaattgctgctcatga

SEQ ID NO: 206168 - DNA, 382 bp, Gossypium hirsutum
ttcaatgtctctactttgactcctccattcaatatttacgccaacaccgccagctttgtggccgcagcgaaaggtttttctgcatttatacaacaatattacgccggaattataccttcgattgtgggcaacgatcaacagcagctggtgactcaaatcgggctcagccagtcagcaggattaggagttctccgaacactacttaacgatgtgatcaattcaacagtgcagccatacacattcacagcggcggagctcagcaaccgtacttcagaagtggttaaccggcttgggggatgtggtgtgaaagctgaaggtttgattgtgccattgcaacttggagcagagaatcgaactaccagtaacgtcgtgccgggagatg

SEQ ID NO: 206169 - DNA, 359 bp, Gossypium hirsutum
ttttcctctccaattttccgtcactttcccgagaaaatgagagaaatccttcacatccaaggtggccaatgcggcaatcagataggagccaagttctgggaagtcgtatgtgccgaacatggcatcgattcaacgggtcgatatggtggtgactcggagctccagcttgagcgaatcaatgtttactacaacgaagccagttgtggccgttttgttccccgcgcagttttaatggatctggaacccggaaccatggatagcgtaagatccggtccttacggacaaattttccgacccgataacttcgttttcggacagtccggtgcgggaaacaattgggctaagggacattacactga

SEQ ID NO: 206170 - DNA, 360 bp, Gossypium hirsutum
ggcctcaccaaatggagcgactaatactaatcaaaatgatcaaaaaccgaccccggaccagcttgttcgagttgactcagaatgtttatcttccattgtcacaaacctagataaaaacgatccaaaaagtgccaaaaccattgaaacccatcaaagcttgcatcaccatcaccatcatcatcaacaacaaagctttgcaacttatggtgccatggaattggacttctcttcctacaatcatcatcaagcagcagcatctaacggtggaggtgtgtcattgacgttagggttacaacaacatggtgggaataatggggtgagcttagcattctccccaacatcacaaagttcattgtttta

SEQ ID NO: 206171 - DNA, 357 bp, Gossypium hirsutum
ccaacacaacaccacataccaacgccagctgaagatggagacggaggagaactagaacccttttcaactagaagatgtagatgggccccttgttaagctgcctcctccaactacaaagcttccaagggagaagcatcttccaaagcctaaacctcctacaaattgggaggagtttgctaaaaggaaagaaacgtaaaaaggacaaagttgcatgggatgaacagactggtacatggaaacgtcgctttggttatgatagtgtcaatgatgataaagacatagccatcattgaagccaagatgactgatgagccaggagaggatccttttgctaaaagacaagatgataaaaagaaac

SEQ ID NO: 206172 - DNA, 352 bp, Gossypium hirsutum
gcaaaacccagggatatgaataatataaccatacttgaaactgggttcaaaccatagtaatatgagtaatctttgtcaaagattggccagaaacctacaactctcatatcatacattattatgattcagaaaacgagtactttaccatcctcaaaatgatatgagcaccaactaaacaaaagtttcactaacttttaccaaacaaataatccgggaagaatactatgagaaatacatgaacaaacaacttcgaagctattctttctccatggttgatgactcaatcctacccttcaagcagcaacctgaccaaagagccacttgcggatctctggaagttttttattgaatg

SEQ ID NO: 206173 - DNA, 367 bp, Gossypium hirsutum
gtctagtatcagataccagctaaaaaagcatacaatttgctcaaacatgcaaggaaaaatcctgcttgttctcccaccacaaatctgttgaatcaatcgagttgcaaattggcattgagaaacttaccagaagacgtttataagcttaaatgggatgttgtggttgtggacgggccgatcggggacacgccggaagcaccagggaggatgccaactatctacactgccggcatgttggcaagaactggtgggattgggaagaagacgacgactgacgttgtagttcacgatgttcatcggacgattgaaaaatggttttcttgggaattcttctgcgaacaaaactttgtctctgctaaagggaaac

SEQ ID NO: 206174 - DNA, 361 bp, Gossypium hirsutum
gtttttgtttacaaggacaagccacgctaacggactgcggtggaaatgttgggaacaactgccgaaatagaacaacatttggagaagttttgatgctgggtccgaatttatgattgcaggtttcgcttccaatattgatcttgcatggagagaacgatatcgttacggacccagctgtgagcatagcattgtatgaaaaagcgcgcagctcagacatgaacattattatatacaaggatgctggccattctcttcttgaaggtgaaccatatgatatgattaacagagcttttagtgacataatttcttggctcgatgaacataactgtaatactgcaggctaatcgcaatctctattatt

SEQ ID NO: 206175 - DNA, 373 bp, Gossypium hirsutum
tattatatctaagaccagcctcaagctggggccaaggggctcctccaatgcaacagcctggttatggttatatgcagcctggggcatatcctggcccatcatcgcagtacaacatgttgcagcctccttatgggggctacccttcccaaccgtcatctggtggatatgcctctggttgggaccagtcatctgtacaaccaaaccagcaaacctctgctgcaagtggttatgattactataaccaacagccttcacagcagcagcagcaaacctctggtgattcggtaactccagctgataacagtggttacaattacagtcaacctccagcttctagctatatgcaaccaggacaaggttattctcagtatgg

SEQ ID NO: 206176 - DNA, 372 bp, Gossypium hirsutum
cggagagtcatgaaaagggaatatgaagaatttaaagtaaggatcaatgcattagtagcaaaagctcagaagaaaccagaagaaggatgggtgatgcaagatggcaccccgtggcccggaaataacactcgtgatcatcctggaatgattcaggtctatctaggaagtgccggtgcacttgatgtggatggcaaagagctgcctcgacttgtctatgtttctcgtgagaaacgacctggttatcagcaccataagaaagccggtgctgagaatgctctggttcgagtttctgcagtgcttactaatgcacccttcatattgaatctggattgtgatcattacatcaacaatagcaaggccatgagggaagcg

SEQ ID NO: 206177 - DNA, 360 bp, Gossypium hirsutum
taattacggagccatccgccaaatacgtatcggaacgagcaaagaaacccgcggcaccgctttcgtggtctacgaggatatctatgatgccaaaacggcggtggatcatctatcgggtttcaatgtagcgaatcggtacttgatcgtgttgtattaccagcaagctaagatgagcaagaagttcgatcagaagaaaaaggaagaggaaatcgctaagatgcaagagaaatacggtgtttctactaaagataagtgaaatctaaatatatctgtgggcttcgttgttgttattttccccttttgaattgggaatttagggttttgtatgaactattggaattaacgacctaatatgataat

SEQ ID NO: 206178 - DNA, 358 bp, Gossypium hirsutum
ctttgctgctttgtcctcttcttctatgttcttcagtttttgcaccaacaatggctcagcctcgttcacctttttgtgaagggaaatgcaaagggaggtgcaataaagcggcggtttgggatcggtgcttcaaatattgcggcatatgttgcgaggagtgtcaatgcgttccgtccggtacttacgggaacaaacacgagtgtccttgctacagagataaggtgaacaacaagggcaaacccaaatgcccttgaaaatgaaatatattcgagttcgggatttaatcaagcttaaagatcgaggacgaagaggccatatatatatatatatgcatgttgatgatgatgttattataaaa

SEQ ID NO: 206179 - DNA, 351 bp, Gossypium hirsutum
  unsure (1)..(351): unsure at all n locations
aaaatatctgctttttcttagttttcctttttgtcccttgtttatttgatatttccccctcatggccgccgctgatgtcgagttccggtgcttcgtcggagggctcgcatgggccaccgacgaccgggccctcgaagaagccttcagtgcgtttggtgaaatcgtcgaatcgaagatcattaatgatcgtgagactggaagatcccgaggctttggattcgttactttccgtgacgagaaagctatgagggacgcgatcgaaggaatgaacggtcaaaatcttgatggaaggaacatcaccgtcaacgaagcccaatcgcgcanaagtggaggcggtggcggaggatttgg

SEQ ID NO: 206180 - DNA, 278 bp, Gossypium hirsutum
catggccggaggaaccgaagcttttcctgatttgggtaaacattgtcaactttcaggttgtcatcaattagattttcttcctttcaaatgccaagcctgtcataaggtgttttgtgtggaacatagatcgtgtaagtctcatgaatgtccggaaccggatcataacagtaggaaggtgattatttgtgaaatctgttcgacgtcgatcgaaataacaggaaaagaagatcaagagaagattattttggacaaacatgagaagtctgggaattgtgatc

SEQ ID NO: 206181 - DNA, 368 bp, Gossypium hirsutum
ctttttagaatttttcttaatcgaaaatgagagagtgcatttcgatccacatcggtcaggccggtatccaggtcggaaacgcttgctgggagctttactgtctcgagcatggaatccagcctgatggtcagatgccaagtgacaaaactgtcggaggaggtgatgatgcttttaacacctttttcagtgaaactggtgctgggaagcacgtccctcgtgccgtcttcgtggatcttgaacccactgttattgatgaagtgagaactggtgcttaccgccagctcttccacccagaacaactcatcagcggcaaggaagacgcagctaacaactttgcccgtggtcactacaccattggcaaggagatt

SEQ ID NO: 206182 - DNA, 375 bp, Gossypium hirsutum
actaaacaggtttcttatctatggagttgatgaaatcatcagacaatattattcaagacagaacccaacagcagcataaacaagaaccagaaatgcaggcgcaggagggacaacaagaacaaggacatcattttcatgtattggcagttgatgacagtgttatagacaggaagttattggagaaactcctcaaagtatcttcataccaagtgacctgtgtagactctggggataaagctttggaatatcttggtctgttgaataacctggattctgactcaacagcttcttcttcttctccttcttcttcttcttcctcctcctcatcttcttctaactcatcttcttgttcccaatcttcgcaacgagagggac

SEQ ID NO: 206183 - DNA, 379 bp, Gossypium hirsutum
gtctaatatccgaaaatacccgagtacaaggacaaacaagatgaggataaggaacataaaaatgaagagtaccacgaatcacgtgaatcgaaggagcacgaagaatacgagaaagaaaaacccgggttccccaaacgggaaaagcctaaagagcacgagaaacacgaagtcgaatattcggaaatacccgagtacaaggaaaaggaagataagagtaagaaacataaagatgaagagtgccaggagtcacacgaatcgaaagagcacgaagagtacgagaaagaaaaacccgatttccccaaatgggaaaagcctaaagggcacgagaaacataaagccgaatatccgaaaatacctgagtgcaaggaaaaactagatg

SEQ ID NO: 206184 - DNA, 361 bp, Gossypium hirsutum
acgtaattagctgtggttatgaagaaaaaactgagtggggcaaagagatcggatggatttatgggtcggtgacggaagatatattaacaggtttcaagatgcattgtagagggtggaaatcggtttattgtgtaccgaaaagaccggcattcaaagggtccgctccaatcaatctctcggatcggttgcaccaagttttgagatgggcacttggttctgtagaaattttccttagtcgtcactgtccactttggtatggttatggtggaaaactgaaatggctcgagaggcttgcttatatcaacaccattgtttaccctttcacctcgatccctttactcgcctattgtactattccagc

SEQ ID NO: 206185 - DNA, 353 bp, Gossypium hirsutum
gaatgacatatcatgacacagttggcatagttgatcttggtggtggatctgttcaaatggcgtatgccatctccgagaatgctgcttcaagggctccaagtgtaccagctggacaggacaattatgtaaatgaaatgtatctcaagggatcaaaatattacctctatgtatacagttatttgcactatggcttactggcagctcgagcagaaattttgaaggccactgaagattctggcaacccttgcatcttggagggttttgatggtacttataaatatggaggagaagaatataaagcatcggcgccgtcatctggttcaagcatggaagaatgcaggagggtgactctc

SEQ ID NO: 206186 - DNA, 353 bp, Gossypium hirsutum
aaaaacccaaatcatcaccccattttatttattagtcatcttgttaatcacgtttgttgcatctaaaactgaaaaagtaagtagtgccatggacagaaagtctgaaagtgaagcggaaatcaccaagtcaattcactttacattcaagatcttaattacagatgcagttccaatccgatgcagtgcaacaatggaatccccattttggcagagaccctttgtcttggcatgctgaatagcaaactccaatgcttcccctgttgtctcttcatgagaagctcttgcagatccagcatataaaatcgggatcaaaccacgaaagactaagctgtgccttgctggagtatcatcac

SEQ ID NO: 206187 - DNA, 371 bp, Gossypium hirsutum
  unsure (1)..(371): unsure at all n locations
ttgaattcagacctcattggttttcatacttttgattatgctcggcattttctgtcttgctgtagtcgaatgttaggtttagagtatcagtcaaagagaggttatattggactggagtactatggaaggacaattggtataaaaatcatgcctgttggaatccacatggctcagattgagtctgtattgagacttgcggataaggagtggagagtaggggagcttaaacaacaagttgagggaaagactgtattgcttggagttgatgatatggatgtctttaagggtgtcaacttgaagctgctggcaatggagcagatgcttgaacagcacccgaagtggcaggggagagcagttntggtacagatcgc

SEQ ID NO: 206188 - DNA, 366 bp, Gossypium hirsutum
gaaaaaactgagtggggcaaagagatcggatggatttatgggtcggtgacggaagatatattaacaggtttcaagatgcattgtaaagggtggaaatcggttaattgtggcccaaaaaaaccggctttaaaaggtccccttcaatcaatcttttggatcgggtgcaccaagttttgagatgggcacttggttctgtagaaattttccttagtcgtcactgtccactttggtatggttatggtggaaaactgaaatggctcgagaggcttgcttatatcaacaccattgtttaccctttcacctcgatccctttactcgcctattgtactattccagctgtttgtcttctcaccggcaaattcatca

SEQ ID NO: 206189 - DNA, 367 bp, Gossypium hirsutum
caaatattggttcataaactcgagtagcttggttgactgtaggtgattagaaggtttcaaatatttgattttgagttttacctcgtaatggtgttgccagttgccattcaatttagctttatcgaatttatctcgcagcagtcttatgagctgttataattaagagaataattattctctcatctgggaaatataactcgtttatttttaacacaaattctcaaaatttcagtgaagggggatttttcaatgccatcatgagctttccacctgattacccaaacagccctccaacaatgaaatttacaacagacgtttggcatcctaatgtttatactgatggcacttgttgcatatcaattcttca

SEQ ID NO: 206190 - DNA, 347 bp, Gossypium hirsutum
gtgatacttacagtttgactcttacttggttcttctatcttatctgcaaggcacccatggttgaaaacaagatcagagaagaaataaagagacacttatcattgaaacaagtgcagggaatcttgcaaatgccatccaactacgacgagttgagtaagctaacatatcttcatgcagcgttgtgcgaaaccctaaggctatatccaccgattcccgtcgaattaagaacatgtacaaagcaagactttcttccgagcggtcatcgggtggatcaaaacacccgaatcataataggaatacatgcaatgggaaggatggaaagcttatggggagaagattgctatgag

SEQ ID NO: 206191 - DNA, 361 bp, Gossypium hirsutum
gttgcttacaatacagtacttaatgggttgtgtaagactgggaacactggtcgagctgttaagtttctaaggatgatgaatgaaagaggtttcgaacccaatattagagcatatagcacccttattgactgtctttgtaagaatgggttactaaatgaggctgtcgacctcttctctgaagtgaacgttaagggcattagaccaaatattgttatttacaattgcttaattcatggtatgtgtaattcaggccagcagcatgaggcaaccaagcttttgaatgaaatggtgggtaacaatgtttctcctgatattttcacgtataacatattgattgatgcacattgcaaggaggggacaa

SEQ ID NO: 206192 - DNA, 353 bp, Gossypium hirsutum
cagaaagagcacccaaaagaaaaaacactgatcaacgaaggatttctagggttttttttcggtatcagcaagcgatggcaatggctgctctcagacgcgaagggaggcgtttcgcccctctgatctctccccgtccaattactgctgtccgatcctctcctatcgttcccactcacgaagatgagggtccgattggtgttcgttatatttcaacccaagtcgttagaaaccggatgaagagtgttaagaatattcagaaaattacaaaggctatgaagatggttgctgcctcaaagttgagagcagttcaaactaaagctgagaattcccgaggcctctggcagccatttact

SEQ ID NO: 206193 - DNA, 388 bp, Gossypium hirsutum
agaacaccaactgcgccaaaaagagaaagcaaaatggcaaatcagaagcaaagcggacccgaacctcctatcaaagtctcaaccatcaattgtatcgatctgtctaatcctgatattggtgaatccgttgctttactaaagcaggcttgcttggattgtggatttttctatgttgtaaatcatgggataagccaggaatttatggatgaagtatttgctcaaagcaagaagtttttttatttgccattaaacgagaaactgaaagttttgaggaatgagaaacatagaggctacactcccatgtttgatgaggttcttgaccctgacaatcaagtgcatggagactacaaagaggggtattacataggcgtggacgtgcctgaaaatg

SEQ ID NO: 206194 - DNA, 364 bp, Gossypium hirsutum
  unsure (1)..(364): unsure at all n locations
gtgagttgggagaaggagaacgtctcaagtgaggcattggaagctgcccgtattgcctgcaacaagtacatggccaagtttgcagggaaggatgctttccatttgagagtgcgggttcatcccttccatgttctgcgtatcaacaagatgctttcatgtgccggtgctgataggcttcagaccggaatgaggggtgcttttgggaaacctcaaggaacatgtgccagagttgacattggtcaggttctgctctctgttcgttgcaaggacagcaacagccatcatgcacaggaggccctccgtcgtgcaaagttcaagtttcctggtcgtcaaaagattattgttagcangaagtggggattta

SEQ ID NO: 206195 - DNA, 388 bp, Gossypium hirsutum
ggcgtttcagcgcatctctttgccgtcttccaaggtttccttaagatgcttgcaggcattgacaccaactttactgtcactgccaaagcagctgatgatgcagattttggtgagctctacattgtgaaatggactacacttttaatccctccaacaacactcctcatcgtcaacatggttggtgtcgttgccggattctctgatgccctcaacaaagggtacgaagcttggggaccactctttggcaaagtgttcttttccttctgggtcatcctccatctttatccattcctcaaaggtcttatgggacggcaaaacaggacaccaaccattgttgtcctttggtcagtgttgttggcttctgtcttttctcttgtttgggttcgga

SEQ ID NO: 206196 - DNA, 370 bp, Gossypium hirsutum
gttattatcaacaaaagttctttgattcatatcagaaggtgatgttcttttgaaggtaaaaacaacaccaacatgatgaacatgaagacaaggattctattgcatccccatggaaatatttacaggtactgaaagaaactacgcacaaagtccagatattttacactatgcttattcccattataaaggccaacaagatttgattctagcactgaagtaatggaactcacatattggcaaccagtttctatgaatcactggcgtcagatagggcacccttggtccatcttttaaacatctacaatgctgccttgggctggtacataggaaccatatgacccgcattatgaaccttaatgaaaccaagagc

SEQ ID NO: 206197 - DNA, 375 bp, Gossypium hirsutum
  unsure (1)..(375): unsure at all n locations
agagagcaagcgagttagacgacgaagagattataaacgtgactgattgcatatataaaatcggaaaattttaaataaatcgccttagatctcttagattcaaagtttcagttggcgatggcacaacctttggtgaagaaggacgacgatcgcgatgatgaagcggactactctccatttttggggattgagaagggtgcagtccttcaagaagctagggttttcaatgaccctcagcttgatcctcgaagatgctctcaggttatcacaaaacttctttatctactgaaccaaggagaaacattcactaaggtggaagctacagaagtcttctttgctgtgacaaagctttttcaatcaaaggatatangcttg

SEQ ID NO: 206198 - DNA, 388 bp, Gossypium hirsutum
ttaggcttgcgcttgttgagaaggggcttcttgacaagcgcaagcctaagcccaccaagctgagagctagcattacgcctgggacggtgctgattttgttggctggtagatttatggggaagagagttgttttcttaaagcaacttccttctgggcttcttttggttactggaccgttcaagattaatggcgttcctttaaggcgtgtgaaccagtcctatgtcattgcgacttccactaaggttgacatctccggagttaacgtagagaagttcgatgacaagtactttgccaaggaagtagacaagaaaaagaagaagagcaaaggggagtttttcgaagctgaaaaagaggataagaagaaactgccagaagacaagaaagaaga

SEQ ID NO: 206199 - DNA, 387 bp, Gossypium hirsutum
attatgtaatgatcaataaggggcttgattgttcgagagggctaaacaaggcaaaggatattggtgcgagtaagcatcgagaaggaaggttgcaactcgatagttggtctcaattcgcaccagcttgtggaaattctaagaatgctgctaagttatgtacctcgttttctttgccccctaagtataactcaatggctgaagctcgtggatatatatacttgatagtgaaagatcaacatggttgtaggtttttacaacggctattcgatgagggtacccgagaggatgttgaaataatattcaaggagattattgatcatgtagtcgaacttatgatgaacccttttgggaattaccttatgcagaagttattggaagtgtgtaatg

SEQ ID NO: 206200 - DNA, 260 bp, Gossypium hirsutum
ctgagagtaatcctcaatatactacggtttatgtcggcaatcttgctccagaggtcactcaagtagaactccactatcacttccatgctcttggtgctggggtgattgaggaggtccgtgtccagcgtgataaaggctttggctttgtgagatacggtactcatgctgaggcagctttggctatttaactggggaacacacactcatttttatgtggcgagcgcattaaatgttcttggggcagcaagcctacaccacct

SEQ ID NO: 206201 - DNA, 388 bp, Gossypium hirsutum
cctaactccaaaagaattgcttatattcagaatctgggtcctgctatttgccaccagtcagtgtagatcatgagatttgtcatctcggctttgttcctttttgtagttgcagctgcttatgatcctttggatccaaatggaaacttaacaatcaaatgggatattgtgtcttggacacccgatggctacgtggctgttgtgacgatgaacaattttcaaatgtatcggcacataatgagtcctggttggaccttggggtggacatgggctaagaaagaagtgatatggtccatgaatggagctcaaactactgaacaaggtgactgctcccagttcaaaggaaatgtacctcattgttgcaagaaaatacctacggttgtagacttgc

SEQ ID NO: 206202 - DNA, 365 bp, Gossypium hirsutum
acaaaaatgacgaaagactaaatgttattcaatatttctgttcttgccaaaggcaagaggagtacacatcaaatacagaaattttagcttaaaaaagcagtagcaccaacattttattgatctttctaactcacggggacattttcacaaacacttttattgattatattaacctcagtgacatttccacaaaaacttgttaaccagctacagtttacaaggcgataatggaggtccacacaaacaatcatttcccacaaatgaagaaacaggaaatttgttcttgggaagctgcccgcacagatggttataactcacattcaatttattgaacccattaatcgccgcaggaaccttgccgtaca

SEQ ID NO: 206203 - DNA, 395 bp, Gossypium hirsutum
gaggaatgagaagcatgttgagatgggtgagaaaaaatatggatcgcaagaagactagggtttttttcactagcatgtcccctactcatgcaaagggtatagattggggaggtgaacctggtgagaactgttataatcaaacaacaatgattgaagatccgaactattggggttcagatagtagaaaaagtataatgaaggtgattggagaagtgtttagtaaatcaaagtaccccattacattccttaacatcactcaactctcaaattatcgtaaagatgcacacacatcgatttataaaaagcaatggaatccattgacgcccgagcaattggctaacccgattagttatgcggattgtactcattggtgtttgcctggccttcaagatact

SEQ ID NO: 206204 - DNA, 386 bp, Gossypium hirsutum
cactgataaggctttctccgccctcaaatctggtgccttgaattcactcaacgatgaacaaagggttcagctggtgctatttcacgtcatcccaagttatatcccattatcccaattccaaacagttagcaaccctatgagaacacaagccggagatagcggcgacggtgagtttcctctcaacgtcccctcttcgggaaacacagtggttctaaagacagggctgacgaaaaccagtgttagtgataccatttataccgatggtcagctggctgtttatcgagtcgatcaggtgcttcaacctttgcaagtcttcgctgctaggtcttcagctctggcaccggcaccgggaatgtctaggaaggctgctgacgttgatgggaaat

SEQ ID NO: 206205 - DNA, 389 bp, Gossypium hirsutum
gacaaattcaaagacatgggaactgttgttatgggaaaggtagaatctggcagtgtgtgtgagggtgattccttattagttatgccaaacaaggctcaagtgaaagttgtagctgtatgttgtgatgaaagtaaggtcaggtgtgcaggacctggtgaaaatttacgggttagattatctgggattgaagaagaggacatattgtcgggttttgtcctgtcaagcattgtaaaaccaatacctgctgtcactgaatttacagcccagctgcagattcttgagttgcttgagaatgctatttttacagctggctataaggctgtcttgcatgttcattccgttgttgaggaatgcgagatagttgaactattacagcaaattgatccaaa

SEQ ID NO: 206206 - DNA, 366 bp, Gossypium hirsutum
tccgctactactccaccaagagtggtgataagctgacgagcttgaaggactatgtgaccagaatgaaggagggtcagaatgatatctactacatcactggtgagagtaaaaaggcagttgagaactctcccttccttgagaagctgaagaagaagggttatgagggcctttacatggtttatgctattgatgagtatgctgacagacagctcaaagaatttgagggcaaaaagcttgtgtcagctaccaaggaatgtcttaaacttgatgagagtgaggatgagaagaataagaaggaagctttgaaggaaaagtttgagggtctttgcaaggtcatcaaggatgtgctgggtgacaaggttgaaa

SEQ ID NO: 206207 - DNA, 351 bp, Gossypium hirsutum
accgggcactttattcatagaaaataccaaaaactagtacatcatccgaggtattcaaccctgaaaacacatattcaaaatcaacaagaaaattcattacagtagcaaacggataacgggacatccctcaatactcctcctcatccccttcgtctccttcaccagactcagcgccaacttcttcataatctttttccagtgcagcgagatctttacgtgccttagaaaactcttctttcttcatgccctcaccaacataccagtgcacaaatgcacgcttggcatacatgagatcaaatttatgatcaatgcgggaaaacacttccgcaacgctggttgagttggagatca

SEQ ID NO: 206208 - DNA, 388 bp, Gossypium hirsutum
gaaaaactcatccgaattgttaagcttgttcaatggagataatgggtttttcgttgctcttcaagttccttctcttgctctctggctttggggtttcaatggcgttacaagaaaccccattggtggctaaaaacttgggtcaaatcagttctaactcggtgcttgtggccttgttagactcgcattatacggagcttgctgaattagtggagaaagctttgttgttacaaagcttagaagagtctgtgggaaagcataatattaccatttttgctcctaagaatgaagctcttgaaaggaatctagaccctgaattcaagcggtttttgttggaacctggtaatcttaaatccttacaaactctattgctttatcacattgtgccgac

SEQ ID NO: 206209 - DNA, 338 bp, Gossypium hirsutum
ttaatttttatcatggatcattttcatgatgaattggttaaacttgggggcggtccagtagcttaaatggggtcatatcatcactagtttcgtatgcagaaaatgatgaatgggagacagttggaccaaaaaacaaatctgcagtcactagaactcaaagcttccttccttcagagttgagtgatatttttggaggacagttaagaagtgtggtgaaggcaataggaaataaagcttctgctactgttcaaccatttctattgctgcaccttgatatccatcctgaagcttgtcatactattgaggatgcacttcacttgttctcggctcccaatttt

SEQ ID NO: 206210 - DNA, 396 bp, Gossypium hirsutum
aaatcataaaatataaattctatacatatcttgtaacttattcttcatatttgatatatatatatatatacattttcaatcaactagttaatgccacctttctcaaatcttaatatactatggtgaattaaatataaatctttttatgcatgtcccggagccataaaaggtgataacatcggtgtagccaccggtaccatagccggaggaatcgcaatcgaaccatcaccgccgccgccacaatggtaatccaaacattccaccggatgttcaagcgctgcttcacacactttctcacttctttgcctcggcttttccggcaaacaattccggcgatcatcaaaagccacaccattcgaactcaaattcccacaaatcccttcttcttcacaaaaa

SEQ ID NO: 206211 - DNA, 384 bp, Gossypium hirsutum
cataaccaagatgtgaattctttaggcttaatctcagcaagaaaaacagctgaagctattgacatattgaagctcatgtcttcaactttcttggttgccttatgccaagccattgatttgaggcatttggaagagaatttgaagaacactgtgaagaacacagttagccaagtggctaaaagagtcctaacaatgggatccaatggtgaactccacccatcgagattctgtgaaaaggaccttctacgagtcgtcgatcgcgaatatctctatgcctacgccgacgacccttgcagtgcaaattaccccctaatacagaaactgagacaagtactagtagaccatgcattgatgaatggtgacagagaaaaagactccaccact

SEQ ID NO: 206212 - DNA, 406 bp, Gossypium hirsutum
ccgttaccaaacagttaaattctccctcactttattttccttttttgtttgtctttccgcctattttttctctgcaatccaagcgagttgtcaactcagtgtctcagatcaccggcgccgattttgaaaccatggaatcgttcaggagtttaaccgtaactcagcgggatcagatattggttgagcaacaagtcttcgacatattcaaaacgttctacaacctgcctccgagttctcaatccttcatgttggagcttcaacgagaaaatcatgtggagtacttaacgaaaggattaacagggctcggtccttctttctgcgtattagatgccaatcgtccttggatttgttattggatacttcattcgattgctttactggacgagtttgtagatcctgaattgga

SEQ ID NO: 206213 - DNA, 397 bp, Gossypium hirsutum
  unsure (1)..(397): unsure at all n locations
attgttttggccttgatggtggtttccgccgcgacggtggttacggcggctgacgagagtgggttagcgaatgagtgcagcaaagatttccagagcgtgatgacttgcttaagctttgctcaaggaaaagcagcgtcgccgtcgaaggagtgctgtaattcagtggcggggattaaagagaataaacccaaatgtttgtgttatattttgcaacaaacacaaacctctggtgctcaaaatctcaaaagcttaggtgttcaagaagataagctgtttcagttaccatcggcttgtcaattgaagaacgctagcgtcagtgattgcccaaagcttcttgggttatctccgagctcaccagacgccgncatcttcaccaactcctgctttaaagcaacga

SEQ ID NO: 206214 - DNA, 329 bp, Gossypium hirsutum
caagctcaagctgaatatgagaaagcaaagaagcaggagcaatcatcctccagtacaaaacctagtgagatgcctggtgggtttccaggtggaatgcctggaggaatgccaggtggtttccctggtagtatgccgggtgggatgcctggaaatgttgatttcagtaaaatattgaatgatcctgaattaatggcagcatttagtgatccagaagtcatggctgctcttcaagacgtgatgaagaatcctgctaatcttgcaaagcatcaagcaaatcccaaagtggcacctgtaattgcaaagatgatgagtaaaagtaaatagttcat

SEQ ID NO: 206215 - DNA, 327 bp, Gossypium hirsutum
gatcacaaagttgagctattttcaatggaatgacaaaacttatagttggtacaatgaatatataactacacaaaactttcactctaattttattctgtcttgtgcatctccattcttgtttgttcatacatcacataccataatctaaaagaaccacgcaagatgatttttttcaacagttaatgccacacattgtagtgtctggtcctttggttttcatcacaaatggatcaattcggacccaaagcaaggagaagattgaagccaatagcactgaccatataacaacaatggttggtgtcctgttttgtctccccattaaacctt

SEQ ID NO: 206216 - DNA, 411 bp, Gossypium hirsutum
ctctctttctcgtcaatatggcagcaaatggcgttgtttctgacaagagcttgatcgtcagcttcggtgagatgctgatcgattttgtccccactgtctccggtgtttctctagccgaagctcccggcttcctcaaagcccctggcggtgctccggctaacgtggccattgctgttgctagactcggaggcaaagcgtcatttgtcggaaaacttggggacgacgagttcggtcatatgctggccgatattctcaagcaaaacagtgtctccggtgacgggatcttgtttgaccaaggcgctagaactgctcttgccttcgttacgttacgcgccgacggagagcgtgagttcatgttctataagaatcctagcgccgacatgctgttgaagccggaggagttgaacgttt

SEQ ID NO: 206217 - DNA, 348 bp, Gossypium hirsutum
  unsure (1)..(348): unsure at all n locations
gaactggtattttggtaacaagaagtccatgttgatccccaattgtttgtttcgcgtcgggggttccgctgttttgctttcgaataagtctaaagataggaggcgggctaagtataagcttattcatgtggttcgaacacatcgaggagcagatgataaggcatttaggtgtgtgtatcangaacaggacgatgcanggaagacaggtgtttcactgtctaaagatttgatggccattgccggaggtgcactgaagaccaatatcactactttgggtcctctcgtgctaccaatcagcgagcagcttttgtttttcacaaccttggtggtgaagaaattgttcaatgc

SEQ ID NO: 206218 - DNA, 396 bp, Gossypium hirsutum
cgaagatgctgcaaccagtactggggctcccttctagtcggctcgagaacgattccctcatgcacttcaagtctcaacagctgatccaagccacctgcagtttgttatggctgcttctatcctgcgtgctgaaacatttggcattcaaattcctgattgggttaagcatccacagatgttggcagacgctgttgacaaagtgacagtcccagatttccagccgaagaaagatgcgaaaatagtaacagatgagaaggctactactctgtcaactgcatctattgatgatgcagcagttatcaacgaactcatcttcaagctaggactttgcacaaaaaattgcctcaaggattcaagatgaaacctattcaggttgaaaagatgatgatacaaact

SEQ ID NO: 206219 - DNA, 338 bp, Gossypium hirsutum
atcaccggctttcattgcctcaactgtgatggagaatgggggccttactgaaggaactaattccacatcactgtttaaagaagccattcacgtaattagctgtggttatgaagaaaaaactgagtggggcaaagagatcggatggatttatgggtcggtgacggtggatattctaacaggtttcaagatgcattgtacagggtggaaatctggttattgtgtaccgaaaagacctgcattcaaagggtgcaatccaatcaatctatcatatcgtttgcaccaagatacgagatggtcactaagctctgtataaattatgcttagtcgacactgtacac

SEQ ID NO: 206220 - DNA, 393 bp, Gossypium hirsutum
ctccccgtaagcaaaccacaaaggaaagcttggagagagacgccaaaaacaatgtctaaggaagttagtgaagaaggacagggtcgtaaggactatgtggaccctccaccggcacctctgattgacatggctgaactcaagtcatggtctttttacagagccctcatagctgagttcatagccactctcctcttcctctatgtcactgttgctactgtaattggtcacaagaaacaacaagatgcatgtgatggtgttggtctcttgggtattgcatgggctttcggtggcatgatctttatccttgtttactgcactgccggtatctcaagtggacacattaaccctgcggtgacttttgggttgtttttggcccgtaaagtgtctttcatt

SEQ ID NO: 206221 - DNA, 409 bp, Gossypium hirsutum
gtgattctcatattgatattcatcccgctgttaatcatagattgaaggaaggtgagactatccggattaatgtgaagcacaagccatctagtggaaccggtatgctttcagctgcgggattgtctggtagtggaaagcctaagaccttgagccttgctccaccacccagtggtgctggaaaaataaggtctcctctcccaccccctcccaatgaccctgttgctgctcggcttgcctctactagtcaaggtgttggtcaaagagcacccaaagaaaacatgaaacaaaccaacccatcaacatatttttctcaactagagaggaatcaccttccagcaaccggatcaggatctacgaagaccactgcatcaggatgggcagctttctaaatttgcattatcatttattc

SEQ ID NO: 206222 - DNA, 378 bp, Gossypium hirsutum
  unsure (1)..(378): unsure at all n locations
cacaagttggtcgagatgtatgctatgtgcagtttcctcaaagatttgatggcatagataggagtgatcgatatgccaataggaacacagttttctttgatgttaacatgaaaggtcttgatggaatccaagggccagtttatgtgggaacaggttgtgttttcaataggcaagcactttatggctatggtccaccttcaatgccaagttttcccaagtcatcctcctcatcttgctcgtgttgctgcccgggcaagaaggaacctaaagatccatcagagctttatagggatgcaaaacgggaaagactttgatgctgccatctntaaccttannggaatngacaattatgatgagtatgaaagatcaatgttgatc

SEQ ID NO: 206223 - DNA, 362 bp, Gossypium hirsutum
gagggctcaaaggcactattggtgatttcagcaactgagagctgggcgtggtaagccttctcagcagagatgactggagcatacgaggaaagcatgaagtggattcttgggtagggaaccaagttggtttggaattcagtcacatcgacattcaaggcaccatcaaacctcagtgaggcagtcaaggaggaaatgacctgtgagacaagacggttaagattggtgtaggtgggccgctcaatgtcaagagaacgcctgcaaatgtcgtagatagcttcattgtcaaggagaacagccacatcagtgtgctccaaaagggagtgagttgagagaacactgttgtaaggctcaacaacagaagt

SEQ ID NO: 206224 - DNA, 403 bp, Gossypium hirsutum
  unsure (1)..(403): unsure at all n locations
ggcatttcatgggacaatgaggctaacctttgtgggaatgatatgtgctggtttaaccattggcatgtatgcatcgcctctatctgtcataaggacagtgataaagacgaagagtgtggagtacatgccatttttactctcatttttcttgttcctcaatgctggtgtttggtctgcttatgcattgcttgtgaaagatatctacattggagtgccaaatgcaattggttttatcttgggttcagctcagttgatcctctatctcatgtacaataacaaaaaatcagctgaggccgtagaagaagaaaaaagangaggaggaagaggttcaactcatntggtgaaggaggcattgagatgcattcagttgaggacaatctaaacaatcgaagcctaaacaaat

SEQ ID NO: 206225 - DNA, 298 bp, Gossypium hirsutum
gtgggtttacttttcttgatattggcttcactaacaagccgctggggtagccttcctagtgaatactccatagtggaacatgagattgacgcatttctttcggaggaaagggtgttggagatcttccaacagtggaaagaaaagcatcggaaagtgtaccggcacgccgaggaggctgagaaaaggtttgaaaatttcaaggggaatttgaagtatatcctagagaggaatgcaaagagaaaagcaaacaaatgggaacatcatgtgggattgaacaagtttgctgatatgagcaatg

SEQ ID NO: 206226 - DNA, 400 bp, Gossypium hirsutum
ttggtgtttttagttctgttgttctccctatatttgatggtgtttgtgaaaagagagacaaggctctacaaactgagcaggattcaccaactacagaatctcctcattgcgatgcaattacatgggacactgaaacttctgctgtggcattacattgtttagtagatttatttattagtttctatgatgtattgaggccccggctatcagatgtggtatgcatactgacaagatacttaagaagttcaatacagggtcctgcaagcactggggttgcagcattgtctcatttgacaggagagttaggaagcagactttcagaagatgaatggcaagaaatattactagcattaaaagaagcagccatgtctactttgccagggtttaagaagcttttgac

SEQ ID NO: 206227 - DNA, 314 bp, Gossypium hirsutum
ctgagttggagattgctgctaaagctgcagatgaactaaggaaggaaggcaagaccgttagggttgtctcctttgtttcttgggagctctttgatgagcaatcagatgcctacaaggaaagcgttttaccatctgctgtatcagctagggtgagtattgaggctggatcaacatttgggtgggcgaagattgttggatccaaggggaaggctattggaattgaccggttcggggcaagtgcaccagcaggcaaaatatacaaggagtttggcttgactcctgaggctgttgttgcagctgcaaaagaactttgc

SEQ ID NO: 206228 - DNA, 371 bp, Gossypium hirsutum
atcaagtcttacagtgaagataatgttcacaagagtatcaaatacggtgtttgggctagtacacctaatgggaacaaaaggttagatgctgcctaccgtgaggccgtggagaatcaagacaattgcccagtgtttctcttcttttcggtgaatgctagtgctcagttctgtggggttgcagaaatggttggacctgttgattttgacaagagtgtggattactggcagcaagataaatggagtgggcaattccctgtcaaatggcatattatcaaagatgttccaaacagtcagctgcgtcacatcatactggaaaataatgataataagcctgcgactaacagtagagatactcaggaggtgaaactgga

SEQ ID NO: 206229 - DNA, 356 bp, Gossypium hirsutum
gagaattagtgtccacattggtcaagctgggattcgggtggggaattcttgctgggagctctactgtcttgaacatgaaatccatcctgatggaaccatgcccagtgacacctcagtcggtgtagcacacgatgctttcaacactttcttcagcgaaacgggttcaggaaagcatgtaccgagagctgtctttgttgatctggaacccactgttatcgatgaagtgcggactggcccttatcgccaacttttccaccctgagcagcttatttctggcaaggaagatgctgctaataactttgccagaggccactatacaattggaaaggaaatttgtgatctctgccttgatcgag

SEQ ID NO: 206230 - DNA, 265 bp, Gossypium hirsutum
tctaaatccaatgattcttgagactctttatcatcggcgtgtttgtgattttgccatataatctgccttcgcttccatagggtacttaatttagtgctcattgttgtggggatctgtgaaaatgaatggagctgtgcttgtagctcttgcatcacccattggtaatatgttgcaaggatgggataatgccactattgcacgcgctgttttgtacataaagaatgcgtttaaattgctaagtgcaccaactatataaggtctgatt

SEQ ID NO: 206231 - DNA, 355 bp, Gossypium hirsutum
  unsure (1)..(355): unsure at all n locations
cggcacgagttgaagatgtgattgacaattatattggtgtgtttgcatccaagaaaggtgggacaatcanaaactcgattatccacagaaaggaacttcataatcttgcatcagagattgaaaaactcaaatctagaatcaccgacctgaccagaagtttgcagacctatggaataacagcaagaaaagaaggcgaagggtctagaattttatcagagaggcaaaggcagctgagatggtcttattcacatattgtggaagagcatattgttgggtttgaagaaaacataaaggaactgatggtgaagttaattcatgaagaaaaacgttgccgcgttgtgtctatctgtgggat

SEQ ID NO: 206232 - DNA, 303 bp, Gossypium hirsutum
tgaaaaatcagatcttttaaatttcaaagattgaaagaaaagcaaaattgttatatcggtacctttttgagagaattggttgaagacttaacttccgattatttccgatgaggaaaggaagaggagccaccgcggctgccgatgcagcgatgaaaccggcggtagaagccaacggatcggtcaaagaactaaggtacagaggtgttaggaaaagaccatggggaagatttgcagcggagattagagatcccttgaaaaaaactagggtttggctagggaccttcgattcggccgaagaagctg

SEQ ID NO: 206233 - DNA, 407 bp, Gossypium hirsutum
tggaaaagttcgccttgttatgaggcaatctaagactctcaagatctgcgccaatcattatgtgttggcaacgatgacggtgcaggagcacgcaggaaacgacaaatcgtgcctatggcacgcttctgactttgctgatgatgaactgaaagatgaacttttctgcattcgttttgcgtcagtggaaaattgcaaaagcttcatggaaacgttccgagaagttgctgaatcacaaaaatcaacagaggaaaataaagaggcatctgctgcagctggtctacttgagaagttgagtgttgaggaaaaggaagccaaggataaagtggaagagaaggatgttaaagcaaaggaagaaacggaaacaaaggaggatacaaaaaaagtagatgatagtgagaagaaagatg

SEQ ID NO: 206234 - DNA, 407 bp, Gossypium hirsutum
tgaagctcttgtttctaactttgctgctttgttctcttctgctatgttcttcagtttttgcaccaacaatggctcagcctcgttcacctttttgtgaagggaaatgcaaagggaggtgcaataaagcggcggtttgggatcggtgcttcaaatattgcggcatatgttgcgaggagtgtcaatgcgttccgtccggtacttacgggaacaaacacgagtgtccttgctacagagataaggtgaacaacaagggcaaacccaaatgcccttgaaaatgaaatatattcgagttcgggatttaatcaagcttaaagatcgaggacgaagaggccatatatatatatatatgcatgttgatgatgatgttattataaaaataaacttgttttgttgctggtattttcctt

SEQ ID NO: 206235 - DNA, 387 bp, Gossypium hirsutum
gctactaaaatgtgtttattgtgatgttggcaaatttacaagtatgtctctgagctctacacaatgaaaacgatgcaccaaatataattttttttttaataaaaaccataactaaaaagaaacctagtattattactacaactacgtactaaatttcatcatatggaaatgctgttggtaattccacgaccagttacaccagggcctgatgaaggcagcagcagttcgtatggaggaatgcctgcaccggttcggtttttaagtctcatatccttgtttctttcgtttatgatttcctcgatttccccaagttttgcggcgaattggtcaaacatttgtaacactttatgatcattgatccagctgctatgaaattcgttcatttta

SEQ ID NO: 206236 - DNA, 373 bp, Gossypium hirsutum
ggaatattccaggaaagtccccatggcagatggagctcctgctgcatctgcagattcaagggtaatggattttggctcagtcttcctcctgtctcccatcaagggtgacggtgatgaggtttctgcagcaaacgcatctgcagctggcagccagcagcctggcctgaatgtggccgagttggttgttggacgtggctttggcactgtgataagacatagagattttgaggaaagatcaaactattatgatgcccttctggctgctgaatcccgtgctatttctgggaagaagggaattcattctgcgaaggatcctccagtcatgcacattcaagaccttacaatggcatcagccaagaaagctagggatttc

SEQ ID NO: 206237 - DNA, 363 bp, Gossypium hirsutum
gtgtgagggaaaaaaaaagtccatttgcatttagtgtacttaagttgttgaatgttacaattacatatgggactcaagaaattgtagcactgctaaaccggctgcccaaacatcgtcttccaatacatgctcctccggggagtgacttatgccgccccgacaccggacaaacagcattccaaccttggttagatgagatatggccatcgcatcatgccctgctccgctcattagcactggaacctcttcatgaatctgccctaccattttgttgacagcactgtaagctgcagattttagccgtgaactcagttcttgatcacaaattactgcatttgcatcatgcttccgttcaatgatgca

SEQ ID NO: 206238 - DNA, 400 bp, Gossypium hirsutum
tctctctctttctctctctctctctcgcctcggtcgtttgttttcttttcatttctttaggagggtggtcaatatggggtcttcgattttgccagatctcggagctgagatcttgatccccgtttgcgccgttattggaattgtcttttctcttgcacaatggcttcttgtttccaaggtgaagctctccccgggtcgagactcgggttcccccggtaacaacggtgcgggtgggaaaaacggctattccgattacctcattgaagaagaagaaggtcttaatgaccataatgttgttattaagtgtgctgaaattcagaccgccatatctgaaggagcaacctcatttcttttcactgagtaccagtatgttggcattttcatggttgcttttgcaatc

SEQ ID NO: 206239 - DNA, 394 bp, Gossypium hirsutum
catgctcagaaatgttttagatatgaatgctcgttatggtggtttaaatgctgcattactggaaggagggaagtctgtctgggttatgaatgtagtcccaacaagtggacctaactaccttcccctcattcttgacaggggctatgttggtgtattacatgattggtgtgaagcatttccaacatatcctagaacttatgacatggtccacgcagatggacttctatcccttgagactagtcaacatcggagatgcaccatgcttgatctattcactgagatagatcggttgcttcgtcctgagggttggatactaatccgtgacgccgctcctcttgttgaatcagccagagctctaacgacacggttgaagtgggatgccagaatcatagaa

SEQ ID NO: 206240 - DNA, 394 bp, Gossypium hirsutum
aagggtttacgtgtcacagtcaaactgactgtccagaaccggcaagccaaagttatggtggttccctctgccgccgctttggtcatcaaggcactgaaagagcctgagagggatcgtaagaagacaaagaatattaaacataatgggaacattagcctcgatgatgtgatagagattgcaaaagtgatgaggcccagatccatggccaaggatttgagaggaaccgtgaaggagattttgggaacttgtgtctccgtcggttgtacggttgatgggaaagaccctaaagacctgcaagaggaaatttctgaaggggaagtcgatgttcccttggagtgaaaaacaaagtgattattatttttgaagtttgtgtttaatgattgctttccctttt

SEQ ID NO: 206241 - DNA, 403 bp, Gossypium hirsutum
aacacacttgctagtattcctacttggagtggtgactctgaccacgcccacatttggtacctatgagtcaccaaattatgggaaaccccctactcctgtattcaagcctcccaaggtgaaaccaccaccatatgaacctaagccaccagtgtatgaaccaccaaaaaaggagaagcctgaacctaagccaccggtttatgcacctccaaagaaagagaagcatggacccaaaccaccaatgtatgaacctccaaagaaggagaagcctgagccaaagccaccagtttatacacctccaaagaaagaggagcctaaacctaaaccaccagtatatgaacctgcaaagaaagagaaacctgaaccaaaaccaccgatttatacacctgcaaagaaagagaaacct

SEQ ID NO: 206242 - DNA, 391 bp, Gossypium hirsutum
  unsure (1)..(391): unsure at all n locations
cggcacgagattgaaagaaaagaaaaatggttctgctagagaaactttgggatgatgtagtggccggtcctcaaccggaacgtggccttggccggctgaggaagatcaccaccaccccacccttgtccaccaaagatgaggcttcatcaatggcgatgccgacgagtccgacgacacctgggacaccatcgacgccggtgtcggctcgtagggacaacgtgtggaggagcgtgttcaatccaggtagcaaccttgcaaccaaaggtattggcgctgaagttttcgacaagcctcaacctaactctcctactgtttatgactggctttacagcggngagacccggagcaagcatcaccgttgattaggcggtggctgacggcggcggatggt

SEQ ID NO: 206243 - DNA, 403 bp, Gossypium hirsutum
cttactgctcatatcaccatccacccaatctggtgcggggggtggcagaaatcacagaagaaaatcatccgtgagttcatcaactcgatctccgccgttgattccaaacacccttcggtggctgggtggtggaagaccgtacagctttacaccgaccaaacgggagccaacatttcccgtacggtgctattaggtgaagagaaaaacgatcgtttttactcccacgggaaatccttcacgcgcttatcgatacagtccgttatcaaaagcgctgtaacggcccgtacgaaaccgttacccatcaatcccaaaagcgggttgtacctcttgctcacctccgacgatgtgtacgtcgaagatttttgcggccaagtctgtgggttccattacttcacgttcccct

SEQ ID NO: 206244 - DNA, 404 bp, Gossypium hirsutum
  unsure (1)..(404): unsure at all n locations
ggatcactagcccaatacgggatgaaacacatgcgatcccgtgcggacatctgcaatgccaggattcagacagaacagatggctgaggcatcggcacaagcttgtgtcagcgttcctactggtcgttggagctctcttcagaaagggttcagtgcataaaaataccactggaatcggcaaatattatcggccaaagcttggattatgtttggatttactgtgttttcttatatcccgaatagttcgaatggtgctgcattntgatgattattcatgcggtttcttatttctgaagttatgtcggaacaactctaataccagactgctaaatttatgtaaatatgctttaagatgtgttctataatacacgacgatgtttgtatataaatgatctatgatggaac

SEQ ID NO: 206245 - DNA, 404 bp, Gossypium hirsutum
atcacttccatcctcgaaaaaggtggccaattcaccactggcatcaagctattgaaagccacacaggtggctgatcaactaaacaaccagctaagcacaccggaccttaacgacgggttaacggtgtttgcgccgagtgacagcgcgttctccggactcaaacccgggacgttaaactcactttccgacaaagagaagcttcagttggttcagttccatatactcccgacgttaatgtcgacgtcccagtttcaaacggcgagtaaccctttgagaacccaagctggggatgttaaaggtgggaagtttccgcttaatgtaacggcggacggaaaccaagtgaatgtgacgaccggagtggtgaatgcgactgtggagaatagtgtgttttctgaccggaggat

SEQ ID NO: 206246 - DNA, 246 bp, Gossypium hirsutum
gggattatctttttgaagccttcttccaaattcctcggtcgcgatttttatatgagtggcgagcctcactggcaagaccataaccctcgaggtggaaagctctgataccatccacaatgtacagaccaagatccaagacacggaacggatcccactataccaacagaggcttatctttgttgctccacagctggaggattgccgtaccctcaatgcctacaacatccacaaggaatgcacactcca

SEQ ID NO: 206247 - DNA, 394 bp, Gossypium hirsutum
cttaaccgccttgtctctcaggttatctcatctcttaccgcatctttgaggtttgatggagccctgaatgtggatgtgactgagttccagactaacctggtcccatatcccaggatccactttatgctttcttcttatgcccctgtcatttcagctgagaaggcttaccatgagcagctatcggtggctgagataaccaacagtgcttttgaaccctcttcaatgatggccaaatgtgacccacgacacgggaagtacatggcttgctgccttatgtaccgaggagatgttgtgcccaaagatgtgaatgcggctgtggccaccattaagaccaaacgcacaatccaatttgtggattggtgccctactggattcaagtgcggtatcaactacc

SEQ ID NO: 206248 - DNA, 380 bp, Gossypium hirsutum
ggttactcaactgtctccttcagttctgaaagctgagggtgtaccagtctatcgggccgtacaacattctggggagtttgttcttacctttccaagggcatatcatgctggatttaattgtggcttcaactgtgcagaggcagtgaatgttgctcctgttgattggctagaacatggtcaacttgcagttgagctctacagtgagcagcatcgcaagacatcactgtcccatgacaagctactcctgggatcagctcggcaagccatccaagctctcagggagttacatgttcttggcagagaaacaccgggaaattcaaggtggaaacatgtatgtgggaaggatgggatacttacgaaggcagttaggatgagaaagc

SEQ ID NO: 206249 - DNA, 393 bp, Gossypium hirsutum
ggggaatgcatcagttttaggtcaaaatgggcttgaacaagctagccccctggcttctggaggaacattttcaaatggaggagccgatatgaacagatggatgtcacagtttcaatcagaaatgcctggtttagtacaaccctctttggcggagaactggctgaattctcaaggtggctcttccggtcttattgttaagagaacaatcagagtggatattcctgtcgacaagtatcctaactacaattttgttggccgcctccttggtcctaagggcaactctcttaagcgtgtggaggcaaatacggagtgccgtgtccttataagaggtcggggcagtattaaagatcctgctagggaggaaatgatgaaaggaaaacctgggtatgaaca

SEQ ID NO: 206250 - DNA, 399 bp, Gossypium hirsutum
gttcagcgacagagttggcttcatttctcttacctgtatcaaataccacccaaacatcgacgtcttctacactcttctctggtaagttcatcgaaagatcaaatcaagatccctgccaaaatgaacgacgctgatgtatccaagcagatccagcagatggtgagattcatccgccaggaagcggaggaaaaggctaacgagatctctgtttccgctgaagaggagttcaacatcgaaaagcttcaattggtggaagcggagaagaagaagattaggcaggagtacgagaagaaggagaagcaagttgaaatccgaaagaaaattgagtattcgatgcagcttaatgcatctaggatcaaggtccttcatgctcaagatgatgtggttaatgctatgaaa

SEQ ID NO: 206251 - DNA, 392 bp, Gossypium hirsutum
atagcctaggacaggaggatctctcaggtgatggcttcaaagcggatcttgaaggagctcaaggatctccagaaagatcctcctacctcttgcagcgcaggccctgttgctgaagacatgtttcattggcaagcaactattatgggtcctcctgacagtccttatgctggtggagtgtttctagtcaccattcatttccctccggactatccatttaaaccaccaaaggttgcattcaggacaaaggtctttcacccaaatattaacagcaacggtagcatttgccttgatattttgaaggagcagtgtagccctgccctcaccatatccaaggtattgctatctatctgctcactattgacggatccgaatcctgatgacccattggtgcc

SEQ ID NO: 206252 - DNA, 393 bp, Gossypium hirsutum
taatcctagaaattatcctttgctctgcgtatgatacccaaggcttctgcctcatttgctgtcaccggaatttttaatgctttccggatttctgcacttgatgtccggaggaatggattgcattccttctccatctttaatgtactaggaaccgtgggcaatcccttgttgcgaaggtgagctacatgggttgcataagcctgaagtgcatcattcttgagatctatagacaaagcaaatttcgaattactcaaagtatattcatgaccacagtagatatttgtatcatcaggtagtgacatgatccgctgaaaggaagaaagcatctgctccggagtgccttctaaaagcttgccacatgataagctgaacaaagtgtctccagtaaaaatt

SEQ ID NO: 206253 - DNA, 391 bp, Gossypium hirsutum
ggaaagttgaggatgttgatgaggagaaagagaaggaagaaaagaaaaagaagaagattaaggaggtgtcgcacgagtggtctttggtgaacaaacagaagcccatctggatgaggaagcctgaggagattaccaaggaggaatatgctgctttctacaagagccttacaaatgactgggaagagcatttggccgtcaagcacttctcagttgaggggcaactttagttcaaggctgtcctctttgtccccaagagggctccttttgatctctttgacacaaggaagaagcccaacaacattaagctctatgtgagacgtgtctttatcatggacaactgcgaggagttgattcctgaattcctcaactttgttaagggtattgtcgactc

SEQ ID NO: 206254 - DNA, 398 bp, Gossypium hirsutum
atttgatctttctcttccaaaatcaattccaaaaagagagaaaatcccaccaaaaaaatggcgaattctaatgacaacaacaacgacgagcaccatgaatcgagtcctcttttgagcaaacaagtggcagaccaagatttgaaggaaaaacctagtggtaaaaaggcaaaagaagctgccgccgaggtgccagctcatccggtagttgctaccggagatgggtttgggtggacggctgatgggttgccgttggtccaccggagtgtcgtcagagaacccttgggtcgatctcaatggaactcatctctccttgcttgtcttggccgtaacgatgaattttgcagcagcgacattgaagtctgtctccttggaagcttggtcccttgtgtgctatatgg

SEQ ID NO: 206255 - DNA, 398 bp, Gossypium hirsutum
cagaaaactagagccgcaatattggatgcagaggagctggttaatgtacaaactcggaaagagaaacagaatgtttccttttcacagaaggagaagcggaaaagagaacttggtcaggctagtagggggaagaattatgttgaagaagagaagaggttgctccgggaaagtggcatctattctggttttgatacttgatttgtgtaactaggaacgagctttctcatcatgtatgggatgtagttgttctcttgcgctagatacttggttgtaacatctatttttgtggttttcagaaaaacaggttccgtattgttgtattataaagataattatctttcaagacagttacaaaaaactgtgaatctagtggcatttgtttggtatgtgggattaat

SEQ ID NO: 206256 - DNA, 392 bp, Gossypium hirsutum
aactggttgatatggaatgttgttaccttacagttgagttcttccgaaagcttcctcaagacgtggataagggtggcagtgctacgcaatctatatttgaccgatacaatgactcctacctgaggagaattggaagtacagttttgtcttacgtaaatatggtctgcgctactttgcgccactcgattccaaagtccattgtttattgtcaagtccgtgaagctaaaagaagccttcttgactttttctacacggaattgggtaaactggagcaaaaacgattatcggcattactgaatgaggatccagcaatcatggaacgccgatccgctcttgcgaagagactggaattatataggagtgcacaagctgaaatcgatacagtcgcttgg

SEQ ID NO: 206257 - DNA, 382 bp, Gossypium hirsutum
  unsure (1)..(382): unsure at all n locations
aaatcccaacttcaaacaccttaattgctacgattttgtttgaagaaagaataattaaggggaaaaatatgcctagattgttatgactttcgttttgttggaaaatgaccggacatacctggccgcacgatcgagcttccttccgatatcaaccctccagcaatcgtcgtcgcagcagtaaaaatatattacatctgttagggaagagagaagtctctcctagaacaaaatatgtaccaaagaagcagtggggagaagcacctaaacgaattgtctattcttcaccttggactgaacccattagagatgccagacgtggtattctgtcatgggctgaggaagagttgctgcatttatcangcaaatattgtcctctggtacc

SEQ ID NO: 206258 - DNA, 376 bp, Gossypium hirsutum
agccgaactactcgtcaaatctattgcagtccatatagagtcttgaacaaagcttcgaagagtcgaagttcacacaatagaataagcaaaaacacacgataaaagcaaacaaatcattgggtagcaaaatgcaagccctccactcaaacattacttatttagtactcatcttcatcttcctcatcaccctcgcctgactcagcaccgacttcttcataatccttctcaagtgcagcaaggtcctcacgagcttccgagaattctccttcttccataccctcacccacgtaccagtgaacaaaggcacgcttggcatacatgagatcaaacttgtggtcaatgcgggagaacacctcagcaacgctggttgagttgg

SEQ ID NO: 206259 - DNA, 392 bp, Gossypium hirsutum
gttatgtgcttggcagctgcaaataagctgatattattttgatttgggttcctaaatcgttgggaggagggactgtaaaaaagcataggttccccatgcagatcctcccgtttcgaggaggcgcacttgtgtgcttcattgcttccttgttatttgttgccagtttttgcaatgccgatgctaaaacagtcgaggttgtcggggctggtgagtgtgcacattgtgcagagaataacttggagattagccaggctttctcagggctacgagtaaacatagactgcaagcccgaaaatgggaagaacttcaaaacacgaggatcaggggagcttgataaacaaggcaattttaaagtatccgttccagaggatttggttgaaaatggggaactg

SEQ ID NO: 206260 - DNA, 394 bp, Gossypium hirsutum
gtcaaggaacatgaggagaaaggtgcagtcttgtgatgcaccctcatccttggattggaggaactatggagttgtgactgctgtcaaggaccaaggttcttgtggaagttgttgggcattctcatcaactggagccatggaaggaatcaatgccttagttactggagacctaattagcctttcagaacaagaacttgtagattgtgataccagcaactatgggtgtgaaggaggatacatggactatgctttcgaatgggttataaacaatggcgggatcgatagcgaaagcgactacccctacactggtgtggatggcacatgtaacaccaccaaggaggaaaccaaggttgtatctattgatggctatcaagatgtagagcaatcagatagt

SEQ ID NO: 206261 - DNA, 389 bp, Gossypium hirsutum
ctggcatgattcaggttttccttggatatagcggtgctcatgacatcgaaggaaatgaacttccccgactggtttacgtctctagagagaagagacctggctaccaacaccacaaaaaggctggtgctgaaaatgctttggttagggtgtctgcagttcttacaaatgctcccttcatcctcaatcttgattgtgaccactatgttaacaatagcaaggcagttagggaggcaatgtgcttcttgatggacccacaagtcggtcgagatgtctgctatgtgcagtttcctcaaagatttgatggcatagataggagtgatcgatatgccaatcggaacacagttttctttgatgttaacatgaaaggtcttgatgggatccaagggcct

SEQ ID NO: 206262 - DNA, 396 bp, Gossypium hirsutum
aaaatttggggctctttacttaccttgttcttgcttcttgatcggaatgttagatttggtacgggtcgtgcgtgtacactgatgccattttcacactatttagacctaaagccagtaattcggatcaccggcggccaagccttgattcttcgagacggagtatagatgtcggggccactcgatcgattcgctcggccttgctttgaggggttttatggtagtgatgagaggagagagaggaaatctgatttcgagaactcagaggatgaaaggcgcacaccaattggatccttgaaaaagaaagcaataagtgcatctgctagatttaagcattctcttaaaaagaagagtaatagaaggaaaagtgatggccgtgtcagctctgtatccattgag

SEQ ID NO: 206263 - DNA, 313 bp, Gossypium hirsutum
aattaaggagcatcggtattgcactctaccttagcatccttggtgttggaagcttcttaagtagctttctcatctctgtaattgagacagtaactggtaaagatggcagagatagctggtttgcagataatcttaacagggcacatcttgattacttttattggctgcttgctgcacttagtgcccttggattggctctctatgtatattctgcaagatcttatatttatgctaggcgaagcacgtcgtaaatagcttctagcccatgttcctgggatacctaagaaatgaataaaatatatcatttcaacat

SEQ ID NO: 206264 - DNA, 398 bp, Gossypium hirsutum
ggaaaggtccaactagttgaaggcatgcttactgaagcgtacacaatgttttcagaggctttttcaatacttcaacaggtcactggaccaatgcaccgggaggttgccaattgttgtcggtaccttgctatggttctgtatcatgcaggagatatggctggggcgataatgcaacagcacaaagaactaattataaatgaacgttgcttgggtttggaccaccctgatactgctcatagttatggcaatatggcccttttttaccatggcctgaaccatacagagctagctctacgacacatgtccagggcactgcttttgctaagcctatcttctggcccagatcatactgatgttgctgcaactttcataaatgttgctatgatgtatcaagatat

SEQ ID NO: 206265 - DNA, 386 bp, Gossypium hirsutum
aatactccaagcaaccattttccttacaagtttgtttttcttgtgattaatccatatggctagctcaatgtcccttaagcttgcatgtctgttggtgttgtgcatggtgatgggtgcacccctggctcaaggggccataacccgtgctgatggcttagtcggcctcccacgctgccttccttttttgtcagggaatggtgatggtgctgatgccacaggttgctgtgccatcgtcatgaatgccttgggatcgctctgtggtgatacataggaaccgatctagcttgaaatcgggttcggatttgggtggaatttcaaattggtgtgttatggaatcccaacttaatcgtgtttaaaggtgggatccaattgtgtgatacattaca

SEQ ID NO: 206266 - DNA, 383 bp, Gossypium hirsutum
tcgagtttttttttttcacgacaacgaaaaacgagcttttcctcaacttggttatggaatatgtaccagagagcatgtatagggttttgaaacattacagcagtgctaatcaaagaatgccacttatatatgtgaaattatacacatatcagatattcagggggcttgcatacctccatagtgttgttggagtttgccataaggatctgaagcctcaaaatcttttggttgatcctctgactcaccaagctaaaatttgtgattttggaagcgcaaaagtgcttgtcaaaagtgaagctaacatttcatacatttggtcgcgtttctatcgggccccaaaactcatttttggtgcaactgaatacacaacctccattgatatc

SEQ ID NO: 206267 - DNA, 389 bp, Gossypium hirsutum
gggtggcactcatgtgaatgttggagacccttttaattacctatgtgcagccagtgaaactcaaatccatgaagacccgaatgtggctcttttctttctggaaaaggatatgcaccccggggcaacaatgagcctgcatttcactgaaaatacagagaaatcagctttcttaccttatcaaactgcccaaaaaataccgttttcatctgacaagttgccagaaattttcaacaagttttcagtgaaacctggatcactgaaggcagagatgatgaagaacacaattaaggagtgcgaacagccagcgattgaaggagaagaaaaatattgtgcaacctcactggagtcaatgattgactatagcatttccaaactaaggaaagttgatc

SEQ ID NO: 206268 - DNA, 388 bp, Gossypium hirsutum
ctccaacctctggtctgccgagctatcaaaacttgctgccaatgccttcttggcgcagagaatctcttcggttaatgctatgtccgcattgtgtgaggccaccggtgctgatgtgagccaagtggctcatgctgttgggaaagacacaagaattggacccaagttcttgaatgcgagtgtgggtttcggtggatcgtgtttccaaaaggatattttgaacctggtctacatctgtgagtgcaatggcctcccagaggttgcaaactactggaaacaagtcattaagattaatgactaccagaaaactcggtttgtgaaccggattgtttcctcaatgtttaacacagtttcagggaagaagattgccattctcgggtttgctttcaag

SEQ ID NO: 206269 - DNA, 386 bp, Gossypium hirsutum
gttgaattccttaaattcgttgattccaaggtgggtgaatcagggaccaagcttgatcgtcgagtccctccagtcatcaaacaggtctcaaccgaagccatcttggcagcccaaaaggctcccgaggttgctcgtggcgtggcttccgaagtccaccgtgctggagtggtgaacaccgcctcaggattagcaaaatcagtgtacaccaagtatgaacccacagcaaaagagctttatgcgaagtatgaacccaaagctgaacaatgtgcggtttcagcttggcgtaaactcaacatgctcccgctcttccctcaagttgcctcggtcgttgtcccaacagctgcttattgcagcgataagtataacgagacagtggctagcagtgc

SEQ ID NO: 206270 - DNA, 396 bp, Gossypium hirsutum
gccagttggggtgtggattatattgttttgactagcgtggatcgtgatgacttacctgatggtgggagtggacattttgctaagactgtccaagctatgaagaacctcaagccagacatcatggttgaatgtttaacttctgattttcgaggcgatttgaaagctgtagacactctggtacattcaggattagatgtctttgcacataacattgaaacagtgaaacggctgcaaagaattgtcagggatccacgggccgggtatgagcagagtttgtcagttctaagacatgcaaaggtgagcaaagaaggaatgataacaaagtcttcaataatgcttggccttggtgaaactgatgatgagttaaaagaagccctggctgatctgagggctata

SEQ ID NO: 206271 - DNA, 397 bp, Gossypium hirsutum
gctctcatatctgtctgatggtacaaatgacaaaatccaagctcggatatatgcaggcgtttgagggcgtctggaggagctattgacgcacccatgtgcttaagagctaataccaactcttcgcacagacggaaatattgccacaggtgatgatggtcaaacccagtgtattatcaatcatcaagcgtggccatgccttataaacctgttgacaaatgatatcaaaaagagcatacaaactgaagctgggatgacaatctcaaatattacaacctgaaataaagagccaatacaggctgtaatagacgctgatattatatctgcactggcacatctgcttgaaagtgctgaatctgatatcaagaaagaagctgcatgagccatctcaaatgccaca

SEQ ID NO: 206272 - DNA, 390 bp, Gossypium hirsutum
tgtttatgttttttttttttatgaattttgtactgtggggggttttgaatgagaactgaaatacttttgggaaattgaaaatcttcaatcggcggactagatggccaccacggagttgcagatgagtcctcagttggagcagatccatggcgaaatccgcgatcttttccgtgctctttcaaatggcttccagagactggataagatgaaagattccaataggcaaagcaaacagctggaagagcttactggcaagatgagggaatgtaaaagattaatcaaggagtttgatcgtgaaattaaagatgaggaaagcaaaaatcctcccgaagtgaacaagcaactcaatgatgagaagcagtctatgatcaaagaactgaattcgtatgt

SEQ ID NO: 206273 - DNA, 396 bp, Gossypium hirsutum
ccaatcttcactcccgtcctcacatttcccaacaaaaagcgaaggaaatcattttcatcaatcccccctatcacccttctttatctttcccacggaaacgaagagcaatcagaaaaccttgtgaagagaaaatgagggaaatcttgcatatccaaggaggtcaatgtgggaaccagatcggggctaagttctgggaagtcatatgcgatgagcatggaatcgacaacactggaaagtataacggtgactccgatctccagctggagcgtatcaatgtctactacaatgaagccagtggcggtaggtatgtccctcgcgctgttctcatggatcttgaacctggcactatggactccgtcagatcccgtcttttcggccagatctttcgtcccgata

SEQ ID NO: 206274 - DNA, 382 bp, Gossypium hirsutum
atgggctcctaatgttcccaccttacttttggcaagacttttggatggattagggattggattggctgtaactctgatcccgatttatatatccgagacagcaccaccagaaataaggggattcttgaatacccttccgctgttttctggttgccttgggatgtttctttcatattgcatggtttttggaatgtcgttaacgacattaccaaattggagattgatgcttggagctctttctattccttccctcgtatacttagcattaactgtattcttcttgcctgaatcaccaagatggctagtaagtaaaggtcgaatgagcgaagcaaggaaagttttgcaaaggatacgtggcagggaagatgtttctggtgagatg

SEQ ID NO: 206275 - DNA, 392 bp, Gossypium hirsutum
agcaccataagaaagccggtgctgagaatgctctggttcgagtttctgcagtgcttactaatgcacccttcatattgaatctggattgtgatcattacatcaacaatagcaaggccatgagggaagcgatgtgctttttaatggatcctcagtttggaaagaagctttgttatgttcaatttccacagagatttgatggtattgatcgtcatgatcgatatgctaatcgaaatgttgtcttctttgatatcaacatgttgggattagatggacttcaacgccctgtatatgtacgcacagggtgtgttttcaacaggcaagcattgtatggctacgatccaccagtctctgagaaacgaccaacgatgacatgtgattgctggccttcttgg

SEQ ID NO: 206276 - DNA, 391 bp, Gossypium hirsutum
tcgaggcattctctgttcaaaagaaacttcttatcgagatcaagcagactcagaaacctgatatggcaggcttggtcgaatttctcaaaccactgaatgaagtgatcttgaaggttaatgctatgacggaagggaggcgatctgatttcttcaaccacttgaagagtgctggggacagtctttcagctttagcatggattgcttacacaggcaaagattgtggtatgagcatgcctatcgcacatgtggaagaaagttggcaaatggctgaattttataacaacaaggttcttgtagagtacagaaacaaagatcagatccatgttgaatgggccaaagctttgaaggaactgtatttaccaagtctgagggattatgtcaaaagccatta

SEQ ID NO: 206277 - DNA, 397 bp, Gossypium hirsutum
ggaaaaaaaaaatccacattacattcatcaacagaaaacccaaaaaacccgaagctcgaaaatgggaagctctagattctcggtcagtttcctcgcgatttgcgcaatcctggccatccacgtggcggcttccgcttcgtctcccatgctcgatttcggcggcaaccatttcctctcgattaaatcggagtgcagtggatccatcgcggaatgcctgatgctaagcggggaatattcctcggacttcgacgccgaattcgccatggactccgagatcaacaggcgcattttagcggcgaggcgttacattagctacggtgcgctgaggagaaacacggtgccatgttcgcgacgcggtgcgtcgtattataactgccggccgggagctcaagcaaat

SEQ ID NO: 206278 - DNA, 334 bp, Gossypium hirsutum
caacagtaccgagctctaacagtacctgagctcacccagcaaatgtgggacgcaaagaacatgatgtgtgctgctgatcctcgtcacggtcgatacttgactgcatctgctatgttccgtggtaaaatgagcaccaaggaagtggatgagcagatgttgaatgtccagaacaagaactcctcatactttgttgagtggatcccgaacaatgtgaaatcgactgtttgtgacatcccacccactgggctgaagatggcatcaacatttattggcaattcaacatccatacaggagatgttcaagcgtgtgaatgagcagttcacaactatgttta

SEQ ID NO: 206279 - DNA, 390 bp, Gossypium hirsutum
tgacattatggggatgcaacaagaatcacctcaacccttttataatacctaagaattgcatcatttgactgttttcaccagaaaaaatgaaattgttagagtttcttgggcaagttgtatgtcttcttaaggaacttagccgctgtctcatcactccggtaacacaaaactcgcaagagtgtgtttggttccgtgggactccactgaccggatgttggtggcaatggaagcttggatttagcagaagaaccgtaactctctgcagtcatgtatttgaattgctcaatcaggctgtcagtttcagtatgaaataaagggaggatggctttaactgttgttgaaaacttttggatcaaatcagccggaagtccatcaccattggaccaaaat

SEQ ID NO: 206280 - DNA, 335 bp, Gossypium hirsutum
caaaacaagtgttcccacggtatatgctgagggtgatgtagccactttccctctgaagttatacaatgagttgagaagggttgaacatgttgaccatgcccggaaatctgccgaacaggctgtaaaggccatcaaggggctcgagaaggggcaatcagtcgacgaatatgactacttaccgtacttctattcccgttcctttgacctagcatggcaattctatggtgacaatgttggggatacagtgctttttggagacaacaacccacaatcaccgaaaccaaagttcggatcttattggatcaaagatggcaaggtggtaggggcattcctag

SEQ ID NO: 206281 - DNA, 375 bp, Gossypium hirsutum
  unsure (1)..(375): unsure at all n locations
cccacatctgaggggaaactattctgcagaatcaatggagaagtttggagagatagcagagaaatgccttgctgacgaggggaagaaccggcctacaatgggggatgttctatggcacttggagtatgtgctgcaacttcataaagcatggattgggtccaacaccacggataattccttctcaagcagtcaggccctgagggatttggaagtgaaagaagctgaaaataagcagtttgatggaaactcttgtttaagggcatcgaactctcattgntagcttgtcttatgacggacaagtgaaaaactggttattggattcctttacaatataaaactacttgtagctggaaattctttttatttttggtggat

SEQ ID NO: 206282 - DNA, 281 bp, Gossypium hirsutum
ccgacctccgaaagcttgctgtgaacttgattcccttcccccgtcttcactttttcatggtcggatttgctccactgacctcccgcggttctcagcagtaccgagctctaactgtccctgagttgacacaacaaatgtgggatgcaaagaacatgatgtgtgctgctgacccgaggcacggtcgatacctcacagcatcagccatgttccgaggcaagatgagcaccaaagaagtggatgaacaaatgatcaatgtccaaaacaagaactctttctacttc

SEQ ID NO: 206283 - DNA, 390 bp, Gossypium hirsutum
tcgactccggtaactcctcaaccgaaaccgactgcaactggttggtgtgtaccgaaggccggtattttcgatgctcaattgcaatcgagtctagactatgcatgtggccaaagcatcgattgcagtccgatccaaccgggaggtgcctgtttcgaaccgaacaccatagcgtctcacgctgcttatgccatgaacctttactaccagagttccgccaagaatccgtggaactgtgatttctcgcagacggcaacactaacatcccaaaatcctagttataataattgcatctaccctggtgggagcacttaaaaaagccagacaaaatgtgaattgaaattggaaaaaggaaaaggatggttaaataaaagctgtgggtaccttatattt

SEQ ID NO: 206284 - DNA, 298 bp, Gossypium hirsutum
caacaatccaagatccactgccaatcaatggacgggcataatttggaagactcaaagcaaagcactgctgatatgtctgttttcgtgcaaactcttcttcaacaaatgcaatccaggtttcaaacaatgtcggagtccatcatcacaaagattgatgaaatgggagaacgtataaatgagctggagcagagcatcaatgacctaaaagcagagatgggaatggagggctctccatcccttttagccccaccaaagcaaaagttagacggagcgaataaaaaggatgactctgcttaaa

SEQ ID NO: 206285 - DNA, 294 bp, Gossypium hirsutum
gaaatttataccgacaaatccagctggtctaattgagtacagggcacatccctactgtatgcaaaagtgctggccctataatgagcgctatcgcactcctaagctgccgtagaagcgaaagaatggaccctgttgatgtaaaagaaatatcatttgatgaaagtccaaggctgttcctacagtgtcaagactctgcatttattgatactcatcaatgacaacctggttaccgatagaatgaaaaatcatatcaagtgacaaagctgaaaagtgtgctacaagtacctctccatt

SEQ ID NO: 206286 - DNA, 289 bp, Gossypium hirsutum
gatcacaaagttgagctattttcaattgaatgacaaaacttatagttggtcgaatgaatatataactacacaaaactttcactctaattttattctgtcttgtgcatctccattcttgtttgttcatacatcacataccataatctaaaagaaccacgcaagatgattttttttcaacagttaatgccacacattgtagtgtctggtcctttggttttcatcacaaatggatcaattcggacccaaagcaaggagaagattgaagccaatagcactgaccatataacaa

SEQ ID NO: 206287 - DNA, 385 bp, Gossypium hirsutum
gcagtgttggctttccctttcggcacccatgcggcccctgttctcaacattacccgtcaactatcagacgcttgccccgacaccatgttttccttccttagcacccaacaatcaaacaactcaacttttagcaaaaaccatgataaaattaagccttttaatgtatgggatggattacctgaggggtatagctttagagggaatcctcatgagcccgtcgattatttccttaaggcagttcctgggagttttataaaggctatagatgctgttgtgtctgaaactggtaaaccagttgattgtttgataacagatgcattttatgcatttggggctgatatcgcggacgagctgaatattccttgggtggcggtttggatgtctg

SEQ ID NO: 206288 - DNA, 374 bp, Gossypium hirsutum
ccggcttcggagaacgcaagagtcagtatctggatgacattgctatccttactggaggtactgttattagagatgaggttgggctttccttggacaaagctagcaaagaagtcttgggtcatgcctctaaagtggtgcttaccaaggatacaaccaccatcgtgggtgatggaagcacccaggaagcagtgaataaacgagttgtacagattaaaaatctcattgaggctgcagaacaggattatgagaaggaaaaacttaacgaaaggattgctaaattatctggtggtgtggcagtgatacaggttggagctcaaactgaaacagagcttaaagaaaagaaattgagagtagaagatgctcttaatgcaact

SEQ ID NO: 206289 - DNA, 249 bp, Gossypium hirsutum
gaaaaatgggtttgaaggaggaattcgaggagtatgcggagaaagctaagacccttcccgagaacactaccaacgacgacaaactcattctctatggactcttcaagcaagctactgttggaccagtgaacaccagccgtcctggaatgttcaacatgaaggaaaagtacaagtgggatgcatggaaggctgttgaagggaaaccgaaggaggaagcaatgaacgattatatcactaaggtaaacagct

SEQ ID NO: 206290 - DNA, 286 bp, Gossypium hirsutum
cttaattctagaatctccgccatgagcaacaacggtaacaatagcaacagttccgatcccgatcgccctgtccgtgtttacgccgatgggatctacgatctattccacttcggccacgctcgctccctcgaacaagccaagaaatcgtttcccaatacgtatttgctggttggatgttgcaatgatgaaacagcacacaagtacaagggcaaaactgttatgaccgaatcagaacgttattgatgccttcccattgcaagggggtgatgagtcattctgtgctcat

SEQ ID NO: 206291 - DNA, 342 bp, Gossypium hirsutum
ggaaggcatccccccagaccagcaaaggttgatcttcgctggtaagcaacttgaggatggccgcacgttggctgattacaacatccagaaggagtccacactccacttagtgcttcgcctccgtggaggaatgcaaatttttgttaagactttgactgggaagaccattacattggaggtagagagttcagataccattgataatgttaaggcaaaaattcaggacaaggagggaattcccccagaccaacagaggctgatttttgctggtaagcaactggaggatggccgtaccctggctgactataacatccagaaggagtccaccctccacttggtgct

SEQ ID NO: 206292 - DNA, 334 bp, Gossypium hirsutum
gatatttataccggcatatccagctggtctaattgagtacagggcacatccctactggatgcaaaagtactcgcccctgtcatgagcgtgatggcacttcttgctgctgtatgttgcgaaagaatggagcctgtggatgtaaaatatatatcactcgatgatggtccgaggccgtgcctatagtgtctagattctgcaattatagatactcatgaatgccaacctattttccttgaaatccataaattttctgaaggattaaatatgaatgttgaacaacaggttcctctacttctggttgataagcaagctcctaatgaagccatggacggag

SEQ ID NO: 206293 - DNA, 375 bp, Gossypium hirsutum
ctgccgcatctcagtacctccgcagttcactgagaaatggatgaggaagttaaggctgtggttcctgagtcactcttgaagaaacagaagagggctgaagaatgggagcttgccaaaaagcaggagcttgaagttgcaaagaagaagaaagtcgagaaccgcaagctgatttacactagggctaagcagtatgcaaaggagtacgaggctcaggaaaaagagctgattcaattgaagcgggaggcaaagttgaaaggaggattctatgtagatccaaaagctaaactcttgttcatcatccgaatccgtggtatcaatgccatgcacccgagaacaagaaagatcttgcaactattgcgtttgagacagattttc

SEQ ID NO: 206294 - DNA, 201 bp, Gossypium hirsutum
ccaatttctgccctccaaacaatgctctcccaaacaatgctggtgggtggtgcaaccctcccctgcaacactttgacctttctcagcctgtcttccaacacattgctcagtacaaagctggaattgtgcctgtttcttacagaagggtaccatgcaggagaaagggagggataaggttcacaatcaacggccactcctact

SEQ ID NO: 206295 - DNA, 364 bp, Gossypium hirsutum
caatcacattctcgacgaatccgtccctgagatcgttacgagtcgtgggtatgcggaagacgtgaggatgagcaatgtcagattattcattggaacgattatcattgtaatcgctctatttgctcagttttacaaaaagaatttccctggaaaccgcgatttcctcattggttgcattgtattgtatatagttttcaatgtaatactccagctgttcagctacagaaaggaaaagaacgcaattatgtttacttaccatcctcctggatccgtcaccagcaccggattggtggtctcttcaaagttgccaagattctatgatctttatacgcttagcatagcgagtgcagatcccaaattaata

SEQ ID NO: 206296 - DNA, 384 bp, Gossypium hirsutum
cttgaatctatttttttgaagatggagggtaaagaagaagatgttaagctaggagcaaacaagttctcagagagacaacctattgggacatcagcccagacagacaaggactacaaggagccaccagcagcacccttctttgagcctggtgaactcaaatcatggtctttttacagagctggtattgccgagtttgtagccaccttcttgttcctttacatcaccgtcttgactgtcatgggtgtgtctcagtctaaaaccaaatgtgcaaccgttggtattcaaggcattgcttgggcttttggtggcatgatctttgctcttgtttactgtactgccggcatttcaggtggtcatattaaccctgctgtgacctttggattg

SEQ ID NO: 206297 - DNA, 292 bp, Gossypium hirsutum
  unsure (1)..(292): unsure at all n locations
cagatctgggttttcactcatttatagccaatagtacaccattttagctataaatagccaacctctccactctctaaaattgtgccacttcttcctcttcattctctctgtatctctttgagtgacttctttttagttctctctccggttccacctccgttcacttcgaaaaatggcctctcacattgttggatatccccgcatgggacctaagagagagcttanatttgctttggaatctttctgggacaaacaagagcagtgccgagggattgcaaaaggtgcagctgat

SEQ ID NO: 206298 - DNA, 361 bp, Gossypium hirsutum
acaatactttctttctcttacagagattgagagaaaatcacagacacacatttatatagcacagagatcatcatggctctacactcgtcttgggtcttcgtttttggtattctaggcaacgctggttcattcatggtttacttggctccactgccaacattgtaccaaatattcaagaagaaaacatcagaaggtttccagtcgatcccatacgtggttacgctcttcagtgcgatgctatggatttactatgcactgcttaagaaagatgccattttcctcattaccatcaacacttgctgcgtattcattcaaacttttaacatggtgactaacttttactccggcccaatgaaagaaa

SEQ ID NO: 206299 - DNA, 301 bp, Gossypium hirsutum
  unsure (1)..(301): unsure at all n locations
gaaatgcagaggttcacggctaagattgtggaaatgatgaagcaagagaagttgtatgcatcacaaggaggacccattattttgtcacagattgaaaatgagtatggaaacattgattcagcatatggggctgccgcanaaccctatattaaatgggcagctggtatggctatttcattggatacaggagttccctgggttatgtgccagcaatctgatgctcctgatcccattattaacacctgcnatggattctactgtgaccaattcaccccaaattctattaaaaaaccaaaaatgt

SEQ ID NO: 206300 - DNA, 342 bp, Gossypium hirsutum
caactgctgaacttgatgccaagatgaagaaatttactgaggatgcaattaaatttaagatggatgatactgctgaattgtatgattttgatgatgataaggatgagaacaagtttgacttcaagaaaattgtaagtgaaaactggattgaaccacctaaaagagagcggaagcggaattactcagaatctgagtacttcaaacaaaccatgcgccagtcagctccagcaaaaccaaaggagcctcgtatttctcgcatgcctcaactgcatgatttcaaatttttaacactcagaggctaagtgagttgtatgaaaaaaaagtcgcttctcatgcaacaca

SEQ ID NO: 206301 - DNA, 411 bp, Gossypium hirsutum
  unsure (1)..(411): unsure at all n locations
gacgacccacgcgtgcgnccacgcgttcttaagtcagaatttttcttatcctgtgagccaaacttcaacccgtgtaattcaagatgatgctggggagaactcatatctatcacttggacatgcattgccaaaaaattatgcttcatttattgttagagctccgccttccaaacctaaacctgtgcagtagtctcgcaaagctgcaatacctgaagaatctgctcctaaaagctacaatacctcagaaaagagcaatgaatcttcaggtaagaatacttctatatttgttgcgaacttgcctatgatcgcaactgatgaaatgctgaaagaggttttccaaaaatttggaccaattaaacccaatggcattcaagtcagaagctttaaagacaacaaaaactgcttttcgtt

SEQ ID NO: 206302 - DNA, 387 bp, Gossypium hirsutum
gtcgtctgctgctgctcccctagtctcgacttcgtgtaggaagaaaaagaacgaagaggccaccttccttgaagacttgaaggatcacatcgatgagttcattaatgcttcaatggaagagcacaaaacttgctttaagaagaccatccagaagatgtttgggatgtcgaaagttgtagcagaaaggagtgcggctgaatccaaggaagccaaaaccgtgtcgaaataagattatcttcttacctctttagtaatgtgacttgtggactacatttatatgcattgaggttgtactgaaatgtagcttttggtttggtctaaaccgtgtagcagtgctttcattttgctttggttgcactttcctttacttaaattagtttttgtttt

SEQ ID NO: 206303 - DNA, 217 bp, Gossypium hirsutum
ctcttgccaatttacagctgatctttttgcaatgaaccatacagatttcatcatcaccagtactttccaggaaattgcaggaagcaaggacactgttggtcaatacgagagccacactgctttcactcttcctggtctctaccgtgttgtacatggtatcgatgtgtttgatcccaaattcaacattcgttcccctggtgctgatatggagatatac

SEQ ID NO: 206304 - DNA, 361 bp, Gossypium hirsutum
tgaaagagcaaaggcttcctcctcagactttcattcctcttcaatcagtgcgtgttaagccaatcattgaaaggttgcgcaccttaagtggcacagcgaagcttatctttgatgtgatccaatttgaccctgctttggagaaggcagttctttttgctgttgggaatactctagtttgtgatgatcttgaagaagccaaggttcttagctggactggagagaggtttaaagttgtaactgttgatgggattctactctcaaagtccggcacaatgactggtggtacaagtggtggaatggaagctaggtcgaataaatgggatgataagaaaattgaaggtttgaaaaaaaagaaggaaca

SEQ ID NO: 206305 - DNA, 215 bp, Gossypium hirsutum
caagcattttccttacaagtttgtttttcttgtgattaatcgatatggctagctcaatgtcccttaagcttgcatgtgtggcggtgttgtgcatggtggtgggtgcacccctggctcaaggggccgtaacctgtggtcaagtcacaagctccctcgcaccctgcattggttacttgacagggaatggtgctggtggcgttcccccaggttgctgc

SEQ ID NO: 206306 - DNA, 325 bp, Gossypium hirsutum
gaaacctgtattacgcaatccatggctacccttttttcaactgattcttcctcacaaaacatcctcattacgttcaccataatattcctcgcatcatctcttctgccttcctattctgcaatcactgagactgaccaacgccgcccatttaagaagatatacgccttcggcgactccttcaccgacaccggcaacaccgagtcccttaccggccccaaaggctttgtccgcgtttccaacccaccttacggcaccaccttctttcaccaccccaccaacccgtactccgatggccgacttcgcatcgacttcgtggctcattcac

SEQ ID NO: 206307 - DNA, 374 bp, Gossypium hirsutum
acgaaccatactgtagtaccattaatcaggtaacaaattcaaagagagtctacaaccacaagggttcagaaatggctattgttgactatgttgcggttgataccaaaaataaacagcatcttgagaaggttaatattcgttttcgacatccaagaaaccctatcattggtgataaatttagcagcagacatgggcagaaaggtgtctgctctcagttgtggccagatattgatatgccattctcaggagttacaggaatgcgccctgatctcataatcaatcctcatgcatttccttcaagaatgacgatagccatgcttttggaatctgttgctgctaaaggaggaagcttacatgggaaatttgtggatgca

SEQ ID NO: 206308 - DNA, 284 bp, Gossypium hirsutum
cgaccaagaaaaagatcttctttgtcatggaacatgtccgtgggggtgagctctttgccaaagtttacaaaggcaagctcaaagaacacgtcgctcgtaagtactttcaacagctgatcagcgccgttgatttctgccacagcagaggtgtttcccaccgtgatttgaagcctgagaatctcctgttggacgaaaatgaagatctaaagatctctgattttgggttgtcggctttgcctgagcagcttctcaatgatggtctccttcacactcagtgtgggaca

SEQ ID NO: 206309 - DNA, 327 bp, Gossypium hirsutum
  unsure (1)..(327): unsure at all n locations
cgaagaagaagaagagaaagcccctgactctgtcactgctaaagccaatggcgatgcgggcaagaagggctatgttgggattcacagttcaggattcagagatttccttttgaagccagagctgcttcgagccattgtggactctggatttgagcacccttccgaagttcaacatgaatgcattccccaagctatactgngtatggatgttatntgtcaagctaaatcagggatgggggaagactgcgggtttttgttctatcaacttacaacagatggaccctaccccaggcaggttgttgcccttgtttgtgcatactaggagta

SEQ ID NO: 206310 - DNA, 284 bp, Gossypium hirsutum
gttgtctggttttgctttcactgttaacgggtgggtccagtcttacggatctcgctgtgttaagccaccaatcatctatggtgatgttagccgccccaagccaatgactgttttctggtcatcaactgctcaaagcatgactcaacgcccaatgaagggaatgcttactggccctgttaccattcttaactggtcctttgtcagaaatgatcagcccaaattcgagacttgctaccagattgccttggccatcaaggatgaagtggaggatcttgagaaggccg

SEQ ID NO: 206311 - DNA, 392 bp, Gossypium hirsutum
aaaagatggcaattgagattcctagagtgaaacttggaactcaaggatttgaggtttcaaagctgggatttgggtgtatgagtcttacaggtcacgatcattcagtgtcagatgaagatggcatagccatcattaagcatgcagtcgaaagaggagtcactcacatcgatacagccgacttatatggacccaaaactaacgaaattctggtcggaaaggcattgaagcatctgccacgagagaaggtacagttggctacaaaattcggtgttgaaagcatgggtccagatggtccggttatcaatggcactcctgaatttgttcgttcttcacttgaggctagccttcaacgccttgatgtggattatattgatctttactatataatcaga

SEQ ID NO: 206312 - DNA, 382 bp, Gossypium hirsutum
ctctggtgaagttgttgcaattaagaaaatgaagaagaaatattactcatgggaagagtgtgtgaatctgagagaagttaagtcactgcggggaatgaatcatccccatattgtgaagcttaaggaggtcattagggaaaatgacattctatactttgtgtttgaatatatggaatgcaacctataccaacttatgaaagacagggaaaagcttttttcagaagttgacattagaaattggtgcttccaagtctttcaaggtcttgcatacatgcaccagcgtggttattttcatcgtgacctaaagcctgagaatttgttggttactaaagatataatcaaaatagctgattttggtcttgctcgtgaaataagctcacgt

SEQ ID NO: 206313 - DNA, 384 bp, Gossypium hirsutum
ggaaaatcctatttaaaaagcaaaaagattatgcttcgactcttgcaaagaacggactaacagggtcagctgcccaattaatcctcatccttacataccgttactgtataagatagatctcgttgtgaaagatctattactggaaaatttatgagtagagccgaagagtgtgaactgtacaagttaccaattaaatgaaggaatgagctccggtgtatagagaggacctcaccgtttaagaagtaaccatagaaacgatggaacccactatttatttatccatttctatttactcctttattttagttaatatgctttttttgatacctagtatcaatacaatttcttatttcaaggcgaaatgcctagaaaaaaggaaaaatc

SEQ ID NO: 206314 - DNA, 396 bp, Gossypium hirsutum
tcttctagcaacactcctgaaagccaaggcattaagaatttcccgcttacaccaccaaggccaaattccgaattgaagcctagtccaaaaccgccattgagcagcaagcaacatcaatttatgtttgacaatatggacactccaacaccgaaatctacaagatcaactacacgacctatgcaaactccacctagtagaatcctacaaggaagcagttcaggattgtcaaaatattcaagaccgagagctagtggagcggattcgccattcgacttgcccttgaaggatgatgacagccttactagctgcccaccattttcagttccaaattacatgacaccaacagtttcagcgaaggccaaagcaagagccaacagcaatttgaaggagatgttc

SEQ ID NO: 206315 - DNA, 321 bp, Gossypium hirsutum
tctgaaattcataaatgaagtaattaatcgtggggttaccattatcctgtttgtagtgacgaatcttgtctgtgttcctaagaaaagaaaagaaatttgtcaaaatttcggggtcttaaagggtcgtggaaacccataagaactcttgaatggaactggaaaagagatgtaactccagttccttcggaaatggtaagatctttggcgcaagaagaaagtgctgatccgtatcatcttaactagggtctgatttctctatttttttaaagataccgctttctcctacttcgttcgaatagaacatgctggggccaacctttt

SEQ ID NO: 206316 - DNA, 272 bp, Gossypium hirsutum
gaacgttagcggagaaaaggaataggcactaccatgcgctgttggcggcagcggaggaatcggtggcgaggaggttaagagagaaagaagcggaagtggagaaagcgacgcggcggaacgccgagttggaggcatgctcagcgcaactaagcgtagaggttcaggtttggcaagcgaaagccagggcacaggaggcaacagcgacttcgttacaagcacagctccaacaggctatgattggctgtggggctgctgcggtgacacaagatagt

SEQ ID NO: 206317 - DNA, 282 bp, Gossypium hirsutum
aaagaaatatttttttaccatatagaagttaaattgaaccaacaaaatcataggagactttttacaaacaagataaatcccttttagaatgacaggaaatcaacagtagtggcaaaaagggaaaataaaataataagaaagggttgtaaaacaccatttagcactccacgccacattgtttaagaactggacctgtttgtttgggcaagaagggatcgatccgtacccaaaccagtgggaaaatcgatggcaaaagtatggaccaaaacacaacaatggggg

SEQ ID NO: 206318 - DNA, 384 bp, Gossypium hirsutum
gttgagaggatggtgagagtcagcgttttgaatgatgcactgaagagcatgtacaatgccgagaagaggggcaaacgacaggtcatgatcaggccttcctccaaagtgatcattaagttccttttggtcatgcagaagcatggttatattggagagtttgagtatgttgatgatcacagatctggaaaaattgtggttgaattgaacggaaggctgaacaagtgtggggtgattagccctcgtttcgatgttggagttaaagagattgaaggctggactgctaggctacttccttccagacagttcggatacattgtgcttaccacatcagctggtatcatggaccatgaagaagcaagaagaaagaatgttggtggaaaagta

SEQ ID NO: 206319 - DNA, 353 bp, Gossypium hirsutum
gttgagaggatggtgagagtcagcgttttgaatgatgcactgaagagcatgtacaatgccgagaagaggggcaaacgacaggtcatgatcaggccttcctccaaagtgatcattaagttccttttggtcatgcacaagcatggttatattggagagtttgagtatgttgatgatcacagatctggaaaaattgtggttgaattgaacggaaggctgaacaagtgtggggtgattagccctcgtttcgatgctggagttaaagaagatgaaggctggactgctatgctactttcttccagacagttcggatacattgtgcttaccacatcaacttgtttcatggaccatgaaga

SEQ ID NO: 206320 - DNA, 268 bp, Gossypium hirsutum
tatgaaattcataaatgaagtaattaatcgtggggttaccattatcctgtttgtagtgacgaatcttgtatgtgttcctaagaaaagaaaagaaatttgtcaaaatttcggggtcttaaagggtcgtggaaacccataagaactcttgaatggaactggaaaagagatgtaactccagttccttcggaaatggtaagatctttggcgcaagaagaaggggctgatccgtatcatcttaaactgggtctgatttctctatttttttaaa

SEQ ID NO: 206321 - DNA, 228 bp, Gossypium hirsutum
ttttcttatgcagctgcatatgatcctttggatccaaatggaaatgtaacaatcaaatgggatattgtgtcttggacgcctgatggctatgtggcagtggttacaatgaacaattttcaaatgtatcggcgcatcatgagtcctggttggaccttggggtggacatgggctaagaaagaagtaatatggtccatggtaggggctcaaactactgagcaaggtgattgc

SEQ ID NO: 206322 - DNA, 389 bp, Gossypium hirsutum
ccagaaagtaaaaagaacagagctttgatatcctaagctaatgtcggacgaggagcaccatttcgagtccaaggccgacgccggcgcctccaaaacctatcctcagcaggccggtactatccgtaaaaacggctacatcgtcatcaaaggccgtccttgcaaggttgtcgaagtttccacttccaagactgggaagcacggacatgctaagtgtcactttgttgggatcgacatcttcactgctaagaagctggaagatatcgttccttcttcccacaattgtgatgtgccacacgtcaaccgtactgattaccaattgatcgacatttccgaggatggatttgtgagcttgctgaccgacagcggagacactaaagatgatctaaggc

SEQ ID NO: 206323 - DNA, 370 bp, Gossypium hirsutum
tgaaaggaagatctgggctagtttgacgtggtagagttgatggcagtaacagaggcagaaaatcctcttgtaggagaaatcacttgcggttcttcactgcagaaattgcaggaaatttgggatgaagttggtgaaagtgacgaagagagagacaagatgcttcttcagatagaacaagaatgcttggatgtatacaagaggaaggttgaacaggctgcaaaatcaagagcgcaacttcttcaggccttgtcagatgctaagcttgagctttctactcttgtatcagctctcggggacaaaagtttcattagcattcctgagacgacattgggaacaatcaatgaacaacttgctgctattgcaccagcac

SEQ ID NO: 206324 - DNA, 384 bp, Gossypium hirsutum
caaacatacatgatagataaagccaaaggaagaatgagaatccgaatgaaagtaagcttagcattagtagtcgtcgttgggtgcatcgccatcggcacggtagccgtccattttttggaaaatttggattgggttaatagcttttatctcgctgttacatcagtgacaaccgttggttatggtgatttttcttttgaaacgttaacggggaggtgttttgctgtcctgtggttgcttgtaagcacgttagctgttgcgagggctttcctttacttaactgagttgaggattgagaaaagaaatagaaaaattgcgaaatgggttcttcagaagaagatgacactaggagatttggttgctgcagacctcgacaatgatggatcc

SEQ ID NO: 206325 - DNA, 402 bp, Gossypium hirsutum
tacagagttgtgcatgaaccagaaagtcgggaaaatgatcaaatagccaatgttaatagtaagtttcaagacatgggattatccagtacagtgaaaggaagttctgttagaatggaagatgcttctacttcaactgattttactggactaccctctttttctcggtcttcatcaattccagattcaggttggaggcctcgtggggtgttggttgcacatctgcaggagcaccgatctgctgtcaataatattgcagtttcaaatgatcacagtttctttgtgagtgcatctgatgattccactgtcaaagtgtgggattcaagaaagttggagaaggatatatcatttaggtcaaggctgacttatcacttggaaggaagccgagcactatgcactgcaatg

SEQ ID NO: 206326 - DNA, 320 bp, Gossypium hirsutum
tacagagttgtgcatgaaccagaaagtcgggaaaatgatcaaatagccaatgttaatagtaagtttcaagacatgggattatccagtacagtgaaaggaagttctgttagaatggaagatgcttctacttcaactgattttactggactaccctctttttctcggtcttcatcaattccagattcaggttggaggcctcgtggggtgttggttgcacatctgcaggagcaccgatctgctgtcaataatattgcagtttcaaatgatcacagtttctttgtgagtgcatctgatgattccacttgtcaagtgtgggattc

SEQ ID NO: 206327 - DNA, 397 bp, Gossypium hirsutum
ttttggtgccatggcaaaaactgagaaaattgccttcattcttgaacaagttcgcctctgcttagatcgccaggattatgtccgtgctcaaattctgtcaaggaagattagtcctagagtatttgaggtcgatacctccaaggaaaagaagaaacccaaagaaggtgacaatgttgtggaggagcctcctgctgatataccttcactattggagttgaagcgtatctactatgaactgatgattaggtattactttcataacaatgactaccttgaaatttgccgttgctataaggcaatatacgagattccatccataagagaagatccatctcagtggattccggtcttaagaaaaatctgttggtacttgatcttggccccacatgatccaatg

SEQ ID NO: 206328 - DNA, 403 bp, Gossypium hirsutum
tttttgtttgttcttgaacaatgtaatgaagaaatgggaagaagcaaaaaaacatggccaaagttctgttgttcattgctctatgtgtgcttccagctttggttagtgctacacgcattctgaataaccaattggtggttgaaggctatgtgtactgtgatacttgccgtgctggttttgaaacccctaagactagaaggctagctgatgccatggttaagctggtatgctccgacaggaagaccggcggagttgttttcgagaaggagggatataccgacaaaaccggaaaataccagattcgtgtatccgaggatcacttggatcagatctgtgatgcagttcttgtgaagagcccccaacttggatgtgccacaatgtcccccggtcgtgaacgtgcccg

SEQ ID NO: 206329 - DNA, 383 bp, Gossypium hirsutum
gtcacttatactttgagctgcttggagaaatgggtggcacctaaaaaggctgaagtgccattgctttttttccctgctaaagctgaagtgatgcctcaaccactcggtgttgttctcattttctcatcttggaatttccctttcacactggcattggacccattgatcggagcaatatctgccggcaacacggttcttttaaaaccatctgatctggcaccggcatgcatgtcgtttctcgtcgagaccatccctaaatacttggacaacaaagccattaaggtcgttgccggtggagcagatatcggtgaacgactgctccagctaaaatgggacaaaatattcttcaccgggagtccacgagtgggtcgcttggttatggc

SEQ ID NO: 206330 - DNA, 399 bp, Gossypium hirsutum
aaatcgtccaatcttggttgcagcatctgtatgcagctatggggcttatgtggctgatggttctgaatacagtgggtgctatggtgaggcaatgacagtcaatgctttgaaagaatttcatcgcagaagggttcaggtcctggctgaagcaagtcctgacataatagcatttgaaacagttccgaacaaaatagaagctcaggcttttgctgaactcttagaggaagaacacatcaagattcctgcatggttaactttcaacatcaaaagatggcgtgaatgtacttagcggcgattctttgcttcagtgcgcatcaattgctgaatcttgcaagcaagctgttgctgttggaatcaactgcacgccacctagatttattcatgatctgattttagcaa

SEQ ID NO: 206331 - DNA, 393 bp, Gossypium hirsutum
ggcaagtacctctttgctggagttgtggacggaaggaacatctgggccaatgatcttgctgcttctttcagcactttgaaggagcttgaggctgttgttggcaaagaaaacctggtggtgtccacatcatgctcgcttctccacaccgctgttgatctagtgaatgagactaagctagacgatgaaatcaaatcgtggctcgcatttgctgcccagaaagttgttgaagtcaatgcacttgccaaggcattggctggtcaaaaggatgaagccttcttctctgccaatgctgctgctcaggcttcaaggaagtcctccccaagagtgactaacgaggctgttcaaaaggctgctgctgctttgaaaggctctgatcaccgtcgtgcaactaat

SEQ ID NO: 206332 - DNA, 355 bp, Gossypium hirsutum
gagagactcaaggaagaaattcaaagactaggccagatccaatcagatggttcttacaaggtcacatttggggtgctatttaatgatgatcgctgtgcaaacatctttgaagcactagttgggacactaagagcagcaaagaaacgaaaagttgttgcatatgatggtgaactactactgcaaggagttcatgacaatgtggaaatcattctcaaagctacaacaccagcagcagcagctcagagtagcaactaatgcagttctaaataaataattgcaattatagttttgcagcaaaagtttgatgatattctatgtaatttttcaatgtttatcatgtttgaaagcttgcttc

SEQ ID NO: 206333 - DNA, 351 bp, Gossypium hirsutum
gggtgatgcagggggtgctgctgatagggttttgaaccaacttcttactgagatggatggcatgtctgccaagaaaactgttttcatcattggagccaccaaccgacctgatattatagatccagcacttctgcgtccaggtcgtcttgatcagttgatctatattcctctccctgacgaggattctcgccatcagatttttaaggcttgcttgaggaaatcaccaattgcaaaagaggttgacctcagagctcttgccagatatactcaagggtttagtggggctgatatcacagaaatttgccaacgagcatgtaaatatgccataagagaaaacattggaaaggatat

SEQ ID NO: 206334 - DNA, 384 bp, Gossypium hirsutum
cattgatcttttgatcttctagagacttctcttcctcgttgtgtgtctctgggtttgccctcgtaatggcgtctgctttagaaaccaaagccaaagaagcatacttcgatgaccacttcgaactcgccctcgatctctactcgcaagccatcggaatcaaccctaaaaaggccgagctctacgctgaccgtgctcaagccaacatcaaactcaacaatctccctgacgctgtggcagatgctaacaaagcaattgagttggatccgtccatgtctaaatcctacttgcgtaaagctactgcgtgtatgaagcttgaggagtatcaaactgctaaggctgcgttggagactggggctgctttggcaccagaagactcgagatttt

SEQ ID NO: 206335 - DNA, 412 bp, Gossypium hirsutum
gaatgaagtagcttcaattgatgtcagcattggcaatatttacatgtctctatgtcgctttgatgaggccatcttctcctaccagaaggcactaacagtgttcaaatcatcaaagggtgacaaccacccttcagttgcctccgtctttgtacgacttgcggatctataccacagaacaggaaagctccgagaatcaaagtcctattgtgaaaatgccctgaggatctttgcaaaacccgtgcctggaaccacagcagaagagatagctggtgggttaaccgaaatttcagccatatatgaatctgttgatgagcctgaggaggctttgaagctcttgcagaaagcaatgaagttgttggaagacaaacccggtcagcaaagcacaattgcaggaattgaagctcgaataggg

SEQ ID NO: 206336 - DNA, 390 bp, Gossypium hirsutum
ctcattttgatcttagcagagatctagcttgtcaccttttaattatttcaacgccgtatatagccgacgccgtccgataaaatctctcgccgccggtgtatggaaacaccgtgggtacatctctagggcacggttttattacagattcattactcatggcttcgtggcttaaagtcgctgaagatttatttgaagttgtagatcgaagagcaaagctagttgctaatgaactgtcggaggagccacctgattctcaaacacaaggttcttcagcaaaaaaaacaaagccaagggcaaaggcacaaaaaagactttctacaaaaagatctcccaaacctagtgatactataaacaagcaaactagttcagaagtactaaaatctgatataa

SEQ ID NO: 206337 - DNA, 385 bp, Gossypium hirsutum
tcgacggcggcgtatttagctcgaagagcggcgcaaaaggagagggttcggatcctctaccgccgtgccctgaaagacacactcaactgggccgtccatcgccacctcttctatcaagatgcttctgaccttcgcgagaaattcgaagccaacaagcatgtggaagatcttgatacaatcgacaaaatgatagatgcaggtgaagcaacttataataagtggcggcatcccgatccttatatcgttccttgggctcctggtggttccaagtttactcgaaaccctgtcccaccttctgggatcgagatcgtgtatgattatggtcgagaagaaaatgactaagacatccatcttttcaacttccccagaaataaagttgatgcag

SEQ ID NO: 206338 - DNA, 374 bp, Gossypium hirsutum
gagagggctatacgccatgcaatacaggaacgcatacctattgtagttgttataaacaaggttgaccggctgataacagaacttaagttgccccccaaggatgcttatcataaactaaggcataccctggaagtaattaataaccatatatctgcagcctctacaaccgctggtaatgtttcagttattgatcctgctgctggaaatgtttgttttgctagtgcaagtgcaggatggtccttcactttgcagtcatttgcaaaattatgtgtcaaactacatggaattccatttgatgctgagaagtttgcatctcgtctttggggtgatatttattatcatcctgataccaaggcttttaaaaggaaaccccc

SEQ ID NO: 206339 - DNA, 408 bp, Gossypium hirsutum
tgagagagtgcatttcagttcacattggtcaggccggtattcaggtcggaaatgcttgctgggaactttactgtctcgagcatggcattcagcctgatggccaaatgccaagtgataagactgttggtggaggagacgatgctttcaacacctttttcagcgaaactggtgccgggaagcacgtccctcgcgccatctttgttgatctggagcctactgttatcgatgaagtgaggactggtacgtaccgccagttgttccaccctgagcaactcatcagtggcaaagaagatgctgccaacaatttcgctcgtggccattatacaattggcaaagagattgttgatctctgcttggatcgtatccgaaaacttgctgataactgtactgggctccaaggcttcttgg

SEQ ID NO: 206340 - DNA, 420 bp, Gossypium hirsutum
cgattccggaaaatcgaccaccactggccacctgatctacaagcttggtggtattgacaagcgtgtgattgaaaggtttgagaaagaagctgcggagatgaacaagaggtcattcaagtatgcttgggtgcttgacaagctcaaggctgaacgtgagcgtggtatcaccattgatattgccttgtggaaatttgagacgaccaaatactactgcactgtgattgatgcgcctggacaccgtgactttatcaagaacatgattactggtacctcgcaggctgattgtgctgttttgattattgattccaccactggtggttttgaggctggtatctccaaggatggtcagactcgtgagcatgctttgcttgcttttacccttggtgtcaagcaaatgatttgctgttgcaacaagatgga

SEQ ID NO: 206341 - DNA, 387 bp, Gossypium hirsutum
gttgcaaggatctctcatggcgctcctttgggatccactgaccttgtggttgatcttggcggttcgtttctttggatggattgcaattccggacacgtgtcttcatcatacaggttggtctcaagctgctcggtcaactgctctagagcaaagttccatgatcttggaagcacgagttgtctattaaacaccaactgttatgtgtccccttacaatggcgtaacaggatcgacttcaatgggggaactagtggaggatgtcatagccgttgattctgttgacccttcatatgtaggccaaagcacaacagtggatcactttctgtttgcttgtgcatcgacgtttcatttacaaggcttatcaagtggggccaagggaatgatgggt

SEQ ID NO: 206342 - DNA, 387 bp, Gossypium hirsutum
ctttttccttttatatttttcctctccaattttccgtggcgtttcccgagaaaatgagagaaatccttcacatccaaggtggccaatgcggcaatcagataggagccaagttctgggaagtcgtatgtgccgaacatggcatcgattcaacgggtcgatatggtggtgactcggagctccagcttgagcgaatcaatgtttactacaacgaagccagttgtggccgttctgttccccgcgcagttttaatggatctggaacccggaaccatggatagcgtaagatccggtccttacggacaaatttttcgacccgattacttcgtttttggacagtccggtgcgggaaacaattgggcttaaggacattacactgaatgagcggagc

SEQ ID NO: 206343 - DNA, 406 bp, Gossypium hirsutum
gagcggtgctacaaaatatgcaggggatgatcttcaacttaatgttgatccttatctatcatctgacaaggacaacattcttattttcaaatccaactcttctcttccatctagaggtgccatagattttgtaccaggtatcaggaaaatggtatgtcaagattctggagtatggaagtatgatagaaatggttctgccaattcgactgttgggtctagtagaagttctcatgggttggctaataccttcagtcttgcacctggaagaggggtttacgctaataggctgcagacacgtgttcattcagatcctgcttggcttgaaactggagatgcagtcgcaaatttataccctgaactgcgggaagacgctcaagaccatgcacgatctcgtaacgcatatttt

SEQ ID NO: 206344 - DNA, 406 bp, Gossypium hirsutum
attagtaacaccctggctctcaacaaggcaccttacaaggaaccaacctacaaagatgggttcccgacatgggtgaaacccggtgacaggaagctgttgcagtcgtcgtcgccagcttctacggcgaatatcgtcgtggcccaagatggttcagggaattataagacgataaaagacgctatatccgctgcttcgaagcggtccggaagtggaaggtatgtgatatacgttaaggcaggcacatacaaggaaaacgttgagataggaagcaagctgaaaaacatcatgatggtgggcgatggtatagggaaaactataatcacagggagcaaaagcgtcggaggaggatccacaacgttcaattcagccaccgttgccgttgttggagatgggttcattgctcgtg

SEQ ID NO: 206345 - DNA, 387 bp, Gossypium hirsutum
aaaactcttgcaaaatcaataaaactcttccatgcaaggatgcaccaacggctctcaccttctaccatagcaaaaacttgaaagttcaaaacttgaacatccaagatgcacaacaaattcatgtttcttttgaaaaatgcaacggtgttcaagcttctggtcttacggaggcagccccagagagcagccccaacaccgatgggattcatgtcactcgtactcaaaacatatggatcacaaattctgtaataggaacaggtgacgattgtatctccattgtaagtggatccaaaaatgtgcaagccatggacataacttgtggccctggtcatggaatcagtattgggagcttgggatctaaaagttcaaaggcttatgtctcgggtg

SEQ ID NO: 206346 - DNA, 400 bp, Gossypium hirsutum
gcacgaaaagaagttatcatcatcaagaaaggttgtcatccgtaatattaattacatttcttcgaacaggaatggggataagggcagtgattctgaagataattctgatgaggatgagttcattgatggagattctctcaaacagcaagtagaggaggctgttggatcactagggaaacaacacaagtctacctcacgccatcataagaaatgcaatggaagcaagcatcgaaacactgtgtcctacgacgaagatgaaccgggaactaaaaatccagagggagaaaaacgaagcaatccctgggatactttccaaaacctgctcttgcaagacaaggatttggattcttctgaagtagataaacagcctgcaagattccaagacaaatattttgcagca

SEQ ID NO: 206347 - DNA, 386 bp, Gossypium hirsutum
cctgcttttgcattatgtcaaaatgatgaagtggcgaaaataataagatcttgtgaattagagatcttaacccttgccacgttatcgactttcaaggttctactaagtggtgtggatgatgctccagctggatgtgcatttgaaaatgttaatgaaaaccttaaagtttatcttaaggttcatggaaccctaaatgcagaagcagaacgcgaaaagattaagaataaaatggatgaaatactgaagcagcaggaaaagctgaagaagatcatcagtgcatcaggatatcaagaaaaagttccatctcacattcaagaagagaatggcacaaagctggcaaaacttctccaagaatttgagtttttcaagaaagaaagcgatcgttt

SEQ ID NO: 206348 - DNA, 306 bp, Gossypium hirsutum
tggttggcaaactgcccatgccaccttctacggtggtgctgatgctaccggcacaatggggggagcttgtggttatggaaacctgttcagtcaagggtatggaacgagcacagcagctttgagcactgcacttttcaacaatggcttgagctgcggtgcctgctacgagctccggtgcaacaatgatcctcaatggtgcattagtcgaaccataaccgtgacagccaccaacttttgtccacctaactatgctttatctagtgacaatggggggtggtgcaatcccccaacaaaaacactttattt

SEQ ID NO: 206349 - DNA, 411 bp, Gossypium hirsutum
atagccatggcttcctcaccaaaactcttctctatgtctatcctcttcctttttgccctcttctccatgcaaatccatgctagagagtacttcagcaaattcccaagagttaacatcaatgagaaagagacaacaaccagagagcaaaagcacgagaccttcgttccccagaccacccaaaagccagaagaacaagagccaaggttcattcctgaaacccaaaatggttatggcctttacggccacgagtcaggctcaggctcaggctcaggctcaggctcaagccggcccagtttcaccaccaaagaaacctatgaaccctatgtcacccctgttagattccaccctgatgagccctataacagcatccccgaatcctccaacaataaagacacttactactacaacaag

SEQ ID NO: 206350 - DNA, 400 bp, Gossypium hirsutum
attaagcttctttctttcataaaacatcgactgaagctgctccaagattaaagaagcttcaatttataatactctgccccttaaactagcaaagcctgatctgctgcataatcgtctaaagaaaaattgatggggataaataagttgctgtgttggtttgcagttttcttctttttgttgggtttctctgcttgcagttcgatttctgatggtgtttttgactctttcacttctactggaaggcacctccttcaagctaagaaagcttgccctgttaactttgagtttctgaactacacaattatcacaagccaatgcaaaggaccaaagtatccacctgaaagttgttgttctgcattcaaggaatttgcttgtccttatgcagaacagatcaacgact

SEQ ID NO: 206351 - DNA, 405 bp, Gossypium hirsutum
tggtaatcaaattggtggcaagttttgggaagtagtatgtgatgaacatggcattgatgccagtggtaactatgtcggcacttcgcctgttcagcttgaaaggcttaatgtttactataatgaagccagtggtggcagatatgtgcctagagctgtgttaatggatcttgagccaggaactatggacagtttacgaacaggtccttatggaaaattgtttagaccagataactttgtgttcggccaaaatggagctggcaataactgggctaagggacattatactgaaggagctgaattgattgattcagttcttgatgttgttcgtaaagaggctgagaattgtgattgtttacaaggttttcaggtttgccattcactgggaggtggaacaaggtcagggat

SEQ ID NO: 206352 - DNA, 404 bp, Gossypium hirsutum
cagaaagggtggatggtattctccgaagaaaaggatagccggcctgtgaaattatcttttaggagaggaaaggttgttgacattcagaccgagaataatggtccaaggaggctcaagttcaggcgaggaagattacttggggtcaaccaaaatattaaggctgagcggagaacctttaggacaagagaagttgatggcgacatgaatgacaatgaaccttgtggggaaaaagttgttttgagacaccaggatttgcagggaaagaaagatgaaaagggtttgtttaacaatgtcattgaagaaactgctagtaaactcgttgaaacccggaaaagtaaggttaaggccttggttggtgcatttgaaactgtcatctccctccaagacggcaaaccttcatcaaa

SEQ ID NO: 206353 - DNA, 403 bp, Gossypium hirsutum
ttttagcgctatatgcctatatctccgtgtctgtcactcagctcagcttcgcccctttacagccaaattcctttctcgagcgtttcttttttaactctccagttctcaacgaatccatagaatttcaccaagaagaagaagaagatgtcgtggcaaacatatgtagatgagcacttgatgtgcgaaatcgatggcaaccatctctcctccgccgccatcgtcggccacgatggcagcatttgggcccagagctccaatttccctcagttcaaacaagaagagattaatgccatcatgaatgactttgctgaacctgggtcacttgctccaactggattgtaccttggtggcacaaaatatatggtgatccaaggcgaacccggatatgttattcgagggaaaa

SEQ ID NO: 206354 - DNA, 414 bp, Gossypium hirsutum
ttttcaacagaaattaaaactttattgcaatcaatgggaccaaacccagagttcaaaacattccaaggggaaaccccaaagttgaaattaaacatttacgaaattgaaaaaaagaagcaaaaataaaacttcaatagcaatcattcttggaaattccttggtttccaagcagccttttgctttttctttactcaacagctagtggaacagtcttgacccgattgttatacatccatgcatgcaacatttcaatgtaacgcttgcgcccacgttgctcctggtaagctacatgtttcgaaaagccataaactccggtgagagtcaatagcttctcggagtaaatctgccatgtatacttctcctgtatgcgtttcaaccctccctgggagatctcatcccaataagatggatccg

SEQ ID NO: 206355 - DNA, 387 bp, Gossypium hirsutum
attgattttgtgctcctgactggcatatggacaagttgcagtgagcacaaacccgacaccgtcaccctcaccagcaccggcaccgacaccggcatacacaaatatcaaagacttactcgttgggggagggccatattaaaaggtcctgggctaccttgggtcgactaaaataatcgacacgttccaaatccaagccaacaacacgggtgaaggcattaccattttcgtaccgaaagacaacgcattcaagggtcttacgaaggcttcattgtgaaatctaactgaagatcaggtcaaatcagagcttctttaccatgccttgccacgatactatgcccttgcgggctttaaagacctaagtgagaaaagccctatatgtacacttgg

SEQ ID NO: 206356 - DNA, 410 bp, Gossypium hirsutum
gtaatgttcagcatttcccgggaaaatcattaagaaaaattgggatttagggtttagggatttcacataatttggattctggaaaatgtctcagactggaaaattgatgccgaatatcgaccaacaaagcacgaagatgctcaatctcactgttctccaaagaattgatgctttcattgaagagattttgatcactgctgctcacgtcaccttctacgaattcaacctcgatagtaatcaatggagtcgaaaagatgttgaaggatctctatttgttgttaagaggaatacacaacctcggttccagttcattgtaatgaatcgtcgtaacacagataatttagtggagaatctattgggagatttcgagtacgaggttcaaggtccgtatttgttgtatcgaaatgctg

SEQ ID NO: 206357 - DNA, 349 bp, Gossypium hirsutum
caaagcagaacaccaggacatcctgagaattttgaaactcctggagttgaagttacaactggtcctcttggtcaaggtattgcaaacgctgtcgggttggctctagccgagaagcacctaggtgctaggttcaacaagcctgacaatgagattgttgaccactacacgtatgctattttaggtgatggttgtcaaatggagggtgttgcgaacgaagcttgttcgcttgccggacactggggacttggaaagcttatagctttctacgatgataatcacatttcgatcgatggtgacactgaaattgcctttaccgagaattgtcaggaaccgtttaaggggcttgggt

SEQ ID NO: 206358 - DNA, 386 bp, Gossypium hirsutum
gaaatcataatactatgtcattcttagaacttgaaaacttgaaacttgtgattccaaattcattacataaatttacactccaaatccattaaatcacaattcacatttgatataaatatacaaattcacaattcacattactaaaaatcccagcacaaatgaaaaaacatggcctccttatttagaaccatcaaaatgaacaccatatttgatttttttttcctaggccattactatagaaagctgaaaagaattccgtcaattttcctcagcttcatcttcatacccttcaccatcttcatcaaccacagcatcttgatattgttgatattcagaaaccaaatcattcatattactttcagcctcagtaaactccatttcatcca

SEQ ID NO: 206359 - DNA, 355 bp, Gossypium hirsutum
ctcctttcttccaaatgccgtccacattttaccctgactggcagcctcaaagacgacttgttagggctcattccagcgaccacgaaaatcaccaatagtactactactccaagcaagtattttccttacacgttcgattttcttgagattcatccatacggctagctcaatgtcctttaaacttgcatgagtggaggggacgcccatgctaatgagtgctcccctggcccatgccaccgaaagctgtggagaagtctaacacttttcctacaccctgcactaattccttgagcggtactcatgatccacctgatcttccaatttgttgtaacgacataacatatctttaattcta

SEQ ID NO: 206360 - DNA, 399 bp, Gossypium hirsutum
tgtcggaggaggtgatgatgcttttaacacctttttcagtgaaactggtgctgggaagcacgtccctcgtgccgtctttgtggatcttgaacccactgttattgatgaagtgagaactggtgcttaccgccagctcttccacccagaacaactcatcagcggcaaggaagacgcagctaacaactttgcccgtggtcactacactattggcaaggagattgttgacctctgtttggaccgcatcaggaaacttgctgataactgcactggtcttcaagggttccttgttttcaacgctgttggtggaggtaccgggtccggtcttggttctctccttttggagcgtttgtctgtcgattatggcaagaaatccaagttgggtttcactgtctacccatc

SEQ ID NO: 206361 - DNA, 384 bp, Gossypium hirsutum
gaaaatagcagctagggttcctctctccctctccaaaaactgaacgacaaaacaaaagagagatggcagtaatggcggatcaccattccctggctgttgtttttggtgtattaggtaacatcatctcagtcctagtatttctggcaccagtgccaacattctgtcggatttacaaaaagaaatcgactgagagtttccagtcactgccataccaggttgcattgatcatttgcatgctatggctgtattacgcgttgattaaaaagggtgctttgcttctgatcaccatcaactcttttggatgtggtgttgaaactattaatatatctatgttctgggcttatgcttcagagaatagcaggatgtctgctatgaaacttttta

SEQ ID NO: 206362 - DNA, 398 bp, Gossypium hirsutum
gtttcctttctcgattttctatttagccaaacaagatgcagatcttcgttaagactctaaccggcaagacgatcactctcgaggtcgagagctccgatacgatcgacaacgtgaaggccaaaatccaagataaggaaggcatccctccagaccagcagcgtctgatcttcgccggaaaacagctcgaagacggccggaccttggccgattacaacatccaaaaggagtcaactctccacctcgtcctccgtctgcgcggtgggatgcaaatcttcgtgaaaaccttgactggcaagacaatcactctcgaggtcgagagctccgacacgatcgacaacgttaaagcgaagatccaagacaaggaaggcatccccccagaccagcaacgtctcatcttt

SEQ ID NO: 206363 - DNA, 218 bp, Gossypium hirsutum
cttactgttgaatctgctggcgggcatagtttcaattgcatttctggaaagagtttaggaagactcctacaagagattttgtggaggaaaggctgcaactgtttcggccaaaagaattaatagagaatttgggtcccaattgaaggagcatattccgaactttgtggaccatactcaaaaaatcaacaaacttgcttaagagaaggctcacgtttttt

SEQ ID NO: 206364 - DNA, 400 bp, Gossypium hirsutum
tctgagggtgtcttaataaacgccttcgatttactttcgggttccatttacttctttatttctacgtttttgaatttttagtaagcgaaaatgagagagtgcatttcagttcacatcggtcaggctggtatccaagtcggaaatgcctgctgggagctttactgccttgaacatggaatccagcctgatggccagatgccaagtgacaagactgtcggaggaggtgatgatgcttttaacacctttttcagtgaaactggtgctggaaagcacgtccctcgtgctgtctttgtggatcttgagcctactgttattgatgaagtgaggactggtacttaccgtcagcttttccaccctgagcaactcatcagcggcaaggaagacgctgccaacaacttcg

SEQ ID NO: 206365 - DNA, 399 bp, Gossypium hirsutum
gatggattcacctactgtgtagttgctgttgaatctgctggcaggcaagttccaattgcatttctggaaagagttaaggaagacttcaacaagagatatggtggaggaaaggctgcaactgctacggccaaaagtctgaatagagaatttgggtccaaattgaaggagcatatgcagtactgtgtggaccatcctgaagaaatcagcaaacttgctaaagtgaaggctcaggtttctgaagtcaagggtgttatgatggaaaacatcgagaaggtccttgaccgtggtgagaagattgagttgctggtggataaaactgagaaccttcgctcacaggcccaagattttaggcagcagggaacaaagatgagaagaaagatgtggcttcagaatatgaag

SEQ ID NO: 206366 - DNA, 388 bp, Gossypium hirsutum
tcgaaatgtcattttggataacaaagtgcagcaattggaaaacaagataaagatgcttgaaggagagttgagagaagctgctgccactgaggctgctttgtactcggtagttgccgagcatggaagctccatgagtaaggtgcatgctccagcccgtcgcctttctaggttgtatcttcatgcttgtaaggaaggttcccaattaaggagagggagtgctgctaaaagcgctgtttctggacttgctttggttgcgaaagcatgtggaaatgatgttccaaggttgatgttctggtggtcaaactgtgtcgttttgagagcaattataagtgaaagtactgttggatgcacggaaagaaatggagttgagaaggggaagaaactggca

SEQ ID NO: 206367 - DNA, 400 bp, Gossypium hirsutum
caaaagtgtgggtgaagatataagaaagctagaaaatggagttcatgtagtgtcgggaactcctggtagagtttgtgatatgatcaaacgaagaaccctacgtacaagggctattaaactattgattcttgatgaatctgatgagatgttgagccgagggttcaaagatcaaatttatgatgtttaccgacatcttccaccagaacttcaggtttgtttgatatctgctaccctccctcatgaaatattggaaatgacgagcaaatttatgactgatcctataaggatccttgtgaagcgtgatgaattgactctggagggaattaagcagttttttgtagcagttgaaagggaagagtggaagtttgatacactatgtgatctgtacgacacgttgaca

SEQ ID NO: 206368 - DNA, 405 bp, Gossypium hirsutum
gtaccttcctctgtatactaactatggtctaggtcttacaacatggagtccgcttgcttctggagtgcttactggaaaatacaacaaaggaaatataccatctgacagtcggtttgctttggaaaatttcaaaaatcttgctaaccgttcactaattgatgatgtgttgaggaaagttaatggactgaagccaattgctgatgaacttggtgtaccattagctcaacttgcaatcgcatggtgcgctgcaaatcctaatgtatcatcggttattactggtgctacaaaggaatctcagattcaagagaacatgaaggcacttgatgtaatcgcattgctgactcctgctgtcatggagaagattgagacagtttttcaaagcaagccaaagcgtccagattctta

SEQ ID NO: 206369 - DNA, 404 bp, Gossypium hirsutum
  unsure (1)..(404): unsure at all n locations
tctgccttacctttccaccctgatttcaccaatttatcataatacaaccaccctctaccctttagtatatccttctctgcaacaattataaggattctatcacatgccaagcctgcaagatcagcactctcaccatccacaaacggattgataagcggatcatcgcaccctttgtcggtgggacaaacgtataaccaccacttatccactaattctttcctggaccgatcattaagctccggtccaatcgggctcgttccccaaaagttaggatggatcataccgataccaagaatcttcagctnttgacccaaattcgattccttgattcgtaaagccaagtgatgtgcaatattgcccccagcactatcaccagccaaaaacacctgttcgaacccaacata

SEQ ID NO: 206370 - DNA, 374 bp, Gossypium hirsutum
gtaccttcctctgtatactaactatggtctaggtcttacaacatggagtccgcttgcttctggagtgcttactggaaaatacaacaaaggaaatataccatctgacagtcggtttgctttggaaaatttcaaaaatcttgctaaccgttcactaattgatgatgtgttgaggaaagttaatggactgaagccaattgctgatgaacttggtgtaccattagctcaacttgcaatcgcatggtgcgctgcaaatcctaatgtatcatcgggtattactggtgctacaaaggaatctcagattcaagaaaacatgaaggcacttgatgtaatcgcatggctgactcctgctgtaatgaaaaaaatggaaacagttt

SEQ ID NO: 206371 - DNA, 411 bp, Gossypium hirsutum
gcaacatggaggcactacccttctgatgcagatctacttgtcaggttcgaaattatgatttccaataatatttctcaacaagaggactgctcattgtcagaggtatcaagcagtagaagccgatacaacagccgtggagctgaggaacgcctgagcttcaacatttgcgaaaagctagtgcagatgatgcatgggaacatgtgggtaatccaaaaccctttaggttctgcacaaagcatggcagttgttattcggtttcaaatccgaccatccatcactacaacaatcaccgagtcgggagaatcttcggaccagccacgctcaaactctatttttcacggcttgcatgttctacttgctgatgacgatactgtcaatcgtgctgtgactggaaagcttcttgagaagttg

SEQ ID NO: 206372 - DNA, 396 bp, Gossypium hirsutum
tgttttcactttttcttctgtcacttttcttgggaaaaaaatgtctcattcgatgggaaagtgccagaaaattcgtcgaattgtccgcatccgacaaatgctgaagcagtggcgaagaaaagccagcataacggccagcaacaacaccatcaacaacaacggagatgcgccgtctgatgttcctgctggacacgtggcggtctgtgtgggcacaagtctcaggagatttatcgtacgcgcgacgtacctaaatcacccaatcttcaaaaaactcctcgtacaaaccgaagaagagtatggtttcaaaaacatgggaccattaatcatcccatgcgacgagtcgttcttcgaagagattctccgagtcgtatcccgatctgattcttcatcaaactc

SEQ ID NO: 206373 - DNA, 420 bp, Gossypium hirsutum
caaaattatccctagtcttacagtgagcgtaacacaaagacccaaaattcttaggtgaccaaaatctggttgtcgaccatagagagcctcatatggcgtctttccatttaaacccgaacaaggagttcgattaattaggtaaccgacagtcaaaatgcactcaccccagaacttgataggaagcgatccttgaaatctaagagcacgcgcaacatttaagatgtgcctatgctttctttcgactctcccattttgttgtggagtgccggtacattaagattagaaaataataccatgttccataaaataattctccatgcaagtaaattcttttccgttgtcacttcgtaccatttttacttgtttatcaaattgtcgattgatcatagtgaagaaatttttgaacactgaaggcacttc

SEQ ID NO: 206374 - DNA, 244 bp, Gossypium hirsutum
atttaccttccatttccatttacttctatattgctacgtttttggaggaggggtgagcgaaaatgagagagtacctttcagtccacatcttgcaagctggttttcacgtcggaaatgcctgctgcgaactttactgtcttgaacaccggatccatcccgttggccaaaagccaagtcacatgactgatgggggcagggatgttgttcaaaacactttatgtactgaacctagcgctggaaagga

SEQ ID NO: 206375 - DNA, 346 bp, Gossypium hirsutum
caaaagctattttctgaaatcttccatcttttgatcagagcaaaaacaaccagtattcaatggggaagaaagctgtgttgattggaatcaactatccacgtacaaaggctgaactgaaaggctgcataaacgatgtgaagagaatgtacacatgccttacagagcgctatggattctctgaagaaaacatcaccggcttgatagacaccgctatattttattatcaacctacatggaagaacatgagaggggcttctaatgatcttgagagatcggcctggcctgtggatataatgtttgtgcacaacagatgcttttggacttggcttcctgctaagactggttg

SEQ ID NO: 206376 - DNA, 403 bp, Gossypium hirsutum
gtttggttggactcggtggtggtcccttgtctttaacatctcagattaaagcgacgtcgttttcttattgtttagtggatcgtgactcagcgggttcgtcgacgttggatttcaactccgggttaccggctgactcagtggttgctccgttaataaggagccgaaaggtggataccttttattacgtcggtctgaccgggcttagcgtaggcggccaacctgttcaactcccgccgggctttttcgagttggaacaatcgggaaacggaggagtgatcgtcgactgcgggacggccataacacggttgcaagcggaggcttacaacgcactccgcgacgcgttcgtgaaattatcgccggacttgccgaccaccggtggggttgcgttgttcgacacgtgcta

SEQ ID NO: 206377 - DNA, 386 bp, Gossypium hirsutum
aaaagttgattacttttttgataacccaaaacacgaaaatgggtgcttctgaatcagttcctcaaaaatcaatccatgaatttacagtcaaggattacaaaaaccaagatgttgaccttagtatgtacaacggaaaagctcttcttgttgttaatgttgcctctaaatgtggactcactgattcaaattatacccagttgactgatctttacaacaaatacaaggaccaaggactggagattttggcattcccatgcaatcagtttttgagccaagaacctggtaccagtcaagatgcacaagaatttgcttgtacaagatacaaggctgaataccctattttccaaaaggttcatgtcaatggtccaaagacagagcctgtctac

SEQ ID NO: 206378 - DNA, 412 bp, Gossypium hirsutum
cttaaacgtcaaggcagaagataagggcactggaaaatctgagaagatcactatcacaaacgataagggtcgtctgagccaggaggagattgagagaatggttcgtgaggcagaagaattcgcagaggaggacaagaaggtgaaggagaggattgatgctcgcaacagcctggagacctatatctacaacatgaaaaaccagattaatgataaggataagctcgctgacaagcttgaatccgatgagaaggagaaagttgaaaccgcagtgaaagaggcacttgagtggcttgatgacaaccagagtgccgagaaggaagactacgaggagaagctcaaggaggtagaggcagtatgcaacccaatcatcacagcagtgtaccaaagatctggtggagccccaggtggtgga

SEQ ID NO: 206379 - DNA, 409 bp, Gossypium hirsutum
tttttgcagtgttttatttattgattctcttagttctcgttttcatcggagaagaaaagtcaaaaaacaaaaatttcatggctcggaaattctttgtcggtggcaactggaaatgcaatgggacaactgaggaggttaaaaagatcattacaacattgaatgaagctgaagttccttctgaggatgttgtggaggttgttgtgagccctccatttgttttccttacctttgtgaaaagtctgttgcggtctgatttccatgttgctgctcagaactgttgggttcgcaaaggtggtgcttttaccggagaaattagtgctgagatgcttgttaatctgagcattccatgggttatcatcggtcactctgaaagaagggctctcttgaatgagtccaatgagtttgttgg

SEQ ID NO: 206380 - DNA, 269 bp, Gossypium hirsutum
gttgcatccatttgccatggacagcagattttagctgctgctggtgttctcaaggggaagaaatgtaccgcatacccagctgtgaaactgaacgtggtgttggccggagcaacttggttagaacctgagcctatagatcgatgcttcactcatggaaatttggttaccggagcagcttggccaggacaccctgagttcatttctcaattaatggatttgctgggtattaaggtttccttctagttgatctgctttacaagctctgtgca

SEQ ID NO: 206381 - DNA, 319 bp, Gossypium hirsutum
gttaaatcaagtgtttgtgacatcccacccaccgggttaacaatgtcatcaacattcatggggaattcgacgtcgattcaagagatgttccggcgtgtttcggaacaattcaccgttatgttccgtaggaaggcgtttttgcactggtatacaggggaaggaatggatgaaatggagtttacagaagcggaaagtaacatgaatgatctggtttcggagtatcagcaatatcaagatgctgttgcagatgacaatgatgaagattatgaagatgaggcaatggaaaattaaggtgatttttttaaaaaaattcaacttc

SEQ ID NO: 206382 - DNA, 405 bp, Gossypium hirsutum
cctagctgagatcctctccgactccgaccccacggatcccgatgaatcttctgaaggggagggggggcgaatgttacatacactctggggcctaaaattacggactgggatcagcagcgtaaggtttggctttccaaaaaccctgaattccctaattttgttaatggaaaagctcgaatcttgctcgtcactgggtcgccccctaacccttgtgacaatgctataggagaccattatttattgaaagcgataaacaataagattgattactgtaggcttcatgggattgaaattgtttataacatggctcatttatacaaggaacttgctggttattgggcgaaattgccattgattaggaggttaatgttgtctcataccgaacttgaatggatttggaggatg

SEQ ID NO: 206383 - DNA, 402 bp, Gossypium hirsutum
gtttgagaagatattggaactgagttatgccatggcggaggaggggttttggaccgagcaggatctcaagtttactgctgcttggcttcaagacttggttgccgtaggttatcagcagccaaggttgatgacattggaactggacaggccaagggcaaatatcggtcacggggatcgaaaagaatttatccctcagaaattgccatctgttcatttagcagtggaggaaacaggggtggttagttctgagattgggaatttgatacgatggaggaagaattttggaaatatcgtgctaatcatgttctgcaatggtcctgtggaacgtactgccctggagtggagactgctttacgggcggatatttaaaactgtggttatcttttctgcgcagaagaattc

SEQ ID NO: 206384 - DNA, 401 bp, Gossypium hirsutum
cagaacttcactgtttttacttacactgcccctggagtggccgttacatcaactgctctaaagaaaggaggactttctactggggatgttgctgcattatacaactacaacaatactcaattcgatggcaaagttgaaaccgactgtaacatctcaacagcacttacatacactgagattcttccatccacgaagactattgcatcgttcaaagagcctgattataagtccggcaaggtggtggatcagtatttccatgaccatgctaccgttacaacaacggttggtttggaccatacaccaaacgttgttgtctcggcgaccatagagacacccactattactgtgggtgcacacgcatgttactataccacctctggaaattatacaaagggtactgc

SEQ ID NO: 206385 - DNA, 385 bp, Gossypium hirsutum
gaaggccagaattaaacccaaaatggatagctttgttgattttggagaaagcttgtttgtcaaaaatttctcttgaagatgcaactggcatggtaaggaaaactgggtgcaatttgaaggaaaaactaagagagcatggaggacttgatgttgtctttgaagtggctttggaatgccattctgttttggagggttggttggagcagagttcatcttctcctcttatagaagataaaaaagatgtgcagagcttggtgctgcttttaaaatgtttgaagatcatggaaaatgctgcattcctcagtagcgacaatcagagtcatctgttagaaatgaaagggcaattgaactctcatggatctagaatatcttttacaaagcttgt

SEQ ID NO: 206386 - DNA, 392 bp, Gossypium hirsutum
gctccaaagaatggatcaggttcaacacccatctgtcatgcagaaggtagcaggccagctccttcgttctagccattctcaagattttcaaggttataatgggtctttcaggagtcctgctctataccaaaggcgtgctgcatatggcaattactccaatgctgcactgcagtatcctgtccgggcttgtggagacctgtctatggttccatcaacagcttcagctatttgcgttcaagcccctgctgagaaaggatttgccagctttgccattgatttcctcatgggtggagtttctgctgctgtatcaaaaacagctgctgcaccaattgagcgtgttaagcttttgattcagaaccaagatgaaatgatcaaaagtggaaggctctctg

SEQ ID NO: 206387 - DNA, 313 bp, Gossypium hirsutum
gaataccaaacattcatgattcatctatgaatgaagaaatattaagaaactacagtaaaagaaaattaaaaaaaaaaaaacaatgcataaaaacattgaatatagagcatcagatcgacgtgaatagccccatcattcagtttaagcatcagaaaccacactaaactcatcatcttccaatggagctggcaagtttagatctatcaaattgttgtaaaatttgcctgaatttggagtagcagcaagcaaatgggatctcttgtgaccaccgagtgcttgtcccgaaccgaacactctgtaacacaatggacac

SEQ ID NO: 206388 - DNA, 316 bp, Gossypium hirsutum
ctcgtgccgccttatgcaaaagtccttacatgctcgttaaagggtggcatcgattatttcatgaccttgtaggtcgagaaggccctttcttggagacaatatgtgtaccatttgcaggccttgccatcttactttggccactcgctgtcattggagcagtgttgggctcaattgtgtctagcatcttccttggtgcctatgctgcggtgattggttaccaggagtcctcgttttggtatgggctttgttatatccgtgcttcgttgtccatatatgatgaatacagcactgatgtccttgacatgcctgaaggatc

SEQ ID NO: 206389 - DNA, 320 bp, Gossypium hirsutum
tgctagagccttctttattttctctaaatctcagtcatccgttgaacaatctctcttataaattatattccaaacccaaatcctttccctcaagcaatttgagtgattctttctttttattgtggtctccagagcttctctgttacatcgtttattttctctcaagaactgaagaaaaaatccgaatagattaaaacttaagaaagatcaaaagatgtttggaagagcacctaagaagagtaataacaccaggtactatgagattctgggtgtttcgaataacgcttcccaggatgatttgaagaaagcttataaataag

SEQ ID NO: 206390 - DNA, 319 bp, Gossypium hirsutum
cacagagatttgatggtattgatcgtcatgatcgatatgctaatcgaaatgttgtcttctttgatatcaacatgttgggattagatggacttcaaggccctgtatatgtaggcacagggtgtgttttcaacaggcaggcattgtatggctacgatccaccagtctctgagaaacgaccaaagatgacatgtgattgctggccttcttggtgttgctgttgttgcggaggttctaggaagaaatcaaagaagaaaggtgaaaagaagggcttactcggaggtcttttatacggaaaaaagaagaagatgatgggcaaaaa

SEQ ID NO: 206391 - DNA, 402 bp, Gossypium hirsutum
tgaaggctgagatagctgttcattcgctatatgagcagctattagcagctcatgtttcttgtctccgtgttgcagcgccaatcgatcagttgcctttgattgacgcacagttagcacaatctcataaccttcttagatcttatgcttcacagcatcaacatggtcattctctatcaccccatgaaagacaggagctcgacaacttcttggcacaatatttgatagttctgtgtactttcaaagaacagcttcaacaacatgtcagagtccatgccgttgaagttgtcatggcttgccgtgaaatcgaaaataacttgcaagctcttactggagtcacattgggtgaaagaactaggtgcacaatgtcagatgatgaggatgatatgcagatggacttttttt

SEQ ID NO: 206392 - DNA, 319 bp, Gossypium hirsutum
cctgaattcctcagctttgttaagggtattgtcgactcagaggaccttcctttgaacatctcaagagaaatgttgcagcaaaacaagatcttgaaggttatccgcaagaacttggtaaagaagtgcattgagctcttctttgaaatagcagagaacaaggaagattacaacaagttttatgaggcattctcaaagaacctcaagcttggtatccatgaggactctcagaacaggactaaaattgccgaattgctccgctaccactccaccaagagtggtgatgagctgaccagcttgaaggactatgtgaccagaatga

SEQ ID NO: 206393 - DNA, 321 bp, Gossypium hirsutum
ttttccacagtttagtttttgcagccacaacacagccaaagaaagaagaaaatggcgtcgaacgcggcggttccattctggcgtgcagccggcatgacttatataacctactcgaacatatgcgccaacctcgttaggaactgcttaaaggaaccttacaagactgatgcccttagtcgtgagaaagttcatttctccatctccaagtggacggatggaaagcctgaaaagcctactctccgcacagactcacctgaagaatgagatgcaagtttggtcatggaagtttcgaactggaaggattttaattttttttttagg

SEQ ID NO: 206394 - DNA, 310 bp, Gossypium hirsutum
ttcgtctttgggcttgatcgtgccgtcataaactcttaccccaagttccggttcagcaaaaaggaggtgtctacggcggtggaggtgacgggttctagtgctgggaacaccatttgttcgatatgtttgtgtgagtatagagaatcagagatgttgaggatgatgcctgaatgtaggcattgttttcatgtaacttgtattgatgcttggctgaaacttaatgggtcttgtcctgtttgtcggaactcaccgcttccgacaccgatttctacgcctttgtcggaagttgtacctttgtctcattacgatt

SEQ ID NO: 206395 - DNA, 320 bp, Gossypium hirsutum
gtgaagcgcctacaagccaggaaacatatatgtggaatgactggtgatggggtcaatgatgctcctgctcttaagaaagcagacattggcatagctgtggctgatgcaaccgacgcagctcgtagtgcttccgacattgtcttgaccgaacctggtcttagtgtcatcatcagtgctgtactaaccagtcgagccatattccagaggatgaaaaactacacaatatatgcagtctccattacaatccgtattgtgctcggtttcatgttattggcattgatatggaagtttgatttccctccattcatggtccttattat

SEQ ID NO: 206396 - DNA, 308 bp, Gossypium hirsutum
tgtctggctcgggcactaagccttgaaccatatgacactggtgcatgtgccatcatcatgcagtaatttcatggtatatcttaattatatggttaataaaaaaaagatggtgagtgaataatgtgcgtgcattcctccatgcaccaatggtgaatctctttgcatacatagagattctgaatgattatagtttatgttatattttatgttgtagtgaaattaattttgaatgttgtttttaaattttgatgtcacttgtcttgatttatgttttaacgaaacttattttatgtattttactttaatgt

SEQ ID NO: 206397 - DNA, 339 bp, Gossypium hirsutum
gtttgagctagctagctcttactcaaatggcaaccaaaacgatgatgttgcaaatattttcacttttcttctttttgttcagtatctgcaactccattttccttggtgctaatggagatgacaatggtggttggcaaactgcccatgccaccttctacggtggttgctgatgctaccggcacaatggtgttagcttgtttttttggtatcctgtttttttttttggtatttgtatctagctcatcatttttttattcttatttttttatttattttattttttttgagttatttttttttttttttctagccttttattttgttttttttttttttttt

SEQ ID NO: 206398 - DNA, 328 bp, Gossypium hirsutum
gactattggattgttaagaactcatggggaagcagctggggagaagcatgctatatcacgatggcaaggaatgtggccattaccttaactggcaaatgtgggatcgcgatggaagccttttatcttatcaaaaccggttactattcccctatttcatgaccgttttcactatcttctataatgtttttgacttcttcttatattatttatttctgttcttttatttagttccttttattcatttgtaaatactttattttttatattctttttatattttcagtttcttctattttattttttatcttttaattttttttcttttttt

SEQ ID NO: 206399 - DNA, 235 bp, Gossypium hirsutum
cggcgatcgaccagttgcttaatgttgagaagcagatgcgcttcgccggcgatgtcgctggaaccaagaaagcggttactgacattttgctgctttgctttgaagctaaagattggaagtctctcaacgaacaaatcgttaatttgtccaagaaacgaggtcaacttaagcaggcagtacctgcattggttcaccaggcattgcattccattgatgaaccaccaaatctggaacc

SEQ ID NO: 206400 - DNA, 321 bp, Gossypium hirsutum
ttcatgatttgccacctccggggaaaaagggtcgcacttatatttgtagttgcatgatttttctgcgtcccaaagatggagctaaacttgtaatgaagaaatggatcgaagaacttcaagctcagccatggtccaaagcaaagaaagcaaatgatcagcctgcttttaactgggctctaaacaaaactgctggtttggtggatctctacctgcttcctcaggcagcattcccaacaggaggattatacttcaagaaccagacatgggtgcagcaaaccaagggaatgcacgtcataattcataataattacatcaccggct

SEQ ID NO: 206401 - DNA, 319 bp, Gossypium hirsutum
tgagaaatcgctcttctccgtcaatatgatcaggcatggaatgtgtatggggtgcttaattacttgcaagcatttgtggagaagtcgaatattattcagatattgaagcaggagaaggagggtcttgagcaatttactgctactgatggatatgattacagtggtggaagcaatgtgttgaaggtgttggggtacttcagtatggtgggtttgttgcgagttcattgtcttttgggtgattaccaaaccgggttgaagtgcttgcttcctattgacatcagtcaacaaggtgtttacaccagtgttataggaagtcata

SEQ ID NO: 206402 - DNA, 361 bp, Gossypium hirsutum
tggccgatctgtttaccgacgatcagatctctgaattcaaggaggcctttagcctgttcgacaaggatggagatggttgcattactaccatggagttgggaactgttattcgatcactttttcatattcttatttattcataatttttttattttattatttttttttttttctattaaataattttttctttttatattttttttttttttttttttttctatgattatttttttttttttttacttattttcttttttttttttttaatatattttattattttttattttttcattttattaatataattttttttttttttctttattttatttttttttttattattttctttttt

SEQ ID NO: 206403 - DNA, 393 bp, Gossypium hirsutum
  unsure (1)..(393): unsure at all n locations
attttaggcgtctttacgctaattctatagacttgaacacaaaatcctacctctccacgacaaagcgtgcattttgcaggccaagtgaacacgcaaaggtcgttaacaccaccatcacttgttctccattttattgcagcaataacttaggatcgagatcccattcaagcagacccgaaatggaggggatagagcatagggtaatcaaagccaatggcataaatatgcacgtcgctgagaaagggaaaggccctgtaantcctttcctccatggattcccagagctctggtatacatggcgccatcagatcactgcttttgcctcgcttgggtaccgagctttggctcctgacctgcgtggatttggggaaacggaggcacccgatgatgcct

SEQ ID NO: 206404 - DNA, 391 bp, Gossypium hirsutum
tgacctcccgcggttctcagcagtaccgagctctaactgtccctgagttgacacaacaaatgtgggatgcaaagaacatgatgtgtgctgctgacccgaggcacggtcgatacctcacagcatcagccatgttccgaggcaagatgagcaccaaagaagtggatgaacaaatgatcaatgtccaaaacaagaactcttcctacttcgtcgaatggatcccgaacaacgtgaaatccagtgtctgcgacatcccacctagagggctatcaatggcatcaaccttcgtaggaaactcgacctcgatccaggaaatgttcaggcgagttagtgaacaatttaccgctatgttcaggaagaaagctttcttgcattggtacaccggtgaaggtat

SEQ ID NO: 206405 - DNA, 306 bp, Gossypium hirsutum
ggatctattaattttgaagaccataaaacaatctgttgaaatgaggaatagcgtttgtcacagtgctacaatctatgcaaatgctataatgcatgctggaacaactgtggatacattcctgagggacaatctggactggctgagtagggctacaaattgggccaaattcagtgcaacagctgggcttggtgttattcacagaggacatctgcagcaggggaggtctctgatggctccatacctaccccaaggtggtgctggtggtggtgggagttcattcttttaatgttttttatcttttttttt

SEQ ID NO: 206406 - DNA, 390 bp, Gossypium hirsutum
aaaaaagtttgtttttgattttaaaatataaacttacgacatctagaaatggtgacctcagtgctacctagagtagaaagcttggcaagcagtgggattcagtcaatcccgaaagaatatatcaggcctcaagaagagcttacaagcataggtaacgtgtttgaagaagagaaaaaagaggaagggcctcaggttccgaccatcgatttgacagaaatcgagtcggaggacaaagaggtccaggagagatgtcggcaggagctgaaaaaagctgccatggaatggggtgtgatgcaccttgttaaccatggcatctccgaggagctcatggatcgtgttaggaaagttgggcagaaattctttgaacttcctgtggaggagaaagagaag

SEQ ID NO: 206407 - DNA, 322 bp, Gossypium hirsutum
tggacttgatataattggtgttcagactgttattaattatgcttgtcctcgagatattacaagttacgttcaccgagtcggtcggacagcaagagctggtagagaaggatatgccgttacatttgttactgacaatgaccgatctctattaaaagctattgcaaagagagtaggttcaaagttgaagagccggattgttgtggagcagtctatcactaagtggtctcaaaaaattgaggagatggaggagaaagtcactgaagttattgaagaggagagggcggagagagccctaagaaaggctgaaatggaagcaacgaat

SEQ ID NO: 206408 - DNA, 319 bp, Gossypium hirsutum
tggtgcaaccttgcaggaccaactgcctgtccgaggagagtgccatcactttggtcgacgggaaggttgtgcaagacatttgcctccgattgagaaacgtggagtgcggtgaagtggaaatccaacttcaatggattgaacttcccgggtctaaaggtttattatgaagtgtgtgttcataaaaatgctgtttcgttccatatcgttatgttttttgttgcaggtttggggagcttctaataccgggcaccgtttgagttttctgccgaggttggttttgttctttttgaaacagtttgaatatgtagttaaaatatat

SEQ ID NO: 206409 - DNA, 328 bp, Gossypium hirsutum
tggttcccttaacaatttacttccaatacagacaacaaaaatatcaagtttcaacccaaacacaaataaaacatgaaaaagcataacatacagtaaaccatttcaagtctttaacaagcttcaaagaatagaagcttgcataacacggaagcaacaggtaataaaagacatcatacgcacactcaatcacaggtacttcttagtactcatcatcttcaccctcatcaccctcagccgactcagcaccaacttcttcataatccttctccaatgcagcaagatcctcacgagcctctgagaattctccttcttccataccctcaccaac

SEQ ID NO: 206410 - DNA, 320 bp, Gossypium hirsutum
  unsure (1)..(320): unsure at all n locations
ctccttttatgttgaacttggattgtgaccattatttaaataacagcaaggctgtaagagaggctatgtgtttcttgatggaccctcaaattggaagaaaggtttgctatgtccaattccctcaacgtttcgatggtattgatagacatgatcgatatgccaatcggaacacagttttctttgatattaacatgaaaggtctagatggtatacaaggccctgtatatgtcggcacggngtgtgttttcagaaggcaagctctttatggttatgaacctccaaagggacctaaacgctcgaaatggttacctgtggttgct

SEQ ID NO: 206411 - DNA, 391 bp, Gossypium hirsutum
agaatatctccttttattttcatttcgtcttcatttcatctcaaatccatcatcgaaattacttgtagttatcagaatggggacaataggcaaaactactacggccactatttttctttgtcttcttctgtttcctattgtcttttccacgcctaatgacagatttgttagaattggactcaaaaagagaaagattgaccgaaacaatcggatggctgcacaccttgaatccaaggaggaaaaggcatctgaagcttttcttagaaagtatcgtcttcatgggaacttgggggaatcagaagacattgatattgtggcactaaagaactacatggatgctcagtactttggtgagattggtattggcactcctacacagaacttcactgtg

SEQ ID NO: 206412 - DNA, 304 bp, Gossypium hirsutum
acaaacccctttagccttacctcaagcttcatcccctttatatttctttgaaattttttcattaaaaatcctaacaaaagcatgggtaattctgggtttctagcaacattattattaccgacattcctttgtgttcatctctttggtgggtttgttgatggtcttggtgtgaattggggcacaatggcaacccataaattacctccagaaacagtggttcagatgttgaaagacaatgggattaaaaaagtgaagcttttcgatgcagattcaaagactatggatgctctttcagggagtgatc

SEQ ID NO: 206413 - DNA, 328 bp, Gossypium hirsutum
tcgagttttttttttttttttttcaacaaaaatcagaattaagtatttttctcaatcagctataaaaataacaactcggttcaaaaatgagaatttaagtatacatcttaaagcaatgagtatatcttaacctaagacattggtccatgaatatgacaaaagaacacaaagcagatcccggttttacacactaatcaatcttgacagatgagtagataagtcttgtgaaccaaaagcacgcataaaatccgatggtgcccgttagcacaaaaaatgcatacgaagcaattagcatgtacccaaagtataggagccccgaaaccagctt

SEQ ID NO: 206414 - DNA, 306 bp, Gossypium hirsutum
ccccattcaaaaagagtctggcaagtctaaaccctagtttcaagcgaaaggagaaaagaaagaagaaatgccgagagaaatcataacactgcatgtgggacaatgcgggaaccatatcggaatggagttttggaaacagctctgcctcgaacacggcatcattaaagaaggctttcttgaagatttctcttctcatgtaggtgacaggaaagatttatttttttactaatctttctattttgtattattttaccatttgtctttactttttttttttgtatcctttatttaataattgtttttttt

SEQ ID NO: 206415 - DNA, 321 bp, Gossypium hirsutum
tgcgaaaggctactttctgaccaagatttttcatccaaatattgcacccaatggggaaatttgtgtaaacacactaaaaaaggattggaatccaagtcttggattacgacatgtactcatcatagttaggtgtttattgattgagccatatccagaatctgcactaaatgaacaggctggcaagatgctgcttgaaaattatgacgagtatgcccggcatgccaggctttatactggaatccatgcgaaaccaaaaccgaagttgaaatcaggagctatttgcgagtcaactacagcattgaacgtggagcatcataacac

SEQ ID NO: 206416 - DNA, 382 bp, Gossypium hirsutum
ctcaaatccgtcgtgctgttgaggctgaagggatcccttacgacttatgtgcctgctaactgctttgcaggctattttcttcctacattgtcgcagccaggagccacctctcccccaagagacaaggtggttattctaggtgatggaaatcctaaagctgttttcaaccatgaagctgacatcggaacgtacaccatcaaagctgtcgatgaccccagaacagcgaacaagactctattcatcaagccttccaagaacacctactcatttaacgagctcatcgccctgtgggagaagttgattggcaaagcccttgaaaaaacatatgttcctgaggaccaacttctcaaacagatccaagagtctccaatcccaatcaata

SEQ ID NO: 206417 - DNA, 327 bp, Gossypium hirsutum
cagttcttaatactttgtttcatttcatcaaaaaaaatcccatcatgagagaaatcctccacgttcaagccggtcagtgtggaaaccaaatcggaggcaaattctgggaagttgttagcgacgaacatggaattgatcccaaagggaactacgtcggtacttctcgtgttcagcttgagagggttaatgtttactacaacgaagctagtggtggtcgttacgtacccagagctgttttaatggaccttgaaccaggaaccatggatagcttgcgtactggtccgcacggacaactttttagacctgataacttcatttttggtcaaa

SEQ ID NO: 206418 - DNA, 274 bp, Gossypium hirsutum
gcttgctctctttgtttttcgagatctgtgcgttttcttcttttcaattagcttcttgaaagctttattttcttaagaacaggaaaccgctgaagagatggcaccaccaattgagactccaaccaagtcctctggctctcaccacgcatcacatcctcctttgaatgaaaggattctttcatcgatgagcagaaggtctgttgctgctcacccatggcatgatcttgagattggacctggagctccaatggttttcaactgtgtgattgaaatc

SEQ ID NO: 206419 - DNA, 293 bp, Gossypium hirsutum
cttcattacattgttcaagaaaaaagaagcaaaaaaacatggccaaagttctgttgttcattgcactatgtgtgcttccagctttggttagtgctacacgcattctgaataatcaattggtggtagaaggctatgtgtactgtgatacttgccgtgctggttttgaaacccctaagactagaagcctagctgatgccatggttaggttggtatgctccgacaggaagagcggccaagttgtcttcaaaaaggagggatacaccgacaaaaccggaaaataccagattcgtgta

SEQ ID NO: 206420 - DNA, 296 bp, Gossypium hirsutum
gtttacccaatttcagttctatctaaagagcagaaaagaaaattgggttgccgtgagatgaagatcgaggatttggatgacgtggagaatgaagacggcgattacggcgcgaagcagttgcagatagtcagagtggacgaagccaaacgactcctagtcggagccggtgctcgtatcctcttttaccccacccttttgtataatgtcttcagaaacaaaatccaatccgaattcagatggtgggacgaagttgaccagtttcttttgctgggggcagttccatttcccaaggatgt

SEQ ID NO: 206421 - DNA, 293 bp, Gossypium hirsutum
caactacgaatcgatccaaatacggtctgaagatccgattcatcaaatccataaatgctgcaggggcattagtgagcccaaacggcatcactaagaattcgtagtgaccatatctcgttctgaaggcagttttaggaatatctgaatctcgaattcgcaactgataatagcccgatctcaaatctatttttgagaacactgaggctcccttcagttggtcgaacaaatcatcgatgcgcggcaacggatatttgttctttatcgtcactttattcagctgacgatagtcaatg

SEQ ID NO: 206422 - DNA, 293 bp, Gossypium hirsutum
cggagttagagagagtgaaacaaaatgagtatcagctgcgcgttgaaggtggttccgattgtgcttctgttggttcttttcgcattagcgaatgccaagaaatcagctgatgtgaccgagctgcagatcggcgtcaaatataagcctccatcatgtgaattccaggctcataaaggtgatagagtaaaagtgcactatcgggggaagctcactgatggaaaggttttcgattccagttttgaaagaggtgatcccattgagtttgagcttggtagtggacaagtaatcaaagg

SEQ ID NO: 206423 - DNA, 238 bp, Gossypium hirsutum
cactgaatgggtcgagtcatccgagctcaacgtaagggtgctggttccgtcttcaaggcccacacccaccaccgcaagggtcctgctcgtttccgcagcctcgacttcggtgaacgaaatggctacctcaagggtgttgtcaccgatgtcatccacgaccctggccgtggcgctcctttggcccgtgtcgtcttccgtcaccctttccgcctcaagaagcataaggcgctttccgttg

SEQ ID NO: 206424 - DNA, 271 bp, Gossypium hirsutum
aggcatctttgaagaccgaaagggagaagaagaaggaaatgtacttcccaatgaggaagtatgccattaaggtgtagggtaggatctctcacattctatttacatatcgattcgctctttactttctagcatcgtcttccgtaaaacccgagttgtgattttgtttcaatcttcatgtttggaaactcttttttgtccccttgtttaaaaccattattctggtctttttgattgaatggctttttaattattttttgcattatggatttat

SEQ ID NO: 206425 - DNA, 295 bp, Gossypium hirsutum
ccaccattgatgttcctgagcaggtttcggttcttgcagatgcagaagctcttagaaaggcttgtaaaggatgggggacagatgagaaggcaataatttcagtgttgggtcacagaaatgcagttcaaaggaagcaaatcaggcttgcttatgaagacctttaccaggaagatctcatcaagcgtcttgaatcagagctttctggtgatttcgagaaagcagtgtatcgttggatattggatccagcagaccgagatgccgtgttagctaatgttgccataaagaaattaagccc

SEQ ID NO: 206426 - DNA, 305 bp, Gossypium hirsutum
caagcattgcccaagtgtttgttgctgcttacaacaaacgacatcttaggcttcctgcagagggacaggaatttggagttttctatgatcctcctttaaaggaatacgtgttgtcaaagctacccctcacctaccagttcaggttcttaaacaaagccgcgataacaaccaagaatgatttagaagacgatggttcccctaaaaaaaggtggttgtgcagcatccaagatgtagaagaggtcaaatgccttgtcagaatcatccctatatgggcttctggtatcattagcttcaccgccatggca

SEQ ID NO: 206427 - DNA, 292 bp, Gossypium hirsutum
gttgcagcttgtgctaagcactacgtaggagatggtggaacaaccaagggcataaatgagaacaacacagtgatcaactggcatgatttgcttagcattcatatgccaggctactacacttcgattatcaaaggtgtttcaacggtcatggtttcgtattctagttggaacggcgttaaaatgcatgctaatcgtgatttagtcactggtttcctcaagaacaaacttcgattcagaggcttcgtcatctcagattgggaaggcattgaccggatcacttatccacctcatg

SEQ ID NO: 206428 - DNA, 295 bp, Gossypium hirsutum
ggacagacaactcgtgacaatattttcagctcccaattattgtggcgaatttgataatgccggggccatgatgagtgttgatgaaagcctgatgtgctctttccaaattcttaagcctgcagataaaaggtccaggttcatttgagagatactactctgtctctgttcctacattgaactgctgaatgattcgagaagaaatgtccaaagattaaggatgctgatgctgatgctgattttgcagctccatgtgataatgaaatatgaccatatccttccctatatcaaagggtac

SEQ ID NO: 206429 - DNA, 292 bp, Gossypium hirsutum
ccaaaataatggccctctgcaagccgtattctaggttggtcctagcactggccatggcattggtggcagctacggtgcctgtttatgggcagagaactatcaacactccatgcaccccatcggcacttaacatcttcactccttgtatgaacttgcttaccaatagcagtgccaatggtacttcgcccactgcagattgttgcaactcgcttaaaacgctcacatcgagcggcatggactggttgtgcctcattgtcaccgggagtgtcccgttccgtttacctatcaatag

SEQ ID NO: 206430 - DNA, 294 bp, Gossypium hirsutum
tcgagtttttttttttttttttttgcgtagacacttaacatttgttattaatatattatctcttttcagaaaccaataaaatatctttcgggatgaaaacaggggtacctcaaaattcagtttctcacaaacagtttaggatcattaaggaaaacgagagcaccattacaatcactgctttcttctcaaagggcttgtccgccagatgacgatgaagacatcactgacagaacctctgtcacagaagccattacacttaaagcagctttcagaacttcctgagaacacccgggc

SEQ ID NO: 206431 - DNA, 290 bp, Gossypium hirsutum
atttgaagtacactcgacagttccagcttaaagctttgttttcttttgggtgtctctctaaaaccctttcttcaatggcttacgaaggcatcctcttgggcatgggaaacccgcttcttgatatctctgctgttgttgatgaagacttcttaaagaagtatggcatcaagttgaacgatgccattctcgcagaggataagcacttgccgatgtatgaggagatgactaaaaagtatgaagtggagtatattgctggaggtgccactcaaaactctatcagagttgcccag

SEQ ID NO: 206432 - DNA, 296 bp, Gossypium hirsutum
cccaaacatgagaagcctgaaatgcacaaggaggaaaaaaaaaaaccctgcaaacaacatgaagagtacgagaaagaaaaacctgagttccccaaacaggaaaagcctaaagagcacgagaaacacgaagtcgaatatccgaaaatacccgagtacaaggaaaaacaagatgaggataagaaacataaacatgaagagtaccacgagtcatacgaatcgaaggagcacgaagagtacgagaaagaaaaacccgagttccctaaatgggaaaaatctaaagagcacgagaaacacga

SEQ ID NO: 206433 - DNA, 293 bp, Gossypium hirsutum
aatacatctctcatctgggttgtcgtttctatagctgaagaaactcttcaatggctgaaaagagcaaggttttgatcatcggaggaactggatatctgggaaagttcattgtggaagccagtgcaaaagagggtcatcccactttcgtttttgtaagggagtccaccgtctccgaccctgttaagggaaaacttgtcgacaacttcaagaacttaggggtccatttgttgttaggggatatgtacgaccatgagagtttggtcaaggcaataaagcaagttgatgtggtgatt

SEQ ID NO: 206434 - DNA, 296 bp, Gossypium hirsutum
ctttggagaggcaacactgccaatgttctcagatacttccccacacaggctttgaactttgccttcaaggattatttcaagaggatgttcaacttcaagaaggacagagatggctactggaaatggtttgcagggaacttggcatctggtggtgctgctggtgcttcatcacttctttttgtttactctctggattatgctcgtacacgtttggctaatgataacaaggctgctaaaaagggtggtcagaggcagtttaatggtttagttgatgtctacaggaagaccatccaatc

SEQ ID NO: 206435 - DNA, 292 bp, Gossypium hirsutum
aaaaatttgtttctatcagcattgctttgcattgctgttgcaggagttttgggtcaagctcctagtaatcctcctacgtctacgccggcgccacccacaccaccggcttctactcctcctccgacgactcaagcaccgcctacaccaaccgccactccgccactggtttctactcctcctcccacttcatcaccgcccccagtgacagcttctccacccccagtttcaactcctccacccagttctcctcctcctgcaactccaccacctgcttctcctcctcctgcaactc

SEQ ID NO: 206436 - DNA, 294 bp, Gossypium hirsutum
ccaaggaatacgttcgtgaaacttttgcttggatgcattattactggtaccttaccaacgatggcattgaatttttaaggacataccttaatctcccctctgagattgttcctgctactttgaagaagcaaactaggcccggtggtggtcgtcccatgggtccttctgatagccgcccacgtggtccgccacgctttggcgacggtgagaggcgattcggtgacagggatggataccgtggaggtccacgaggaggcggtgatttcggtgataagggtggtgcgcctgctgatt

SEQ ID NO: 206437 - DNA, 296 bp, Gossypium hirsutum
ctcctgaggaacagcttctgaagacttatgcatgttacttgtccacctcggctggtcctgttatgggagttttatatttgtcaagtcaaaagcttgctttttgtagcgacaatcctctgtcttaccaagttggtgctcagactcaatggagctactataaggtggctattccattacatcaactaagggcagtgaatccatcaacaagcaaggcaaacccagctgagaaatacatccagataatatcagttgacaaccatgaattttggttcatgggctttgtacactatgacagt

SEQ ID NO: 206438 - DNA, 288 bp, Gossypium hirsutum
atttgaactgccccggtggaagtacatattctgtcttggcaatttacgattgcatgtcttggataaagccaaaggttggcacagtttgtttcggagtagctgcaagccagggagcacttcttcttgctggtggagagaagggaatgcgttatgcgatgccaaatgcacgtattatgatacaccaaccgcaaagtggatgtgggggtcatgttgaagatgtcagacgtcaagtaaatgaagccgttcaatctcgttataaaattgacaaaatgtacgcggctttcaccg

SEQ ID NO: 206439 - DNA, 294 bp, Gossypium hirsutum
cggtgactccgatctccagctggagcgtatcaatgtctactacaatgaagccagtggcggtaggtatgtccctcgcgctgttctcatggatcttgaacctggcactatggactccgtcagatccggtcttttcggccagatctttcgtcccgataactttgtcttcggtcagtctggtgctggcaacaactgggccaagggtcattataccgagggagctgagctcattgattctgttctagacgttgtcagaaaagaggcggagaattgtgattgtttgcagggttttcaagt

SEQ ID NO: 206440 - DNA, 294 bp, Gossypium hirsutum
gcagtttggtatagccaggaaagttatcatcaccaaggattcaacccaaataattgctgatgccgcttcgaaggatgaaatacaagctagggtgcaacaattaaagaaagaactagccgagacagattctgtttacgacacagaaaaactggcagaaaggattgccaaactatctggtggtgttgcagtcattaaggttggggctgcaactgagactgaactcgaggatcgcaagctacgtattgaagatgccaagaatgctacctttgctgccatagaggaaggtattgtacc

SEQ ID NO: 206441 - DNA, 292 bp, Gossypium hirsutum
atcaagtgtgtcacggtcggtgatggagctgtggggaaaacttgtatgctcatttcatataccagcaatactttcccaacggattatgttccaacagtatttgataactttagtgccaatgtggtggtggatggcagcacagtgaaccttggcctatgggacactgccgggcaagaagattataataggctaaggccactgagttatagaggagctgatgtgtttttgttggccttttctcttataagcaaggccagttatgaaaacatctacaaaaagtggatcccagagc

SEQ ID NO: 206442 - DNA, 294 bp, Gossypium hirsutum
aacctctcttcattctctatttcctccgtgaaagctgctgttgtgctgatccaagtgataaaccagtgtaaagatgagcgttgttgggtttgattttggcaatgagagctgcattgttgctgttgcaaggcagagagggattgatgtagtgcttaatgatgaatcaaagcgtgaaactccggctattgtgtgctttggggagaagcagagatttattggtactgcaggggcggcgtcttcaatgatgaaccctaaaaattcaatttctcagattaaacggttgattggccgtca

SEQ ID NO: 206443 - DNA, 293 bp, Gossypium hirsutum
aaatatctcaagtgtgttataaaagaaaccttaagactgcaccctgttgtacctttattgattccaagagaaagtagcaagaattgtgtggttaatggatttgaaatacctgcaaagaccagagtcattgtgaatgcatgggcaatcgggagagatcctaatcattgggttgagcctgaaaagtttgagcctgaaaggtttgtcaacagttcagttgatttcatggggacaaatttcgagctcatcccatttggggcaggaaggaggatatgtccaggcatattattcgcact

SEQ ID NO: 206444 - DNA, 296 bp, Gossypium hirsutum
gtatgaacctccaaaaaaaacctccaatgtatgaacctaagccaccgaagccaccggtttatacacctccaaagaaagaaaaaccagaacccaagccaccaatgtatcaacctcccaacaacccaccaatatatgagccaaaaccacctaagccaccagtttatgcaccaccaaaggaagaaaagccaaaacctaaaccaccagtttatgagcctccggcacatgagccaccatacggtcactatccaggacatccacctttggggaagcctcaatagaatgctcccatcgactag

SEQ ID NO: 206445 - DNA, 296 bp, Gossypium hirsutum
ctgcaacttggtaatattgaccgttgccgaaaactgtatgagaagtatctggagtgggcacctgagaactgctatgcatggagcaaatatgctgagttagaaagatcattagctgaaacagagcgggcaagagctatttttgagcttgccatcacacaaccagctttggacatgccggagttattgtggaaggcatacatagattttgaaatttctgaaggtgaatatgaacgaactagaggattgtacgagagactattagatcgtacaaagcacttgaaggtgtggattagtta

SEQ ID NO: 206446 - DNA, 298 bp, Gossypium hirsutum
tgtcactgcaggaagctagacggtttgagttgagggagttgtctttggcgaccaaaaatttcagtgatagaaacctgatcggggaagggaaatttggtgaggtatataaaggtttgcttcaagatggaatgttggttgctatcaaaaagcgagctggagctcctagtcaggaattcattgatgaggcatgctatctttcatctattcagcatcggaatcttgtcactcttttgggctactgccaggaaaataatcaacaatttcttgtttacgaatatatacccaatggaagcgtttc

SEQ ID NO: 206447 - DNA, 301 bp, Gossypium hirsutum
gttccccaaattggaaaagcctaaagagcacgagaaacacaaagtcgaatatccgaaaatacccgagtacaaggaaaaccaagatgagggtaaggaacataaacatgaagagtaccacgaatcacgcgaatcgaaggagcacgaagagtacgagaaagaaaaacccgagttccccaaattggaaaagcctaaagagcacgagaaacacgaagtcgaatatccggaaatacccgagtacaaggaaaagcaagatgagggtaaggaacataaacatgaggagtgccacgagtcacacgaatcg

SEQ ID NO: 206448 - DNA, 293 bp, Gossypium hirsutum
atttcttgagagaattaaagaggatttcaccaagagatatggcggaggaaaagctgcatctgcccctgcaaacagcctgagcaaggagtttgggccaaaattaaaggagcatatgcagtattgcattgatcatcctgaggagatcagtaagattgccaaagtgaaagctcaagtttcagaagttaaaggagttatgatggaaaacattgagaaggttctggaccgtggtgagagaattgagcttctggtggatagaacagaaaatcttcgttctcaggcacaagattttcggc

SEQ ID NO: 206449 - DNA, 295 bp, Gossypium hirsutum
gttctcagtcatggagattgggtgccactcttagcacaggtgaatgaacactcaatgttgtcaatgctgagaaatgcaacctgcacattatcaaatttttgcaggggcacgccccagcctacatttgatcaggtaaggcctgcccttcctgcgcttgaacgtctcattcattcaaatgatgaggaagttctcactgatgcctgttgggctctatcgtacctttctgatggtacaaatgacaaaattcaagctgtgattgaggcaggagtttgtccacgacttgttgagctcctac

SEQ ID NO: 206450 - DNA, 294 bp, Gossypium hirsutum
ctgaattccaaaccaacttggttccctacccaagaatccacttcatgctttcctcgtatgctccagtcatctctgctgagaaggcttaccacgagcagctctcagttgctgaaatcaccaatagtgcctttgagccctcatctatgatggctaagtgcgatccacgccatggaaagtacatggcttgctgtttgatgtaccgtggtgatgttgttcccaaggacgtcaatgctgcagtcgcctccattaagaccaagcgcaccattcagcaacactggtggagttagaaatcat

SEQ ID NO: 206451 - DNA, 293 bp, Gossypium hirsutum
atgatttgaattttttttcaatgttccttttactttccttcaaatctctccaatctccaccgctacttccgccacttcggccaccgccgcgaatttccgatttataatgtgtttgtattaattgttacctgttacgatttgtgaataattgagttagggttttcgatttatcttgatttatttgtaaaggaaaagggaaaaaggaaaagaaaataaaagatggacaagtacgagctggtgaaagacataggatctgggaacttcggcgtagcgaggttgatgcgtaacaaaga

SEQ ID NO: 206452 - DNA, 295 bp, Gossypium hirsutum
cttaaatctaggcggcatttaaatgtccgaggaaaaagtgctacactgccttctattacagaaaaggactgggatgacataaaatttggtgtagacaataaagtcgacttttatgctgtttcttttgttaaagatgcagaagtggttcatgagttgaagaattatcttcagagttgcgatgcagatattcatgttattgttaaaattgaaagtgcagattctattccaaatttgcattcaattataacagcatctgatggggcaatggttgcaggaggagatcttggtgcatagc

SEQ ID NO: 206453 - DNA, 296 bp, Gossypium hirsutum
aaaaaacacaccctaaagagacaatgagaaagctgctagcctttgcctttcttttcttcttcttttgggataaaacattagctcaaatagctccggcgccgccgttaaaggtggacaacatcacttccatcctcgaaaaaggtggccaattcaccactttcatcaagctattgaaagccacacaggtggctgatcaactaaacaaccagctaagcacaccggaccctaacgacgggataacggtgtttgcaccgagtgacaacgcgttctccggactcaaacccgggacgttaaac

SEQ ID NO: 206454 - DNA, 301 bp, Gossypium hirsutum
aaaagaagcagcttgaatctgtttttttgaagatggagggtaaagaagaagatgttaagctaggagcaaacaagttctcagagagacaacctattgggacatcagcccagacagacaaggactacaaggagccaccagcagcacccttctttgagcctggtgaactcaaatcatggtctttttacagagctggtattgccgagtttgtagccaccttcttgttcctttacatcaccgtcttgactgtcatgggtgtgtctcagtctaaaaccaaatgtgcaaccgttggtattcaaggcat

SEQ ID NO: 206455 - DNA, 297 bp, Gossypium hirsutum
gttggttcaatttaatcataggagactttttacaaacaagataaatcccttttagaatcacagcaaatcaacagtagtggcaaaaagggaaaataaaataataagaaaggtttgtaaaacaccatttagcactccacgccacattgtttaagaactggacctgtttgtttgggcaagaagggatcgatccgtacccaaaccagtgagaaaatcgatgccaaaagtatggaccaaagcacaacaatggtgggcgtcttgttttgtctccccatcaaacctttgaggaatgggtaaaga

SEQ ID NO: 206456 - DNA, 274 bp, Gossypium hirsutum
ccccatcgctcctactgttttcatctgcttcaagtcatggcaggtttggcaccggaaggatcccaatttgatgctcgccaatatgatcagaaaatgactgagttgctccaaactgatggagatgattttttcacgagttatgatgaagtttatgacagttttgatgcaatgggacttcaagagaatcttctgaggggtatctatgcgtatggttttgagaagccttctgcaattcaacaacgaggtattgttccattttgcaagggtcttgatg

SEQ ID NO: 206457 - DNA, 297 bp, Gossypium hirsutum
cgcttctttggagaagttccttcaggaaaggatcaaggttggtggcaaagctggtgctctaggtgactccgtcactgtcacccgcgacaagacccgtatcacggttacctctgactccaacttctctaagcggtaccttaaatacttgactaagaagtacttgaagaagcacaatgtccgggattggcttcgggtgattgcttccaacaaggaccgtaatgtttatgaactccgctacttcaatattgctgagaatgaaggggaagaggaagaatgagcaatcagttcagttacttt

SEQ ID NO: 206458 - DNA, 298 bp, Gossypium hirsutum
gcaaagttgaggatgttgatgaggagaaggagaaggaagagaagaaaaagaagaagattaaggaggtgtcacatgagtggtcattggttaacaagcagaagcccatttggatgaggaagccagaggaaattaccaaggaggaatatgctgctttctacaagagtcttacgaatgactgggaagagcatttggctgtcaagcacttttcagttgaggggcagcttgagttcaaggctatcctctttgttcctaagagggctccttttgacctctttgacacaaggaaaaagccaaacaa

SEQ ID NO: 206459 - DNA, 301 bp, Gossypium hirsutum
gaaaatccaacagccacaggatgaatactttcgtggtcaaggaaacttcttcgaggactccagcatgcccaataaccatcagatgtttccacaaggggaaggtcaatttgaccggttcaagggcctgaattctctgtttgagaccgaacataacaacaacaacagcttcccgctgatgttcgggtttccattcgatttgtctactttcgattacaaggaagatcttcaaacagttgggatggacaccatcccaaggcaggatgtttcaatctggttccagtaagactgtaacgcctgtcgg

SEQ ID NO: 206460 - DNA, 271 bp, Gossypium hirsutum
ctccacaagatcatcatccagggtggatctgtcatcgaacgagtgcaccgtgtgtttatctgagctagaagaaggtgagaaagtgaggaaactgaaatgtaaacacactttccacaaggattgcctcgatagatggctccaacagtattgggcaacttgcccactttgtaggaccaaagtgttgccaaataaggttggggttaatattcacaggctccaaaatcagtgtagagttgatggaagtgatgaagagaagatttttttattatcc

SEQ ID NO: 206461 - DNA, 276 bp, Gossypium hirsutum
gagttgtcggatgtttgcgctagtatcttgactttgttggactcgaatctgatcccatctgctgctgcgagtgaatcgaaggttttctatttgaagatgaaaggggattatcatcggtatttaacagagtttaaggttggtgatgagaagaaagctgctgctgaagatactatgctgtcttacaaggctgctcaagatatcgcactgacggatctagcaccaacgcacccgatcaggctgggacttgcgctgaattactcggtgttttactatgag

SEQ ID NO: 206462 - DNA, 335 bp, Gossypium hirsutum
gggaattttcttgtcataattttctgaggaattcatcgatggcaaccaaagtgtatattgtatactattccatgtatggacatgtggaaaaactagcagaggagataaagaaaggggcggcatctgttgaaggtgttgaagcgaaactatggcaggtccctgagactctgtcagatgagattcttggaaagatgagtgcaccaccaaaaagtgatgtaccgatcattacaccacatgaccttcctgaggctgatgggtttatttttggcttcccaacaagatttggcatgatgtcttgccaattcaaagcatttatggatgcaactgatggtcta

SEQ ID NO: 206463 - DNA, 209 bp, Gossypium hirsutum
gaaaaatggttctgctagagaaactttgggatgatgtaggggccggtcctcaaccggaacgtggcctttgccggctgaggaagatcaccaccaccccacccttgtccaccaaagatgaggcttcatcaatggcgatgccgacgagtccgacgacacctgggacaccatcgacgccggtgtcggctcgtaaggacaacgtgtggaggagc

SEQ ID NO: 206464 - DNA, 261 bp, Gossypium hirsutum
gagacaagatggatacatccaacattcataaaaatggtaataatttttaatattatacatctatagtagaacaaggcaggtagtgatatagatcgtcaacattgtaccaaagatacttttagagtatatcgaatcagtataactatccttcttctgacacagcaatgcaatttcaaacagtatatcaatgtgaagtgctagataatttcttttttcttcttgggtggcgatgtataaccaagtatcatgcaatagaaaatt

SEQ ID NO: 206465 - DNA, 237 bp, Gossypium hirsutum
gattaaacttcccattcttcccggctcgcaaactttcaaaggaagggttttgatgtcttatacaaaggtgcttacattcctttcttaagccaataccagccttaaattcttgatcttattgagcatgcttagacacaacccaaccttaccattggtgtcttggtctctattggggggaatattctcacgaatttcttcaaactcattttttgtggggagaaaccacccatatttgag

SEQ ID NO: 206466 - DNA, 242 bp, Gossypium hirsutum
gaaccaaagaagtttggacttcttgcaaattggcagagggagtataccatggaggatttactgacacagctgaaaaaggagatggcagcaccacataaccgaaagctggttcaacctcccgagggtacctacttctagctctcaagattatcggacatcctggatctaagtgcatttctggtatgcaatatatagtttgtaatgctttgtgatctttaaagaaaatagtggggaatgcccca

SEQ ID NO: 206467 - DNA, 292 bp, Gossypium hirsutum
cagaacctttttaagaaaccaaaaatcaaacattttcaaaggagggagtgaaaaaaggattagcccaaaggaccattttgattcttcaccggcaccgctcattgaactggcttagatcaaaccttggtctttttaccgaactctcatcgcccaatataatgctactctcctttttctataccataccataaccaccggcattgggcacaagaaacaacacgaagcatgccatgggggtggtcctttgggtattgcttgggccttttgtggcctgaatttcattcctggttac

SEQ ID NO: 206468 - DNA, 318 bp, Gossypium hirsutum
cttggatcgtatccgaaagcttgctgataactgtactgggctccaaggcttcttggttttcaatgctgttggtggtggtactggttctggtcttggatctcttctcttggagcgtctctctgttgactatggaaagaagtcgaagcttggtttcaccgtctatccttcacctcaggtttctacatcagttgtagagccttacaacagtgtgctgtccactcattcactccttgagcacactgatgtcgctgttcttctggataacgaagcaatatatgacatctgcaggcgttcttttgacattgaacgacccactta

SEQ ID NO: 206469 - DNA, 217 bp, Gossypium hirsutum
aaacaaacaacaagcacgctaagctatttacattcatggtgcaatgtccagtctcaaatccgagctcggagaatatgtatggttacagaaggcaggcttaaacaaaagaaaatggaaaaccagatgaagcttgaggctaaactccatgaactggaggtagaatggtgtgctgggtctgaaactattgaggaaattctttccagaattcaacagaaag

SEQ ID NO: 206470 - DNA, 283 bp, Gossypium hirsutum
ggtttggtgccacacctgtgatgtgccagaagaacctaatatgggttgtcacaccgatgccaggtgtggttgatcgctattctactttgggggaggttgttcaaggccacactttggtcaatgcatctgggaagaatggccttccaagagattggcttgtcaccaataatgaaaccggtggaatttttacaccagccaccagggtgttggtggtggtgaattaaccggcttgaaaggtattttaaattcccaaagagggttgggggggaataaaacccttttt

SEQ ID NO: 206471 - DNA, 268 bp, Gossypium hirsutum
attgcacccactggctcatcttttccatctcggtctcgttttgagtatgtggaaaatgttcaatctactgagttgaatcatggtggcccacaagtgcttaatcatgttgctccaccaaagtcatcaagcttctttgcggaatttggaatggacagtggttttcagaagaaatcaagctcaaattcctcaaaagtgcagattcaggaaactgatgaagctaggaaaaaattctcaaatgctaaatctatttcatcagcccaattttttg

SEQ ID NO: 206472 - DNA, 373 bp, Gossypium hirsutum
agctaagcctagtggttctgaacaaagcgttctggaaaagcatgttgcattctttgacagaaaccatgatggcatcgtttatccatgggagacttttgaaggttttcgagcaatcggggcaggttatctcttgtccatgaccggtgctttcctcattcactttgctctcagtagcaaaactcgccctgggaaatatccttctccattctttccaattgaggttaaaaacatccacctggctaaacatggcagtgactctggtgtatatgacagtgatggaagatttgtatcattgaagtttgaagaaatcttcagaaagttcgcccgtacccatggcaatgccttaacatctggtgaactcatggcaatgctc

SEQ ID NO: 206473 - DNA, 364 bp, Gossypium hirsutum
aaaaggcctggtctctacttcgatatcggcaaaaaagctagagatcttctttacaaggattaccaagcttaccacaaggtcactggcactacttacactttccatggagtcgcaatcacatcaaccgggactaagaaaggggaattgcttttggctgatgtaaatactcagctcaagaacaagaacatcacaactgatgtgaaattcgactcccgatcgaatcttttcaccactgtcactattgatgaacctgcaccaagattgaagaccatctttagtttcgttgttcctgatcaaaagtctggcaaggtggaactgcaataccggcatgaatatgctggcataagcactggcattggattga

SEQ ID NO: 206474 - DNA, 330 bp, Gossypium hirsutum
agaaggggaaggggatcagctgtctttattgacgcttttggtggctgcttttaggaagtctttgattgggtgtagcctttctggaagtaaagagctttgttcaatggaaattgggttgcctaccaatgttagacatgttgctcatgtgacttttgataggttccatggatttcttggtttgccggttgaatttgagcctgaggtccccaggagagctccaagtgccagtgcgagtgtatttggggtttcaacagaatctatgcagctctcactggactctagagggaacagtgttccaacaatactactcctgatgcaaagtcatttata

SEQ ID NO: 206475 - DNA, 241 bp, Gossypium hirsutum
cagccttaccctggaatgctcgaagcaacaaggggatcgggaatattcctctcgaagggtccgagaaacgaggacatacaaagcctcgcaaaagatcaaagtgcacccgatgcatgggttaacaccaacatcgtcccttataaggacgatgttcagttcaagttgatcactattgggaatgaagccatttcaagacaatcaagctcttacattcctgatgccattaacaacataatggact

SEQ ID NO: 206476 - DNA, 347 bp, Gossypium hirsutum
gtcatttgaaaatcactcgtcctggtattaacggtacagcgtttcgattttcatagagaaacctcgaaacttctacgtagtgagaggaaagtttgagtacgtgcgatggctcgctcgtggagagcaagcggctctttggtggctctagctatagtcttgtccggatgcttctttgcaatctcaattgccaaggaggaagccgcgaaattgggaacagtcatcggaattgatcttggtacaacttattcttgtgttggtgtgtacaaaaacggtcatgttgaaattatagccaatgaccaaggtaaccgtattactccatcgtgggtggctttcactgacagcgagag

SEQ ID NO: 206477 - DNA, 315 bp, Gossypium hirsutum
ctcctaccaagaagataacctctctgaatgatggagtcatcatctcagagcttttaaagtatccggtcagaggtgttgtctttgaaggtggtaacactcttcaagacttgtctgacgcagtgtctgatgcgtgcatttgccttcaagataacaacatagcatacaatgtcctcatctctgattgtggacagcggatcttcctccttcctcagtgttatgctgagaaacaagctcttggggaagtgagtgtagagcttttggacacccaagtgaacccggctgtgtgggaaattagtggtcatatggtgttgaaaa

SEQ ID NO: 206478 - DNA, 293 bp, Gossypium hirsutum
atggtgggataataggaaaaataagaggaacccaagatatccagattttaagcacaaggatactggagaagctctatggattgaaggtaggaatactccccattgggtgagatcccagttggagatactagattctagaatgagctctctgcaagatgaggatgaaaggatgttttcttcgatggccagtgacaatctcctgcctttttaatgggttaaaccagtgtgtttatgatgttactataagttgaatgcacttggcaagggccctgcattttggatgcaaaaagttt

SEQ ID NO: 206479 - DNA, 386 bp, Gossypium hirsutum
ctcgtgccgttcttcttattcctttattgctttttagaatttttcttaatcgaaaatgagagagtgcatttcgatccacatcggtcaggccggtatccaggtcggaaacgcttgctgggagctttactgtctcgagcatggaatccagcctgatggtcagatgccaagtgacaaaactgtcggaggaggtgatgatgcttttaacacctttttcagtgaaactggtgctgggaagcacgtccctcgtgccgtcttcgtggatcttgaacccactgttattgatgaagtgagaactggtgcttaccgccagctcttccacccagaacaactcatcagcggcaaggaagacgcaactaacaactttgcccgtggtcactacaccattg

SEQ ID NO: 206480 - DNA, 378 bp, Gossypium hirsutum
  unsure (1)..(378): unsure at all n locations
cagtactacatcgtagtgatttgttatatttactttacccgtgttgtggtttatgccttggagacgattacttcttataagtatctttggaccagtgtagtggctggggagttagccacacttgcattttatgtgtttacagggttcaaattcaagccagaggctcataacccatactttgtgatcgatgatgaggaggaagaagctgcagcagagcagctgaagcttgaagatgagtttgaattgtgatagtattcattgaggaaaagaaatggagaatgattgaagaaggttcaggttgtcaaactggggcaattgaggtagaagccttatcatcttaatgggtaccattgaaaaaaaanaatgggatatttgatg

SEQ ID NO: 206481 - DNA, 383 bp, Gossypium hirsutum
gaacaaattatcctctacaaagacacaacttccatatgacttttactacttgaaatattgtaagccatccaagattgtgaacaatgctgaaaatttgggggaggtgctacgaggtgaccgcatcgagaactctgtctacacctttgaaatgagggaggatcagccttgcaaaatagtctgtcgaataaaactcgatgctgattctgccaagaatttcaaggaaaaaattgatgatgaatatcgagttaatatgatacttgataaccttccagttgcggttcgtagacaaaggagagatggaagtcaatcaacaacatatgaacatggtttccgtgttgggttcaaagggaattatgccgggagcaaggaagagaagtatttca

SEQ ID NO: 206482 - DNA, 342 bp, Gossypium hirsutum
gtctatccttcacctcaggtttctacatcagttgtagagccttacaacagtgtgctgtccactcattcgctccttgagcacactgatgtcgctgttcttctggataacgaagcaatatatgacatctgcaggcgttctttggacattgaacgacccacttataccaatcttaaccgccttgtctctcaagttatctcatctcttaccgcatctttgagggttgatggagccctgaatgtggatgtgactgagttccagactaacctggtcccatatcccaggatccactttatgctttcttcttatgcccctgtcatttcagctgagaaggcttaccatgag

SEQ ID NO: 206483 - DNA, 362 bp, Gossypium hirsutum
gagaaagtgacgggaaaataagaaaaatgcctagatcgaaatcaccggtgtcaatagctttatcgtttctcttcacattcttcagcatctcaaacgcttttttcggaccgtcgtcgccagtgcttcagcttactccttctaatttcaagtccaaggttttaaattcgaatggagttgttttggttgagttctttgcgccttggtgtggccattgtcaagctctaacacctacatgggagaaggctgccaatgttttgaatggagttgctactgtggctgctcttgatgctgatgctcaccagtcccttgcagagaaatatgggattagagggtttccgacaataaaggtgtttgcacctgga

SEQ ID NO: 206484 - DNA, 317 bp, Gossypium hirsutum
attcctccaagttaggagtttggagagtggtcaccgctgaagcaaaacaaatttcttgggggaaaagaaaatggagttttccatgatttttatgattagcttctctgtattgattttgtgctcctcactggcatatggtcaagttgcaatgagcacaaacccgacaccgtcaccctcaccagcaccggcaccgacaccggcatacacaaatatcaaagacttactctctgtggcaggtccatatcacaagttcctgggctacctctagtcgactaaattaatcgacacgttccaaatccaagccaacaacacggttg

SEQ ID NO: 206485 - DNA, 376 bp, Gossypium hirsutum
gcttaatggaggtctcggaaccactatgggatgtactggtcccaaatccgtcattgaagttcgcaatggcttgacttttcttgacctaattgttattcagatcgagaatcttaattctaaatacggatgtaatgttccgttggttctgatgaactcattcaacacccatgatgacacattgaagattgtcgacaagtactcaaattcaaacattgagattcatacttttaatcagagccaatatcctcgtctggttgttgaagattttgctccattaccaagcaaaggccagcatggcaaggatggatggtaccctcctggtcatggtgatgtgttcccatctctaatgaacagtggcaagcttgatgctttctta

SEQ ID NO: 206486 - DNA, 276 bp, Gossypium hirsutum
  unsure (1)..(276): unsure at all n locations
gacaagcattcactttgcaacagaagggcgtaaagaccgtttctctgctctacggaaccgtatattactcatacaattgcaagcaaaccaaaaatccctcacatacaaaaatgggtgattaaaagtcgaaaccctctccagattaactcaatggaggatcgacaactntagtccttgttcttacaaaaaatccgaccccttaaggtcggtctttggaactggcacttgtctatagagaagaatcgatatatgtatattcgattatttcccgagcca

SEQ ID NO: 206487 - DNA, 336 bp, Gossypium hirsutum
cttgatttgaagggaccaaaagccaataaggtccttctggactactatatcatcatctaggaacagcactttatttagttttgggaagatctctggtaaataaaacccaagatggttcagtatggacaaatactttgggttccggaacttcaaatttgaatcaaaactaacccgatgtgccctgaagtaataatcaatcatggaaggggaacctaacttgctttggtcccttgatttgaagggaaacgtctatggtgctgttgaaacttgtggggaaagcttccatcggtttgatcggtatctcaacttcttaaaatccctgatctcaaagaactt

SEQ ID NO: 206488 - DNA, 395 bp, Gossypium hirsutum
acgagcttaaacaatcaatcaagtgataaaatagcccttatcttttgtaagagggagaaattcataggaataattggtgtagctgagaccgtagccgaattcgaataccttcagcccttggtagaatctgtaagtacgtccaggataacctgaagatggttcaggccgcattctcatgtctgtcatcggtattttagtcaaattttgtggataccatgtaattggtaatctccctcctggattatgatcaccaaatataatttcggctaatgcacgtcctccagcttcaccgggatagccagcccatataatgcttccaatgttctgatcattcttggcaaatgttatgtctactggacctccacaaagaagcacaagaatgacaggcttatttg

SEQ ID NO: 206489 - DNA, 240 bp, Gossypium hirsutum
tgtccatctgctgtattaccagtgttggactcactggtggaccctcttcaaaagacaattaatttcaagcccaaacaagatgctgtcaaacaggaagtagatcgtaatgaagatatgatccgtagtgctcttcgtgcaatcgcattcttgaaccgaataagtgggggagatagcagtatgaagttgaagaatctcatgagtgaaatatcgaaatctccaacattattggacaagtattac

SEQ ID NO: 206490 - DNA, 393 bp, Gossypium hirsutum
ggaacctttcggattcgttgataattttttgaaagatttcttcgaaaaggtttcattaactcctcatttatatcgagtagaccttgttgttgcgagaattcttaattcatgagttgtagggagggacttatgtcaccacaaacagagactaaagcaagtgttggattcaaagctggtgttaaagagtataaattgacttattatactcctgaatatgaagtcaaagatactgatatcttggcagccttccgagtaactcctcaacccggagttccgcctgaggaagcaggggccgcggtagctgctgaatcttctactggtacatggacaaccgtgtggaccgatgggcttaccagccttgatcgttacaaagggcgatgctacgacattgag

SEQ ID NO: 206491 - DNA, 269 bp, Gossypium hirsutum
gcactcaagtctccacttatgggaatatttgagaagcgtcgtgcacggaagttcttcatatatgttcaagattatgatgaaaaggatcctaaaactcacgagggaatggacttgacaagggtgtcaactagggcactaattgcgaaatatgggcttgatgataacactgtggatttcattggtcatgcattggcacttcacagagatgaccgctacctggatgaacctgcattggatactgtaaaaaggatgaagctttatgcggagtc

SEQ ID NO: 206492 - DNA, 390 bp, Gossypium hirsutum
  unsure (1)..(390): unsure at all n locations
caggctatgtcaattttgatctcaactttccaccatggcaaaaacccttctgctattgatcaaatgacttttgcaaggtacacggagcgaactgcttttgaaaggcccctcacaagtggtgtggcatatgctgtaagggtgctccactctgaaagggaacaatttgaaaagcatcaaggatggactattaagaggatggatacactcgaaaaaaatcctgttcataaggatgactataatcccgacctctttgaaccatcgccaattcaggaagaatatgcacctgttatctttgcgcaggatatcatatcacatgtgatttctattgatctgctgncgggaaaggaagatcgcgagaatgtattgcgtgcaagaaaatcaggaaagggg

SEQ ID NO: 206493 - DNA, 385 bp, Gossypium hirsutum
  unsure (1)..(385): unsure at all n locations
gttcagccggctttttgccaagaaggagatgcgtatattgatggttggacttgatgctgctggtaaaaccaccattctttacaagctcaagttgggagagattgtcaccacaattccaaccattggtttcaatgtggaaactgtggaatacaagaacatcaactttactgtctgggatgttggtggccaagacaagattcgtccattgtggaggcattacttccaaaacacacaaggactcatttttgtggttgatagcaatgatcgtgatcgtgtggtcgaagccagggatgagttgcacaggatgttgaacgaggatgagttgagggatgctgtgctactggtatttgcaaacaaagcagatcttncaaatgctatgaatgct

SEQ ID NO: 206494 - DNA, 251 bp, Gossypium hirsutum
tggagtgcaaggagctgatgctaaaaacatcttctatttgagagaaattgatgatgctgataagttggtagaagcaatcaaagcaaagaagaatggaaaggctgttatcgttggtggaggttatattggtcttgagcttggtgcagccttgaaaattaacaatcttgatgtcagcatggtgtacccggaaccatggtgcatgccccggcttttcacctctggcatagctgctttttatgagggttattatg

SEQ ID NO: 206495 - DNA, 377 bp, Gossypium hirsutum
cccggtcggtcaccgaatcgtgatcgctggagactagacgagttagagtgtttctttatctttgtttgttagtgtaagaggaaagtgtgcgtgtttggattgataagaggaaaagagaaaatgaatgggaatagcaatggatttgggagtgccggtgcggtggcggcgactgagtttttaaggagacgtcatcgacatgagactggagagaatcagtgtagttctgccgtcgtcaagcggatcaaagctcctgttcctctcgtttggtctctggtgaggcgatttgaccagcctcaaaagtataaaccctttgtcagccggtgtgttgcacaaggaagccttgaaattgggagtcttagagaagttgatgtcaagtc

SEQ ID NO: 206496 - DNA, 210 bp, Gossypium hirsutum
ctgatcccgctaaatacaatcacttgtacagtatggtgaaagaagaagttgattgtaaaacagcaacagattcatctagttgtaccaatggtcttctttggttgacacgagcaatggatttcctcgtagaattgttccgcaacttacttgcacattcagattggactatgactgaatcttgtaccgacttctatggcaaaaccctgaaaa

SEQ ID NO: 206497 - DNA, 128 bp, Gossypium hirsutum
ccccagagctcttaggaggttgaggactgcttgtgaaagggcaaagagaactttatcgtccactgctcaaacaaccatcgaaattgactccttgtatgagggtatcgatttttactctaccattaccc

SEQ ID NO: 206498 - DNA, 287 bp, Gossypium hirsutum
  unsure (1)..(287): unsure at all n locations
ggaaaaacaaaaagcaaaaatggagaaatctcaagtctgggtggccttttggagccatggccttgntattggcatcggcgacagcggatgacgtcgttgtactaacggaagatatcttcgagaaggaagtcggtcaagatcgaggagctctcgtcgagttctatgctccttggtgtggtcactgtaagaagcttgctcctgagtacgagaagcttgngtcaagttttaagaaggctaaatccgtcttgattggaaaggtggactgtgatgagcataagagtgtctgc

SEQ ID NO: 206499 - DNA, 317 bp, Gossypium hirsutum
cgaatctttatcgaattaggacactttgttaccccatttccgtttgaatcaatcaggttttttgtcatggaagataagcagtcggttgcaacactcatagactcaacaactactaagatacagcagcttcagaaagcatttgctgaacttgaaagtcatcgtgctgtaacacttaatctgaaatggaaagaacttgaggaacatttccatgggcttgagaagtccttgaagagacgcttccatgaattagaagaccaagaaaaggagtttgagacaaaaactaagaaatctcgagaaatgttgaagaagcgtgaagc

SEQ ID NO: 206500 - DNA, 279 bp, Gossypium hirsutum
gcccaaccagctttgtcaagaccaaaaactgctctttgattgcattaatgaagtagtcagagaggtttgtgagtactattttggttcccctagtgtttcatttgttaaacccaatatccgtcctatcccaaacatgcaaaatacaattcaagaagtctgggagggagtttattggcatttgctcccgactccattgccttgtactctggacctggtagtccgaaaagacctggctaagactggaacatggatggaccttcaacttgacacttgttatat

SEQ ID NO: 206501 - DNA, 265 bp, Gossypium hirsutum
atttggttaaccatggctcataacttttgtcatcctttcttccttttccaacttttactcattactgtctcactaataatcggtagtcacaccgtctcgtcagcggctcgacatttattccagacacaaacaacctcatcagagctgccacaattggcttcaaaatacgaaaagcacaaagagtctgaatacaaacaaccaaaatatcacgaaaagtacccaaaacatgagaagcctaaaatgcacaaggaggaaaaacaaaaac

SEQ ID NO: 206502 - DNA, 359 bp, Gossypium hirsutum
ccgaagatgacaaggagttattgatgtcccacatgaactttgaaaagaaatttggacaatcagccatttttgtaacttcaacactgatggaacaaggtggtgtccctccttcttcaagccctgcagctttgctcaaagaagccattcatgtaattagttgtggttatgaagacaaaaccgaatggggaagcgagcttggctggatttacggctcgattacagaagatatcttaacaggattcaagatgcattgccgtggatggagatcaatatactgcatgccaaagttgcctgcattcaagggttcagctcccatcaatctatcggatcgactaaaccaagtccttcgatgggcactc

SEQ ID NO: 206503 - DNA, 225 bp, Gossypium hirsutum
attgagtcgccttggaaagcctattgcagctgatgcgggggggaagttgtacacaattatggagatttgccgtctttttgatcaaaaattcagagaacatttaaatggggggcgtactgggggggataaaggttacaatggttttgacaaccaactttctgctggtttgaaaagggtggcatttggcaggccactatcaatggggaatattagggagcttattac

SEQ ID NO: 206504 - DNA, 262 bp, Gossypium hirsutum
ggttcgatcctgctgcagatttcatacttactcaatcatgtggaaccatcatcagattgtgttctatattgatgaagtgccaattagggtttataagaacaatgaagctagaaatatcccatacccaaaactccagccaatgggagtttattcaacgctgtgggaggctgatgattgggcaacaaggggaggtttagagaaaattgattggaccaaagctccgttcttagcttattacaaggacttcgacattgaaggatgt

SEQ ID NO: 206505 - DNA, 464 bp, Gossypium hirsutum
gagagcactagcattagcactagcactagtagcaaccatggcctccgccgcatgtttcttgcgaccaccacgcactcacaaccaatggcagatcatcatcattatcgccgtcgctgcgccaggtttcaaacatgaagcctacccagcaggtggtgtgcaaggctcaaaagcaggaagatgatggaagccttgtgtcccgtaggttggctctcactgtactcattggtgctgccgctgttggctctaaggtttctcctgctgatgctgcctatggtgaagctgcaaatgtatttggaaagccaaaaacagacacagacttcatgccatacagtggggatggattcaagctctcgataccatcgaaatggaacccaagcaaagaagtggagttcccaggtcaagtgctgaggtacgaggacaacttcgacaccaccagcaatttgagcgtcatgatcactcccacg

SEQ ID NO: 206506 - DNA, 457 bp, Gossypium hirsutum
cggacgcgtgggcggacgcgtgggcttcttcacactctcttcgtgctcccgccgtatttcggttcccggctcttctctcttgttttccttccttccttccttctgtcaacaccactttctaatggcttcccttgctggttcatccatctctatgcaacctcgccagaccctggctacaagcagggttactgggttgaaattggtttcatttgtgaaccggtgaagaagcagcctctcctttaagctgcgtccggatcgcttgcggatttcatgtgctgccaaaccagagacagtggataaggtatgtgaaatagttaggaaacaactagccctaccaagtgacaaatcagtcacaggtgaatcaaaatttgctgaacttggagccgattctcttgatacgggcgaaattgtgatggggcttgaggagagtttggaatcactgtgggagaggacaatg

SEQ ID NO: 206507 - DNA, 261 bp, Gossypium hirsutum
aactgtaaaaatggtccaaaagagaggtgtaaggttgatgtcccgtgcaagaagacacaagagaaagttgtgaatacactgatcgagaagcgtccaaagcagttgggtattggcggggcactacctccgaagaaggagctacatcgatttgtaaagtgggctaatggtgtccgcattcaaaggaatacgaggatccctaagcagaagttgaaggtcccaccatcgttgaaccagtttaccaagactcttgacatgaacctt

SEQ ID NO: 206508 - DNA, 448 bp, Gossypium hirsutum
  unsure (1)..(448): unsure at all n locations
gttagctgatctaacatgggatgagtctctaaaacacacgcttggagctgctcagaactgctctgccagcagaaagggcaatcaccagctcactgatgtcgtccttcctgaatcgaaagactggagggaatcgggcatagttagcccggtcaaaaatcagggatcctgtggatcttgctgggcatacagtactactggagctcttgaagctgcttaccatcaggcatttgggaaaggaatctctctttcggagcagcagcttgcggactgtgctggagcatttaacaactttgggtgcaatggtagattgccatcccaagcctttgagtatatcaattacaacggtggccttgatacggatgaggcatacccttatacagaataagatggtcaatgcatattctcatacgaaaatggtggtgttcaagtcatngactctgtcaacatt

SEQ ID NO: 206509 - DNA, 304 bp, Gossypium hirsutum
cccacgcgtccgtaacacaatcagttgcttcacaacggcctatacaaccatggctctttggtgcccatcattcgtcggtaaggcagtgaagttctgcacttacacccctgaaatccggggaactggccgtgtttccatgaggaaaaccaccaagcctgtttcttctggtagcccatggtacggtcctgaccgagctttgtacttgggtccactttacggtgagccaccatcttacttgaccggggagttccctggtgactattgttgggacactgatggactcttagctgatcccgagaccttt

SEQ ID NO: 206510 - DNA, 429 bp, Gossypium hirsutum
cagaagccatggccagcatgataatggcttcctcaaagcctgtaatctccatggctgctggatcatccttcttttccaaacccaaactcaaacaaatcccacaactttccctcccaaaactccccaccccaaagttcttgaaaacccaacaaatcccctcactctcctccaccactctcaaatctatctccctcttcacagtcaccactttatcctttgccccaccttctcttgctgcagaaatagaaaaggccgctcttttcgatttcaacttaaccctccccatcatgatggtccagttcttgttcctcatgtttgctcttgacaaggtctactttaccccactcgggaaattcatggatgagagagatgctgccataaaggagaaacttgccagtgtgaaggacacgtctgaagaaatgaagcaac

SEQ ID NO: 206511 - DNA, 387 bp, Gossypium hirsutum
ggtgctcttgatcgagatgatgaggatgtatactttgatgatgaatctgctgaggtggtgatatcatccttgaggcttggtgatgaacaaggaagcctgttcacaaattccaactggtctgcattccaagatgacagaaccggtaatgcacctgcagccacatcccccccagaggtgatgactgatatgaacctttatggccactgcaaatggtggtaacagcactagtgatgatgaagtggtagttggagaggatgatgagttgaatgacaacagccagtcagtgaatagcacgtctactttagatgtgatgaacgaatttaacagtgttatgagccgtggagacttgagtccacaaggtgagaaaagcaatgctactcaagatat

SEQ ID NO: 206512 - DNA, 420 bp, Gossypium hirsutum
cttttcctccgactttcattccatggattgtgctttatctcctcagatcttcataaacacaagatttgctaggtgtgtggccatcagacaaggagttgaaatcaggctatacagaaaaagatggttgaattctagttgctgtgctgtgggggtgtctgagatgggtgctggcaacctgtttgatgatgggtccttgaaagggtctgaaaatgggtcattgttgggtgcacttggtgactcagttttaccaccatttggaacagtggatgctgaaattaccccagaaaccgttgatttctttgttagtgatgcagaaggtgatcctgactggccttctaaaggattctcttccattgaccaagcattgaatacaatacgccaaggaaagtttgtgattgttgtagatgatgaaaatgaaga

SEQ ID NO: 206513 - DNA, 379 bp, Gossypium hirsutum
tcgacactgcctctacggcacaggctaacatggtcgctcctttcaccggcctcaagtctgcctgtgctttggcagtcaccaggaaggccaacaacgacattacttctctcgcaagcaatggcggcatagtgcaatgcatgcaagtgtggcctcctactggaaagaagaagttcgagactctctcataccttcccgaacttacacccgtgcagttggctaaagaagtggattaccttcttcgctcaaaatgggttccttgcttggaattcgaattagatgagggattcgtgcaccgtaaatactctagcctacccacgtactactatggacgctactggaccatgtggaagctgcctatgttcgagtgcacctactcggc

SEQ ID NO: 206514 - DNA, 379 bp, Gossypium hirsutum
ctaaaaaccaatggccagatttgttctgcgactgcccaccggcaacttgagaagcttctcggttcatgcttcgtcaaacggggctcctccgggtagtggctcacaaaatggggggccaatgatcttggagcttccacttgataagattaggagacccctaatgcgcaccagatcaaatgatcctaacaaagtccaggaactcatggacagcattcgacaaattggacttcaagtgcctatcgatgtgcttgaagttgatggagtttactatggtttctctggttgtcatcggtatgaagctcaccagcgccttggactctcaacaatacgctgcaaagttctaccaggaaccaaacaaactctgaggcatcattttcat

SEQ ID NO: 206515 - DNA, 376 bp, Gossypium hirsutum
ggggccgatgtgcaagaatgagattatcatggctgggactctatttctaacggtggggctctcgattgttggaggggtgttaaatgtggatgctgctactgctggcattcttgggttatctgtactacttgtgactggggtagtaacatggaaggagtgacttgctgaatcagttgcatggtatacacttactgggttggctgcactcatcgctatggctgagtctgtgtacaaatgtggtctaatctgatgggttagtcacaccgtgtcaaggtcgcacgtggattcagactttcatggcatatgtcaagcggcattgtgcttcttctctatagctactggcattacttctttgactgtggaactgctcatattg

SEQ ID NO: 206516 - DNA, 444 bp, Gossypium hirsutum
cccacgcgtccgcccacgcgtccgcccacgcgttcgcaacaacaacccccatcagaaatagcatattctcctttcttcttatgtcttcagtataaaaaacgaaaagaaaagacatggctgctgttactgctgcagtctctgttccttctaccaagtccacctctctccctgctagaacctctcttgtctttcctgataggatcaccttcaagaaggtgcccgtttactacagagatgtttgcagtggggggagagtggtttctgtcaaggcccaggttacaactgaagctcctgccaaagttgtaaaggaatccaagaaaaacgatgaaggtgttgtggttaacaagttcaggcctatcaacccttacattggtagatgccttctaaacactaagatcactggcgatgatgctcctggagagacttggcacatggtcttcagca

SEQ ID NO: 206517 - DNA, 448 bp, Gossypium hirsutum
caagcttctattcagttttgtaagagctatggctaaggacattgaggttggtggtgagtggcaggccaaggactaccatgatcctccacccgctccattggtcgacgctcaggagttagccaagtggtctttttacagggctgtcatagctgagttcattgccactctcctctttctctacatcactgtcttgactgtgatcggttacaagacccagaccgaccctgctaagggcggtgaagattgtggcggcgttggcattctcggcattgcttgggcttttggtggcatgatctttatccttgtttactgcactgccggtatctctgggggacacatcaacccagcagtaacctttggacttttcttggctaggaaggtgtcgttggttcgagccatattttacatgggtgctcagtgtttgggagccatatgtgggtgtgggctg

SEQ ID NO: 206518 - DNA, 443 bp, Gossypium hirsutum
cccacgcgtccgcttctcgctttaatcctcgcttttctccgccatcaaccacttcctcgtgttctcaaggttgtagaagatggcagagggcgaggatatccaaccccttgtttgcgacaatggaacaggaatggttaaggctggatttgctggggatgatgcaccacgagctgtgtttcctagcatcgtcggtcgggctcggcacaccggtgtaatggttggtatgggccaaaaagatgcatatgttggtgatgaagctcaatcaaaaagaggtatttcgacgttgaaataccctattgaacatggtattgttaacaactgggatgatatggaaaagatttggcatcatactttctacaacgagcttcgtgttgctccggaagaacaccccattttacttaccgaagcccctcttaaccctaaagcaaatcgtgagaagatga

SEQ ID NO: 206519 - DNA, 449 bp, Gossypium hirsutum
attttctcctctttctctctattcgaaatttgaatactctctcattttacgatatttcttagtgtgttttggatcgggaggttagaggtttatcatcaatggcggatactgagacgtttgcatttcaagctgagatcaatcagcttcttagtttgattatcaacactttctacagcaacaaggagatcttccttcgtgagcttatcagtaacgcctctgatgctttggataagatcaggttcgagagcttgacagacaagagcaagcttgatgcacagcctgagctcttcattcatattgttccagacaagaccaataacactctatcaatcattgatagtggtattggtatgaccaaagctgatttggtgaacaatcttggtacaatcgcaagatctggtactaaggagtttatggaagcactggctgctggtgctgatgttagtatg

SEQ ID NO: 206520 - DNA, 335 bp, Gossypium hirsutum
atcgagactagtgtcacgtgctacgctcgtcggattgttctttctggcgtctcttctaagcgctccggggcattattctccggtccatccacatctccttacttcagctctaacagccttaaaacaagttcactatttgaagaatcattaacggttgttccaacgtcattattcaacgtttcaaaggcaaaccacactacttcactactgacaaattgttacaacagatactactttgacgaatttctcacaaaggcatcaacacataaggcattgattagattcatcatctgcatgggtgaagcattaacaacaattgctttttaagttataac

SEQ ID NO: 206521 - DNA, 275 bp, Gossypium hirsutum
ctcaaattcagtgaacaatttcacagttgttttcttcattctctctctcagccatggctgcggccatgggcaccgtcgctggcgctggcgacgccaaccgagctctgagagtgtcagtgccaacctcagctttcatggggaagaaagtgagctcaagattcaacagcaccaggcaggttccttcgggaagttttaaggtgatggcggcggacaaagatatagacgaagagacacagactcgaaaagaccgatggaaagggttggcttacgatatt

SEQ ID NO: 206522 - DNA, 468 bp, Gossypium hirsutum
cacaaaccgttccctaatttcttatctcttattctcctctctctcgtcgccatcgcctctgctgaagggttcttcgaagaacgcttcgaagatggatgggaaagtcgttgggtaaaatctgactggaagaaagatgagaacatggctggggaatggaattacacttctggaaaatggaatggagatcctaatgacaaaggtattcaaactagtgaagactacaggttttatgctatttcagctgagttcccagaagttaacaacaagggcaagactctagtcttccaattgtctgggaagcacgagcagaaacttgactgtggtggtggctacatgaagttgctcagtgataacattgaccagaagaaattttggggcgacaccccgtacagcatcatgtttggacctgatatttgcggctacagcaccaaagaaagtacatgccattcttacatacaatgggacaaa

SEQ ID NO: 206523 - DNA, 424 bp, Gossypium hirsutum
  unsure (1)..(424): unsure at all n locations
ggcaaacgccataattaaagattttgacgttttgctctcgatctctccgcccaaatcttgtggacgcgaagcagataaatgatgtgatgactcttttctttgtcagatcccttcgaaagcgattcttcttcttctttctattctttttaaattgaattgaagttgctgattcgaaatgagtacggacgaccttctcagcatcgagcctttacagctcaagtttacttttgaactgcggaagcagatctcgtgtgctcttcaattgtcgaataaaactgatcattatgtagctttcaaggggaaaacgacaaatccaaagaagtacttgcgtcgtcccaatacgggggtcgttttgcctagatccacatgcgatgtttgtgttaccatgcaagcgcacaaagaggctcctnctgatatgcaatgc

SEQ ID NO: 206524 - DNA, 410 bp, Gossypium hirsutum
tatattcagctatagcatacactactagtacccactactagcaatggcttcctcaatgaggtcatcggctaccattgccactgcctctccggcacaggctaacatggtcgctcctttcaccggcctcaagtctgcctctgctttcccagtcaccaggaaggccaacaacgacattacttctctcgcaagcaatggcggcagagtgcaatgcatgcaggtgtggcctcctactggaaagaagaagttcgagactctctcatacctccccgatcttacacccgtgcagttggctaaggaagtggattaccttcttcgctcaaaatgggttccttgcttggaattcgaattagaggagggattcgtgcaccgtaaatactcgagcctacccacgtactacgatggacgctact

SEQ ID NO: 206525 - DNA, 454 bp, Gossypium hirsutum
cccacgcgtccgcattttcatatcaatggctgcagtcacaaacgccgctgctacatcctcgttcatggggacacgcttccccgacgtctacacaagttcagggagattcgtcgccaggtttggttttggcggcaaaaaagcagctcccaagaaagcctcgaaacaaacctccgaccgccctctatggtacccaggagcggtggctcctgattggctcgatggaagcttggtgggtgattacgggttcgacccgttcgggttagggaaaccagcggagtacttgcaatatgatttggattctttggaccagaacctggctaagaatatggctggtgagatcattggaactaggaccgaagttgccgacgtgaaggcgacgccgtttcagccttacagcgaggtttttggtctacaaaagtttaaggagtgtgaattgatccatggacggggggcc

SEQ ID NO: 206526 - DNA, 436 bp, Gossypium hirsutum
gaaaaagatgcatttgaaagttataacaaatagcctccggttgcttttcttgattctctggttcttggggagtgggaggatcgcatgcaaagagggctctttcgatatgatgttactgcctgtgaaaccaaggtgattcctggtgaatatggctctattgctcagctgaacgagggccgtcaccttaagaagaggccaactgagttccgtgtagataaagttctccagcccttcgatgggaacaaattcaactttaccaaagtcggacaagaagaggtgctcttccagtttgaagcaagtgaagatggtgaagttcagttcttcccgaatgctcccattgatgttgagaatcacccaagtgttgttgccataaactttagtcctattgaatacggacatgtgctgttgatccctcgaattcttgaatgcttgcctc

SEQ ID NO: 206527 - DNA, 257 bp, Gossypium hirsutum
cccacgcattcgcgtactcatgttcagacttatgctaagtgtattaccttctgggctcagaatcacttccatgcgggcaatggcaattaaaggatggattcgtgcaccgaaaatactctatcctacccacgtactactattgacgctactggaccatgtggaaactgcctatattccggtgcaccgactcggatcacgtattgaatgaacttgaagaatgcaagatggaataccacaatgcatacattagaatcatt

SEQ ID NO: 206528 - DNA, 322 bp, Gossypium hirsutum
ctcttttgtataactgtagcatatagtactagtaagctttaatagcaatggccccctccatgatctcgggggctaccattggcaccgtgaactgctcctacccggcacaggccaacatggtggcccccttcaccggcctcaagtctgcctctgctttcccagtcactaggaaggccaacaacgacatcacgtctcttgcaagcaatggtgggagagtgcaatgcatgcatttgtggcctcctcttggtgagaagaagttctagacactctcatacctacccgatcttacacccgtacagttggctaaggaagtttattacct

SEQ ID NO: 206529 - DNA, 438 bp, Gossypium hirsutum
aaggatcttttaaaaccattgagggagtagaagtccaagtaatcgacaacgttttttttcgacacggaaaaaattggattacttttatggaccagggaggaaccatctcttcgttccgggtccggttaacataccggaacccgttattcgagccatgaaccggaataacgaggattaccgttccccggctattccggcaatgacaaaaacccttctcgaagatgttaagaagatattcaagactacgaccgggactccttttatgatcccaacaacaggaaccggcgcatgggagagtgcacttactaatacgttatcccccggtgaccgaatcgtatcgttcctcattggacaattcagtcttctttggatcgatcaacaacaacgtctcaagttcaacgtcgacgttgtcgaaagtgagtggggacaaagtgctaa

SEQ ID NO: 206530 - DNA, 291 bp, Gossypium hirsutum
gggggcttgctggaaaggctagctttaacaggtgtggatgtatacagcttatattggacctggtgacagtggcatgaaggctagaaaacgacgttggacactatattgctgagcagggaatcgttgatcctgtagttgtatgcgcatcaaaggacttcatgaccaatcgtattcatgatactgggacaaaagctggtaaagggaaacatatattgaatctcggagatggtattaaagttgcatcacctgaacaaaatgtggaccatctctatgatgttgctccagctgtca

SEQ ID NO: 206531 - DNA, 468 bp, Gossypium hirsutum
ggaaaaatggcgacctctgctttagccattgcaactgcatagccattgacccatcgtttcggcaactggtgagcacacttcatggccatccttctcctgttcttgctgttcttgcacgccactcgcacctcccaacgaacccaaactctctttcaactcaaaacctgttgcgaaacaatgtgttttcaatgtgggtgttgggcttttagcagcttcacttgttgcttgctcaccattggacgctgatgccaccaggatcgagtattttgcaactggtggggaacctccatgtgagctcaactatgccaaaactggtcttggatactgtgatgttattgcaaggtctagtgtggaagctccaccatgggagcttggcaatattcactacactggaagatttgcctgttgggatagtcctttgaaagtagctataaacggtgctacaacctcttaccatgcgaattggtc

SEQ ID NO: 206532 - DNA, 439 bp, Gossypium hirsutum
  unsure (1)..(439): unsure at all n locations
cccacgcgtccgcccacgcgtccgcccacgcgtccgggaaaatcggcccaaacatcggaggattttagcaaagcagacaagggaagccgaaaccctaagtacttgccctcattcagccgccgttcgacctttaatccaccacgactattgatggataaaatcctacggtggagccttctttctactcgactccacggtttaatgactttagccacaaagccctctctctgccttcgatattgacgaaggggatggagatctccaaggcgcactcacgaaggtaaagcttctgcctctnttctccttaatatttctttgttcaagaaaatagggggaaacgaaaaaagaaaaaaaggaacccagaatctgaatctcaccttttaatttcttttgtgtttggtatttcaaatgtattgattgtgtgcgtaaccttacaact

SEQ ID NO: 206533 - DNA, 458 bp, Gossypium hirsutum
cccacgcgtccgaaaaagaagcaaaaaaacatggccaaagttctgttgttcattgcactatgtgtgcttccagctttggttagtgctacacgcattctgaataatcaattggtggtagaaggctatgtgtactgtgatacttgccgtgctggttttgaaacccctaagactagaagcctagctgatgccatggttaggttggtatgctccgacaggaagagcggccaagttgtcttcaaaaaggagggatacaccgacaaaaccggaaaataccagattcgtgtatccgaggatcacttggatcagatctgtgatgcagttcttgtgaagagctcccagcttggttgtgccacaatgtcccccggtcgtgaacgtgcccgtgttatcttgaccaacttcaatggcatttcatccaccacccgttatgccaatgccatgggcttcatggttgacgagcc

SEQ ID NO: 206534 - DNA, 343 bp, Gossypium hirsutum
gcgagccactcgtccgaaggaattcttgcgcacgtgaacttagacacaggcattacaatatatgatgctgcaccctgtctactctactgcatgcttgacaccctactcggagcaatcggagctttgatcgaccgaagtaagattgccgacaagccttctacaggcattgaaggtgcagtaatacctcctgggaagggcattacgggcgcattgtgtctaaaggatagaggtccattggcaggattcacaaaggcgaacgagctgcttgtcggaagaatggcttacctggggattgccttattattgataggagaaattatcacagggtaaggagctctagctc

SEQ ID NO: 206535 - DNA, 345 bp, Gossypium hirsutum
ctcgtggatttggatttgtcacttttgatgagaaagcagcaatggaagaagctattgaagcaatgaatggaatggatttggacgggcggaatataactgttgatagagctaaacctcaacaagggtcagggagagattatgatggtgaccgtagccgtgatcgtggacgtgatcgtgaccacgatcgtagccggggctatgatggcagtcgtggatctaatggtggggagtgttttaagtgtgggaaacctggacactttgctagggagtgtcctagtgatggggctagggggggtaagtataatggtaggggggatcgctatggcggtggaagcgttcgtcgcc

SEQ ID NO: 206536 - DNA, 414 bp, Gossypium hirsutum
  unsure (1)..(414): unsure at all n locations
cggcaaccaacccaggtcaccctaaagccttaggcaccttggcacccttggttttccaccgttctactttggttggccaaaccgtttggaagcagtccaatgagctcttacgcaaagtccggaggctttcaatcgtggtcgtgttcccatgcgcagaactgtgaaaaatgcccctactagcatctggtatggncctgaccgnccaaagtacttgggtccattctcagaccaaatcccatcatacctgacaggtgaattccctggtgactatgggtgggacactgctgngttatcagctgaccctgagacatttgctaagaaccgtgagcttgaagtgatccactgcagatgggcaatgcttggtgcccttggttgtgtcttccctgaaattcttcaaagaatggagttaagttc

SEQ ID NO: 206537 - DNA, 446 bp, Gossypium hirsutum
caaccccaccaatttctcaaagtagggctggcaatggggatgatgaggctttccaaatgctgggtgtcgttgttgtttcttgtggctctgtcgggattcacccatggatttgtgatgtcgcctcgcactttgcttaaccgcttctctcaaaacagcaattattatttaaccactgaagagcactggttcgatcagactctcgatcactattctccttacgaccaccggcaatttaagcaacgttactatgaattccttgactactttcaagttcccgatggacccattttcttaaaaatttgtggggagtcttcgtgcaatggcataagcaatgactatctcggcgttttggccaagaagtttggggctgccgtggtttcacttgagcatcgttactatgggaaaagcagcccttttatgtcacacacaacggaaaatctgaaata

SEQ ID NO: 206538 - DNA, 432 bp, Gossypium hirsutum
atccactgacttcaccggtgtcagcctctttaagtccaaaggctccactagactcataacggcaactcggtgctgtgactacaagcaacaactcagcctcagctcagtgaaacgttgctcaagatcaaccgccgcaacaactgacgatgcgactggtcgtctagtcacggtgaactacggtaacgattcgctcgaaatatgtagagtacttaacggcatgtgtcaaaccagtggaagtagacgcagaatctaccgagactcctgcctataagccatgctttgctacgctgacacctgactctgcgactatgacatggacgaccactactggcctgcataagatctttatggcatatgtatgaatagagttcgtgtggagcgtccgacatagtacttgggaatagtcataagtcttactaaatgggtaccttc

SEQ ID NO: 206539 - DNA, 367 bp, Gossypium hirsutum
caacaaaatcagttgcttcacaatggcctctacaaccatggctctttcttccccatcattgggccggtaaggcagcgaagttctccccttccacccgtgaaatccggggaactggccgtgtttccatgaggaaaaccaccaagccttgttccttctggtagcccatggtacggtcctgaccgagttttgtacttgggtccactttccggtgagccaccatcttacttgaccggtgagttccctggtgactatggttgggacactgctggactctcagctgatcccgagacctttgctaggaaccgtgagctcgaagtcattcactgcagatgggccatgttgggagctcttgggtgtgccttccctg

SEQ ID NO: 206540 - DNA, 416 bp, Gossypium hirsutum
gccacgcgtctgagggttccatcaaccgttggagccttacctgctattttacgtgcaccagcacctgctctgaatgcgctcgtcgaccacctacattgcggccttcggtcatggctagccataactcttgttattctactccgactgttatccatgaccgcccggttttcgctgaccctgttcctgtgctcaacccgagaggagacatgtgaaacaagtcctacgacgaagccattgaagctctcaagaaacttgttactgagaaaggagaactgaaagctgacgcagctgcaagggtagatcacatcacaaccgagttaaacacaacatgagttgacggcaaaccatctgactcttctgatgagagactgaaagaaggcttagtttacttcaagaaagaaaaatctgaaaagaat

SEQ ID NO: 206541 - DNA, 325 bp, Gossypium hirsutum
cccacgcgtccgaccacgcgttcgctatagcatacactactagtactcactcctggcattggctttctcaatgatctgatcggctaccattgccactgcctctttggcacaggctaacatagacgattcgttcaccggccttaagtctgactcatctcaaccagtcaccaggaaggcctacaacgacattacttctctcgcacgccatctcggaacagtgcaatgcatgcagctgttgcctactactggaaagatgatgctcgagactctgtcatacctactcgatcttacaccactgcagctggctacatgaagcagtttacct

SEQ ID NO: 206542 - DNA, 326 bp, Gossypium hirsutum
tacactctctccacccacattggctgctgccagtgttggcaatcccaggaggagaactaaggttaatgtaagttacattataggattgaattcctttggtgggctaaaagctcataacaatgtgatctcactaggccaaccagtgtgcattgaacgatcatttgcaaaggttgtgagctcactcagagctccatccaaggggaaaggtagtggcggcggtgccctctcttcaacctgcaatgcaattggtgagatatttaggattgcggcaatcatgaatggacttgatctcgttggtgttgctgtggggtttgttctcctttgaa

SEQ ID NO: 206543 - DNA, 367 bp, Gossypium hirsutum
  unsure (1)..(367): unsure at all n locations
cccacgcgtccgctcccatcacccgagatcatctttccccttcagaatggcggctgcaaccatggctctctcttccccatctttcgccggaaaggccgtcaagctctctccttccgcccctaaaatccaaggcaatggccgtgtttccatgaggaaaaccgctaccaaggctgctccctctggaagtccatggtacggtcctgaccgagtcttgtccttgggtccactatctggtgagcctccatcttacttgaccggagaattccctggtgactacggttgggacactgctggactctcggcggacccagagacatttgccaggaaccgtgagctcgaagtcatccactgtangtgggctatgttg

SEQ ID NO: 206544 - DNA, 468 bp, Gossypium hirsutum
atgaggctccaaactttacaaagctcgcggacaaggttgcagcacgctgggttctatgtgggggctccggacttcttttatggggaaccctattaccctaataaccctgatagacctctatctgcttggataaaagatcatggaccggataaaggttacgaggatgcaaagctcgcaattgacgctttgaaaagtaaaggggtttcatccattggagctcgtgcgttctgttggggtgctaaagttgtggctggactggctaaagatccccttatccaaacagctgtaatgatacatccttcatttgtgactggggacgatatcaaaagtgtgaaagtggccattgcgatattgggagctgagcatgaccatatatctcccccagagcttttaaaacagtttgatgataacttaaaaaccgatgaagttgatagctatgtgaaaatatttgctaaagttgcccatgga

SEQ ID NO: 206545 - DNA, 428 bp, Gossypium hirsutum
gcttacggtggatacctatgcacccagagactaggaatggcgtagtaagcgactaaatgctgcagcgggttgaaaataagcgtagatccggagattcccgaataggtcaacctttcgaactgctgctgaatccatgggcagacaagagacttgtgttataggatttttgatagacaggattcgacaaatggacttagtcataacataaataacatataaatggattgtgcaaaaatccatagtggtttttttattatttattctagttattctagtaaaataaaaaataaatggaaataaaaagaaataggaagaaagaaaaagaatacaataatattttgattctatatcataggaacggaaataggacttcttccgcttctgattgttgattcaatgcaataacaagattattttgttacaacaag

SEQ ID NO: 206546 - DNA, 411 bp, Gossypium hirsutum
cccacgcgtccgaaaaaatacaaaatctccattaatttcattgcttttccaagttgttaacagtggaggatgattcaaaccatttctcaaaaccagaaactcccaacaccatgaaagctgaagctgaagcagaagaaagagaccctgaaagtaattcttctctaagtgaaccacttttgaagagaaacagaaccctttctagcaatccattagccttggttggagccactgtctcccatattgaaagcttggattatgagataaacgagaatgatcttttcaagcatgattggagaagcagatccaaagttcaagtccttcaatacatattcttgaaatggactctagctttccttgatggattgttaacaggattaattgccactcttatcaatcttgctattgaaaaca

SEQ ID NO: 206547 - DNA, 395 bp, Gossypium hirsutum
gaaaaaaatcatggccaccgtcacgacgcaagcctctgccgctgttttccggccatgtgcatcgaaaacacggttccttactggttcttccggtaagttaaaccgagacgtttcatttaaaccagtggctgctacatcgactagctcattcaaagttgaagcaaagaaaggggagtggttacctggtcttccttcaccagcttacctgaatggcagtcttccaggtgataatggctttgatcctcttggattggctgaggaccctgagaacttaagatggtatgtacaagctgagctcgtgaatggacgttgggctatgttgggtgttgcaaggatgcttctgcccgaagttttcactaagattgggataattaacgctcctcaatggtatgatg

SEQ ID NO: 206548 - DNA, 450 bp, Gossypium hirsutum
gagttatccctcactttcctcaccaaaaaatatccaaacaacgaccaccgtccactgccgccgaagaggacagacccctataaataaaaaaatggacacaattctccataccgaacctctatctctcactcgcttacgcgccacttcgaattccagcgcttccattcaccatatgccttgccagctcatcttccgtactttccaccgtctctcctttcctttatccaccgtcaacgctggctccagttctcgcaggtcatccgcttttgatgtcgccactagcggcactctcaccgccaattccgtttcgccgagaggtggagtatatacagttggggatttcatgacgggaaaagaggatttgcatgttgtaaagccaacaacaactgttgatgaagcactggaagctctacgtgaacacagaatcaccggttttcctgatatcgatga

SEQ ID NO: 206549 - DNA, 392 bp, Gossypium hirsutum
ggacaagactactggccagaagaacaagattaccataacaaatgataagggtcggttgtcgaaggaagaaatcgagaagatggttcaagaagccgagaagtacaagtccgaggatgaggagcacaagaagaatgttgaagccaagaattcattggagaactatgcctacaacatgaggaatactatcaaggatgagaagattggttcaaagcttgacccggctgacaagaagaagattgaagatgccattgatggagcaatccaatggttggatggcaaccagctagccgaggctgatgaattcgaggataagatgaatgagctcgagagcatctgcaatcctatcattgccaagatgtaccaaggtgcatgggctgacatgggtggtggca

SEQ ID NO: 206550 - DNA, 448 bp, Gossypium hirsutum
ggatgttctcaaagcttctactaccattgtttattcaccatacattccaacaacaacatgaaacaaatcccagttttctaaacccatctttcacaatttgaacttacaattaccatgttttacaagaaatggatcgaaatccaggttgtttacgaccttatcatcgtacccaatatcaacaactgagtctattgagccacctatgccggaagttgacgctgaggtcggtaaagagagattcgattggtactcacagtggtatccggtgatgcctgtatgtgatttgcataagatggtgccacatggtatgaaagtattaggacttgatctagtggtgtggtgggataagaacgagaatgaatggaaagtgttcgatgatacttgtcctcatagattagctcctctatctgatggaagaattgatcaatgggggatgttacaatgtgtg

SEQ ID NO: 206551 - DNA, 454 bp, Gossypium hirsutum
cccacgcgtccggtgcttcttcggctattgcagctgttgccatctcatcccccagttcccagaagactggatcagtagtggggacaacaaaggcttctttcctttcagggaagaaacttagatctgtgagaaagtacacaaaaccagctgccggaccaacatttccagtgtgcgccgccgccgaccccgacagacccctttggttcccaggcagcactcctcctccatggctggatggcagtctccctggtgactttggtttcgatcctctcggtcttggttctgaccctgagacattgagatggaacgtacaagcagagctggtgcactgcagatgggcaatgttgggagctgctggtattttcatcccagagttcttaaccaagattgggattttaaacactccatcgtggtactcaacttgaacagaggaatactttactgacaccacaac

SEQ ID NO: 206552 - DNA, 445 bp, Gossypium hirsutum
cccacgcgtccggccacgcgtccgtatcccgcatgttctttatcgaggggcagctggaggagccacagagttctgactggaaattagtgtatgtggatcatgaaaatgacatattacttgttggtgacgatccttgggaagaatttgtaagttgtgttcaaagcataaagatactgtcgtcagcagaagtacagcagatgagcttggatggtaatcttggaaatgtgtcagttcccaatcaagcttgcagtgggactgaaaacggaaatgcatggagaggacattatgatgatacctcagcagtctcatttaacagatgatgtttctaaattcggatattgagatgtcttcttcccttgaacttttgccgggcctgtggatgaatatattgtatgcttgttcactcaaatgagtacaatgcagtccagtccttcaagagaagtga

SEQ ID NO: 206553 - DNA, 401 bp, Gossypium hirsutum
aaaaaaaaaagaacatggctaagaagaagcatgttttgaaggaagacgatgaacatgatgggtccaacactaaaaaacaagtttgtcgagctgatttccctccccactttgtcttcggtgtttctacctcttcctatcagattgaaggaggtgtgaacgaaggtggcagaggtaaaagcatatgggatgctttctctcacattgaaggaaaaatcgttgatggaagcaatgctgatgttgcagtggatcattacaacaggtacaaggaagatatagagcttatatccgagttagggttcaaagcttacagattttccatatcatggcctcgtatttttccagatggtttgggaaccaaagttaatgaagaaagaattgcattttacaacaatgtgatcgat

SEQ ID NO: 206554 - DNA, 354 bp, Gossypium hirsutum
aagcaatccatcgaaattttttttccggcgggaaaaccctaagtaatttagcgggaaaatgtcgggaaaaggtgcgaaagggttgacaacagctggcaaatccacaaaggacaaggacaaggacaagaaaaaacccgtctctcgctcttctcgcgctggtctccagttcccggtgggtcgtgtccatcgactgctgaaaacaagggttagtgcaaacggaagggtcggagcaacagctgctgtatacacagctgcaattctcgagtacttgactgcagaagtgcttgaaactgcgggtaacgcaagcaaggatctgaaggttaagcgaatcacaccaagacatttgcaactagc

SEQ ID NO: 206555 - DNA, 435 bp, Gossypium hirsutum
gacccactcgtccggattgagaacgttagatcgtacggagcggatccggcgattatcaaagctttggctaatagggaaattgggatcgtaatcggagcagctaatggagatattccttctttggcttccgatccaaactcagcagctcagtggattaactccaacgtgttgcctttttaccctgctagcaaaatcatactcatcactgttggcaacgaggtattgactacaaatgacccgaatttaatagaccaactgctacccgcaatgcaaaatatgcaaaacgccattaacggcgcttcactgggtggaaagatcaaggtctcaacgggtcattcaatggcggtgttgggtcaatccgacctgacatcttccgggttgtataggccgagttatcaacccgcattgtaaggtttgcttcagttacacaaggac

SEQ ID NO: 206556 - DNA, 447 bp, Gossypium hirsutum
cccacgcgtccgcccacgcgtccgctttggaagagtttctcacaaaggcaacaacagataaggcattgattagattaatgatgtgtatgggtgaagcattaagaaattgcttttaaagttagaacagcttcatgtggtggtactgcttgtgttaattcctttggtgatgaacaacttgctggtgatctacttgccaacaagcttctttttgaggctttgacatactcgcacttttgcaaatacgcgtgctccgaagaaattcccgagcttcaagacatgggaggacctgctgaaggtggattcagtgttgctttcgatccgctcgatggttccagcattgtcgatacaaatttcaccgtaggtaccatctttggtgtttggcctggtgataagttaaccggtgtaacggggcgagaccaagtggctgccgcgatgggaattttcggt

SEQ ID NO: 206557 - DNA, 417 bp, Gossypium hirsutum
atttttgcgccgtccgatgaagcttttaaagccgacggtgtacctgatctgagtaagttgaccaatgccgatcaagtttcgctgttagaataccatgcctcgccggattataaaccaaaggggactttaaagacgacgaaagatccgattactacattggctactagaggtgccgggaagttcgatttgacggtcaccgccgccggtgattccgtcacgcttcatactggaatcagtccatctagagtcgctgaagcagtttttgactccccaccggtcgtgatattcaccgtcgacaatattttgttaccctctgagttgttcggaaagtcaccgtcgccagcacctgctcctgaaccagtttcttcaccttcaccgacaccttctccattatccgaagcaccatcgccattagcc

SEQ ID NO: 206558 - DNA, 446 bp, Gossypium hirsutum
ttacaaggtgccacttaattccaagcgaaatggcggtctcctcttccacagtgtctgctgcagtccctccatttctttgcagtaacaccaccaaaattcccagctttaaagtcccacaccacacgccactacgtttatacaatgctaaaagaacgcagatttgggtcaagaggagctgtttcaagtcaaccatcacagctaaagtcgctcaacaaagcgatttgcagtataggaagctcggcgactctgatcttcaaatcaatgaaatcacattgggaactatgacgttcggagaacaaaatacagagaaagaagctcatgaaatgctcagctatgcttttgaacatggaatcaatgctctcgatccttctgaagcctacccaattcccatgaggaaagagacgagtggaagaaccgatctctacattgctagctggctgaagtct

SEQ ID NO: 206559 - DNA, 466 bp, Gossypium hirsutum
cccacgcgtccgtgcacttgagggaaagaaaaaaaaagaagaagaagcttgaatctattttgttgaagatggagggtaaagaagaagatgttaagctaggagcaaacaagttctcagagagacaacctattgggacatcagcccagacagacaaggactacaaggagccaccagcagcacccttctttgagcctggtgaactcaaatcatggtctttttacagagctggtattgccgagtttgtagccaccttcttgttcctttacatcaccgtcttgactgtcatgggtgtgtctcagtctaaaaccaaatgtgcaaccgttggtattcaaggcattgcttgggcttttggtggcatgatctttgcccttgtttactgtactgccggcatttcaggtggtcatattaaccctgcttgtgaccttggattgtttctagcaaggaaactgtcacttacaagggcatt

SEQ ID NO: 206560 - DNA, 466 bp, Gossypium hirsutum
agaaaaaaaaaagcttcaatctttggttgttaagtgggtgaaacaaaaaaaaaatggagggcaaagaggaggatgttaaactaggagccaacaagttctctgagagacaacctattgggacatcagctcaaacagacaaggactacaaggagccaccaccagcaccattgtttgagcctggtgagctcaagtcatggtctttctacagagccggcattgctgagtttgttgctaccttcttgttcctttacatcactgtcttgactgtcatgggtgtgtctcaatctaagaccaaatgtactactgttggtattcaaggcattgcttgggcctttggtggcatgatctttgctcttgttattgtactgctggcatttcaagtggccatattaacccaactgggacctttggggttgtactggcaaggaagctgtcccttacaagggcagtattcttcatgatcatg

SEQ ID NO: 206561 - DNA, 384 bp, Gossypium hirsutum
  unsure (1)..(384): unsure at all n locations
cttctccaatggcgactcagctgaagagcagctttacgtcgtctgttacaagaggactggtagtccccaggggcatttcgggatccccgttcaaagtatcttccggaaagaccaggaccccttgcttcactgtcaaagctgttcaatccgacaagtcaacatttcaagtaatccaacccatcaacggcgaccccttcattggaagcctggagactccaatcacctcaagccccttaattgcatggtacctttccaaccttccagcctataggacggcagtgaacccacttctgaggggaatcgaagtgggtctggctcacggcttcctcctggtgggtccattcgttaaggcccgccctctaagggacactgcngtggcgggtc

SEQ ID NO: 206562 - DNA, 433 bp, Gossypium hirsutum
  unsure (1)..(433): unsure at all n locations
cccacccgtccgtgaaaaaattgccagctaattgaacattcaaaattggctaagttggggtgctctcattttcctcatcagccagggccaatcccattcaacgcaaaaacatcctattttagatgacaatctcacaatcgaaagcttcatccacaaaactctccaatggaggaaaaatactcttcaccagttaaagttgcaggggaacagactggagctatcaacctncacagtggtagcagcagtgctgagcttcgtagctgcctccatatccagtgcgggaggcattgttgggggagggttgtttattcccattctcaccctcgtgggttctttagaccttacaactgcctctagcttctcagctttcatggtgacgggagggtcagttgcaaatcttatgtttaacttgagtgcccaaagtgcgatgttt

SEQ ID NO: 206563 - DNA, 437 bp, Gossypium hirsutum
gacccactcgtccggagaaacgctaaaaatgctattctctctggctgtaccgctggaggattggctacgatattgcactgtgacaggttacgagctctccttactgctactactaaagtaaagagcatttcagatgctggcttcttactacatgcgcatgatgtctcgggagggaagcacataggagaattctatggcaaaatggctagactacacggatccgactagaattttccagcgtcttacctgaagaatgggagccagaccagagttgtgtctctatatacagtacgtgatgcatactatgcagacaccaatctatttcgaaaattcagcttatgactcctggcagattaagaacatgttggctcccattgctgctgacaaaagctaggagtggaaaagctgcaagcatgactagaataagtgtacagaaa

SEQ ID NO: 206564 - DNA, 449 bp, Gossypium hirsutum
cccacgcgtccgcccacgcgtccggctgatttagtttaagaaaacatttccttagagcataaaaggaaagttacgaacatgccgggtgtcaatcctgaaattgagttcccagccattgagtttcgtttatcggatttgaagcgaggaactgaaggatggaaccgtttgtgcaagagggttcaagaggcttgtgagactttcggttgtttcgaggtggtatatgaaaaggtatcgactaaactccgagaggatgcgtttgggttgatgaaagaaatggttgagctcccagtggagacgaaacagaagaataatagtcccatgccttaccatggttgggttggaccatgcaagcaggtttctgtgttgtatgaagggcttggagttggagatgcctccaactatgactctgttaaaagtttgctcaacttatgtggcctaatggtcaccca

SEQ ID NO: 206565 - DNA, 278 bp, Gossypium hirsutum
tcttaagaaagttgggtacaaccctgagaagatcccgtttgttccaatctccggtgtttgagtgtgacaacatgattgagagatctacaaacctcgattggtacaagggtcctactctccttgaggctcttgaccagatcacctagcccaagaggccctcatataagccacttcgtcttccacttcaagatgtctacaagattggtggtattggaactgtccctgttggtcgtgttgaaaactgtgtcctaaaacccggtatggttgttacctttggt

SEQ ID NO: 206566 - DNA, 399 bp, Gossypium hirsutum
caagagttctttttttcacagcaatggcagccatgaactccagtgttttggcatgcaacgatgctatctcaggcactggatcatctgagcttaatgccaaacttgcttcagcgccatcagttgcttccccagttatgtgcggtggtcgcaagttgcctgtgatcagagcccagcaggctaaattttctgattccaaaggatcaggtgccagtgaaggaagaagagctgctgtgctctacttggcagctggccttttcaccacagctgttgcttcttctgcaaatgctggggtcattgacgagtaccttgaaaagagcaaagctaacaaggaattgaatgacaagaagaggttggcaacaagtggaacaaacttttccagagcatacactgttcaatttg

SEQ ID NO: 206567 - DNA, 424 bp, Gossypium hirsutum
aggaaatgttcaataatttgggtgacctgttgtgtactatcactgggtttgactccttcgctttgcaacccaatgctggcgctgctggcgagtatgccggactaatggttatccgtgcatatcataagtcaagaggagaccatcaccggaacgtgtgtatcatacctgtttcagcacatgggacaaatccggctagtgctgcaatgtgcggaatgaaaatcgttcctgtaggaactgattccaagggtaacatcaacattgaagaattaaggaaagctgctgaagctaacagggacaagttatctgctctcatggtcacttatccttcaacccatggagtgtatgaagaagggatcgatgagatatgtagaataatccatgacaatggaggtcaagtgtacatggatggggctaacatgaatgc

SEQ ID NO: 206568 - DNA, 269 bp, Gossypium hirsutum
ctgctcctcactggcacacgccaaaatagtggcccacttcaccaaccttaaatctgcctctgctttcccagtcactaggaatgccaacaacgacatcacttctcttgcaagcaatggtgggaaagtgcaatgcatgcacgtgtggcctcctcttgggaagaagaagttcgagacactctcatacctccccgatcttacacccgtacagttggctaaagaagtagattaccttcttcgctctaaatggattccttgcttggaattcgaat

SEQ ID NO: 206569 - DNA, 449 bp, Gossypium hirsutum
cccacgcgtccggacgtggtgagccacttgatcccgtgcttgtcctacgtacaaaacgggggtacgcccgctgctgcatgctgcagtggggtaaaaacactctacggccaggctcagacctccacggaccgccaagacgtgtgcaagtgcatcaaatcggcggtgaacggaatgccttacaccggctataacctcaatctcgcagccggcctacctgctaaatgtggtctccatcttccttacaacatcagcccctccactgactgcaacaaggtgcagtgaggttgatgatgatgatatggaagaaggagtgggagaaggtttcagctcagctagataaagtagctagctaaggttaaataagctgtgctggtgtgttgtttttcagcaaattccatgtataatcggggaaagaaaaagaaatagaagctgtactttctaactgtatt

SEQ ID NO: 206570 - DNA, 430 bp, Gossypium hirsutum
ctttcctttcctttccttttctctctctctagcaatggagtcgcgattgttatcacgcgcgttctgttatcaccggcttacctcagctcaggccgaagctttcgccggggattgtcaacgtttcgtatgcttcggctaagccgatcggagccgtcggtgaaggcgggaacgtcatatggcggaggcaactaaggccctccttgctactcgaatgctcgtcggttagcaagcgagaggttctgaaaccggtttcggctgccgcgtcgtcaccggccgatggaggaagcgattccgccggggaggggaagatcgctccggttggattcttcgagaagtatcctgctcttgttaccggatttttcttcttcatgtggtacttcttgaatgtaatattcaacattctcaacaagaagatctacaattacttccc

SEQ ID NO: 206571 - DNA, 430 bp, Gossypium hirsutum
agcccagatttcgtttagaaattagaaaaccccaccgtttatagcgctgttattaaatacgtccataaacatcatcccctcaaaaaaggagaagcttctctctcccattaaccctaactacacaagaaataaaattacctcaaaacaataggatggcagaagcagaggtaggatctggtgaaggaaagccccaagagatgtcgttgaaggataaagggaatgagtttttcaaggctgggaactaccttaaagctgctgctctttacactcaggccattaaacaagacccttcaaatcccactctttatagcaatcgagcagcagcgtttctaaatttggttaaacttaacaaagcgctggctgatgctgagacaacaattactttgaaacctcaatgggaaaagggatattttcgaaaaagatgcatttt

SEQ ID NO: 206572 - DNA, 418 bp, Gossypium hirsutum
aaaaaaggcagttaggaaccagaaaccaatgcaatggcttctcttgcaaccttagctggggttcaaccaacgaccatcaagggccttggtggcagctctctcaatggaaccaagctcttggtgaagtcaactcgccagagtttcaaacccaaaaactacagggctggtgctgtggtagcaaagtatggtgataagagtatatactttgatttggaggatattggcaacacaactgggcaatgggacttgtatggatccgatgcaccttcaccgtacaacccactccagagcaagttctttgagacatttgcagctccatttaccaagagaggattgttgctcaagttcctgatcttgggaggcggttccctcggtctttacctcagtgccactgcttccgatgaccttctaccgatca

SEQ ID NO: 206573 - DNA, 436 bp, Gossypium hirsutum
  unsure (1)..(436): unsure at all n locations
caccgagccagtgtccgttttacacgattgggttatagcttagctntgcttaacttctttgagaggaaaacttcattgagacaccatattaatgagttaaaaatctttaccggaaatgggcaaactcgttcccaatcgctcgtttttccttttatttttcctttttcttcactttctcctcttcgatttcgctctctctgagattttcttcgaagaacgcttcgaagatgggtggaagagccgatgggtgctgtcagattggaaaaggagtgagggaaaagccggcacctttaagcacaccgccggcaagtggtctggcgatcctgatgataagggtattcagacttataatgatgccaaacattatgccatctctgctaagataccagagtttagcaacaaaaacagaactctagtggtccagtattctattaaa

SEQ ID NO: 206574 - DNA, 451 bp, Gossypium hirsutum
gacccacgcgtccgcccacgcgtccgcccacgcgttcgcggacgcgtgggtttagctatggcatggactactagtacccactactagcaatggcttcctcaatgatctcatcggctaccattgccactgcctctccggcacaggctaacatggtcgctcctttcaccggcctcaagtctgcctctgctttcccagtcaccaggaaggccaacaacgacattacttctctcgcaagcaatggcggcagagtgcaatgcatgcaggtgtggcctcctactggaaagaagaagttcgagactctctcatacctccccgatcttacacccgtgcagttggctaaggaagtggattaccttcttcgctcaaaatgggttccttgcttggaattcgaattagaggagggattcgtgcaccgtaaatactcgagcctacccacgtactacgatggacg

SEQ ID NO: 206575 - DNA, 441 bp, Gossypium hirsutum
aacaaaatcagttgcttcacaatggcctctacaaccatggctctttcttccccatcattcgccggtgaggcagtgaagttctccccttccacccctgaaatccggggaactggccgtgtttccatgaggaaaaccaccaagcctgttccttctggtagcccatggtacggtcctgaccgagttttgtacttgggtccactttccggtgagccaccatcttacttgaccggtgagttccctggtgactatggttgggacactgctggactctcagctgatcccgagacctttgctaggaaccgtgagctcgaagtcattcactgcagatgggccatgttgggagctcttgggtgtgttttccctgagctgttggctaggaacggtgtcaagttcggtgaagctgtatggttcaaggccgggtctcaaatcttcagtgagggt

SEQ ID NO: 206576 - DNA, 408 bp, Gossypium hirsutum
aacaaaatcaactgcttcacaatggcctctacaaccatggctctttcttccccatcattggccggtaaggcagtgaagttctccccttccacccctgaaatccagggaactggccgtgtttccatgaggaaaaccaccaagcctgttccttctggtagcccatggtacggtcctgaccgagttttgtacttgggtccactttccggtgagccaccatcttacttgaccggtgagttccctggtgactatggttgggacactgctggactctcagctgatcccgagacctttgctaggaaccgtgagctcgaagtcattcactgcagatgggccatgtttgggagctctggggtgtgttttccctgagctgttggctaggaacggtgtcaagttcggtgaagctgtatg

SEQ ID NO: 206577 - DNA, 423 bp, Gossypium hirsutum
ctcttagcgaccctgaccatcctattgtacttgaacgaatggacttccccgatcctgtgagtaaggttgctattgaacctaagactaaagctgatgtcgataaaatggctaatggtttgatcaagcttgctcaagaagacccttctttccacttctcacgggatgaagagatcaaccagaccgtaattgaaggaatgggagaattacatctcgagattattgttgatcgtttgaagagagagttcaaggtcgaagccaatgtcggtgcaccacaagttaattaccgggaaagtatttccaaagtttcagaagtgaaatacgtacacaagaaacaatcaggtggacaagggcagtttgctgatattactgttcgtttcgagccgatggatgcaggtagcggatacgagttcaagagtgaaatca

SEQ ID NO: 206578 - DNA, 443 bp, Gossypium hirsutum
tgaggagcagtggaggctgatcctttggatcagttccgcaaatggtttgatgatgcgggggtgtcacttaaaggaaccaaatgctatggcattgtcaaccactggaaaagatggaaaaccctcatcgagaatggtattgctaaaaggggttgacaaggatggtttcgtctggttcaccaattatgaaagtcagaaggcacgtcaattatcagaaaatcctcatgcggcacttcttttctactgggatgggcttaatcgacaggtaagagtggaaggatctgctgagaaagtttctgatgaggaatcagagcaatactttcacagtcgtcctcgaggcagtcaactcggagcaatcgtaagcaagcagagtacggtagttcctggacgccatgtactgcaccagctatacaaagaactagaagaaaaatactgcaacgagagtt

SEQ ID NO: 206579 - DNA, 422 bp, Gossypium hirsutum
aaaccctcctttcctctcctctcctctcctctacaaggaaatggcaatttcatcaacaggggcagccactgccgcttcttctaagcttagatacccacacgcctcccctttcccaactcactcctcaaccaccacctctgcctttttctcctcaattccctctaaactaacccctacccacctctcctcttccttcctccctcctttcctcactaccgtcgccaccacttccgtattccctcgccgtcgcggttctttcaccgtcaaagctgcccgtggcaaattcgaacgcaaaaagccccacgtcaacatcggcaccatcggccatgtcgaccacggcaaaaccaccttaactgccgctctaactatggccttagcctccatgggtaacagtgccccaaaaaagtacgacgaaattgatg

SEQ ID NO: 206580 - DNA, 264 bp, Gossypium hirsutum
cccacgcgtccgcccacgcgtccgcttacttggtcatgcaaacgacttcccatccgctatcattggggttcttgttaatgaaaataccttctaccccgtcttcaccatttcttgtgaaacacccttgaccttctatggattacaacatgcacactccttggctcctggatataccgaacctgtgaccgttcactacaacccttaggagattgacttcccataaatgaagagcattaccattgcgagatcagcctttctcttctt

SEQ ID NO: 206581 - DNA, 425 bp, Gossypium hirsutum
ctttacggctttagatctgagagcaagatcggggttcttttttgttccaagatttcttgtgtaaatctttttatctgggttcataaaatgaagatctgattttaggttatgtttcgggagagttttaccaacgtgtgatagagtcaacaaaagtgaagtaagtgcttatgattcaaccaggggggcgtataatttatagacttcgcaacaaggattcgaacgattaggtagttttttcaacttcaagatttctttcggggggatccaattcaaatttcaagaaagttattttcttccaataagcgaattcggaaaaatttaaggaataacaactatgaaaataagggcttccgttcgtaaaatttgtgaaaaatgtcgcctaatccgtatgaggggacgaattatcgtaatttgttttaacccga

SEQ ID NO: 206582 - DNA, 378 bp, Gossypium hirsutum
ccctaatacatcatctacaagctcaacggttccttgtagcagtgacaagtgcgaacaacagagaaaatgttcttcaccttcaagtaattgtccttatcaagttatctatctatccaatggcacctcgtcgatcggggttttggtggaagatgtcttgcgcttgactacggacgacgataaaacaaacaaacccgtcgacgccaagattactttcggttgcgggaagattcagactggatcgttcttaaacggtgcagctcctaatggtcttttcgggcttggtatggacaatatatcagttcccagcatattagcaaaagaaaatgttacatcgaattcgttctctatgtgttttcgatctgatgggatcggaagaat

SEQ ID NO: 206583 - DNA, 438 bp, Gossypium hirsutum
gtgagtggcaatggcaaccgctacagttacagcatcgtctacactttcatggcttcacaggtttggaggaacacaaaacgagacagcaaaagtagcagacaaaaacagggtcttcgtggttttcgcccagaagaaagctaaaaagactcgaaagataatactgaaggaggatgtggaatacctggggaaaaagggacagcttttggatgtgaaagctgggtatttcaggaattatcttttgcctacgggaaaaggccagattatcacttcttctttgcttaaggaaatgaaaatggaggaggaaagaattgaagcggagaatcaacgggtgaaagaagaggcacagcaacttgctctaatattcgaaacagttggagcttttaaggtgaagagaaaaggtggaaaaggaaagcaaatttttggaagtgttactgctca

SEQ ID NO: 206584 - DNA, 435 bp, Gossypium hirsutum
  unsure (1)..(435): unsure at all n locations
atcagatctgtcggtgctcctgcattttccgcccactactcttccaaatcctcatcatgtgcgggagagatccgtggggaggtcccctggagataaacgccactgattctgccactgacgacgacaggagcaggaatctgcaggacctggatagggctgcactctctcgccccttggacgagactcagcaaagctggctgcttggccccggggagcaaaagaagaagaagaagtacgtcgatctcggatgtatcattgtgagccgcaagatctttgtatggaccgtggggaccctgctcgtctccgccctcctggccggactcatcaccctcatcgtcaagactgtcccacgtnatcaccaccgncactctcncgccgataactacactctggctcttcacaaggcgctcatgttctttaatgctcagcgttctg

SEQ ID NO: 206585 - DNA, 439 bp, Gossypium hirsutum
  unsure (1)..(439): unsure at all n locations
ctttattttggtgcgaggaacttatcatgaatccactgatttctgccgcttccgttattgcgtgcggggttggctgtcgggcttgcttctattggacctggagttggtcaaggtactgctgcgggccaagctgtagaaggtatcgcgagacaacccgaggcggagggaaaaatacgaggtactttattgcttagtttggcttttatggaagctttaacaatttatgggctggttgtagcattggcactcttatttgcgaatccctttgtttaatcctataaacatgagaattttgtatttttttttcttattttatggcttgggacttactcctcgctttttcgaattctatcaagatttcacccctacaattaattattcgttgggacaataatccatgggaaggattaatttgaggatgaggaantatcacaccgac

SEQ ID NO: 206586 - DNA, 436 bp, Gossypium hirsutum
cccacgcgtccgatcaactgcttcacaatggcctctacaaccatggctctttcttccccggcattcgccggtaaggcagtgaagttctccccttccacccctgaaatccagggaactggccgtgtttccatgaggaaaaccaccaagcctgttccttctggtagcccatggtacggtcctgaccgagttttgtacttgggtccactttccggtgagccaccatcttacttgaccggtgagttccctggtgactatggttgggacactgctggactctcagctgatcccgagacctttgctaggaaccgtgagctcgaagtcattcactgcagatgggccatgttgggagctcttgggtgtgttttccctgagctgttggctaggaacggtgtcaagttcggtgaagctgtatggttcaaggccgggtctcaaatct

SEQ ID NO: 206587 - DNA, 360 bp, Gossypium hirsutum
caccaccaccaacatagtccaacattttcataacaatggctgcagtcacaaacgccgctgctacatcctccttcatggggacacgcttccccgacgtctacacaagttcagggagattcgtcgccaggtttggttttggcggcaaaaaagcagctcccaagaaagcctcgaaacaaacctccgaccgccctctatggtacccaggagcggtggctcctgattggctcgatggaagcttggtgggtgattacgggttcgacccgttcgggttagggaaaccagcggagtacttgcaatatgatttggattctttggaccagaacctggctaagaatatggctggtgagatcattggaacta

SEQ ID NO: 206588 - DNA, 436 bp, Gossypium hirsutum
cccacgcgtccgcaacattaagctctatgtgagacgtgtctttatcatggacaactgcgaggagttgattcctgaattcctcagctttgttaagggtattgtcgactcagaggaccttcctttgaacatctcaagagaaatgttgcagcaaaacaagatcttgaaggttatccgcaagaacttggtaaagaagtgcattgagctcttctttgaaatagcagagaacaaggaagattacaacaagttttatgaggcattctcaaagaacctcaagcttggtatccatgaggactctcagaacaagactaaaattgccgaattgctccgctaccactccaccaagagtggtgatgagctgaccagcttgaatgactatgtgaccagaatgaaaggaggtcagaatgatatctactacatcactggtgaggagtaaaaa

SEQ ID NO: 206589 - DNA, 427 bp, Gossypium hirsutum
  unsure (1)..(427): unsure at all n locations
gttgaaagcggcgtccaagttaattttaatccccgttccccccggtgcaacctaggttaggtaacagagccgtttttcagggcactcccggaacaagtgttccctcgtttccgcctcactttggcacctgcaacaaacccattaatcttcgatagttaagattactgaaagtaggcagaaagtttcgtgaaaaacgccatactgtaatcttaattttagggggaagatctagattccacaattttttgtaaaattgtttgtaatttgcctgtaaatgattctggtcttcatgtagaagaagtttatgtccactacgcanttgctacgctaccactccaccaagagtggtgatgagctgaccaacttgaatgactatgtgaccagaatgaaggaggcgtccaatgatatctactacatcaatggtgag

SEQ ID NO: 206590 - DNA, 440 bp, Gossypium hirsutum
cccacgcgtccgcaagcatcaacgatccgagttgggtcctacaatggagaagagatttatgctccgtttaagagtcttgttgctatggtgaacccaaatgatattgtgtttggaggatgggacattagtgacatgaacctagctgatgcaatggctagggccaaggttttcgacattgatctgcaaaagcaactgagaccctacatggaatccatggtcccactccctggaatctacgatcctgatttcattgctgctaaccaaggtgaacgtgccaataatgtcatgaaggggaccaagaaagaacaagttcagcaggtcatcaaagacatcagggagttcaaagagaaaaacaaggtggacaaggttgttgtactctggactgcaaacactgagaggtacagcaatgtcattgtggggctaaatgacaccgtggaaag

SEQ ID NO: 206591 - DNA, 358 bp, Gossypium hirsutum
cccacgcgtccgcttttttgtttcttatcttgttgttggtctggaaatctctccactctgtctttttgcttccaagttttgttgctaacagtatatctttgaaagtcagttgatattacaattattcccttcccaaaccttgcatcatcaatcatggttcctttcatttatgttgttcttttcttagccatgtctggccattcaagtgccaactattgcttatgtaaagatggagtgaatgagcaaacacttcagaaaaccctggattatgcttgtggagcaggagctgattgtactccaattaatcaaaatggtccttgttataatcccaacactgtgaaagatcactgcaattatg

SEQ ID NO: 206592 - DNA, 402 bp, Gossypium hirsutum
aaacaaaccaaataaacctaaaaacacttattcaccataaaaacctaatatatacggggatagtgatttaattgaccagagccggtttaaaacaatccaatgaagctcttacacaaagtcagagctttcgatggtggtcgtgttaccatgcgcagaactgtgaaaagtgcccctaccagcatctggtatggccctgaccgcccaaagtacttgggtccattctcagaccaaatcccatcatacctgacaggtgaattccctggtgactatgggtgggacactgctgggttatcagctgacccagagacatttgctaagaaccgtgagcttgaagtgatccactgcagatgggcaatgcttggtgcccttggttgtgtcttccctgaaattcttttaaagaat

SEQ ID NO: 206593 - DNA, 443 bp, Gossypium hirsutum
attagcaacaagaagatggagagtggagcaaagaaatggggtttccaaaggactgaggggctgtatgcagcgtccaccaccaccgtccgaggatatctcaacctattaatgggcaacatcaaccaagatagttgccttacagtcgttcctctcggtcatggcgacccctctcattttccaagcttcaggactactcctgctgctgaagatgccatcgttgatgctctacgttcggctaagcataattgttatgcgaccactgttggtattcttcccgcaagaagggcacttgcagattacctcaaccgtgaccttccctacaagtcatcgcccgatgatgtttatttaacaaatggatgtactcaaggaatagaagttgttatatcaattctttcccgccccggtgccaatattttgcttcctagaccgggcttcccactcta

SEQ ID NO: 206594 - DNA, 445 bp, Gossypium hirsutum
  unsure (1)..(445): unsure at all n locations
gtcgacggcttctatcaacggttggtgccttacctcctcttcttccaccactaccgacctgctctttttccgctcgtcgacgacctacattgcggccttcagtcgtcgctagccttaactcttctccttctcctccgactcttatccaagaccgcccggtttttgctgcccctattcctttgctcaccccgagagaagagatgggaaacaagtcctacgacgaagccattgaagctctcaagaaacttctcagtgagaaaggagaactgaaagctgaagcagctgcaagggtagatcaaataacagcagagttaaacacagcatcagctgatggcaaaccatctgactcttctgttgagagactgaaagaaggcttcgtttacttcaagaaagaaaaatatgaaaagaatcctgctctgtatggtgagctngccaagggtcaaag

SEQ ID NO: 206595 - DNA, 444 bp, Gossypium hirsutum
ggcgatgacatccacttttggattggtaaagatactagtcaggatgaagctggaactgctgctgtaaaagcggttgagctagatgcagtactaggagggcgtgctgtgcagcacagggaacttcaaggccatgaatctgacaaatttttgtcatacttcaaaccttgcattatacctctggaaggtggcgttgcttctggatttaaaacagctgaagaagaagagtttgaaacacggttgtatgtctgcagaggaaaacgagttgtcagattgaagcaggttccttttgcccgttcttcactgaatcatgatgatgtgtttatcttggacactcaaaataagatttatcagttcaatggtgcaaattctaatattcaagaaagggcaaaggcattagaagtaattcagtttctaaaggagaagtaccacgagggaacgtgcaat

SEQ ID NO: 206596 - DNA, 437 bp, Gossypium hirsutum
cggactcgtggttttcaatctcattacagacgtggattttagacaattagttaaccaattaccaagaggagcaagtttcacgatcttgtcggattcatgtcacagtggtggtctcattgataaagaaaaagaacaaattggaccttctacctatagggcagcttcatcactttcttacaaggctaagaacatcccttttgaatccatacttgagcacctaacaacactaacagggatcaacacatcagacattggtactcatttgttagaatcctttggtgccaatgccagcctcaaattcctcacacctcagctcgagtccgagttattcgacttcttgaaggctgatgaggggattttgttaagtgggtgtcaagcagatgagacatcggcggacatgaacccgatggaaagcggtgggaaagcgtacggagcct

SEQ ID NO: 206597 - DNA, 451 bp, Gossypium hirsutum
  unsure (1)..(451): unsure at all n locations
ggaaggccaacaacgacattacttctctcgcaagcaatggcggcagagtgcaatgcatgcaggtgtggcctcctactggaaagaagaagttcgagactctctcatacctccccgatcttacacccgtgcagttggctaaggaagtggattaccttcttcgctcaaaatgggttccttgcttggaattcgaattagaggagggattcgtgcaccgtaaatactcgagcctacccacgtactacgatggacgctactggaccatgtggaagctgcctatgttcgggtgcaccgactcggctcaagtattgaaggagcttgaggaatgcaagaaggaataccccaatgcattcattagaatcattggcttcgacaacgtgcgtcaagtgcagtgcattagtttcattgcctacaagcctncaggcttctaagctttttattaaacttgtctctc

SEQ ID NO: 206598 - DNA, 453 bp, Gossypium hirsutum
cccacgcgtccgcccacgcgtccgcccacgcgtccgctagatcgcgagcgcccacgcgtgcgcccacgcgtccgactatcactaccattatggcttcggctactgtttctgtagccaaacccaaccttcagattcaggcaaaaggaaagggtgttggttttgcagatttctcaggcctacacaactcctctactagccttccctttgccaggaaaacctctgatgacttccattcactcgttgcttttcagacatctgctctaggaagcaataatggcgggtacaggaaagggatggcagaggcaaagctaaaggtggctataaatgggtttggtaggattggcaggaacttcttaaggtgctggcatggccgtaaagactccccacttgatgtcattgccatcaatgacacttgtggtgttaagcaggcttctcaccttctcaaatatgatt

SEQ ID NO: 206599 - DNA, 424 bp, Gossypium hirsutum
aagtaagcaaaatgggagaagcagaggggtgtagcaaagacaaaagatggagtcttcaaggcatgactgcacttgtcaccggtggtaccaaaggcatcgggaatgcaatcgtagaggaattagctgcattcggagcgattgtgcatacatgttctcgaactgaaactgagctcaatgattgcttactcgaatggaaggcaaagggtttacgagttactggttcagtgtgtgatgtttcgaatcaagctcaaagggaaaatctactaaacacggtttcttctgagtttaatgggaagcttaacatcctgataaataacgtgggaacgaatatagggaaaatggtgacagattacacggcggaagatgtttcatttttgacgagcaccaacttcgaatctgcttataacattagtgtattggcaca

SEQ ID NO: 206600 - DNA, 437 bp, Gossypium hirsutum
cccacgcgtccgcttctctctcttctcttaccatggatccttacaagtttcgtccttcagagttcctttgattccccgttctggaccaccaattctggtgctccagtttggaacaataactcatcacttactgtgggagcaagaggtccaattctccttgaagactatcatttggtggagaagctagctaatttcgatagagaacgcatacctgaacgtgttgttcatgctagaggagccagtgcgaaagggttcttcgaggtcactcatgatatatctcagctcacatgtgctgatttccttcgtgcccctggagtccagacccctctcattgttagattctccacggttattcatgaacgcggtagtcctgaaactttgagagacccccgaggtttcgctgtgaaattttacacgcgagagggaaattttgatct

SEQ ID NO: 206601 - DNA, 422 bp, Gossypium hirsutum
cccacgcgtccggttaaacacaacatcatctgacggcaaaccatctgactcttctgttgagagactgaaagaaggcttcgtttacttcaagaaagaaaaatatgaaaagaatcctgctctgtatggtgagcttgccaagggtcaaagccctaagtatatgattgttgcctgctcggactctagggtctgcccatctcatgtgctggacatgcaacctggtgaagcttttgtggtccgtaatgttgctaacatggtgccaccatatgaccagattaaatatgctggcattggatctgctattgaatatgcagttttgcatctcaaggtacaagaaattgtggtgattggacacagtgcctgtggaggaatcaaggggcttatgtctttcccattagatggaaacaactcaactgatttcatag

SEQ ID NO: 206602 - DNA, 445 bp, Gossypium hirsutum
gggggtgacgatgatgaagttgaaggcacgagatgggcggtcttgattgccggatctaatggatattggaattacaggcatcaggctgatgtttgtcatgcttatcaactgttgagaaatggtggcctaaaagaggaaaatatcattgtttttatgtatgatgatattgcctacaatgaagaaaaccctagacctggaatcatcattaacaatccccatggtgatgatgtttataagggtgttccaaaggattacactggagaaaatgttactgttaacaacttttttgctgctatccttggaaacaaatctgctcttacagggggtagtggcaaagttgttaatagtggccccagtgatcatatcttcatatattactctgaccatggaggtcctggtgtacttggcatgcctaccttaccttatctttatgctgatgatttga

SEQ ID NO: 206603 - DNA, 451 bp, Gossypium hirsutum
ctcagctcatccttatgggctgggttgaaagcaagcggtgggttgatttcttcaaccccgaatcagaatcagtggaatgggcaactccatggtctaagaccgctgagaacttcgccaacgctacaggtgagcaagggtacccaggaggcaagttctttgacccattggggctagcaggaaccatccagaatggggtctacgtccctgatattgacaagcttgagagacttaagcttgctgagattaagcatgctagaattgcgatgttagccatgttgattttctactttgaggctggccaaggaaagacaccccttggtgctcttggattgtaaaagaaaactttaagggtctgtttggatgtagataactgagttatgtcttggacgtaaggagagttgagccagaaaaaaaactggaaatgatgtttgttgagctgatgagttccctc

SEQ ID NO: 206604 - DNA, 413 bp, Gossypium hirsutum
  unsure (1)..(413): unsure at all n locations
gagaacaaaaggaaatggagattgttttgcaaactcctgctcatcctgctcagaaacgagattatgtttttcacaacgggaagcgccatgtacgaccttactactttgagttcgtctctcatgttaataaacgatgggaaggtaaaacaatagtggatttgttcgctcaagagttcagaggtcgatctagagattactatgttagtgctgtcaaatgtggacggatacaagtggatggagagaatatacctgtttcatacatagttaaacgatgccagaagattagccacttcttacataggcatgaaccaccagtgatggcttgngatgttgaagttcttcaaaatgaacctgatgtactgacagtttgcaaacctgcatcagttcctgtacatccatgtggtcaatatcgt

SEQ ID NO: 206605 - DNA, 439 bp, Gossypium hirsutum
  unsure (1)..(439): unsure at all n locations
ctctctcattttatcactgccgctttgccagcagccgcgccacactcgagagagagctggtgaaccatggccgaacagactgagaaagcctttttgaagcaaccaaaagtgtttttaagctcaaagaaatcttcaaaagggaagagacctggaaagggagggaaccgcttctggaagagcattggtttgggcttcaagactcctcgtgaagctattgaaggaacctacattgacaagaaatgcccgtttgccggcactgtttcgatcaggggtcgtatcttagctggtacttgccatagtgctaagatgattaggacaatcattgttcgacggaattaccttcattatatcaagaaataccaaaggtatgagaagaggcattcgaacatacctgcacatatttctccatgcttncgtgtgaaggaagggatcatgtcat

SEQ ID NO: 206606 - DNA, 301 bp, Gossypium hirsutum
cccacgcgtccggggaaagtggactgaaacccactactagcacttataacacgctaatcgaaggggacgggatagccggtaagcccgaagaatctgttaaactggtagacctaatgttgcaggaggggaatgtcaaacccaatctccgaacctataatgtacttgtccgagcatggtgcaaaaagaacaacatgacagaagcttggaatgcggttaataagaagaatggccttcggaatgcaaccagatgctgttacctacaataccatagcgaccgcttattcacagaatcaagagactg

SEQ ID NO: 206607 - DNA, 397 bp, Gossypium hirsutum
  unsure (1)..(397): unsure at all n locations
tttagctatagcatacactactagtacccactactagcaatggcttcctcaatgatctcatcggcggccattgccactggctgtccggcacangctaacatggtcgctcctttcaccggtctcaagtctgcctctgctttcccagtcaccaggaaggccaacaacgacattacttctctcgcaagcaatggcggtagagtgcaatgcatgcaggtgtggcctcctactgggaagaagaagtttgagactctctcatacctccccgatcttacacccgtgcagttggctaaggaagtagattaccttcttcgctcaaaatgggttccttgcttggaattcgaattggaggagggattcgtgcaccgtaagtactcgagcttacccacgtactacgatg

SEQ ID NO: 206608 - DNA, 398 bp, Gossypium hirsutum
cccacgcgtccgcccacgcgtccgcccactcgtccgtgagaagtcattgaaggatttgaagctgaaagaagtgaagaatgggagattggcaatgttggcaatcttgggttacttcatacaagggctcgtgacaggtgtaggaccataccagaacctgttggatcacttggctgaccctttcaataacaatgtcttgactaacctcaagttccattagatgaaagtgcctatatttgttccatggaactaccctccccccccctccggctaaaagctccattgccaaatccctttctgctcctttcttgatctcagtaaaacatgtgtaaatttattctgtaatctgcgagaaagaactgaaatagactttgttaatgccactgtaatatcatgagttt

SEQ ID NO: 206609 - DNA, 376 bp, Gossypium hirsutum
cccacgcgtccgatagtcttggaacccaaggacagaagactcttttagcatttcaccggggagatggagataacaaatgtgagcgagtatcaagaaattgcgaagcaaaagttgccaaagatggtgtatgactactacgcatctggtgctgaggaccaatggacattgcatgagaatagatttgctttcaccaagatactgtttcgtcctcgtattctcattgatgtaaacaagatagacatgaccacaactgtgttgggtttcaagatatcaatgcctatcatgattgccccaactgccatgcaaaaaatggctcatcctgaaggggagtatgcaacagctagggctgcatctgctgctggaactatcatgacat

SEQ ID NO: 206610 - DNA, 440 bp, Gossypium hirsutum
cccacgcgtccggccggcaagattgttctttgtgatcgtgggatgaacgccagggttcgggaaggagctgtcgttaaagcagccggtggtataggcatggttttgtctaacactgccgcaaatggtgaagagctggtagcggatgcccatttgctcccggcaaccgccgtgggtcaaaaatctggtgatgctataagagactacttgttttcaaatcctaacccaactgtcaccattctttttgaaggaaccaaagttggcatagaaccatcaccggtggtggctgcttttagctcaagaggaccaaattctataacctcggagatattgaaaccagacatgattgctccaggggttaacattttagcagggtggtccggtgcagtaggtccaacggggttggctacggataccagacgagtggattttaacatcatttc

SEQ ID NO: 206611 - DNA, 423 bp, Gossypium hirsutum
atttagctatagcatacactactagtacccactactagcaatggcttcctcaatgatctgatcggctaccattgccactgcctctccggcacaggctaacatggtcgctcctttcaccggcctcaagtctgcctctgctttcccagtcaccaggaaggccaacaacgacattacttctctcgcaagcaatggcggcagagtgcaatgcatgcaggtgtggcctcctactggaaagaagaagttcgagactctctcatacctccccgatcttacacccgtgcagctggctaaggaagtggattaccttcttcgctcaaaatgggttccttgcttggaattcgaattagaggagggattcgtgcaccgtaaatactcgagcctacccacgtactacgatggacgctactggaccatgtggaagct

SEQ ID NO: 206612 - DNA, 404 bp, Gossypium hirsutum
tattttttttaaaaagggttgcccccttctaactctgaaaggcaatggcttcaatgcttagctcaggaaccgtccttaggccaaccccatttcttggccaaaacagaaatgctaaccctctcagagatgtctccgtgggcactgccaaatacacaatgggaaatgaactgtggtatggaccagacagagtgaagtacttgggacccttttcagctcagattccatcctacttgaacggcgagttccctggtgactacggatgggacactgccggtttgtcagctgaccctgaggcctttgctaggaacagggctcttgaggtaatccatggaagatgggcaatgctgggagcactaggctgcatcaccccagaagtccttgagaaatggcttagagttgacttc

SEQ ID NO: 206613 - DNA, 453 bp, Gossypium hirsutum
cccacgcgtccgccgccatcttcaataatttcttccgttgatctttgttagagattagctgtttaggttttcattatgggaaagatcaagatcggaatcaatggatttggaaggatcgggcgtttggttgcgagagttgctctccaaagcgatgatattgagctcgttgctgttaacgatcctttcatcaccactgaatacatgacgtacatgtttaagtacgacagtgttcacggtcaatggaagcatcatgagcttaaggtgaaggactcaaagacccttctctttggtgaaaagcctgtcacagttttcggtatcagaaaccctgaggaaatcccatgggctgaggctggagctgagtatgttgttgagtctactggtgtttttactgacaaggacaaggctgctgctcacttgaagggtggcgcgaagaaggttatcatttctgctccc

SEQ ID NO: 206614 - DNA, 456 bp, Gossypium hirsutum
gcgcccacgcgtccgcccacgcgtccgcaccaacaaaatcaactgcttcacaatggcctctacgaccatggctctttcttccccatcattcgccggtaaggcagtgaagttctccccttccacccctgaaatccagggaactggccgtgtttccatgaggaaaaccaccaagcctgttccttctggtagcccatggtacggtcctgaccgagttttgtacttgggtccactttccggtgagccaccatcttacttgaccggtgagttccctggtgactatggttgggacactgctggactctcagctgatcccgagacctttgctaggaaccgtgagctcgaagtcattcactgcagatgggccatgttgggagctcttgggtgtgttttccctgagctgttggctaagaacggtgtcaagttcggtgaagctgtatggttcaaggccgggtctca

SEQ ID NO: 206615 - DNA, 400 bp, Gossypium hirsutum
cttgtttatattttgcaggaggctgctgcttattcacgaacatggaagggccatatgcagaatttgcttggatatgcaggttcagtttattgtgtgtacaaaatgattaagtcattacaaagtgttgttttcaaggaggctggttcagttgaccctgttacaatgtcaattaccatattgttgcagttctttgatattggaatagatgctgcattgttatcacagtatatttccctgctgtttattggaatcttgatcacaatatcagtgcggggtttcttaacaaatctaatgaagttcttctttgcagtttccagagttggtagtggatcttcaagcaatgttgtccttttcctttctgaaattatgggaatgtacttcctctcttcaattcttctga

SEQ ID NO: 206616 - DNA, 394 bp, Gossypium hirsutum
ccaggattgaagagataagattatagtgaataactaaacataataaagccccttcgacttgcttcagtgatttgccctctcaaagcccaagaaaaatggcttctgcttccgctactctcctcaagtcttcacctattatcgacaagtccgagtggattaagggccaaaacctccgccacccttcggtttgttttgtacggtcacaccctacatcggccgcctttgccgtccgtgctagttcatatgccgatgagcttgttaagaccgcgaaaactgttgcatctccaggtcgtggtattttggccatggatgaatcaaatgctacatgtgggaaacggcttgcctcgattggtctcgagaataccgaggcaaaccggcaagcttaccgtaccct

SEQ ID NO: 206617 - DNA, 421 bp, Gossypium hirsutum
cttgtttatattttgcaggaggctgctgcttattcacgaacatggaagggccatatgcagggtttgcttggatatgcaggttcagtttattgtgtgtacaaaatgattaagtcattacaaagtgttgttttcaaggaggctggttcagttgaccctgttacaatgtcaattaccatattgttgcagttctttgatattggaatagatgctgcattgttatcacagtatatttccctgctgtttattggaatcttgatcacaatatcagtgcggggtttcttaacaaatctaatgaagttcttctttgcagtttccagagttggtagtggatcttcaagcaatgttgtccttttcctttctgaaattatgggaatgtacttcctctcttcaattcttctgataagaaaaaagttgaggactg

SEQ ID NO: 206618 - DNA, 334 bp, Gossypium hirsutum
ccaagccttcggattggtttttctttcccatcattcgcccgttaagcaatgaaggtctcgccttccacccctgaaattcggggaactggccgcgtttccatgaggaaaaccaccaagcctgtttcttttggtagcccatggtacggtcctgaccgagttttgtacttgggtccacttttcggtgagccaccatcttacttgaccggtgagttccctggtgactatggttgggacactgctggactctcagctgatcccgagacctttgctaggaaccgtgagctcgaagtcattcactgcagatgggccatgttgggagctcttgggtgtgttt

SEQ ID NO: 206619 - DNA, 390 bp, Gossypium hirsutum
gcttcgctgaattttcgtgatcgtcgagaaagaaaatgatgggaaggaaattctgcgtcggcggaaattggaaatgcaatggaaccactgaggaagtgaataagattgtgagtactttgaatgctggagaggtgccttctccggatgttgttgaggttgtggttagccctccatttttgttccttcctttggtaaaaacttcactgagacctgagttccaagtcgctgcacaaaattgttgggtcaagaaaggaggtgctttcactggtgaagttagtgcggagatgcttgtcaatttgagcattccttgggttattattggtcattctgagaggagacttattttgatggagtcaaatgagttcgttgcggataaggttgcttatgcac

SEQ ID NO: 206620 - DNA, 341 bp, Gossypium hirsutum
ctcttttgtataactgtagcatatagtactagtaagcagtaatagcaatggcctcctccgtgatctcatcggcaaccattgccaccgtgaactgctcctccccggcacaggccaacatggtggcccccttcaccggcctcaagtctgcctctgctttcccagtcactaggaaggccaacaacgacatcacttctcttgcaagcaatggtgggagagtgcaatgcatgcaggtgtggcctcctcttgggaagaagaagttcgagacactctcatacctccgcgatcttacacccgtacagttggctaaggaagtagattaccttcttcgctctaaatggatt

SEQ ID NO: 206621 - DNA, 406 bp, Gossypium hirsutum
aagcaatggtgggagagtgcaatgcatgcaggtgtggcctcctcttgggaagaagaagtgcgagacactctcatacctccccgatcttacacccgtacagttggctaaggaagtagattaccttcttcgctctaaatggattccttgcttggaattcgaattagaggagggattcgtgcaccgtaagtactcgagcttacccacgtactacgatggacgctactggaccatgtggaaactgcccatgtttgggtgcactgactcggctcaggtgttggaggagcttgagaattgcaagaaggaataccccaatgcattcattagaatcattgggttcgacaacgttcgtcaagtgcagtgcattagtttcattgcctacaagcctaaaggctactaagttgtttac

SEQ ID NO: 206622 - DNA, 448 bp, Gossypium hirsutum
caacccttgatcggcaccaacacaaatctctatcctttgtttccatggaagagcagggttgttggggttgtaaagatgatcacgaagtgttccattagccatgtaatcgtagaccagaatcatctcaccgtcatcgttgcaatatccgatcagtgagaccaaatggaggtggcgtagctgggaaagcatctcaatctcggtcctgaattcgtgagcaccttgttgagactcatggttcaaccgtttgattgcaacttgggtctccccaccatcgatgaatcctttgtaaacgttgccgaaacctccaacaccaataatgaaaacattgtcgaagttgttggttgcttgtttgatctcagacaatgaaaagtatcgacaaagatcataaggctgagatgaaccaccacacttggttgactccttcactggaactcctgtaccggaaaac

SEQ ID NO: 206623 - DNA, 435 bp, Gossypium hirsutum
aagaaatcaaaagacaaatagccaataacaatggcactcagaatgtgggcttcttccacagccaatgcactcaaaatctcttgttcctccaaacctaatgtttcccttgctttttcactctctagatgcttttccactgttttggatgggctgaagtatgctaattcacatgaatgggtgaagcatgaaggtcctgtggctaccattggcatcactgaccatgctcaggaccatcttggagaagtagtgtttgtggagttgcctgaaccaggtggctcagtgagccaaggaaaagggtttggagcagtggaaagtgttaaagcaacaagtgatgtcaattccccaatctccggcgaagtcgtggaggttaactccaaactgtccgaaactccgggcctgatcaactcgagcccatatgaagatggatggatgatc

SEQ ID NO: 206624 - DNA, 414 bp, Gossypium hirsutum
cggacgcgtgggcggacgcgtgggcttgaccgcaagcacattctccacctcagaattgacgatcaggtaaagagagagattgggacgctcaaacttctcaaacatcccaatgtggtccggctgcacgaggtatcggcgagcaaaacaaagatttacatggtccttgagtatgtgaatggaggcgaactatttgagcgagttgaatcaaaaggcaggcttttggaatgtgaagggcgaaagttttttcagcagctaattgatgccataagctactgccatgagaaaggtgtctaccatagagacctaaagccagaaaatgttctaattgatgcaaatgggaacttaaagatattaagattttggcctcagtgctttaccttcgcatttcgggaatgatgggctattgcatacaac

SEQ ID NO: 206625 - DNA, 269 bp, Gossypium hirsutum
acacgcgtccgcggacgcgtgggatccacaccaccaccacagcaatcacgcaatgtcaggacgaggcaagggagggaaggggctgggcaagggcggcgccaagcgccaccgcatggtcctccgggacaacatccatggcatcaccaagccggcgatccgacgtctcgcccgccgcggtggtgtgaataggatcagcggtctaatctatgaggagacccgcggggtgctcaagatctttcttgagaatgtcatccgcgatgctgtgacct

SEQ ID NO: 206626 - DNA, 440 bp, Gossypium hirsutum
caactgcagctctaacatccatcatctacatggccatggcaactcaagcaggtctcttcacccccacaatccccaccccaaaatctttggccccatggaaaccagcctcatcattttcctttgctacctcttccaagtccctcaacttctccatggctcaaagaaccattagagctgcagctgctgatgaggaagcatcatctgctgctgctacaaaggaagctccggtcggtttcacccctccggaattggaccccaacaccccatcacccatcttcggaggaagcactggaggactgcttagaaaggctcaagtcgaagaattctacgtcatcacatgggattcacccaaagaacaaatctttgagatgccgactggtggggcggccatcatgaggcaaggacctaacttgctcaagttggcgaggaaagagcagtgt

SEQ ID NO: 206627 - DNA, 426 bp, Gossypium hirsutum
cacaatcaaacttggggttccttaatcacgtgaaccggtccttgccatgtcccaatttgaggctccaacacagagcacgtaaaggtaagaaccatagatggaaaccccatttttgttcttcaaggactcatgttcctggttcagaagggttaagaataagcaaggtgaaggtcactgttgtgtcaaccatggcagccactagctcagcaggtgaaatagctatgtcatcagaggagaacgtttacaatgtggtgttgaaacaggcatctctggttaataagcgattgacatcacctcgtgttgatgacgttgtacctggtgatttgagcttgataaatgaagcatatgatcggtgcagtgaaatttgagccgcttctgcaaaaaccttttatttgggaactttgcttacgaccccagaaagacgta

SEQ ID NO: 206628 - DNA, 439 bp, Gossypium hirsutum
caccattttccaccacaagcgtgtccagaaggttcagagattttagagagaacaaacaacaatggctgctacatctggggctgtactaaatggattaggctcttcatttctttgtgggggaaagaggagccaagcccttttgggtgccagcattggggccaaaggctcgccctcccctactgctggaactagaaagttgatcgttgtggcagccgccgcacctaaaaagtcttggatccctgctgttagaggtggtggcaacttcattgaccctgaatggctcgatggatcgctccctggagactacggatttgacccactaggtcttggaaaagacccagcattcctcaaatggtaccgagaagctgagctgatccatggacgttgggccatggctgctgtcgtcggcatcttcgtcggccaagcttggagtggcatt

SEQ ID NO: 206629 - DNA, 435 bp, Gossypium hirsutum
ccacgcgtacggagccgagctctaacatcgtcccgacttcaactggtgcggtaaaggccgtggcccttgtactccctactctcaaaggcaaacttaacggcatcgcattgcgtgtaccaacaccaaatgcgtcggtggtggacctagtggtccaggtttcaaagaagacgtttgctgaagaggtgaacgctgctttcaaagagagtgcagagaaagagctacagggtatactttcagtgtgtgaagaacccctcgtttcagtggacttcaggtgctctgatgtgtactccaccgttgatgcatgactcaccatggtcatgggagatgacatggttaaggtgattgcttggtatgacaatgagtggggctactctcaaagggttgtggatttggctgacattgttgcctatagctcgaagtgatttcaatgggcta

SEQ ID NO: 206630 - DNA, 436 bp, Gossypium hirsutum
ctaaattatcttctttctcttctcttaccatggatccttacaagtttcgtccttctagttcctttgattccccgttctggactaccaattctggtgctccagtttggaacaataactcatcacttactgtgggagcaagaggtccaattctccttgaagactatcatttggtggagaagctagctaatttcgacagagaacgcatacctgaacgtgttgttcatgctagaggagccagtgcgaaagggttctttgaggtcactcatgatatatctcagctcacatgtgctgatttccttcgtgcccctggagtgcagaccccgctcattgttagattctccacggttattcatgaacgtggtagtcctgaaactttgagagacccccgaggtttcgctgtgaaattttacactcgagaaggaaattttgatctcgt

SEQ ID NO: 206631 - DNA, 392 bp, Gossypium hirsutum
gtcagtcatttgcatgctttctgactcctggaatgaatattcgacttattggagaagctaacgattatgtgggaaagggtatggctggaggtgagttggtagtaacccctgtagagaatcctgggttttgccctgaggatgcaactattgtacgaaatacatgtttgtatggagcaacaggtggacaaatctttgttagagggatggctggacagcgctttgctgctagaaactcacttgcccaagcagtggttgaaggcactgatgaccattgctgcgagtacatgactgatggctgtgtggttgtacttgtaaaagtggcgataaatgttgctgctggaatgactgtaggtttagcatacatgcttgatgaggatgatactctaatgccc

SEQ ID NO: 206632 - DNA, 393 bp, Gossypium hirsutum
ctcaatgatctcatcggctaccattgccactgcctcttcggcacaggctaacatggtcgctcctttcaccggcctcaagtctgcctctgctttaccagtcaccaggaaggccaacaacgacattacttgtctcgcaagcaatggccgctgagtgcaaagcatgcaggtgtggcctcctactggaaagaagaagttcgagactctctcatacctccccgatcttacacccgagcagttggctaacgaagtggattacctgctacgctcaaaatgggttcctcgcttggaattcgaattagatgagggattcttgcaccgaatatactcgagcctacccacgtactgctattgacgctactggaccatgtggaagctgcctatgttcgggtgcac

SEQ ID NO: 206633 - DNA, 435 bp, Gossypium hirsutum
cgatctctccgcccaaatcttgttttccgaaaagacgccaaacagataaattttgtgattcctcttttctttctcagatcccttcgaaagcgattcttcttcttcttcttcttctattctttttaaattgaattgaagttgctgattcgaaatgagtacggccgaccttctcagcatcgaccctttagagctgaagtttccttttgagctgaggaagcagatctcgtgtgctcttcaattgtcgaataaaactgataattatgtagctttcaaggtgaaaacgacaaatccaaagaagtactgcgttcgtcccaatacgggggtcgttttgcctcgatccacatgcgatgttattgttaccatgcaagcacaaaaagaggctcctcctgatatgcaatgcagggacaaattcctccttcaaagtgtaaaggtaaa

SEQ ID NO: 206634 - DNA, 452 bp, Gossypium hirsutum
  unsure (1)..(452): unsure at all n locations
gaccaagccttccggccgaacttccaattattgggaaccctcaaaaccatcggccgctaccttaatggttcattcaggtccttacctaaccggttcggccctttaaggtcgctacgcttcggaaatttccccatactcgtcgtctcctccgctgatgctgcctctgagatcaagaaaactcatgacttgacattcgtaaacagaccgaaacgcagcctctntcaaaagcttctttatgactacaaagacgtggcgtcggcaccttacggtgagtattggaggcaaatgaaaagtatatgcgtagtaaatcttttgagtaacagaagggataaatcttatcaaggtgtgcgagaagaagaaacggctctagcagtggagaagatcgaaaagtctagctctttgtgttccccggtgaatctaagcgaactctnttccgcaaccaccaacaacgt

SEQ ID NO: 206635 - DNA, 440 bp, Gossypium hirsutum
tttgtctctttcgctttctggcctccgagaagaagccgacgccgccatggttcacgtcagtttctaccgcaattatgggaagacatttaagaagccaaggcgtccatacgaaaaggaacgtttggatgctgagttgaggcttgtaggagaatatgggctccgatgtaagagggagttgtggagggttcaatatgctttgagccgaatcagaaatgctgctagggatcttctcactcttgatgagaagaaccctcgtcgtattttcgaaggtgaagctcttcttcgtaggatgaacagatatggacttttggatgagagtcagaacaagctcgattatgtattggctttgactgttgagaacttccttgaacgccgcttgcaaacacttgtgttcaagactggtatggccaagtcaattcaccatgctcgtgtgttgatta

SEQ ID NO: 206636 - DNA, 432 bp, Gossypium hirsutum
  unsure (1)..(432): unsure at all n locations
tttcccgacaatggagagtttcgggttttgtttccttatgcttacaatcgcaattttggcatcacccgcactttccgatctggtcctttccaaagtcgatcgacgcatatatttcacatcacatattgttcggatttcttcaactatgaaggtggagaatgcaggttccgaaaaggagtccaaggttttgctggcttttcctgagcaacaagccaaaaatatggcatatttgattgctactccacatgaagggaaagggaaaggaaaaaaccctgttgttgttctccctgttgaggctgccaacccaaaagacatgcctgctgctttgacattctattcagtatctttgcctaagggattagctgagggtgatagcttcacttttgatgtcttggccgtatntacccatgccttgcgacctattcctgagca

SEQ ID NO: 206637 - DNA, 385 bp, Gossypium hirsutum
agcaaatttaagcttattaagagagtaagatggcatccactttcacagccatgtcatcagttggctcattcgttgcacctaatggtctagtcatggataagaagcttccatcttcttccaacagattgtcatctttagcttccatttcttcatcttcatttgttagtagacgaaatgttgttcttagaagatctcgtctgcccaagatttctgcagcaaaagagctacatttcaatacggacgggtcagccataaagaaattacaaactggtgtgaacaagcttgctgatttggttggagtcactcttggaccaaaaggtaggaatgtcgttctagagagcaaatatggctctcccaaaatcgttaatgatggtgtgacagtggc

SEQ ID NO: 206638 - DNA, 436 bp, Gossypium hirsutum
ctcttctcttcttttctcttctcactctctaattttgtgagtgacaatggaagctggacttccaatgcttaactgtctcttgcagcacacgctacggagcttgtgttcatattcagattcttcttcttcttcatcaaagtgggtttatgcagtgttttggaggatactgcctcgaaattatccaccaccaaagtgggattatggagggagtgcacttgatcgttccgaaggaaacaaaagaaactggattcttgtatgggaagatgggttttgtgatttctatgaatgtgagggtgctggaagtggttatgtaaagggaaggtttggagctgatattttcttcaaaatgtcacatgaagtttataactatggagaaggattagtagggaaaattgcagcagataacagtcacaaatgggtgcataaagaaatccca

SEQ ID NO: 206639 - DNA, 382 bp, Gossypium hirsutum; identical to SEQ ID NO: 193667

SEQ ID NO: 206640 - DNA, 289 bp, Gossypium hirsutum
ctcttttctagattcttggcgatcgatcggagcggcggggttcaagcaatcctaccgcggccccgattgccgagcacgttgaagagccggaggttgtggtgcaagatcgggagtcccttctgggcaagatctcggagaagatccacggccacgattcgtcttcgtcgtcttcctccgattccgaggatgagaagaaacccgaagtgtccgcggcggcgggaatcaagtcgaaaatcttccgcatttttggaagggagaaggcgattcatcacgtgcttggcggggggaa

SEQ ID NO: 206641 - DNA, 386 bp, Gossypium hirsutum
gatcaaggagaagggcgtcggcggcttcatcaaggagttcaaagatgaaggctacacgaaatgctttttcgatgggaatcttctgcaaaccaaactccataatgtaagtgcaaccgttgtcggagttgataaatatggtaacaagtactatgaaaaactaaaagatactcagtatggaaggcacagatgggtggagtatgccgataagggtagatataatgcatctcaagtaccgccagagtggcatggttggttgcacttcattactgaccacaccggcgatgaacttctgatgctgaggccaaagaggtacgggctcgagcacaagcaaaaacttctctggagagggagatgcatacatataccattccaagggtcacacgctt

SEQ ID NO: 206642 - DNA, 431 bp, Gossypium hirsutum
attaacccagcggtgactttcgggctgttcttagcgaggaagttgtcgctgataagagcagtcttttacatgataatgcaatgccttggagctatatgtggcgctgccgtcgtaaagagcttccaaaagacccaatacgaaaggctaggcggcggtgcaaacacggttagctcgggatatagcaagagtagtggccttggtgctgagattgttggtacctttgttctggtctatacggtcttctccgccactgatgctaagcgtaatgcacgagactcccacgtccctatcttggcaccgctgcctattgggtttgctgtgttcctggtccacttggcaacaattcccgttactggaacaggcattaatccagctaggagcctcggcgcagctcttatttacaacaaggaccaagcatgggatgaccattg

SEQ ID NO: 206643 - DNA, 406 bp, Gossypium hirsutum
tcggcatacactactaggacacactactagctttggcttgctcaatgatctcatcgggtaccattgccactggctgttcggcgcacgctctcatggtcgctcctttcaccggcctaacgtctgcctctgctttgccagtcaccaatacagccaacaacgacattactgtcttggcatgctatggcaggcagagtgcaatgcatgcaggtgtggcctcctactggaaagaagaagctcgagactctgtcatacctgcccgatcttacacccgtgcagttggctaaagaagtggattaccttgtttgctcaaaatgagttccttgcttggaattcgaattataggagggattcgtgcacacgatatactctagcctacccacgtactacgatggacgctactggacca

SEQ ID NO: 206644 - DNA, 360 bp, Gossypium hirsutum
ctacctcaatagccaggccctctctttccgcgtcaccaccagcgacggcgtgactctcgacttccccaacatagtcccggcgaattggaacttcgggcagacgttcacaagccgggtgcaattcacttaaagatccaagatccgaaatcctgcggcagaggcatgctcactatttttgctaccattgcccgccaaccagtttttttttctttcaaaatttgtttctttctccccgccgacttactatttacacacatcctttcttgggttgctaaatgatgcagagcttgggaggtgttggacattattagtttacttttcaagaaataaaagttgaaagagggggtgatggttgtagcc

SEQ ID NO: 206645 - DNA, 425 bp, Gossypium hirsutum
gatggagaagatgaaaatcctcctttgattgattctgaaaacaattcaaagccacgtcgtattgcactttttgtcgagccttctcctttctcgtatgtatcagggtataaaaacaggttccagaattttataaaatatttaagggaaatgggagatgaggtaatggttgtaacaacacatgaaggggtcccgacggagttctacggagcaaagttgattggatcaagaagtttcccgtgcccttggtaccagaaagtgcctctttccttggcactcagtccaagaataatttcagaagttgcacggtttaagcctgatataatacacgcatcttcacccgggatcatggttttcggtgctctcattatagcaaaactactatgtgtacccatagtaatgtcttaccacacccatgtttcagtgta

SEQ ID NO: 206646 - DNA, 481 bp, Gossypium hirsutum
cgagaacgccgtgctgctgtggacgctggatccggcggagagggatgcccagctggcgagtgaggcggcgaagaagtcgaaccatctggctctgattgagattggctgtgggaggtcggcggcagagttactggctgcgagggctgagtatcatcagcggtttaagaggtctttggaggaggatgtggctgctcatactaagggggattttcgcaagcttcttgtaccacttgtgactgtgtaccgatatgagggggaagaaatcaacacaacattggcaaaatcagaggcaaagctactccatgaaaagatctcgaagaaggcctacaatgacgaagagctcattaggatcctcactaccaggagcaaagcacagctccgtgcaacattcaatgactacaataatgcttttggaaatacaatcagcaaggatttgcacgccgatccgaatgacgagttcctctctgcactgagagcagtc

SEQ ID NO: 206647 - DNA, 440 bp, Gossypium hirsutum
cgcttgtatcgcttgctttcactgtgactgtgagttgcagccatgtatggaggagatgaagtatcggctatagtgatagatttagggtctcacacttgcaaagctggttatgccggtgaagatgctcccaaggctgtatttccctctgttgtggggtgcattgatcaaatggatgctgatgatgacaaagaaaacaacgattctgagactaacaacaataatgttgattccaacaaacccaagggaaaacgcaggttgtatgtaggctctcaagccttgggttttcgtcgtgaccatatggaggtggtgtcacccctaaaggatggggttgttgttgattgggatattgttgatagcatatgggatcatgctttaaaggattgtttactcgttgatccgaaagaacatccaatgctacttgctgagccttcttccaacac

SEQ ID NO: 206648 - DNA, 436 bp, Gossypium hirsutum
cccacgcgtccgaagccttgcacaatggtcaccatcacctctgccgatgtcgctatcgcatctttcaccggccttaaagccggtgcaaccgcagctaacgttagcgccacagccaaggttgcagcctctccagtcccaaggggcagcatcaaggcctccctcaaagacgttggtgtcgctgttggggcaactgctgcaagcgtaatccttgccagcaatgccatggccattgaagtcttgctcggcagtgaccatgggggtctggctttcattcccaaagaattcagcgtaagcccatgggagaagattgtgttcaagaacaatgccggattcccacacaatgttgtgttcgatgaggacgaaatcccaagcggcgtcgacgtatccaaaatctccatgcctgaagaagagctactcaatgccaaagacgagactt

SEQ ID NO: 206649 - DNA, 420 bp, Gossypium hirsutum
tcgcgcacgcgtcgctagccttgaacaatgctttgcatcgcctctgtcgatggcggtatcggatctttcaccgtacttaaagcacggagcaaccgacactaagcgttagcgccacatgccaggttgcatcctctccaggcccaatgggcatcatcaatgcctccctcagagacgttggtgtcgctgttggggcaactgctgcacgcgtaatactcgccagccatgccatggccattgaagtcttgctcggcagtgaccatggtggtctggctttcattcccatagaattcagcgtaagcccatgtgagaagattgtgatcaagaacaatgccggatgcccacacaatgttgagttcgatgaggacgaaataccaagcggcatcgacttatccaaaatctccatgcctgagaaagagctac

SEQ ID NO: 206650 - DNA, 435 bp, Gossypium hirsutum
cccacgcgtccgcccacgcgtccgcccacgcgtccgggtgggatagtgtctgatgatgataatgggaatgctgttgtcactgcacggcttcttgttccaaataatatggtaggatgtctcttagggagagggggtgatgtgattcaaagattgcgaagtggcacaggtgctactatacgtgttcttccagctgatcatcttcctgcttgtgcagtggcaacagatgaattagtgcagatatcaggaaaacgagatgtcacaaagagagctctatatgaagtttccactcttttgcatcaaaatccacggaaagacaagcctcctttgagcttctctgtgccacattcaagccagaatttccctcctagtgctcttccaccgagcaattcaatgtggtcgcatcgaaatttttctcctcatgatagtccaccaatg

SEQ ID NO: 206651 - DNA, 354 bp, Gossypium hirsutum
gggtgcctgcggtgaacattttcgaaagtaggttgagacgtgggaagtttgatgagccacgcgtgtggccaattggatctcgtatggaaatcaccaaggttatccactaagtgcaaagtctgattgacccgatgatgtacctggtgatgtgaaagcattcaaacgcttcacaagctgctcgtgtaggactgttaaggacgttgccgaaactgtctagaatgactttggaagtattgacattctactgcactgtgttgcctatggaccggacgttaccaaacccgcttgttggcacatccataattggattccttgctgcactaaatgcataaagctgtccgtttgtttacatac

SEQ ID NO: 206652 - DNA, 329 bp, Gossypium hirsutum
gggtgcctgcgtggaacattttcgaaagtagcttgagacgtggaacgtttgatcagccacgctcggggccaaatgggtctcttctggaaatcacacacggacatccactatatgcagggactgattcacccgatgatacacctggcgatgtcataatcctacaaatgctacacaggggcaccttatcggactgttattgaggcagccaaacctgtatagaatgactttgctagaattgacattgtagtgcactctgttggctcttgaccctacactaccaaaccgacagtggagacctccaaaataggacaccttgctgcaatattcgc

SEQ ID NO: 206653 - DNA, 448 bp, Gossypium hirsutum
  unsure (1)..(448): unsure at all n locations
cccacgcgtccgcccacgcgtccggtttcttccatatccaaatcctttcctttacctagatctcttcccttcaatcctctcacaactcaatcatcttctaccctgaaaaaagtgaacttctcttctcttccttccattacctcaatccttaccaaagaagacattgtcaaggaagaagaacaataccctcaaaagtcaagctttgatttcaattcctacatgcttcaaaaagcaagttcagttaaccaagccttggaatctgctgtttcactccgtgaccctgttaaaatccatgaagcaatgcggtactcccttttagcaggtggaaaaagggtacgtccggtgctttgtttagcagcctgtgcacttgttggtggccgggaatccatggctatgcccgcagcttgtgctgntgaaatgatccacaccatgtctttaatccacgatg

SEQ ID NO: 206654 - DNA, 434 bp, Gossypium hirsutum
cccacgcgtccgctgagattgtgccaatatttctaaaaaagggtttcttcctaccaacatcgttgaaatgctttcgtctcgtgaaaaacaagttttcttatccgactccgaggatgagaaggctgaggtaaatccaattccaagaaagaaaaagaagaaaaactcaggggtagaacccgttattttgaatgacataccacctcctcaatgcttacaaagctccttggagttcttgaagaaagggaaaatgcaggttccaagatcatctttggttttaaagaactctaaccaagtactccgccttagttgtgccatatcaacttctgggttacgtgaaagttgtaaaagactgtaatgaagtttgctagtgtccttctgaacctgagattgtgccaatatttctaaaaaagggttcaatgcagcctattcctatt

SEQ ID NO: 206655 - DNA, 467 bp, Gossypium hirsutum
ggggatatagatccgtatgtgctgattgagtatagggctcaggagcgcaagagcagcgtcatccgagcaggcggaggttcgaacccagtttggaacgagacattcaagtttctggtgaactactccggtggcaatgacagccagcagaagcttgtcctcagaatcatggacagagacacattcacggccgatgatttcatcggccaggcatcgatcaatgtggctgacttgatctcgttaggcagcgaaaacgggaaggtcatcgacctacacacgaagaagtacagtgtcgtactcgcaaatagaacatattgtggagagattcgtgtgggagtcaaatttatccccaaggtagaggagaatgagaccggagaagagctcggaggatggaaacacagctttcaccactgatatattacttgttaggagggtgttgtgtagtcgtgtgtgtaaaattgtgataccaa

SEQ ID NO: 206656 - DNA, 447 bp, Gossypium hirsutum
cccacgcgtccgcccacgcgtccggaagaactaaattccccagaatttgcttcagtaatggctgcctcagttatggcttcttcagttaccctcaagccttcattcaatgttgagaaatctggtgtaagaggggttccttcccttgctaggtccccttcttctttcaaggttgaagccagtggtggcaagaagatcaagaccgacaagccttatggaatcaatggtggtatgaacttgagggatggtcttgatgcctctggaaggaagggtaagggaaagggtgtttaccaatatgttgacaaatatggtgctaacgtcgatgggtacagtcctatctacaacaccaacgactggtctcccagtggtgatgtttatgttggcggtactaccggattggcaatctgggcggttaccctagccggaaattcttgccgtggtgcacttctt

SEQ ID NO: 206657 - DNA, 435 bp, Gossypium hirsutum
  unsure (1)..(435): unsure at all n locations
cccacgcgtccgcaattttgtaagcaagtatggctaaggacgttgaggttggtggtgagttccaagccaaggactaccatgatcctccaccagctccattagtggacggggaggagttgacaaagtggtcattttatagggctgtaatagccgagtttattgccacgctcttatttttatacatcactgtgttgacagtgatcggatacaagagtcaggttgaccctgataagggcagtgacgaatgcggtggtgttggcattcttggcattgcttgggcttttggtgggatgatctttatccttgtttactgcactgctggtatctctggaggacacatcaacccagcagtgacctttgggcttttcttggctaggaaggtgtccttagttcgagccatattttatatggctgctcaatngttgggagccatat

SEQ ID NO: 206658 - DNA, 449 bp, Gossypium hirsutum
gcccacactctcaaattcagataacaatttcacagttgttttcttctctctctctctcagccatggctgcagccatctccaccgtcgccgccgctgccgccgccaaccgagctctgggagtgtcagtcccaacctcagctttcatggggaagaaagtgagctcgagattcaacaacaccaggcaggttccttcgggaagttttaaggtgatggcggccgaaaaagagatagacgaagagacacagaccgaaaaggaccgatggaaagggttggcttacgatatttcggacgaccaacaagacattactcgagggaaagggatggtggattccttgttccaagctcccatgaatgatggaactcactatgctgtcatgagttcctatgaatacatcagccaaggtcttaaaacgtacaatttggacaacaacatggatggtttctacatc

SEQ ID NO: 206659 - DNA, 439 bp, Gossypium hirsutum
ctttgaattgaaaccctcaaaattccacttaaaaaatggcctccacagcttccctctccaccgccgtagccaccacctctttcctccgcggccacccggccccgaaaaccctaagctcccttcctttcaaccaatctcttttcgggctaaaaccccaacgaaatggccgtctcaccatggctgcatacaaagtgacactgttaacacccgaaggaccccaagaattcgtgtgccccgacgacgtttacatcgttgaccaagctgaggaagaaggcattgatcttccgttctcgtgtagggctgggtcttgttcttcgtgtgccggaatgattaagcaaggctccgtcgatcaatccgacggtaatttccttgatgatgaccagattgctgcaggttttgtcctcacttgtgttgcttaccctcagagtgatgttgttat

SEQ ID NO: 206660 - DNA, 398 bp, Gossypium hirsutum
ctcagtttgcaacaccagagcttgtgtgcttcaaagctaccatcatcatcatgtttcttctgttgacaagatccatttccagacatttaaagggttgaaattgaataaacccaatttatcattcactgctggtagatgccaaaaatccaggcttatatgcaaagccagtgaggctgttgctcaagttgaagtggtgacagaagcagactgggaagagcttgtggttggcagtaagacaccagttgtagtggatttttgggcaccatggtgcggaccctgtcgggtgattgaaccagctatagctgaattagccaaagaatatgctgtgaagattgtttgttacaagctcaacactgatgacagcccaaatattgccacaaaattcggtatcaggagca

SEQ ID NO: 206661 - DNA, 436 bp, Gossypium hirsutum
gttcggatcgcggcgacgtgggcggttcgctgcccgcgacgtcgcgagaagtccactgaaccttatcatttagagaaaggagaactgaaagctgaagcagctgcaagggtagatcaaataacagcagagttaaacacagcatcagctgatggcaaaccatctgactcttctgttgagagactgaaagaaggcttcgtttacttcaagaaagaaaaatatgaaaagaatcctgctctgtatggtgagcttgccaagggtcaaagccctaagtatatgattgttgcctgctcggactctagggtctgcccatctcatgtgctggacatgcaacctggtgaagcttttgtggtccgtaatgttgctaacatggtgccaccatatgaccagattaaatatgctggcattggatctgctattgaatatgcagttttgcatc

SEQ ID NO: 206662 - DNA, 450 bp, Gossypium hirsutum
attccggtgcctgttgacctgtctcgacagtcatggccggaccaggtgcggcagtgctgtgggtcgacgttgatgtatttgaggactgggacatgtagtgggatcaaggtggggcgggccactcaggcgcgggatgagattgtggacaatgtgttggcagcggtggagggggtggtggggaatgttccgcggaagtgggctaatgtgcggtcgttccatataaaggcggcggagtctctggcgctgcctatatatcaggctttaccggagcaggggttgaagattgagggggtgcagaagaagggagagactggtggtggttccaagaagaggaagagtaaagcatacaaatctgaggacatgggggtaaagggaaccaagcggttttaattggtacatgaaatggagtgatgggtttgatggaagttatttagctagctagaatgtgtc

SEQ ID NO: 206663 - DNA, 426 bp, Gossypium hirsutum
gcatttctggcctatacacaacgaaaacaaatgcaaacatcttatgcccgcatgcgaatggggcaggcttgacgctcaacagggagaggcgatatggaaagcaggaagcaaatttattgtagaggctttgacaatgcaaaacgtgaatgattacatgttccatttgttgaacaaatactctaaaccttagatgtataaaccgacaatacctccaaatgtcacgaagctctgtttcgaaaccacagagcacggcctattgaaggagtgcatgcaaaacatggtgaagtgtcctagtgataaacttccatgtacattgccttccccatttaaaccttgaaccattactgcttctctcaaggcaaaagtaaaaatagctagacacgctgtgacgtgggagactgaatattgcaaaaaactgaaagcata

SEQ ID NO: 206664 - DNA, 503 bp, Gossypium hirsutum
catagctatatcatatgagggttgtaactcactggtggctgtgcacatagtgtgtgaagaggcttgctgctagaaggaaaacgctgtgcagtatcaatataggctgccaatactgatggcgatgtgacgtctgatgcggccaaagatgctacactaaatgctctagttgctgcttgctatggagctggtgcacaaacgtgcatggcactacacacactaggcattcatggcgactctcaatcatctgtgaatgacctggtacagggtcgcctaaagacatatagtgaatgctggactataacccaatgcagaccttgggacagtgattaacatacaggctagagaacgaatatgcttattcatataatctggagttgagagtgcggcagaactactgctagagggtagaaatatcgtggatacatgatatgagcaatgaaactttattggtccgacaattttaactggaggcacagctgacatggaatgctataacgaggaaa

SEQ ID NO: 206665 - DNA, 459 bp, Gossypium hirsutum
  unsure (1)..(459): unsure at all n locations
gngaaagaggatccaagactttttatgtgcggcggctgccacaacgatcaactttctagttccagcagcaggggagggcgagcctttggccccaatgctagcacccaaaagggcggaatctgctgaacatacagggatattgagattgaggggtttgccattttctgctggaaaagatgatataatggagttctttaaagattttgtgttatccgaagatgctgttcatatagtattgaattcagaggggaggccaagtggagaagcatttgtggagtttacaaatgcagaagattcaaaagctgcaatgtccaaggataggatgacacttgggagtcgttatattgagttgttcccttcattttctgaagagatggaggaagcaatttcaagaggacggtgattcttcagacaatgtcttntgttttattttctattctataccaggtatgatttctt

SEQ ID NO: 206666 - DNA, 496 bp, Gossypium hirsutum
cccacgcgtgcggaacaatgtcggtctcacttgaagctgcagctaccctgatgcaaccaatcaagggtgctgcaccatcaaggaccaatgtgctgctcaggtcctcccagagcgtttctaaggccttcggtttggagcctgttggtgctaggctcacctgctctttgcaaactgacctcaaggacttggctcagacgtgtgttgatgctaccaagctcgctggtttcgctcttgctacatctgctcttgttgtctcgggagcaagcgctgaaggagttccaaagcggctaacctacgatgaaatccaaagcaagacatacatggaagtcaaaggaacaggaactgctaaccagtgcccaaccatcgatggtggtgtcgactcttttgccttcaagcctggcaaatactacgccaagaagttctgcttggagcccacttccttcactgtcaaggctgatggtgttaacaagaatgcccctcctgagttgcaaaacac

SEQ ID NO: 206667 - DNA, 411 bp, Gossypium hirsutum
  unsure (1)..(411): unsure at all n locations
ggtgactatggctgggacactgctggtttgttagccgaccctgatgcctttgccaggaatagggctcttgaggtcatccatggaagatgggcaatgttgggagcactaggctgtatcacaccagaagtacttgagaaatggcttaaggttgatttcaaggaaccgggatggatcaaggcaggagctcaaattatatcagaaggtggcttggattacttacgcaaccctaacctagtacatgctcaaagcatccttgccgttctcggattacaagattgtactaatgggactcgtcgaaagattccgcatcaatggctcacctggtgttggtgaatgcaatgatctttatcctgagggacaatactttgaccctcttgancttgctgatgaccctggtacatgtgctgaact

SEQ ID NO: 206668 - DNA, 392 bp, Gossypium hirsutum
cttgaaatatgcatatatctaaatgacaagtacgaaattgatgggagggatccaaatgggcacgttggttgcatgtgggcaagatgcggcgtgcacgaccagggatggcgagaaagacccgtttttgggaaaatacgatacatgaactatgctggatgcaaaaggaaattcaatgttgacggatacacagcttatgtcaagagactagtcggtgaaatcaagaagagaaaagcagaaagcccggtgggtcaaaagataaagcagccgcgcaacgaacaacattaacatgtcgcggcctgtctgttgagaaactcttttatctaaactccatggctgtagtaccactaaccatattgtgttagaaatgacaatgacatgctaggttttttggt

SEQ ID NO: 206669 - DNA, 416 bp, Gossypium hirsutum
caaaactccaacactaaccgcttcggttttcacggaagctgtcactgagactgaaacaccatccgacttcatcattcctcagaaacctgaggaggtggtcaagcaagttggaaagccaagactggttttgaaattcatatggatggaaaagaacatcgggcttgcccttgatcaagtcataccgggccacggcactgttcctctaagtccatatttcttctggccaaggaaagatgcctgggaagagctcaaggccactctagaaagtaagccttggatttctcagaagaagatgattatccttctcaatcaggccactgatatcatcaatctatggcagcaaagtggtggcaacctttcccagagctagatgtgcattttttttatataattttttttgtcttagctatgcaaaa

SEQ ID NO: 206670 - DNA, 289 bp, Gossypium hirsutum
gccatacatggatactctggagtcgtagtcagagttactcccatgcgtactgagatcattatcagagccactcgtacccaaaatgttctgggtgagaaagggaggaggattagggaactgacctctgttgttcaaaagcgattcaagtttcctgaaaacagcgtggagctgtactctgtgaaggtcaataacagaggcctgtgtgccattgattaggctgaggaccttcgctataagctactaggaggtgtcgctgtccgtagggcctgatattaagtgcttacatttg

SEQ ID NO: 206671 - DNA, 486 bp, Gossypium hirsutum
gcacttaggaaccagaaaccaaggcaatggcttctcttgcaaccttagctggtgttcaaccaacgaccatcaagggccttggtggcagctctctcaatggaaccaagctcttggtgaagtcaactcgccagagtttcaaacccaaaaactacagggctggtgctgtggtagcaaagtatggtgataagagtatatactttgatttggaggatattggcaacacaactgggcaatgggacttgtatggatccgatgcaccttcaccgtacaacccactccagagcaagttctttgagacatttgcagctccatttaccaagagaggattgttgctcaagtccctgatcttgggaagcggttccctcggtctttacctcagtgccactgcttccgatgaccttctaccgatcaagaaaggtccgcaactcccacccaagcctgggccgcgtggcaagatataatttagttaaactctttaagcttttc

SEQ ID NO: 206672 - DNA, 454 bp, Gossypium hirsutum
gtgatttgcgggtggagaagacgagagctcatctctctgcttcaaagctcctgtccgggtagaattctcttcttgctttgcgttgcgttctttgttgttcaatcgccatggcttcaaagcggattttgaaggaactcaacgatttgcagaaagatccacccacttcttgtagtgctggtccagtaactgaagacatgtttcattggcaagcaacaatcatgggaccctcagatagcccttatgctggacgtgtgtctttagttactatccatttccctacagattattctttcaagcctcctaaggttgcgtttacgaccaaagtcttgcattccaacatcaacagcaatggaagcatttgtcttgatattctcataaaacaatggagccctggactaaccatttccaacgatctggtctcaatctgctcagtgctgaccgatccaaaccctga

SEQ ID NO: 206673 - DNA, 490 bp, Gossypium hirsutum
cactcccgttcggtactgctggattgctttatcttataaaattgattgcctgtcaaagatggtgctgcttattcacgtgcttatctggtcgatcctttcaccggactaagggcggcctctgttttggaagcaatcatgcaggccaacacctacattactatactcgcaagaaatggcgagcgaatgcaatgcatgcaggtgtggcctactactggaaagaagaagttagagactctgtcataccttcaagatcttacacccgtgcagttggctaaggaagtagattaccttcttagctcaaaatggcttacttgcttggaatacagaattagaggagggattcgcgcaccgtacatactctagactacccacgtactaccatggacgctactggaccatgtgaaagctgcctatgatcgggtgcaccgactaggctcaggtattgaaggagcttgaggaatgcaagaacgaataccgcaatgcattcatt

SEQ ID NO: 206674 - DNA, 458 bp, Gossypium hirsutum
cccacgcgtccggacggcttgtatcaacggatggtgcctaacctcctgtcttttcaccggggccaggtccaattttgggggtcggcgacgacctacattgcggccttcagtcgtcgctagccttaactcttctccttctactccgactcttatccaagaccgcccggtttttgctgcccctattcctttgctcaccccgagagaagagatgggaaacaagtgctacgacgaagccattgaagctctcaagaaacttctcagtgagaaaggagaactgaaagctgaagcagctgcaagggtagatcaaataacagcagagttaaacacagcatcagctgatggcaaaccatctgactcttctgttgagagactgaaagaaggcttcgtttacttcaagaaagaaaaatactgaaaagaattctgctctgtatggtgagcttgcctagggtcaaagccct

SEQ ID NO: 206675 - DNA, 476 bp, Gossypium hirsutum
  unsure (1)..(476): unsure at all n locations
cccacgcgtccggttggtcgaagttggggttatggaatctggttccgcttcaatgttcattgcactcatgatattcttttcgggaacgaaacgataccgatacaagaaatgttcgggaagccccattgtacatatttgccaagttgtttctgctgcatctgcgaaaaagacagctaaactcccttctgatatttccttgttgtatgaagatctccctgaggcatcacgaatccatcacacggatcagtttcgcttcctggacaaggcatctgttgtgacagaagatgattacagacaaggttccttcatgatgaacccttggaagctttgtgcagttacaagggtagaggaggtaaagaagatgatcaggctactcccgatttgggcaacaacgattatattttggacgacatatgcacagatgatcactttctcggtggaacaagcaaccaccatggagagaaccatangacatt

SEQ ID NO: 206676 - DNA, 461 bp, Gossypium hirsutum
ctactagtacccactactagcaatggctgcctaaatgatcgcatcggctaccattgccactgcctggtcggcacatgctaacatggtcacccctttcaccggcctcaagtctgcctctgctttcccaggcaccaggaaggccaacaacgacattacttatctcgcaagcaatggcggcagagtgcaatgcatgcacgtgtggcctcctactggaaagaagaagttcgagactctctcatacctccacgatcttacacccgagcaggtggctaatgaagtagattaccttcttcgctcaaaatgcgttcacttgcttggagttcgaattggaggagggattcgtgcaccagaagtactcgagcttacccacgtactacgatggacgctactggaccatgtggaagctgcccatgtacgggtgcaccgactcggctcatgtgttggaggagcttgaagaatgc

SEQ ID NO: 206677 - DNA, 482 bp, Gossypium hirsutum
ccctatcgtgcgacgctacattcttcaactcatgttacagtttaagctgcgacatatccagaccaagactcctgccgtaaagatgagcaatgcaaggcttatgataatggctggtgcaggctgcactggtgtgaagggtagcatgagaagaaagaagaaggctgtccacaagacaaccaccaccgacgacaaacgattgcagagcacccttaaaagaataggagtgaatgctatttctgcaattgaggaagtcaacatattcaaggatgatgttgttatccagtatattaatcccaaagctcagtgctactatagctgccaacacacgagttgtcagtggctctgctcagacatataactcgcatgataatgttcctggaatcatcacacataagggacctgattactgggacaacttgaagaaattggcatatctatttcagatacaagcacctggtgctggtgatcgtaccggtactggt

SEQ ID NO: 206678 - DNA, 463 bp, Gossypium hirsutum
gaactaggtaaattgatcatcgttaatcatatttattttatcatgctcaagaaagaaaggggactgctcatactttgcatggatggctattcactagatctggcactcttggcgtcaccagcattgacttcttcgacattccaaaggttcacccatctgtggcacccgacctgagatgctacggcgacacggatgcgccagatttgggcaccacttatacctgcttccatatactgggggatttggaacagctattaaatattatttcccctaactaacacaaagtgttggtagtaggacatgactggcgacctgccatattttctaatttgtgtttgtttacgccagacaaagagaaagctgtgttcaacctcagtgtgtgctttatttcacataatccacatatgaactctatttatgggtggagagctatttatgggaatgattataacatgtgtacatt

SEQ ID NO: 206679 - DNA, 486 bp, Gossypium hirsutum
atttttgtgaaaatgatactagcttatgatatttatactgtcaaactttgaaatacagaagctgtgttgtatggtagggtggaactcaacgaacaaacccggttgaacgttgctagcaccaacagggtggctgtggctagacctggttttaccgttagagcttaacatgttcctgccgagcctgaaactggacgcagagctgtgctgggtcttgttgctgctggtataagctactggctccttagttcaagctgtgcttgctgatgcacgaaacatcaaggttggcccgtcttcaccaccctccggaggattgccctgaactttgaatttcgatgagccaagataccttgatctggcgtacaaagatcggtttttcctccaaccatttactccttcacaagcgtgttacaaggcaaatgaataagtcaaatacattcttggtttgaaaatcttgatcgacaaaaaagcatagtcctatgttatgaa

SEQ ID NO: 206680 - DNA, 263 bp, Gossypium hirsutum
tagccttgtctggtgctcacacatttggcagagctcagtgtttaacttttaccagtcgattgtacaattttacgggagtgggtgatacagatccgaccttgaacgccacatacttggaagaactacgccaaatatgcccacagggtggaaatagtagtgtgttgacaaatcttgatcccacaacacctgatggtttcgacattaactacttaaccaatttacaggttattgaaggttggtttggaattgttaaaatttatttt

SEQ ID NO: 206681 - DNA, 503 bp, Gossypium hirsutum
  unsure (1)..(503): unsure at all n locations
acgcctgcaggtacggnnnaattttctggtcgacgccacgcgtccgcccacgcgtccgataaattaaccgtccaactacaataaaaaggaaaatccggaaaaaaaaatcgtgggaatagggataaggtgaagataggtgggattagcggaggctatgtttttaggagtagcagtgtatttcacgctctgggctattcattactctatctcttatgatgatgccgagttgctaaggagacagtttgatcttgcaaacaaagaggcaatggatgaatctgcagagtggaggctgagatttgatgaagaggcaaacaaggcttgcaagtgtgccaaggaactagacgacgagcaaagagtctattggaaagaatggagattgcactggctgtgacgaaaaactgatgctgactgaaaaggaaaatgctgctttactcaagcaagtggaaacgttaaaaaatgagcttgaggcagagaaacagatgtgtcacacatagtagacaaac

SEQ ID NO: 206682 - DNA, 394 bp, Gossypium hirsutum
accactttgatcaatccttaatttcccaatttcttctgaaaccctaatcctaaattgatcccccagcttcggtgttccaatggccactgaggaaccaactgtcgccgtggaatctgcgcctgagccggcggaagagaaccccgctgaggctacagccaatcccaaatctggcaaagcaaagaaagctaaagagcccaaagccaagaaggctgcagctcctaggaagccacgagcttctcctgctcatcctccttacgaagagatggtcaaagatgcaatcgttactttgaaggagaagactggatcaagtcagtatgctatcactaaattcattgaagagaaacagaagaatcttcctggaaattttaagaagcttctgcttttccatttgaag

SEQ ID NO: 206683 - DNA, 471 bp, Gossypium hirsutum
gagagacgaggcttgtttgcttggcacctttgttatatctctaaaaacacttgtacaagggtgggggtacaatatgaacgcggctgtggctgatgcagcggactacaatggacaccctgctaacaagtctagaactggtggctgggtacctgctgctctcaactaatgaattgaaatatgtgagaggctgtcaacaatgggaatagcatagaaccttgtgacttacttgggtggaaccatgcaccttgcaagcgctacttctgcaaatgttgtaacagacttcatggggacatcatttctactatgattactgggcggctctctagccgattgatactagagcagataccgaacgatcgctatattctccatggatcagatgcttgggacttgcctgctaacagaatctacgaaactcccacaactacggtcaccttcgtcaagtataccgacgtaacacaatgcgaacaa

SEQ ID NO: 206684 - DNA, 402 bp, Gossypium hirsutum
cccacgcgtacgatggcctctactttctgtcaaaatctctgtttgctttctctttttgtgctcttggcagttttctcggctgagcctatttcccattggaagaaccaatctccaagttctagccaggcaaagttacaggctgaaaagctcataagatgacttaatatggtccctaaagatgctattaatgctggtgacaatgcccctgcagttgagacctccaagattgttgaaaagcaattcacgttcctcagtgcttggggaacctgggccttccattcaggagtttgagtcaccatgctgggtactataaacttacacatgctgtatctgcaaggatgttttaccttttcttcgaatgacggaacagcaagaaagaccctgtcgtgatttcggtgactg

SEQ ID NO: 206685 - DNA, 443 bp, Gossypium hirsutum
gagggtatcatgagggaggctctcttagacttttatacacgttcagggaagaggaagcctgatcagatcattattttcagggatggggttagcgagtctcagttcaatcaagttttgaacaaagaacttgatcaagttattgaggcttgcaagttccttgacgagaattggaaccctaagtttgtggttattgttgcacaaaaaaaccatcataccaagtttttccagcagggatctcctgacaatgttttacctggtactgtaattgacaacaaagtatgccatccgaagaacaatgatttttacctttgtgctcatgctggaatgatagggaccacaaggccgacccactatcatgttctcttagaccaggttgggttttcagctgatgatctgcaggagcttgttcattctctatcctacgtgtatcaaaggagcaccac

SEQ ID NO: 206686 - DNA, 460 bp, Gossypium hirsutum
cccacgcttccgcccactgttccgattaaacgttttgcccgggctctctagatcagttgtaagacaagaacaatgtggagataatgtaacacaaaactagaggttgcaaatacgcttaaacacacaaaaggggaaacgttcctgtgagacacctaggggtgaatatctttggtagtgccaaatatagagtctttggattcccttagaccttaatctaccacttagaaagcgtcggtctggatagcatatgcattagcaaggacaagggcagcttgcattaaatatttgacagccaatgcgaaccatgtgcacatgctgtggctctgcaacaagcatgtatacatattccaacaacttctcaatggtcatcttcggtggctcgcaagatggtggccctcacctcgagttcacgagctttctaccgacaccatagactacgacctctccgatccatattctc

SEQ ID NO: 206687 - DNA, 474 bp, Gossypium hirsutum
  unsure (1)..(474): unsure at all n locations
cccacgcgtacgaccacgcgttcggtaatatggatttcctgaattggttaatgtactttgttttctccttgatattgtttcaagctttccatttgatcacaagaaggaaattgggaagatcccataagcttccgcccggtccaccaacaattccgatcttcgggaaccttttccaggttggtgataaaccccataggtcccttgccaaacttgccaagattcatggggacatcatgactctgaaacttggccagactactaccgtagttttttcatctgcaacaatggccaaagaaatcttccaaaagcatgatgccgtatcttgtaaccgaaccattcccgatgcccttcgtgcccttcaacatcacgaagccggattgccttggatgcctgtttcaaccacatggagaaatcttangaaaatctgcaatgngcatattttcgctactcataaacttgacgctgatcaatact

SEQ ID NO: 206688 - DNA, 395 bp, Gossypium hirsutum
cgccatctctcaagacaatggattggttacaattgttgagccagagatcttgcttgatggtgatcacggaattgacaggactttcgaagtagccaaaaaggtatgggctgaggttttcttctatcttgcccagaacaatgtgatgtttcaaggtatcctcctcaagccaagtatggtcactcccggtgcggagtgcaaggacagggctactcctcaacaagttgctgattacaccctcagcctactccgccaaagaatacctccagctgtccctggaatcatgtttttgtctggtgggcagtctgaagttgaggctaccttgaacttgaatgcaatgaaccaagctccaaacccatggcatgtgtcattctcatatgcaagagcccttcaaaaca

SEQ ID NO: 206689 - DNA, 500 bp, Gossypium hirsutum
  unsure (1)..(500): unsure at all n locations
cccacgcgtccgctcangttatctcatctcttaccgcatctttgaggtttgatggagccctgaatgtggatgtgactgagttccagactaacctggtcccatatcccaggatccactttatgctttcttcttatgcccctgtcatttcagctgagaaggcttaccatgagcagctatcggtggctgagataaccaacagagcttttgaaccctcttcaatgatggccaaatgtgacccacgacacgggaagtacatggcttgctgtcttatgtaccgaggagatgttgtgcccaaagatgtgatatgcggctgtggccaccattaagaccaaacgcacaatccaatttggggattggtgccctactggattcaagcgcggtatcaactaccagccaccaactgttgtttcatgaggggaccttgccaaggttcaaagagctgtctgcatgatcttcaactcaaccagccttgcggaagtgtttcccgcatgatcataaat

SEQ ID NO: 206690 - DNA, 454 bp, Gossypium hirsutum
gagaaaggcaagaccttccatggagagaggattcgaatatgtaatagtaggaggaggtgtagcaggtggatatgcagctcttgaatttactaaaagaggggtttctcatgctcagctctgcattatatctgaagaaccagttgccccatatgagagacctactctaagtaaaaaatttctacatcctgaatctccggcacgccttccatcatttcacacttgtgttggtgctaatgaggaattgttaactccgacatggtacgaggaacatggtatcgaattagtccttggaactcgagttgaatctgttgatgtcggacagaaaacgctattgacagcttccggcgagactatgcgttatgaaaccctcatcattgccacaggggctaaggctttaaagctcgaagaattcgagtgaaaagatcggaagcggaaatgtatgtatgtacgagat

SEQ ID NO: 206691 - DNA, 429 bp, Gossypium hirsutum
aaagaaaatggcactcctttgtgcttcaacctcagtcatcttctcttcttcttcttcttcagagaggccttcctttgcttcattgaaaaggactagtcccagtaaccaaagctcatttcttgggttcttccctgtagtggcattgtccaaaccttcttatgctcggacaacaaccttgtctttctccaaacgggatttcaaggtttgctgccgggacctatctcttgtccctgaaaaccaacgttggatgttcgaggaatccgaggctgatggccctgacatttggaacaacacatggtatcccaaagctaaagaccacattaataatgaaaaaacatggtatattgttgatgcaactgacaaacattctggaagactggcatcaacaattgctgtgcatattcgtggaaagaatttgcccacttatac

SEQ ID NO: 206692 - DNA, 433 bp, Gossypium hirsutum
accacgcgatccacggtgtgaggcacctggtccatgtcttgaaccaattctgataatctcgggcgtactatcatgtggcagctactgcagtaatcaccactcttgcgtagttcaccgggttaagacccaatgctgctactgctccagctaggagcctgccaacagtgcaaccagtgaagggcacggggaaggctgctcttcatgcacgatgagattccatagaatctaccacagagactacaacggcgactacaacaacccttatgctgtttgctgtgacgccaggattggctacatcagccaacagaaaggccaccgctggattgaagctcgtaggcagggactcaggcttgcatactggtgacacagttggtttcacacttgctgacactttggcttgccatattgttggccatattatcggtgttgggat

SEQ ID NO: 206693 - DNA, 360 bp, Gossypium hirsutum
gtctttctggcaacatgggttcaccaccactttggattctgcttctgggtgtgttgtttatggcttctggaacaatcgcagctccccctaggaagcctgtagatgtcccattctccagaaactatatgcctacttgggcttttgatcacattaagtatttcaatggtggctctgagattcagctccaccttgacaaatacactggtactggtttccagtccaaaggatcatacttgttcggacacttcagtatgcaaataaagctagtccctggagattctgcggggactgtcactgccttttatttgtcttctcaaaactcagagcatgatgagatagattttggagttctgggcaaca

SEQ ID NO: 206694 - DNA, 401 bp, Gossypium hirsutum
  unsure (1)..(401): unsure at all n locations
cggacgcgtgggtttgtgtgtgtcaggggatgttactttcaagtcggggaaaaaatcgaaaccaagatgaccatagaacatgcgtatcagaggtctttggagactgtgatgcagtggctacgcaacgaggtgaatatgagtaagaccaaggtctactttcgcactttcgctcccgtacatttcagaggaggggattggagaaccgggggaagctgccacctcgagactttgccggagctgggaacaacattagtgccatcggaaacttgggagcttctcgaaatagtaaaggatgtgttatcacctcactcaaacacattccatggaataaaattcgacatattaaacatcactcanatgacagcaccaaggaaagacgggcacgcgtcggtatactattt

SEQ ID NO: 206695 - DNA, 381 bp, Gossypium hirsutum
ctctacaccatggctctttcttccccatcattcgccggtaaggcagtgaagttctccccttccacccctgaaatccggggaactggccgtgtttccatgaggaaaaccaccaagcctgttccttctggtagcccatggtacggtcctgaccgagttttgtacttgggtccactttccggtgagccaccatcttacttgaccggtgagttccctggtgactatggttgggacactgctggactctcagctgatcccgagacctttgctaggaaccgtgagctcgaagtcattcactgcagatgggccatgttgggagctcttgggtgtgttttccctgagctgttggctatgaacggtgtcaagttcggtgaagctgtatgg

SEQ ID NO: 206696 - DNA, 408 bp, Gossypium hirsutum
attgtttgtttttgggttaaaagctctgtttttttattacccttttcataaaaagcttcaatctttcgaccatgttgcttaaagcttcccctgctttttctttgttgaagaatccccaagttgaaactcgggttcctctgttttcaagaaacggttctgggtttgggtctggggctgttgttgtttgtgctaccaaaggagccaataataagccattaacaggtgtgatttttgagccttttgaggaagttaagaaggaacttaatcttgtcccaactgtgcctcaaatgtccttggctcgtcaaaagtttgctgatgagtgtgaagctgccatcaacgaacaaatcaatgtggagtacaatgtttcatatgtctaccatgctatgtatgcctattttgatagggaca

SEQ ID NO: 206697 - DNA, 371 bp, Gossypium hirsutum
gagattagattatagtgaaaaactaaacataataaagccccttcgacttgcttcattgaggtgccctctcaaagcccaagaaaaatggcttctgcttccgctactctcctcaagtcttcacctattatcgacaagtccgagtggattaagggccaaaacctccgccacccttcggtttgttttgtacggtcacaccctacatcggccgcctttgccgtccgtgctagttcatatgccgatgagcttgttaagaccgcgaaaactgttgcatctccaggtcgtggtattttggccatggatgaatcaaatgctacatgtgggaaacggcttgccttgattggtctcgagaataccgaggcaaaacggcaagc

SEQ ID NO: 206698 - DNA, 429 bp, Gossypium hirsutum
tccacgcgtccggcccgtgacaagaactggtctttcagggattaggattctagaggatgaggatgctgccccatcgcgtaggcctttgaagagaatgagttcaccggagaggtgggaagccaaacagttgattgcttctggtgttttgagactagacgagtatccaatgtatgacgaggacggagatggaatgctttatcaagaagagggtgccgaggaagagttggagattgagatgaatgaggatgaacctgcctttttacaagggcagactaggtactctgtcgatatgtcaccagtaaaaatatttaaaaatccagaagggtccttgagtcgagccgctgctctccaatctgcacttattaaagaacggagagaagtacgagagcatcagcagaggacaatgctggattcaaatccaaaagatct

SEQ ID NO: 206699 - DNA, 353 bp, Gossypium hirsutum
gggaaaggtaaatctggattattgggcagagctttggctgatattggacagcatatgctcatggtgactgcaatggttgtaattatgctgggacgtttcgaccaccgaagtgtcagcttggttgcggccaaccaacccaaagatggtaccatgttcctcggtcttggttgaaacctacacagaatctgttggttctttttgaggagctgggaggagaccccacaagaatctcacttgtaaaaagatctgtgtccagcgtttgtgccgatgtcactgagtatcacccgaatattaagaactggcagattgaaagctatggaaaggcacaacagtttcgcagaccaaaagttcac

SEQ ID NO: 206700 - DNA, 456 bp, Gossypium hirsutum
ctccaccaccaacatagttccaacattttcataacattggctgcagtcacaaacgccgctggtacatcctccttcatggggacacgcttccccgacgtctacacaagttcagggagattcgtcgccaggtttggttttggcggcaaaaaaagcagctcccaagaaagcctcgaaacaaaccttcgaccgccctctatggtacccaggagcggtggctcctgattggctcgatggaagcttggtgggtgattacgggttcgacccgttcgggttagggaaaccagcggagtacttgcaatatgatttggattctttggaccagaacctggctaagaatatggctggtgagatcattggaactaggaccgaactttccgacgttgaggcgactcccttttagccttacagcgaggtttttggtctacagaggttagggagtgtgaattgatccatggg

SEQ ID NO: 206701 - DNA, 312 bp, Gossypium hirsutum
cgtccgtgatgacccagaggcattcgcaagacccaatgggtgggagatcatgatcggtcgggtggctatgttctcaatgttcgggttcttcgttcaggccatcgtgaccggtaagggaccattggagaacttggctgaccaccttgctgacccagtcaacaacaatgcttgggcctatgcctccaactttgtccccggaaagtgaacttagagagtgaaaagggattcgtcttgttcatgttattattcggtggtgtgaaagtaatatcgttgcacaattcaatgaaagcagattgtgaattctgtgtgctc

SEQ ID NO: 206702 - DNA, 335 bp, Gossypium hirsutum
gctgcagctaccctgatgcaaccaatcaaggttgctgcaccatcaaggaccaatgtgccgctcaggtcctcccagagcgtttctaaggccttcggtttggagcctgttggtgctaggcttacctgctctttgcaaactgacctcaaggacttggctctgaagtgtgttgatgctaccaagctcgctggtttcgctcttgctacatctgctcttgttgtctcgggagcaagcgctgaaggagtttcaaagcggctaacctacgctgaaatccaaagcaagacatacatggaagtcaaaggaacaggaactgctaaccagtgcccaaccatcgatgg

SEQ ID NO: 206703 - DNA, 409 bp, Gossypium hirsutum
gcgtccgtccacgcgtccgtgaaaacattttcattttcaaaccccactccccccatggctggtctcaagcttatttgtggcctagtattgttgtgcatgttggttttggaacccatggccacaactgctctcacatgtggacaagtggcaagccaaacgggtagttgtataaggtatttgcagcgtggagggaaccctccagctgcttgctgcaacggagttaggaacctaaacaggcaagctagaaccacccgtgaccgtcaaactgcatgcagatgcttgcaaactgccgctaggaccatctccggtatcaatactaaattggctgccggtcttccggccaaatgcggtgtcaaaattccttacaagatcagcccctccaccaactgcaatagagtgagatgatcat

SEQ ID NO: 206704 - DNA, 368 bp, Gossypium hirsutum
gtctgtctctctgttttactccacaaccactatcactaccattatggcttcggctactgggtctgtagccaaacccaaccttcagattcaggcaaaaggaaagggtgttggttttgcagatttctcaggcctacacaactcctctactagccttccctttgccaggaaaacctctgatgacttccattcactcgttgcttttcagacatctgctctaggaagcaataatggcgggtacaggaaagggatggcagaggcaaagctaaaggtggctataaatgggtttggtaggattggcaggaacttcttaaagtgctggcatggccgtaaagacttcccacttgatgtcattgccatcaatgacactg

SEQ ID NO: 206705 - DNA, 447 bp, Gossypium hirsutum
taatatcattacatggttaccaaaaattcgactatgtcgaaggtttcgttattgtagacgaagttctcatcaataattggagatcgtcctttttttcacctcgaaaccctgtcaaaatttcatcccttggttccaacaacaatggcggcgttttgtattgcttggaaattaccaaaaactaccacgaatctacggccgagaccatcgatcaggaaattgaggctttgttgaagaaattaaattttatacccacatcagtgttcacaactgatttaccatatgtggatttcttagaccgggttcacaaagccgagttaaagctccggtctaagggtatgtgggaggttccacatccatggttgaaccttttcgtccctaaatcaaagattgccgattttgatcgaggggtcttcaagggcattttgggaaataaaactagtgggccta

SEQ ID NO: 206706 - DNA, 440 bp, Gossypium hirsutum
ctccaggttgccggagacttagctccatcacggttctttcaacctgcgagagaacacatcacacatttccaccagaacatcattccgacatcgttcaacggtgaggaggccttgtcgccttcccggcaaggttgacaacctcctcgtcttccacgttttcggatgccaacgactgaatatcccaaaggctgacgaacttgctgctgaatgtgaatatatagagcagcttggcgccagtccatgtgattatgccatcagataatacagtgaatgatttaatcaaagctgctatagaaatttacgtcaaggagaatagaatgccattgttagaggaaactgatcccaagttttttcaaattcactattcgcagatctgcctggaaagtttaagaacaggggaggagctgatcaacttgggatcgaggaatttccttttgggt

SEQ ID NO: 206707 - DNA, 377 bp, Gossypium hirsutum
ccacgcgttctgccacgcgtccgcggacgcgtgggggcttccatcaacggttggtgccttacctcctcttgttcctccaccaccacctgctctttttccgctcgtcgacgacctacattgcggccttcggtcgtcgctagccttaactcttctccttctcctccgactcttatccaagaccgcccggttttcgctgcccctgttcctttgctcaccccgagagaagagatgggaaacaagtcctacgacgaagccattgaagctctcaagaaacttctcagtgagaaaggagaactgaaagctgaagcagctgcaagggtagatcaaattacagcagagttaaacacaacatcagctgacggcaaaccatctgactc

SEQ ID NO: 206708 - DNA, 418 bp, Gossypium hirsutum
atcgtgttattatccattatatcttgtctccccacccttaaaccatgtctgcttttgtgggcatgtatgcagaggagttgatcaagaacgccaactacatcgccacgccaggcaaaggttttttggcggcggacgagagcacaggcaccatcgggaagcgtctctcgagcatcaacgtcgagaacatcgagtccaatcgccaagccctccgcgagctccttttcacctctcccaacgcattatcctgcctctccggtgtcattcttttcgaggaaacactttaccagaaaacatctgacgggaaacccttcggtggaaatcctcgaagagaacaatgtcattccaggtatcaaggtcgataagggcaccgttgagatagccggcaccaatggcgagaccaccactcaagggttcgact

SEQ ID NO: 206709 - DNA, 453 bp, Gossypium hirsutum
tcgggcacttgcacatgggttagtcgttcctaagagacgggggtagcccgtccgacagcgcgtgcagcgcgagcttcgaaagggaatcgggttaaaattcctgaaccgggacgcggcggctgacggcaacgttagggagtccggagacgtcggcgggggcctcgggaagagttatcttttctgtttaacggcctgcccaccctggaaacggctcatccggaggtagggtccagcggccggaagagcaccgcacgtcgcgtggtgtccggtgcgcccccggcggcccttgaaaattcggaggaccgagtgccgtccgcgcccggtcgtactcataaccgcatcatgtcttcaaggtgaacagcctttggtcaatgtaacaatgtatgcaagggtagtcggcaaaatggatccggtaccactggaaaaggattggctcttaaggcttggcacggg

SEQ ID NO: 206710 - DNA, 371 bp, Gossypium hirsutum
cgaccttgcatcccctctccctgctttgctctgaaaagtccaagtttttctccaatggcgaccgtctctccaactcctctgttgaaagatgagctcgacatcgtgattcccacgattaggaacttggactttttggagatgtggagaccctttttccagccttaccatctcatcattgttcaagatggtgatcctaccaagaccatcaaggtccctgaaggcttcgattatgagctttacaataggaacgacatcaacaggattttgggtcctaaggcttcttgtatctctttcaaggattctgcttggtagggcctttgggtacatggtttccaagaagaaatacatctattccattgatgatgactgct

SEQ ID NO: 206711 - DNA, 410 bp, Gossypium hirsutum
tacataagttggaaatgcttataattcattgttgattgccattaataacatacataagttggaaatgctattaattcattggtgatcttttgatggtatttggtctaacaggctatcatcatagcggcggaggatacaacgtcagttactctgacatgggctttgtctttttactcaataatcgtgacacattatgtaaggtccaacaagaactagatgttaaggttggtaaggataggttggtagtgacggaatcagacaccaaaagcttagtgtaccttcaatccattattaatgaaacgctacgcttatattctgctttttcactatccctgatccatgaagccattgaagactgcacagataatggatatcatgtttcaacttgcacttggcttattataaaactt

SEQ ID NO: 206712 - DNA, 450 bp, Gossypium hirsutum
cccacgcgttcggatgatgcaacatccagcacaagctatggtaccaccaccaatggctccacagacccaacagtaccaatatcagcaaccacctccggctccggttcctcaggcacaacaaccttacatgatgatgaacatgatgcagccgcctcagagtcatcctccacctatgtggcccccacaacaaggttcggctggggtacctgctcaacaacagccagctggtcaaccggctaacgcagatgaggttcggactttgtggatcggagatttgcagtattatatggatgagaattatctcttgagctgttttgcccaaactggagaggttgcttctgtaaaagttatccgcaacaagcaaaccggtcaagtggagggctatggatttattgagtttgtttcaagagctgctgctgagagagttttacaaacatacaatggtacacc

SEQ ID NO: 206713 - DNA, 271 bp, Gossypium hirsutum
ctggactctcagctgatcccgagacctttgctaggaaccgtgagctcgaagtcattcactgcagatgggccatgttgggagctcttgggtgtgttttccctgagctgttggctaggaacggtgtcaagttcggtgaagctgtatggttcaaggccgggtctcaaatcttcagtgagggtggacttgactacttgggttacccaagcttgatccatgctcaaagcattttggccatctgggcttgccaaggttatcttgatgggagccgtcg

SEQ ID NO: 206714 - DNA, 353 bp, Gossypium hirsutum
cccactcgtccgcggacgcgtgggtttagctatagcatacactactagtacccactactagcaatggcttcctcaatgatctcatcggctaccattgccactgcctctccggcacaggctaacatggtcgctcctttcaccggtctcaagtctgcctctgctttcccagtcaccaggaaggccaacaacgacattacttctctcgcaagcaatggccgtagagtgcaatgcatgcaggtgtggcctcctactgggaagaagaagtttgagactctctcatacctgcccgatcttacacccgtgcaattggctaaggaagtagattaccttcttcgctcaaaatgggttccttg

SEQ ID NO: 206715 - DNA, 417 bp, Gossypium hirsutum
cccacacgtgcgaaaaaatttccccttttcgattcaatcatgagtaacgaatatgatcatgtgttcaagcttctgcttatcggcgattcctccgtcggaaaatcctgcttgcttctcagatttgctgatgattcttatgtggatagctacatcagttccatcggtgttgatttcaaaatcagaacagtggagttggacggcatgacaatcaagctgcaaatttgggatactgctggacaggagcgttttcggactattactagcagctactaccgaggagctcatgggataatagtcgtctatgatgttaccgagatggagagcttcaacaatgtcaagcaagtggttgaacggagaatgacagatatgctaatgacagtgtatgtaagcttctggttgggaaccaaatgtgattta

SEQ ID NO: 206716 - DNA, 425 bp, Gossypium hirsutum
tcggcttgttgttcacatcaccaagaacttcatgacccttcctaacattaaggttcctcttatcttgggtgtttggggaggcaaaggtcaaggaaaatctttccaatgtgagcttgtctttgccaagatgggaatcaaccccattatgatgagtgccggagaattggaaagtgggaacgccggagaaccagccaagttgatcaggcaaaggtaccgtgaggccgtcgacattatcaagaaagggaaaatgtgttgcctcttcatcaacgatctcgacgctggagccggtcgtatgggaggaaccacacaatacacagtgaacaaccaaatggtgaacgccacactcatgaacatcgctgataacctcaccaacgttcagctccccggtatgtacaacaaggaagagaaccctcgtgttccgatca

SEQ ID NO: 206717 - DNA, 437 bp, Gossypium hirsutum
acgatttttcaactcaaaatcaattcccattgacaaacaatggcttccatgcctagctctggagttgttcttaggccaaccccatttcttggccaaaccaaaaatgctaaccctcttagagatgttgtctctttgggcactcccaaatatgcaatgggaaatgaactatggtatggaccagacagagtgaagtacttgggaccattttcagctcagactccatcttacttgactggagaattccctggtgactatggttgggacactgctggtttgtcagccgaccctgaggcctttgccaggaatagggctcttgaggtcatccatggaagatgggcaatgttgggagcactaagctgtatcacaccaaaagtacttgagaaatggcttaaggttgatttcaaggaaccggtatggttcaaggcaggagctcaaat

SEQ ID NO: 206718 - DNA, 356 bp, Gossypium hirsutum
caatgttatctatgactggtttacgtggctcttcacaagctgggttggaaggtaatcttcaactcagcggccaaacccgtctgaacgttgctagcaccaacagggtggctgtggctagacctggttttaccgttagagcttaacaggtccctgccgagcctgaaactggacgcaaagctgtgctgggtctcgttgctgctggtttggctactggctcctttgttgaagctgagcttgctgatgcacgaagcatcaaggttgggccgtcttcatcacccttcggtggattgcccggaacttttaattcctatgagccaagatacctttatcttgcgtacaaagatcggttttttctt

SEQ ID NO: 206719 - DNA, 419 bp, Gossypium hirsutum
tcgcctgtctccaatggcggctgccgtcttcaccatcggtgctgtcaaccgagcaccgttgaggttgaatggatcaggtgccggagcttctgctccaagctcagctttcatggggaacagcttgaagaaagtgagcgctaggttcaacaacaacggcatggctccagtgggaagtttcatgattgtggctgccaaagaaatcgacgaagacacacagaccgtccaggaccgatggaagggtcttgcttatgatatctccgatgaccaacaagacattaccagagggaaaggtttggtcgactcattgttccaagcttccatgaacgaaggtactcactatgctgtcatgagctcctatgagtacatttgccaaggccttctcacatacgacttggacaacaacatggatggattctaca

SEQ ID NO: 206720 - DNA, 447 bp, Gossypium hirsutum
attcgctggactctcatctgatcccgatacctctgcttggaaccgtgagctcgaagtcattcactgcagatgggccatgttgggagctcttgggtgtgttttccctgagctggtggctaggaacggtgtcaagttcggtgaagctgtatggttcaaggccgggtctcaaatcttcagtgagggtggacttgactacttgggtaacccaagcttgatccatgctcaaagcattttggccatctgggcttgccaagttatcttgatgggagccgtctagggctaccgtattgccggtggaccactcggtgaagtgactgacccattgtacccaggtggcagctttgacccattgggtcttgcttatgacccatatgcattcgctgagctcaaggtgaaagagatcaaaaaacggttggttggctatgttctcaatggtccggttctttc

SEQ ID NO: 206721 - DNA, 344 bp, Gossypium hirsutum
cccacgcgtccggtcaaacgttgggtcacgcatacgtccacgctttcgcgttgaatggctcactggtgttacatggcacgatgctggcaaggtggagttagttgaaggttcatctgatctaggcacaacccctgtccttctcgatggcatcattgattggtatagaaatattggtgatcggattcatcgagttccaataggaacgcccatcttgaccctgataagaggctgtaccccggacgaaagttctttgatcctctcgatctagccgacgaccctgagaaggatagcaccctatcaatcggctgatatcaatcatgctcatcctaccatgggtgctttct

SEQ ID NO: 206722 - DNA, 444 bp, Gossypium hirsutum
tcttccactcgtccggttgagttgagccatggttcttatcttcaatccttcatacaattcttacgacctttgtctttggcccatcccctaagctttccccttctatctcttcaccccaacgctttcccttcttaaccaaacccctccgacccaatgccttcaatctctcaacatcatcatcagctcctgatcagaaatggagggttaacgtttctttcttcccagctttttttaacaaaggcaaggacgctaaggttctcaagcaagaccttcttgattgcattgcaccacttgaccgatgtgccgatgccacccccgtggaccagcagagagttgatcagtttgcaagcaaacttggagcagttaatcccacaaagcagcctctgaaatctgatttactaaatggaaaatgggagcttatttacaccacttccaaatctaatt

SEQ ID NO: 206723 - DNA, 354 bp, Gossypium hirsutum
cttaattcccttgtttgcctatgcgttcgtccacgcgttcttattagcattcttctccagtgtttgcaacaaaatctctagtaggtcagggacattatcagcttctcctcgattctctcctttatatttctcttctcaacctcgtctctcactcttcagctccactcccatttctcactacgttaaaaatctaccagctattttggccatggattcttctaaagctggtacagtgaaggaattgccagtggggctagatgaagctaccgaggataaatatgcttcccagcggaaataacttcaagagtttactaatatctcttacatcgacaaggcatgggtttttaaggcttg

SEQ ID NO: 206724 - DNA, 374 bp, Gossypium hirsutum
gttgcctgctcggactctagggtctgcccatctcatgtgctggacatgcaacctggtgaagcttttgtggtccgtaatgttgctaacatggtgccaccatatgaccagattaaatatgctggcattggatctgctattgaatatgcagttttgcatctcaaggtacaagaaattgtggtgattggacacagtgcctgtggtggaatcaaggggcttatgtctttcccatttgatggaaacaactcaactgatttcatagaggattgggttaagattggaatccctgctaagaccaaggtgctagctgaacatggtggtgagcctttgggagtccaatgtacacactgcgagaaagaagcagtgaatgtattcct

SEQ ID NO: 206725 - DNA, 344 bp, Gossypium hirsutum
caaaacgaactgcttcacaaaggcctatacaaccatggatctttcataaccatcattcgccggctaggcagtgtagttcttcccttacacccctgaaatccaaggaactggccgtgttttcatgaagaaaaccaccaagcctgttccttctggtagcccatggtacggtcctgaccgagttttgtacttgggtccactttgcggggagccaccatcttacttgaccggggagttccctggtgactatagttgggacactgctggactctcagctgatcccgagacctttgctaggaaccgtgagctcgaagacattcactgcacataggccatgttgggagctc

SEQ ID NO: 206726 - DNA, 361 bp, Gossypium hirsutum
agctcgcgtgcagaacaagtgtattcaccgtgggagaaaagcatagttttcttctttctttctttgcgtacgggcaaatcatctttggcagcttacataaccagtgaccaaggactagggggctggcaaatatcatttcagcctaatacttacatgcttgcaattggttctactgagcaagaaaatgatgtacctggacgcactcataaaacaatggctcctaaaaatcttcggctttatatgataaagactacccctcgacgagtggatgaacgtggcatctatgattcctggaaaaacacatggggatgtcatcaagcagtacagagaattcggagaagatgcgagtgatatatatgct

SEQ ID NO: 206727 - DNA, 404 bp, Gossypium hirsutum
agctcttgtacattcagggagtttgtccctttgccaaaagagatatttcatgataatggtacaaatgagatgaaagctgctcaaaattatcctcggcatgttgctgtgcatgtcctagatggaagccttagaacatgtgttcaaaatccttccctggctgcatcggcaactactgaacatcagaataatgcaccaaaatctactcatcaggcattgccaccttttcatattccctttatacatcttcggcccgatcaagaggagtatcgatcatttctacatgtctcctccactttttccaatctcattgtatctactttgttacagaatccagctgctcatgctgcagcaaagtttgcagctacattttggccatatgcaaatgttgaaagttcttggcgatt

SEQ ID NO: 206728 - DNA, 243 bp, Gossypium hirsutum
tcgtccacgcgttcggagcgaacatggtgatagtatgtaatgtcttgcacatgacgggtgtgcctcatgcccttgcgagtgccggtgctgctatagtattcggatcgagcattcacttcacgggaggattagctagggaatctcttaacaaaaatatcatcattaatctccatcctgtattgatgttgaatggcttcattatcataggaggtgaagccattatgagctacaagtctttgccac

SEQ ID NO: 206729 - DNA, 427 bp, Gossypium hirsutum
  unsure (1)..(427): unsure at all n locations
nccacgcgttcggccacgcgttcgcccacgcgtccgagaaatttcaagaaactgctctctgtgtcttaacgctataatcattgaagaaaaatgggtttgaaggaggaattcgaggagtatgcggagaaagctaagacccttccccagaacactaccaacgacgacaagctcattctctatggactctacaagcaagctactgttggaccagagaacaccagcctgcctggaatgttcaacatgaaggaaaagtacaagtgggatgcatggaaagctgttgaagggaaatcgaatgaggaagcaatgaacgattatatcacttatgctaaacagcttgcagaggctgctgctgcatcttcttgacgtgtgtgtgagaatagaaaaatggtgaaattntcaagcccttttgatacctatgggcgttgaa

SEQ ID NO: 206730 - DNA, 133 bp, Gossypium hirsutum
tgaggaaaatcatgggtgccaaagttctcggcatctttgcttagctttccttgtcagctgagttggcatttgcacaggatgaggaagaccaatgtcttgttatgaacttctacaaggattcttgtcctcaggc

SEQ ID NO: 206731 - DNA, 340 bp, Gossypium hirsutum
acgattgacccttatttcctgccttagttacattgaaggcgggactctaaaactactgggttgggccaactccagcgaggaggcggaaaaaacaaagcaaattgataaaatggcaacacaagcacttgaaaaatcatctcttacctactcagtggagactgcaaggcagattcttggagctaaacgacaaatagggccttcaaggaaaggaacctttgtcgttaaggcaggttcgacttcacccgttaagcaaggaactgatagacctttatgggttgcatctaaacaaaagcctttcatacttggaaggcaagccttcaagtgaataaggaatttgacc

SEQ ID NO: 206732 - DNA, 354 bp, Gossypium hirsutum
cccacgcgtacgactatcactaccattatggcttcggctactgtttctgtagccaaacccaaccttcagattcaggcaaaaggaaagggtgttggttttgcagatttgttaggcctacacaactcctgtactagccttccctttgccaggaaaacctctgatgacttccattcactcgatgcttttcagacatctgctctaggaagcaataatggcgggtacaggaaagggatggcacaagcaaagataaaggtggctataaatggatctggtaggattggcaggaatttcttaagatgctggcgtggcccgaaggactccacacttgatgtcattggcatcaatgacactggt

SEQ ID NO: 206733 - DNA, 342 bp, Gossypium hirsutum
tcctcacgttctcactgtttttacaatggcgactcagctgaagagcagctttacgtcgtctgttacaagaggactggtagtccccatgggcatttcgggatccccgttcaaagtatcttccggaaagaccaggaccccttgcttcactgtcaaagctgttcaatccgacaagtcaacatttcaagtaatccaacccatcaacggcgaccccttcattggaagcctggagactccaatcacctcaagccccttaattgcatggtacctttccaacctcccagcctataggacggcagtgaacccacttctgaggggaatcgaagtgggtctggctcacggctt

SEQ ID NO: 206734 - DNA, 339 bp, Gossypium hirsutum
tcgcccacgcgttcggatgacttaaagagtggtcagaccaagatgaaatctgtcctcgtggattgccttgttggggctgggatcaagccaacatcgatagtgagttacaaccatctgggaaataatgatggcatgaatctatcggcaccccaaaccttccgttccaaggagatctcaaagagcaacgttgttgatgacatggtttcaagcaatggaatcctgtatgagcctggtgaacatactgatcatgttggggtcattaaggatgttccatatgtgggagacagcaagaaaaccatggatgagtatacatcaaagatattcattggagggaagaac

SEQ ID NO: 206735 - DNA, 362 bp, Gossypium hirsutum
catctggggctgtactaaatggattaggctcttcatttctttgtgggggaaagaggagccaagcccttttgggtgctagcattggggccaaaggctcgccctcccctgctgctggaactagaaagttgatcgttgtggcagccgccgcacctaaaaagtcttggatccctgctgttaaaggtggtggcaacttcattgacccagagtggctcgatggatcgctccctggagactacggatttgacccactaggtcttggaaaagacccagcattcctcaaatggtaccgagaagctgagctgatccatggacgttgggccatggctgctgtcgtcggcatcttcgtcgggcaagcttggagt

SEQ ID NO: 206736 - DNA, 361 bp, Gossypium hirsutum
tctcatattttttctggcctaggaaagatgcctgggaagagctcaaggccactctagggagtaagccttggatttctcagaagaagatgattatccttcttaatcaggccactgatatcatcaatctatggcagcaaagtggtggcaacctttcccagagctagatgtgcattttttttatataattttatttgtcttagctatgcaaaaaggcctcggttaattcactgatattgagaatgtctggtttgaaacctcttatctcttaactaagatatgaattgatggttttaataggataacaaacactgctgaattgttggtatttcccttaaaatccacatatttgtttatttatcat

SEQ ID NO: 206737 - DNA, 437 bp, Gossypium hirsutum
tcgataccacccaaacatcgtcgtcttctacactcttctctggtaagttcatcgaaagatcaagtcaagatccctgccaaaatgaacgactctgatgtatccaagcagatccagcagatggtgagattcatccgccaggaagcggaggaaaaggctaacgagatctctgtttccgctgaagaggagttcaacatcgaaaagcttcaattggtggaagcggagaagaagaagattaggcaggagtacgagaagaaggagaagcaagttgaaatccgaaagaaaattgagtattcgatgcagcttaatgcatctaggatcaaggtccttcaggctcaagatgatgtggttaatgctatgaaagaatcagcattcaaggaccttctcaatgtgagccatgatcaccatgtttacaaaaggcttttgaaaaatctaattgt

SEQ ID NO: 206738 - DNA, 425 bp, Gossypium hirsutum
gaagatttctgctacttctatttacttcgagagtttgccttacaaggttaactccactacggggtacattgactacgataagttggaagagaaggcgttggatttcaggcctaagcttatcatttgcggtggaagtgcgtatcctagggactgggattacgctaggttcagggccgttgctgacaagtgtggtgctctgttgttgtgtgatatggctcacattagtggccttgttgctgctcaggaggcaaacaatccgtttgagttctgtgacattgtcacaaccaccacccacaagagcttgaggggtcctagggctggtatgattttctatcgcaagggaccaaagccaccaaagaagggccaacccgaagatgcagtgtatgaacttgaagacaagatcaactttgcagtttttccttccc

SEQ ID NO: 206739 - DNA, 420 bp, Gossypium hirsutum
agcactatctctattatcaactatggctttcgtcgtatgtttcttgcaccaccacgcactgaccaccaatggcagatcatcatcattaccgccgtcgctgcgccaggtttcaaacatgaagcctaaccagcaggtggtgtgcaaggctcataagcaggaagatgatggaagccttgtgtcccgtaggttggctctcactgtactcattggtgctgccgctgttggctctaaggtttctcctgctgatgctgcctatggtgaagctgcaaatgtatttggaaagccaaaaacagacacagaattcatgccatacaatggggatggattcaagctgtcgataccatcgaaatggaacccaagcaaagaggtggagtttccaagtcaagtgcttgaagtattaagacaactttgacaccacca

SEQ ID NO: 206740 - DNA, 309 bp, Gossypium hirsutum
aaagaacctacttttgttgaatagttttgccttgctactccagggttggagcatgggagaatgcatactgcaagccaaccatcaaagcggatgccaagtgggggtatctaatctcttcttgcaatcccaagaatctttgcgtgtgcacagacaagattccatcttcccgtttgggtcttatttggaactgcatttaaacatgtcattcaaaaggacatcaagaatctccctatgctgcaagagatgatcaatgaaagggctttctttaaaatgacaattgattttgggtgaaaatggcatttgtaaaat

SEQ ID NO: 206741 - DNA, 334 bp, Gossypium hirsutum
atctagctatagcatacactactagtacccactactagcaatggcctcctcaatgatctcatcggctaccattgccactgcctcttcggcacaggctaacatggtcggtcctttcaccggcctcaagtctgcctctgctttcccagacaccaggaaggccaacaacgacattacttctctcgcaagcaatggcggcagagtgcaatgcatgcaagtgtggcctcctactggaaagaagaagatcgagactctctcatacctacccgatcttacacccgtgcagttggctaaggaagtggattaccttcttcgctcaaaatgggttccttgcttg

SEQ ID NO: 206742 - DNA, 396 bp, Gossypium hirsutum
  unsure (1)..(396): unsure at all n locations
gcgcccacgcgtncgcccacgcgtccggtgtgcctctgctacgcaccacttcttaagcagcttcctctacgatcataatggtgtcggttactgtttctgtagccaaaccaacccttcaggcaaatgcaaagggttttgcggaattctcaggtctgcgcaactcagctagccttacctttgccaggaaaacctcggatgactttcaatcagtcattgcttttcagacttctgctttgggaatcaataatggtggataccggaaaggcgtggtagaggcaaagctaaaggtcgctattaatgggtttggtaggattggcaggaactttttaaagtgctggcacggccgtaaggactccccacttgatgtcattgcaatcaatgacactggtggtgtta

SEQ ID NO: 206743 - DNA, 364 bp, Gossypium hirsutum
aaatggcccgccattctgattgttttattgctttaccaggcgggtatggaactttggaggagttattggaagtgataacctgggctcagctgggtatccatgacaaacctgtgggcttgcttaatgttgatggctattataattatctactgactttcatcgacaaagccgtggatgatggctttatcaaaccttcccaacgccacatcattgtctctgcaccaaatgccaaagaactggtccagaagcttgaggagtacgttcctgtgcatgatggaatcatagccaaggcaagttgggaggttgagcagcaacagcagcaagtgccgcaacaggtggggttcaatgccactacttttcagac

SEQ ID NO: 206744 - DNA, 463 bp, Gossypium hirsutum
ttcgatcgcccacgcgttcgatatactacaacattcaaaatgttgcaactacagtttaagaagggctcagacaactacagaaggcggaaagaacacagaaacagggaggcatggtgatgtgtgctacagtgctcgttataatgtgctttgtcatgttggtcctcctaatcctcaaggagataatcttttgattcgcatgcatgtttttttcgttgatgatttccagtttgaccagcggtgagagcccattactttagaatcagcaatttccttggtcagcagcatgagcatgggggattttgaatacccccatacgcatacgacttaaccggcatgaatacttatttttttactctttaattcttgggttgttgttctttcaagaaaaaggaaaaggcgggtgtttgaatcgcgtttaaaagattgatctataatagagttaataagttatgtatttcttttt

SEQ ID NO: 206745 - DNA, 393 bp, Gossypium hirsutum
cccacgcgtccgcccacgcgtccggctggagcatacaaggttgctgtcctcaagaggaagacaccctcaattcttgccctttccagacaaaagctaccccaattagctggaacttccattgagggggttgaaaaaggtggctacatcatttcagacaattcttcaggcaacaatcctgatgtaattctgattggaactggttctgagttagagatcgctgttaaagctgctgatgaactaaggaaggaagggaaggctataagggttgtctcccttgtttcatgggagctctttgatgaccaatcagatgcctacaaggaaagtgttttcccatctgcttgaacagctagagtgagtatttgaggctggatcaacatttgggtgggggaagat

SEQ ID NO: 206746 - DNA, 406 bp, Gossypium hirsutum
gcgttcgccacgcgttcgggcttcggctactgtttctgtagccaaacccaaccttcagattcaggcaaaaggaaagggtgttggttttgcagatttctcaggcctacacaactcctctactagccttccctttgccaggaaaacctctgatgacttccattcactcgttgcttttcagacatctgctctaggaagcaataatggcgggtacaggaaagggatggcagaggcaaagctaaaggtggctataaatgggtttggtaggattggcaggaacttcttaaggtgctggcatggccgtaaagactccccacttgatgtcattgccatcaatgacactggtggtgttaagcaagcttctcaccttctcaaatatgattccacccttggcatcttcgctgccgat

SEQ ID NO: 206747 - DNA, 434 bp, Gossypium hirsutum
cccacgcgttcgcccacgcgttcgccctctcttttcttcgtctagctttttaacttcattatcatttctctgcaaaatgaccgttctttcttccgatcaatttccttcatgtcatgtctttaagtcatgtctaccctttctttttgtagccttgttgtttcagtttcaaactggtttctctgctttgataatgagcttgaagaaccatcctggccaccctcaacatcgaaggccaatgttccaaacgaaccaaagcacttgtgcattgtttgtaggcacttgggttcgtgatgatagttacccattgtaccaatatttcaactgtccaatcatagatgcagaattcaactgccaactgtatggaagacctgattctgattacctcaaatatcgatggaagcctctcaattgtgtgctttccaggttcgatggac

SEQ ID NO: 206748 - DNA, 364 bp, Gossypium hirsutum
tcgcaccaacaaaatcagttgcttcacaatggcctctacaaccatggctctttctttcccatcattcgccggtaaggcagtgaagttctccccttccacccctgaaatccggggaactggccgtgtttccatgaggaaaaccaccaagcctgttccttctggtagcccatggtacggtcctgaccgagttttgtacttgggtccactttccggtgagccaccatcttacttgaccggtgagttccctggtgactatggttgggacactgctggactctcagctgatcccgaaacctttgctaggaaccgtgagctcgaagtcattcactgcagatgggccatgttgggagctcttgggtgtgtt

SEQ ID NO: 206749 - DNA, 241 bp, Gossypium hirsutum
atgctaagaacgccgctaacatcgaaaatcatcggatttcttggcaaaaacacctcaaacttacagggacaaacaacactgctaactaccaaagcaatggcctgagcctgcaacgcaagcgagtgtaggcgaccactggaaaaaagaagttcgagactctctcatacctgcccgaacttacaccccggcatgtggctaaagaagtggattaccttcttcgctcaaaatgggttccttgctt

SEQ ID NO: 206750 - DNA, 322 bp, Gossypium hirsutum
tcggccaaagatggtgtatgactactacgcatctggtgctgaggaccaatggacattgcatgagagtagatttgctttcaccaagagactgcttcgtcctcgtattctcattgatgtaaacaagatagacatgaccacaactgagttgggttttaagatattaatgactatcatgattgtaccaaatgccatgcaaaaaatggctcattctgaaggggagtatgcaacagctagggctgcatttgctgctggaactatcatgacattattctcatgggcaacttctagtgttgaggaggtggcttttgacaggacccggcat

SEQ ID NO: 206751 - DNA, 307 bp, Gossypium hirsutum
agctggtgttcaaccaacgaccatcaagggccttggaggcagctctctcaatggaaccaagctcttgggggagtcaactcggcagagtttcaaacccaaaaactacatggctggtgctgtggtagcaaagtatggtgataagagtatatactttgatttggaggatattggcaacacaactgggcaatgggacttgtatggatccgatgcacctttaccgtgcaacccacttcagagcaagtgctttgagacatttgcagctccatataccaagagaggattgttgctcaaggttctgaacttggga

SEQ ID NO: 206752 - DNA, 286 bp, Gossypium hirsutum
  unsure (1)..(286): unsure at all n locations
tggcttggactacctaggcaaccccaaccttgttcatgctcaaagcattcttgctgtcctcgggttccaggttgtcctcatgggactagtcgaaggattccgcatcaatggtctccccggagtcggtgaaggcaatgacctttaccctggtggccaatactttgaccctcttggtcttgctgatgaccctgtcacatttgctgaacttaatgttaatgaaatcaagaatggctggctagccatgttctttatgtttgganactatcgtcaagccattgtcacacgc

SEQ ID NO: 206753 - DNA, 359 bp, Gossypium hirsutum
cacaaataccctttctccgttaaggatggcctagcccaaatgctccgtggcggggtgattatggatgtcgtcacccctgaccaagctcgcatcgctcaataagctggagcctgctcccgccatggttcttgaacgagaccccgccgacattccatcccaatgtggcatggcgcggatcagtcgacccacaactcatcaaagaaattaagcaagctgtcaccattttcctcatggccaaagctcgtattggacatatcgttgaggcccagatcctttaagccattgtcatcgactcttttgacgagagcgaaaaccttaccctctccgacgaaaaaaaccacattaacaaacataatttt

SEQ ID NO: 206754 - DNA, 256 bp, Gossypium hirsutum
caaattgttgcatccccacaatgtgtcactttttctactcttgcttccccacccgatcagttccagagtcgttcctggaagaccactgcctactgtcgcaagattgctctaaatgtgatggctttggccactggtgagaccttggccacgcgtgaagctccaaccgaagttaccccaactgagctgacagagtttattaacaaaatacaataaacctgggataaagttgatgacaagtacgcagtgaggtcacttg

SEQ ID NO: 206755 - DNA, 379 bp, Gossypium hirsutum
ctttgccaagaatgttagagatacttcctttttcgacgtgctggctgcccaacttactccggagagtgaaggcgtaccatcaggatctcttaagggagaaacagccgccaaactgaaggttgcaatcaatggattatgacacattggcaggaacttgctcagatgctggcatggcaggaaggactcacccctcgaggttgttgttgtaaatgacagaggcggtgtcaagaatgcttcacacttgctgaaatatgactacatgctgggaactttcaaagctgatgtgaaaatagttgacaatgaaaccatccgtgttgatgggaagcccatcaaggtcgcttctaacagggaccatctaaagcttgcttgggctgaactt

SEQ ID NO: 206756 - DNA, 453 bp, Gossypium hirsutum
gagcactatcattagcactagcactagtagcaaccatggcctccgccgcatgtttcttgcgccaccacgcactcacaaccaatggcagatcatcatcattatcggcgtcgctgcgccaggcttcaaacatgaagcctacccagcaggtggtgtgcaaggctcaaaagcaggaagatgatggaagccttgtgtcccgcaggttggctctcactgtactcattggtgctgccgctgttggctctaaggattctcctgctgatgctggctattgtgaagctgcaaatgtatttggaaagccaaaaacagacacagacttcatgccatacagtggggatggattcaagctctcgataccatcgaaatggaacccaagcaaagaggtggagttcccaggtcaagtgctgatgtacgaggacaactttacaccaccagcaatttgagcgtcatgatcac

SEQ ID NO: 206757 - DNA, 332 bp, Gossypium hirsutum
acgcccacgcgtccgaaaagaaaggtttttttcaatggccgaccggcgctgacgtaccggaggcgcttccctcctcattcctctcatctcctttcacccgatccgggtttgttttcgataaatttcttctattttcatggctgctccacctgcaagagctcgagctgattacgactacctcatcaagctccttttaatcggcgacagcggagtgggtaagagttgccttcttttgcgtttctcagatggctcatttactactagttttatcacgacaatttgaaatgactttaagataaggactatagagcttgatggaaaaaagatcaaac

SEQ ID NO: 206758 - DNA, 285 bp, Gossypium hirsutum
agaaaaatgaaggcgtcattgaaaggcagatacaccaatgacaagagcaccgccgtcgtttgcctttccgccaacgcgggcgacatcaagctacgcgcttccatgactgacgcgacattcatcaagggtcccagcctgaacggtttgactcttgccgtggaaaaacctggcttcttcatcatcgactacgatgtccccaaaaaggattttcggtttcagttcatgaactcagttagggttgcggagaagcccgtgaaacttacttacattcacggcagaagggat

SEQ ID NO: 206759 - DNA, 364 bp, Gossypium hirsutum
attcgaaaacatagcaatgaatatcttaaaacaacataagggcccgccgaggacaataaggcatagggatactagaccgacggcgtgcaccattgaagcaaggttgacatgttcggccactaccaccacaaccaagcctaagtccagtcagaaccagttggttatcgagccacggcttgagacaaaaccggactctatcactcccattatccctagagtaggccctccctagtccaatgatccaagtttacaatcaacatggtcccaccgagcatgggtggccagaggatgcaccacgctattcttttccctagccaagactgtaacgggtgcaactgatacacatatggggatcaaacctata

SEQ ID NO: 206760 - DNA, 255 bp, Gossypium hirsutum
ctctggtcttcattgtaacacaatattacattctgtttcctctgctatcgctctggggggggccattgtataaaactcgttatggatggatccggagcgtttgtcgatagagaaggtgcaggtcagcacattgaatcatgatccagagaaagtgctgattactgccccagggaacggggacatccccacctatgtggttggagtgaatgctgacacctacgacccaagtgaatctatcattacctatgcttattg

SEQ ID NO: 206761 - DNA, 358 bp, Gossypium hirsutum
cccacgcgtccgcggacgcgtgggctgtctctaccactgaaagcaaagaaaaaatggcaacggagatggcccttgtaaagcctatctccaaattcagtacaagcagtccaatttttagcaactcccgatatgggaagttcacgaccgtcagaatgtcatctacttcccaatcaacagcaaaggccgccgcgaagggtggcaagaaagctgccaaaaccgccatcaaagagacccttttgacaccaaggttttacaccaccgactttgatgaaatggaggcgcttttcaacactgagattaacaagaaccttaaccagtccgagtttgaggcactgctgcaagagttcaagactgatta

SEQ ID NO: 206762 - DNA, 352 bp, Gossypium hirsutum
cccacgcgtccggctggggctggatcggctaccttgtcaatggcatatgcagctgtcaagtttgcagatgcatgtctccgaggcttgagaggagatgccggagtcatggaatgtgcctttgtagcttccgaggttaccgaacttcctttctttgcaaccaaggtacgacttggtcgtacaggagccgaggaagtctatcaactagggcctctaaacgaatatgagagggttggtttggagaaagcaaaagaagagttagctggaagcattcataagggtattgccttcatcaagaaatgaaattgttgctgctgagctaatcttttaatataatataacataaagcctctta

SEQ ID NO: 206763 - DNA, 447 bp, Gossypium hirsutum
gaaacccaagattataaatttagtatcgatttgagtatttgaatagtttagattacaagaatggcaggggaactagtattgtgggatttctggccaagtccatttgggatgagatccaggattgctttggctgagaaagggataccatacgagtacagagaagaagatttgaggaacaagagtgatttgctgctgcagatgaaccctgttcacaagaaaatccctgttcttatccataatggtaaaccggtttgtgagtcgggcattcaagttcagtatattgatgaggtctggcatgataaagctcctttgatcccttctgatccttattaaagagctggtgccagattctggggtggattcattgacaagaagatatatgagctggggagcaaaatatggaagacaaagggagaaaaacaagcaaatgcaagaaagatttattga

SEQ ID NO: 206764 - DNA, 221 bp, Gossypium hirsutum
gaatcactagccacagagcttgcacctaggatgagtgccatagcaacgctactgataatgcgcatgaactgaaaaagaccttgtctatcatctacaacctgcagcgtcatgcgaaaatcaccgcagagatattggagattgttgctggtgccaatgctttggcctaatgaacttgaaacctgactcaccatcaattatgtccccttgtaggtatcaaaaag

SEQ ID NO: 206765 - DNA, 442 bp, Gossypium hirsutum
cggacgcgtgggctcagattggtttttgtctaaaggtggtacacgcatgagcatgcagcgaatgtgggatccggttgcttatgccttgggttttattgactgtgataacatcagtgctcgttgtatgcttacgattttctctctgtttgccactaagacagaggcttcccttctgcgtatgctgaagggttctcccgatgtctacttgagtggtccaatcagaaattatataacagaaagaggaggcaggttccatctaaggtggggatgcagagagatactttacgataaatccgctgatggagagacatatgttaccggacttgccatgtccaaagctactaacaagaaactcgtaactgctgatgcttatgttgctgcatgggatgttcctggaataaaaagggtactttcattcgggtggagggaattagaatttttt

SEQ ID NO: 206766 - DNA, 438 bp, Gossypium hirsutum
ctttaaagtgccaaaccctctttttataaaatccaaacagcttcattgctgtttgttgaggtggtggtggtggtgaaaaacgtccaaatgtggaactcagttattattcagtgcttggaatttctgaacaagcttccccttctgaaattcgagaagcttatcgtaaacaggctttgaaatggcatgctgatagatggatgaaaaaccccactgtatcacgtgaagctaagaaacgatttcaacagattcaagaggcttattcagttttatcggataaaggaaagagaaagatttatgacgctgggttgttgggtctacttacagacgatgatgatgaaagctttcttaacttcatgcaagaaatggctatgatgatgcaaaacgtgaactcaaaggaaggaaacagcttggaggatcttcaaggatcgttaatggatg

SEQ ID NO: 206767 - DNA, 443 bp, Gossypium hirsutum
agcagctgcaccacaactacagagaagagagtaaaggggaaaaaaagcgtcgtcgtttttgcttcttcttctacttcgctctctctccttctccgaagttcctctttcgttctttcatttattcagtattgtaaaagatggccgacggtgaggatattcaacccctcgtctgtgataatggaactggaatggtgaaggctggttttgctggtgatgatgctccaagggcagtttttcccagtattgttggtcgtccccggcacactggtgttatggttgggatggtcagaaggatgcctatgtaggagatgaagcacaatctaaaagaggtatccttactttgaaatatcctattgagcatggtattgtgagcaactgggatgatatggaaaagatctggcatcatacattctacaatgaactccgtgttgctcctgaggagc

SEQ ID NO: 206768 - DNA, 447 bp, Gossypium hirsutum
gcaagagactcccatatccctgtcttggcaccacttcccattgggtttgctgtgttcatgggtcacttagccactattcccatcaccggaaccggtatcaacccggctcgtagtttgggggctgctgttatcttcaaccaggacaagatatgggatgaccattggatattctgggtaggaccttttattggagctgccattgccgcaatctatcaccagtttatattgagggcatccggtgctaaagctctgggatccttcaggagcagctctgccatgtaaaatcttgtgaagcaagaactgtgcagccatgagttcaaagtaaaagctggcatgcttggatgaatgaaatgaagttttcttcagaccattgaatttggaaaagataatcaaagggtaatggctcttctttatgcatgtggcacttatttttaatgtgccctaaac

SEQ ID NO: 206769 - DNA, 444 bp, Gossypium hirsutum
gaagatcttgggcctttctttgagtctataatcagatgcatacctggtccacatattgacaaagatggtgcactgcaaatgcttgctacaaatattgagtatgatgaacataaaggacgaatagctattgggcgcttgcatgctggggtacttcggaaaggaatggaagtaaaggtttgcacctcagaagattcgtgtagatatgcaagaatttctgaactttatgtctatgagaaatttagtaagaccgctgttgagagagtagaagctggtgacatttgtgctgtttgtggaattgaagatattcagattggagagactattgcagataaagcatttggaaagccattacctgccattaaggtggaagaaccaactgggaaaatggctttctctatcaacacttcaccatttgttggccgtgagggaaagtatgttactagc

SEQ ID NO: 206770 - DNA, 294 bp, Gossypium hirsutum
  unsure (1)..(294): unsure at all n locations
gcactntcgaatcttaagaatccacaactagtttcaaatggcacccaaagccgagaagaaggcagcctagaaaaagccagctgaggagaaaaaggccgagaaggccccagctgagaaaaaaccaagagccgagaagaagctccctaaagaagccggggacaagaagaagaagcgaagcaagaagagcattgaaacctacaagatctacatcttcaaggggctgaagcaggtccatcctgatatcggcattttcagcaaagccatgggtattatgaacaagcttcatcaacgaca

SEQ ID NO: 206771 - DNA, 406 bp, Gossypium hirsutum
cgtccgcccacgcgtccggtttagcctttgaattgaaaccctcaaaattccacttaaaaaatggcctgcacagcttccctctccaccgccgtagccaccacctctttcctccgcggccacccggccccgaaaaccctaagctcccttcctttcaaccaatctcttttcgggctaaaaccccaacgaaatggccgtctcaccatggctgcatacaaagtgacactgttaacacccgaaggaccccaagaattcgtgtgccccgacgacgtttacatcgttgaccaagctgaggaagaaggcattgatcttccgttctcgtgtagggctgggtcttgttcttcgtgtgccggaatgattaagcaaggctccgtcgatcaatccgacggtaatttccttgatgatgacc

SEQ ID NO: 206772 - DNA, 441 bp, Gossypium hirsutum
gccaccgtgacctcaggcgtgctagagccgcagctctcaacatcgtcccgacttcaactggtgcggcgaaggccgtggcccttgtactccctactctcaaaggcaaacttaatggcatcgcattgcgtgtgccaacaccaaatgtgtcggtggtggacctagtggtccaggtttcaaagaagacgtttgctgaagaggtgaacgctgctttcaaagagagtgcagagaaagagctacagggtatactttcagtgtgtgaagaaccccttgtttcagtggacttcaggtgctctgatgtgtcctccaccgttgatgcatcactcaccatggtcatgggagatgacatggttaacgtgattgcttggtatgacaatgagtggggctactctcaaaggttgtggatttggctgacattcgtgccaatagctggaagtgacttca

SEQ ID NO: 206773 - DNA, 428 bp, Gossypium hirsutum
ctgatgaggaagaagccaagcaaaggcagctgaagtccattttgaacaagctaactcctcaaaattttgagaaactctttgagcaagtaaaagctgttaacattgacaatgcagttacactcactggtgtcatctcacagatctttgacaaagctttgatggagcctactttttgtgaaatgtatgcaaacttctgccagtgtctggctggggagttgcctgattttatcaagaacaatgaaaagataactttcaagagattgctgctgaacaagtgccaggaggaatttgagagaggggagagagagcaagaagaagcaaataaaatagaggaagagggtgaggctaagctgtctgaggaggaaagagaagagaagagaatcaaagctcgaagacgaatgttaagtaacattagacttattggggag

SEQ ID NO: 206774 - DNA, 348 bp, Gossypium hirsutum
attgtttcacatgggcctctacaaccatggctcttttttccccatcattcgccggtaaggcagtgaagttctccccttccacccctgaaatccagggaactggccgtgtttccatgaggaaaaccaccaagcctgttccttctggtagcccatggtacggtcctgaccgagttttgtacttgggtccactttccggtgagccaccatcttacttgaccggtgagttccctggtgactatggttgggacactgctggactctcagctgatcccgagacccttgctaggaaccgtgagctcgaagtcattcactgcagatgggccatgttgggagctctttggtgtgttt

SEQ ID NO: 206775 - DNA, 367 bp, Gossypium hirsutum
gcgagcgccgcccttttttttttttttttttttttttttttttaaataaaatacataaacaggtaataaattcacatagtataccaccctcatattagtatatattttggtggattaataaacttattaaactctcacaaaacatgctaaaatagggggaaaacatcgtagtatagcaaaacattcaatgtagccagattctagggcatatgtggcttgcttcatcgacggctgtaaatcaggtcgatgatgatcaaggattcggggaagtttggatgctcaaaagcttcacgtcgtcgaggactgggccacatatggaagagaagtcatcactcctcatggtgtaaaaagtgctaaggaacatgat

SEQ ID NO: 206776 - DNA, 378 bp, Gossypium hirsutum
tagctcaaagcactgcggggcgctgctcggaggaagtgaaccagctggttctacctttcaatgccaatgtgaaaaccatgatgaatagccttaatgctaaccttccgggtgcaagatttatctacgtcgacattgctcacctttttgaagatatcgttgctaatgctagaacatacggatttagtgtggtaaaccgagggtgttgtgggattgggaggaacagagggcaaatcacatgtcttccattccaaacaccatgtgaaaatagagatgaatatgtgttttgggatgcattccatccaactgagaaagtgaatatcataatggcaaggaaggccttcaatggtgatccttccattggttatcccatcaacattc

SEQ ID NO: 206777 - DNA, 372 bp, Gossypium hirsutum
gcggcggcgtaggtagcggcggtgtgcttgtgatctcaatctcaaccccaggcgagctcggctccggtcacccgtcgatccacgcaaccatgtctaggaggaagaccagcgagcccaaggaggagaacgttacccttggacccactgttcgtgaacgagattttgtctttggtgttgctcacatctttgcatccttcaatgacaccttcattcatgtcactgatttgtctgggagggaaactttggtttggatcactggtggcatgaaggttaaggctgatcgtgatgagtcctctccttatgttgatatgcttgcttgccaagatgttgcacatagttgctaggagcctcggtttgacattgctttatatt

SEQ ID NO: 206778 - DNA, 271 bp, Gossypium hirsutum
atagtactagtaagcagtaatagcaatggcctgctccatgatctcatcggcaaccattgccaccgtgaactgctcctccccggcacaggccaacatggtggcccccttcaccggcctcaagtctgcctctgctttcccagtcactaggaaggccaacaacgacatcacttctcttgcaagcaatggtgggagagtgcaatgcatgcaagtgtggcctcctcttgggaagaagaaattcgagacactcttattacctcccgatcttacaccc

SEQ ID NO: 206779 - DNA, 426 bp, Gossypium hirsutum
cccacgcgtccggttagctatagcatacactactagtacccactactagcaatggcttcctcaatgatctcatcggctaccattgccactgcctctccggcacaggctaacatggtcgctcctttcaccggcctcaagtctgcctctgctttcccagtcatcaggaaggccaacaacgacattacttctctcgcaagcaatggcggcagagtgcaatgcatgcaggtgtggcctcctactggaaagaagaagttcgagactctctcatacctccccgatcttacacccgtgcagttggctaaggaagtagattaccttcttcgctcaaaatgggttccttgcttggaattcgaattagaggagggattcgtgcaccgtaaatactcgagcctacccacgtactacgatggacgctactggaccatg

SEQ ID NO: 206780 - DNA, 368 bp, Gossypium hirsutum
ttggatttgatccacttagacttggtgaggtgccggagaaccttgagaggtacaaggaatctgagttgattcactgcagatgggctatgcttgctgttcctggtatattggtgccagaggcattggggtatggaaactgggtaaaggcacaggaatgggcagccgttcctggtgggcaagccacttacttaggcaaccctgttccatggggaactcttccaacaatcttggtcatcgagttccttgccatcgccttcgtcgagcaccaacgcagcatggagaaagataccgagaaaaagaagtaccccggcggtgctttcgaccccttgggatactccaaggaccctaaaaagtttgaggaatacaaa

SEQ ID NO: 206781 - DNA, 423 bp, Gossypium hirsutum
ggcatccatcaccatgacaacatttttccttagcaccactaacctcacaaagggggctccaagaattacccagcggagactagtggttgccaatgctgctaagggagctcaagtggagagtgtccagatgagcggtgagaggaaaacagagggcaacaatggcaggagggagatgatgtttgcagctgcagctgctgttatttgctcggttgcgggggttgcaacggcggagcctaaacgtggtagcgcagaggccaagaaggcgtatgctcctgtttgtgttactatgccaactgctaggatctgtcgcaactgaggcagtgccactgcacattgctcgagtgccatgagactatgcttgttatgggcaggggctgaaagaagtaatttaataatgcttggaaatcttcatttttataattg

SEQ ID NO: 206782 - DNA, 315 bp, Gossypium hirsutum
cccacgcgtccgcccacgcgtccgcccacgcgtccgggctgctgccaagattgggaagatacttgcggaacgcttgctgctcaaagagatccctgccgtttccgtttccttaaagcgagaacagaagtatcatggtaaagtcaaggctgtcatggattctcttacggaaggcaggtgtcaagttgctttaaatttagaacattttcaaaacattgtttacttttctaaatctgggctttttaacgattcattttttgtcctggaattgataggtgactttagttccaaggaagaatacattgggcatttttatgc

SEQ ID NO: 206783 - DNA, 313 bp, Gossypium hirsutum
cccacgcgtccgcgagctctgtatagattcttctagttccgaccaaaaaaagaattgctcatctttccttcagagaatatttgttttgagtgaaaaaaaaaatgttgggagtattcagcggagcgatagtgtccccgccggacgagctggtggctgccggttgcaggacgccgtcgcctaagataacggcggacgctcttgtgaaacggttcatcgaggcaaacccctccaccgtgtctatgcagatcggagatcatgtccaattcgcttattctcaccgtaacgagtctgctttactttccaggtcattcgc

SEQ ID NO: 206784 - DNA, 442 bp, Gossypium hirsutum
aatggggtagctactgaaagggaaaagaagttcaagattttccgggcagaccctgtcgattatcagagcattaccgacgccctgaaaggctgctctggtttgttttacgcctttgagcccccacaagaccaccctgcctatgatgaatatatggtagaagtggaggtacgagcagcacataatatggtagaggcatgcgctcggacggagacaatagacaaggtggtcttcacatcctccgccactgctgttctttggagagacaacaattcccaatcgcttgcttccgatttggatgaacgccattggagcgacgtcaatttctgccgcaaattcaagttatggcacgcgctgtcaaagacggtggcagagaagacagcatgggcgttagcaatggatagggacattaacatggtttcaatcaacggggggttgttgatgg

SEQ ID NO: 206785 - DNA, 445 bp, Gossypium hirsutum
cccacgcgtccgtgttttttggtttatagagatggatcatgcagcagatgctcataggactgatttgatgacaataacacgtttcgtgttgaacgagcaatccaagtatcctgagtctcgtggggatttcaccatcttgcttaatcacatcgttcttggttgcaagtttgtttgctctgctgttaacaaggctggtcttgccaaactcatcggactcgctggggagactaatgttcagggtgaagaacaaaagaaattggatgtgctttcaaatgaagtctttgtcaaggctttagtaagcagtggcagaacatgcatccttgtctcagaagaagatgaagaggcgacttttgtagatccctcaaagcgtgggaagtactgtgttgcttttgatcctctagatggttcctccaacattgactgtggagtttcattggaacaattt

SEQ ID NO: 206786 - DNA, 422 bp, Gossypium hirsutum
ggccaccagaatcgacggcgattcctcccgaaaaatcatccccgacccgacccgaataaccaatccctcgataactcttcggatcctcaatccttgctccattccaggtttttaaaagtctaagcgcaatggatgatgtaactgatttgactggtgatggaggtgttattaagaagatcgtagcaagagccaaagtgggtgcgctcgccccttccgaggatcttccgatggttgatgttcattatgaaggtaccctagctgaaactggtgaagtttttgatacaacacatgaagataactctgttttctcctttgagcttggaaagggcacggttattcaggcttgggacattgctttaaaaactatgaaggttggtgaagttgcgaaaataacttgcaagccagagtatgcctatggtgct

SEQ ID NO: 206787 - DNA, 365 bp, Gossypium hirsutum
cacaaccactatcactaccatgatggctttttttactgtttctgtagccaaacccaaccgggggaatgatgcaaaagggaagggtgttggttttttattattttttaggcctacacaactcctctactagccttccctttgccaggaaaacctctgatgacttccattcactcgttgctttttagacatctgctctaggaagcaataatggcgggtacaggaaagggatggcataggcaaagcttaaggtgggtataaatgggttttggttggattgtggaggaaccttttttaaggtgctttgattggtcgtaaaggactccccacttgatgtcattggcattaatgtacactggtggtggtaa

SEQ ID NO: 206788 - DNA, 258 bp, Gossypium hirsutum
gtttcttcttacaagcttatgtgaccggagaaggtccggtggagaacctttcgaagcacctgagcgatccttttggcaacaacttgctcacggtcattgctggaactgctgaaagagctcccaccctctgattttaatatctttgttttctgattttcgccgctacttgttattgcgtttatgcattttgttgtacatcaaacttatcggataattcccgagaactttaatcttgaaggtctcaccctcgaatttact

SEQ ID NO: 206789 - DNA, 419 bp, Gossypium hirsutum
agctatagcatacactactagtacccactactagcaatggcttcctcaatgatctcatcggctaccattgccactgcctctccggcacaggctaacatggtcgctcctttcaccggcctcaagtctgcctctgctttcccagtcatcaggaaggccaacaacgacattacttctctcgcaagcaatggcggcagagtgcaatgcatgcaggtgtggcctcctactggaaagaagaagttcgagactctctcatacctccccgatcttacacccgtgcagttggctaaggaagtagattaccttcttcgctcaaaatgggttccttgcttggaattcgaattagaggagggattcgtgcaccgtaaatactcgagcctacccacgtactacgatggacgctactggaccatgtggaagct

SEQ ID NO: 206790 - DNA, 424 bp, Gossypium hirsutum
atcgggctccataggtaggtcattgagagaaaagtataggtagaaaactctcaaaacccctacccgcgaacggtgaatctgggaaaacccactcagctcatttagatccctaccaaatctgcaaaaaacataccatgatttgatcccaaaaacccaccccaaacaaatgggttttggtttttcttcaaaacccttcttccttttcctctcatttcttgttttctttaccaatcttgaactttacccttttgttgaatcagcccctgattacacaactttggtctacaaaggttgtgctaagcaggcttttacagatccagctgggatatacttccaggccttgtctggcttggttcagacctttctttcacaggtcatgaagggaaaggtttacaagaaaaacaccgggtactggccaaaccac

SEQ ID NO: 206791 - DNA, 446 bp, Gossypium hirsutum
cccacgcgtccgcccacgcgttcgcccacgcgttcgcccacgcgtccgcggccacatatcagaaactgcgaaaattcatttaaaaatggcgacagctgcatcctcttcatcctccatggtggccaccgccgttttgattcctcgttttccggcagcctccgttggaactacccgctgcagtgccttgccgcctctccctcctcgcgtttcgaccgcttccttgtccttttcctcttccgttaagctaatcccagaatccaagaggttttctctactgcagacaaaagcctcagaagagacctctgttgatgctggtgaccttttcgctgacttgaaggaaaagtgggataaagttgaggacaagaccacagttgttctttacggtggtggggcattagttgctgtttggctatcatccattcttattggtgccattaactcggtcc

SEQ ID NO: 206792 - DNA, 395 bp, Gossypium hirsutum
gggagtggtgctggacatactcgtagcaatgggcttcattaaatcgcatcatcactggttagacgtagagcacattgaagaagctcttcaaaacacattagtttgcatagagatggttgttttcactgtagtacagcgccgtgcatacagtgctgcacgatatagtggagaaagtgaagctaagataaagaaaaatgaatgatatttgggatgccccaataaccatatctatgtatgtatgtttattcatggattgtattagaagataagcttagaaatgcttctactctctattttcaatatattaaatagatttaatgagggtctgaaaatttcctttcttttcgttgtttttgtgtgttttgttgtgtgtttttgtgtttttttgttatatt

SEQ ID NO: 206793 - DNA, 421 bp, Gossypium hirsutum
aagaaataacctcaaagccaaatggatctcctcttcttggagaaggccctcctgggccttttcgtggcggtggtactagccatcaccatctctaagcttcgtggcaagcggttcaagctccctcctggaccattacccgtgccggtgttcggcaactggctccaagtgggtgatgacttgaaccaccgcaacttgacagatttggccaagaaatacggtgacatatttttacttcgaatgggacagcgtaatctagtggtggtgtcttcacctgagctagccaaagaggtgctccactcgcaaggagtggagttcggctcaagaactaagaacgtagtgtttgatatattcacgggtaaaggtcaagacatggttttcacggtgtacggagagcattggaggaaaatgaggcggatcatga

SEQ ID NO: 206794 - DNA, 444 bp, Gossypium hirsutum
cccacgcgtccgcaggtattgtgctggattccggtgatggtgtttctcacaccgtgccaatctatgaaggatatgcccttccacatgccatcctccgtcttgaccttgcaggtcgtgatctaaccgatgccttgatgaagattcttaccgagagaggttacatgttcaccaccactgctgaacgggaaattgtccgtgacatgaaggagaagcttgcttatgttgccctggactatgagcaggaactggagactgcgaagagcagctcatctgttgagaagaactatgagttgcctgacggacaagtcattactattggagctgagagattccgttgcccggaagtcctcttccagccatctttcatcgggatggaagctgctggaatccatgaaactacctacaactctatcatggagtgtgatgtggatatcaggaaggatc

SEQ ID NO: 206795 - DNA, 440 bp, Gossypium hirsutum
ccaccgcatgcttcttgcaccaccatgcactcacctccgcacccagatcatcatcgactccacccttcacatcccagcgccaagttgcaatcgtcaagtcaaatcaactactggcttgcacatctcagaaacaggcagtccaagaaaatgatgattcgggaagcaacgctgtgatctcccgtaggttggctctcactctgctcatcggtactgcagcggttggctctaaggtttctcctgctgatgctgcctatggtgaagctgcaaatgtatttggaaagccaaaaacaaacacagagttcatcccatacaatggggaagggttcaagctgtcaataccatcaaaatggaacccaagcaaagaggttgagtacccaggtcaagttctgagatacgaggacaactttgactccaccaccaatgttgctgtcctggtcact

SEQ ID NO: 206796 - DNA, 436 bp, Gossypium hirsutum
  unsure (1)..(436): unsure at all n locations
aaacgaaagccctttttcctcccatggccgccaccaacacattgatgagctgtggcatcgccaccgctttcccttcagtgctttcctcttcaaagtccaagttcgccaccgctacgccgttgcctagctttggcgccaatgttggccaccgtgttagcatgtcggctgactggatgcctggtcagcctaggcctccttatcttgatggttcagcacctggtgactttggatttgatccacttagacttggtgaggtgccggagaaccttgagaggtacaaggaatctgagttgattcactgcagatgggctatgcttgctgttcctggtatattggtgccagaggcattggggtatggaaactgngtaaaggcacaagaatgggcagccgttccttgtgggcaagccacttacttaggcaaccctgttccatgggg

SEQ ID NO: 206797 - DNA, 440 bp, Gossypium hirsutum
aagctctccccataaacatcaataccccaactgcacctcgataacacccataatcagcatacccatggcaactcaagcaggtcttttcactcccactatcaccacttcaaagtctctggctccatggaacccatcttcaacattttcattagctacccccaagtccatcaacttctccatggctcagagaactagcgttagggctgcagctgcagatgaagctgctgctgccgctgccacaaaggaagctccggtgggtttcacccctccagaattggacccaaacaccccatcacccatcttcggaggaagcactggtggactgctgagaaaagcccaagttgaagaattctatgtcatcacatgggattcacccaaagaacaaatctttgagatgccaactggtggtgcagccatcatgagacaaggacctaacttgc

SEQ ID NO: 206798 - DNA, 371 bp, Gossypium hirsutum
acaatcagcaagcctggcacaacggccaccagcacctcagccgctgacgcaaggccatctatcaccggccggaaagccggagcaaccgcagctaaagtaagcgccacagccaaggttgcagcctctccagtcccaagggtcagcatcaaggccgccctcaaagacgacggtggtgctgatgcggcaactgcagcaagcgcaatcctagccaacaatgccatggccattgaagtcatgctcggcagagacgaagggggtctggcatacattccgcaaagaaatcagcggaaagccaggggagaagattgaggacaagaacaatgccagattcccacacaatgttgagtacgatgaggacaaaatcccaagcg

SEQ ID NO: 206799 - DNA, 365 bp, Gossypium hirsutum
gaacaacgccggcttcccgcacaacgtcgtcttcgacgaagacgaggtgccgagcggcgtcgacgccaccaagatctcgcaggagtagtacctcaacgcgccaggcgagacctactccgtcaccctcaccgtgccgggaacctacggcttctactgcgagccgcatcaaggagccggaatggtcggcaagatcaccgtcaactaattaagctagctatcgatcgatatccattcatgtattagctgttgcttcctgctttgtactccgccgatctgtccatctctacatgttctcgtcttcacacaacaacctttggtacgactacgtatatatgcatgctactagctgattgatttttattaaa

SEQ ID NO: 206800 - DNA, 432 bp, Gossypium hirsutum
gagagagatggcttcaaaaagatcggcatcggttgccctcttttttgcactcaacattctcttcttttcacttgtcagtgctaattgttcttgcccttcccccaagccaaaaccaaaccccactccctccccaactcctgctgcggaaggaaagtgccccataaatacccttaaactaggtgtatgtgctgaggtgcttggtttagtcaatgtaactgttgggtcacccccagttcaaccttgctgcacccttatcaaaggccttgctgatcttgaagctgctgtttgcctttgcacagcgatcaaaggcaacattttgggtatcaatcttaatatcccacgttccctcagcttgcttctaaatgtctgctcaaaaaaagttccatccggctttcaatgtccctgatcactcttccaaaatctttcttttct

SEQ ID NO: 206801 - DNA, 411 bp, Gossypium hirsutum
gttgtattcgagtatgtactaaaattggatacccaacacgatttgatggacctgttttcaggtgaaagagatcgtggtcatcggacacagtgcctgcggtggaatcaaggggctgatgtcattcccgtacgacggaaccacttcaactgatttcatagaagattgggttaaaattggaatgcctgcaaggaagaaggttaatgcaaaaaatcgtggggagcctctggggcttcgatgcaccttttgtgagaaggtaatcatcttaaatttaaaatctctgctattaaataatgctgttaatccagatagggaaataataacaatattaagaggttttaaaaccaagcctgatagtgaaactggtttaattaaataaatcataaaaataaagaaaaagattagaaaatagag

SEQ ID NO: 206802 - DNA, 428 bp, Gossypium hirsutum
cccacgcgtccgaattcctatccatcgccttcgttgagcaccaacgaagcatggagaaggacaccgagaagaagaagtaccccggcggcgctttcgaccccttgggattctccaaggaccccaaaaagttcgaagaatacaaggtcaaagagatcaagaacggccgtctagcattgttggcatttgtgggattctgtgttcacaatcagcttacccaggcactggaccattggagaatttggctacacatttggctgatccatggcacaacaacattggagatgttatcattcctagatcactttacccttagatgatgatagattgatggaatattttaaatgtaatgtccgttcttgcattgcgtaaaacatatgtaatgaaatctaatttgaaggctttcgtaatgggaattataatttttttta

SEQ ID NO: 206803 - DNA, 383 bp, Gossypium hirsutum
cccacgcgtccgcaagcaatggcatcgatgactggtttacgtggctcttcacaagctgcgttggaaggtagtctccaactcagcggccaaactcggttgaacgttgctagcaccaacaggttggctgtggctagacccggttttaccgttagagctcaacaggtccctgccgagcctgaaactggacgcagagctgtgctgggtcttgttgctgctggtttggctactggctcctttgttcaagctgtgcttgctgatgcacgaagcatcaaggttggcccgcctacaccgaccttcggtggattgcccggaactttgaattccgatgagccaagagaccttgatctgccgtacaaagatcggttttttctccaaccattgac

SEQ ID NO: 206804 - DNA, 409 bp, Gossypium hirsutum
cggacgcgtgggggaattttagtcttcaggggaacgatcgaacgatgtcgtacctactaccgcacctgcactcaggatgggccgtagatcaggccatcttggcagaggaagagcgtctcgtcgtcatccgattcggccacgactgggacgaaacttgcatgcagatggatgaggtgcttgcttctgtcgctgaaacaataaagaactttgctgtgatttatcttgtagacataacagaagtacctgattttaacacgatgtatgagctttacgatccatcgacagtgatgttctttttcagaaacaagcacattatgattgatcttggcactggcaataacaacaagattaactgggcactcaaggacaaacaggagttcatagacatcattgagactgtataccgggg

SEQ ID NO: 206805 - DNA, 400 bp, Gossypium hirsutum
cccacgcgtccgcccacgcgtccgcccacgcgtccgcccacgcgtccgcccacgcgtccgcccacgcgtccggtttttgttttttgttttttcactttcacaccacattcttcagtgcaggcaccatggcagcttcctcagctttgttcacccctatcttctccaccgtccaaaagaagaatggcattgtcacccccttcagcatctcattccacggccttagacccctaagcaagagcaaatcttcatccaacgccatctccttctcaagaaactcagctgctagtgctaggcttgcaatcaaagcagagctgagcacccaagttgtgataagcgtcagcactgctctctcccttttcttgggtagatttgtgttcttcaactttcaaagagagaacgt

SEQ ID NO: 206806 - DNA, 464 bp, Gossypium hirsutum
cttcgaaattcctttggggggcgcgtgcgcaacgcgttcaaccactcattttcttatttttccagccatggcggcagaatgcaatgcatgcacgtgtggcctcctactggaaagaagaaattcgagactctctcatacctccccgatcttacacccgtgcagttggctaaagaagtagattaccttcttcgctcaaaatgggttccttgcttggaattcgaattagaggagggattcgtgcaccgtaaatactcgagcctacccacgtactacgatggacgctactggaccatgtggaagcttgcctatgttcgggtgcaccgactcggctcaagtattgaaagagctttgggaatgcaagaaggaataccccaatgcattcattagaatcattggcttcgacaaacggcggtaagtgcagtgcattagtttcattgcctacaaaccttcagcttctaagcttt

SEQ ID NO: 206807 - DNA, 428 bp, Gossypium hirsutum
gctagagaaggcatcgtttcgttgggaggcccttacattcctctcaaaactggaagaagagacggtagaaggagcagagcacatgttgtggaggagtatcttccggaccacaatgagaccatctctggcgttctcgacaggtttgccgccatgggtattgacacccctggagtcgttgccctcctaggagctcacagtgtcggcagaactcactgtgtgaagctggtgcatcggttgtacccagaggttgaccctgccctcagccccgaccatgttccacacatgctccataaatgccctgatcaaatcccagaccccaaggccgtccagtatgtgagaaacgatcgtgggacacccatggttttggacaacaactactacaggaacatactggacaacaagggtttgttgattgtggatcaccaact

SEQ ID NO: 206808 - DNA, 392 bp, Gossypium hirsutum
caaaacccctagccagccacttccccgccgcctctccgaaccatgggccgagtccgtaccaagacggtaaagaaatcctctcgccatgtgatcgagaggtactactctcgcatgacgcttgatttccacaccaacaagaagatcatcgaagaagtggctatcatcccttccaagcgtctccgcaacaagatcgccggcttttccacccatctcatgaagcggatccagaagggtcccgttcgtggcatctctttgaagctccaagaagaagagcgtgaacgtcgcatggatttcgtccccgacgaatccgccatcaaagttgatcaaatcgaaatcgataaggaaactctcgatatgctttccgttctcgggatggctgatattccccggct

SEQ ID NO: 206809 - DNA, 405 bp, Gossypium hirsutum
  unsure (1)..(405): unsure at all n locations
gcatacactactagtacccactactagcaatggcttcctcaatgatctcatcggctaccattgccactgcctctccggcacaggctaacatggtcgctcctttcaccggcctcaagtctgcctctgctttcccagtcatcaggaaggccaacaacgacattacttctctcgcaagcaatggcggcagagtgcaatgcatgcaggtgtggcctcctactggaaagaagaagttcgagactctctcatacctccccgatcttacacccgtgcagttggctaaggaagtagattaccttcttcgctcaaaatgggttccttgcttggaattcgaattagaggagggattcgtgcaccgtanatactcgagcctacccacgtactacgatggacgctactggaccatgt

SEQ ID NO: 206810 - DNA, 429 bp, Gossypium hirsutum
  unsure (1)..(429): unsure at all n locations
cggacgcgtgggcttagtttagcgttccaagtaactctccctcccactcttacctttcaagcccgtaaagtcatgagcttggttctggaacctccgcctccacctctatgcaaatccaaaaccggtgctccgctcaaacgctgcttcacctccatccgcaccgcgttatctccgccaaaccatcgattcagagcctctcgttttccacttcatccgacttccagctctagaccaactgttactgtggttctaaagacggagaaagaaaaaaatgcggtgacggagcaaaaagacccgccggtaaggattgtggcagtggtcggccaaggaagcgtcagcccattaaaatgcaccccctgggaggaggttatgatgcacaccgcanaaagattgaaatgggtggatgaaggatatgaaatggttgttttc

SEQ ID NO: 206811 - DNA, 328 bp, Gossypium hirsutum
cggacgcgtgggcggacgcgtgggtaaatggcatcatcccttctctctagaactcttttgggtcatcgcttaattcgattctcctcgtctctccctcacaaccccttgattttctctaatcttttcaataagagagagttctgtgtacaggctgggtcttaccataccacatataaggcctctggtcagccttctcgtttaatggcttctgcagcaattgagataagaagtaatttttcgacacaatctctttccaccaatgatccggttgtttctgttgattggcttcatgctaatttaaaggagcctgatttgaaagtattggatg

SEQ ID NO: 206812 - DNA, 409 bp, Gossypium hirsutum
cccacgcgtccggtggccagactagggtttatcaaaaaaaacgacgaaatggatgattggttgaacgagaaacacttcccgtcgaggatccgagtttgggtcggaccggaagtcgggtcaacgtacgtgtccgggttaaccttgggtcggtccacgaacaatggtgaaaacgaagtcgaaacacaaaggatccttaaagggagattcgggaaatattcaaaggattccttccatgttaaagcaagagcaagggtttccatgaagaacaagatgaaaaactggaggtgggatcaagacgcggaagggaacgccgtggtgttcgacgcggtgctttgcgacaacgtgacgggccacgaaatcgcaacttggaaatcgttgaacaaaatagcaacggcagcagccatggttt

SEQ ID NO: 206813 - DNA, 431 bp, Gossypium hirsutum
  unsure (1)..(431): unsure at all n locations
cccacgcgtccggacatggcagagacattgtgtcagaagcgtgctttggaagcattcaggttagatcctgaaaaatggggagtaaatgtgcagcccctttctggttctccttccaattttcaagtttacactgcactcttaaagcctcatgacagaattatggcacttgatcttccccatggtggccatctctctcatggttatcagacggacaccaaaaagatatctgctgtgtccatattttttgagacaatgccatatcggttgaatgaaaacactggctatatcgactatgatcagttggagaagagtgcaactcttttcangccaaaattaatagttgctggtgccagtgcttatgcacgtctgtatgattatgcacgcattcgaaaggtttgtgacaagcagaaagcaataatgttggcagacat

SEQ ID NO: 206814 - DNA, 293 bp, Gossypium hirsutum
gagagataagagaaagcactgaaaacgcaaaaccatggcctctgcttctctgctcaagacttcaccagttttagacaagtctgagtgggttaagggtcacacccttcgccaaccttccacttctgcggtgaggtgccaccctgttgcaccctctggactaactgtgcgtgcaagctcatatgccgatgagcttgtcaagactgctaaagctattgcttctcctggccgtgaaattttggccatggatgagtccaacgctacctgcggtaaacgtttggtctcaatcgggcttg

SEQ ID NO: 206815 - DNA, 422 bp, Gossypium hirsutum
cccacgcgtccgcccacgcgtccggtcgcccttgctatcacctgcaaataactctccctcccttcgtccgaatttctctgaaaaaaatctcaaattcccttatttgggttgatatatagtattatatatatatatttacaagaatggtagcttcggctatttcagcttctttcaatctctctctctgtactcaatccagacccacttctatttcatccctttctcccagaaactcgacgaagttgatagtctctgcattgccatccccttatggagactcttctacaatggggttatctagtagaactgctgggctacctatgaagatcaacaagaagggcttacttgaatccaatccaagctacgatgcaatacaagctaaaacggggaatccacctgtgatgccagcagtaatgacttca

SEQ ID NO: 206816 - DNA, 430 bp, Gossypium hirsutum
  unsure (1)..(430): unsure at all n locations
tttagctatagcatacactactagtacccactactagcaatggctttctcaatgatctgatcggctaccattgccactgcctctgcggcacacgctaacatggacgctcctttcaccggccttaagtctggctctgcttttccagtcaccaggaaggccaacaacgacattacttatctcgcaagcaatggcggcagaatgcaatgcatgcaggtgtggcctcctactggaaagaagaaggtcgagactatgtcataccttctcgatcttacacccgtgcagatggctaaggaagtggattaccttcttcgctcaaaatgggtttcttgcttggaattcggattagaggacggattcgtgcaccgganatactcgagcctacccacgtactacgatggacgctactggaccatgtggaagctgactatgt

SEQ ID NO: 206817 - DNA, 428 bp, Gossypium hirsutum
catatgcttgtggctagccataaaccatgtaggattttgccggcaagtatgcagaggggttgatcaagaacgccaactacatcgccgcgccaagcaaaggtattttggcggcagacgagaacacatgctccatcgggaagcgtctctcgtgcatgaacgtcgagaacatcgagttcaatcgccaagccctacgcgagctccttttcacctctgccaacgcattatcctgcctctcccgtgtcattcttttcgaggaaacactttaccagaaaacatctgacgggaaacccttcggtgaaatgctcgaagagaacaatgtcatttcaggtatcaaggtcgataatggcaccgctgagatagccggcaccaatggccagaccaccactcaagggttcgactccttgggtgcgcgttgacagcaatactat

SEQ ID NO: 206818 - DNA, 397 bp, Gossypium hirsutum
ctttttcttgtggtctccaaagcatctctgttatatcggttattttctctgaagaactgacgaaaaaaatccgaatagattaaaacttaagaaagatcaaaagatgttcggaagagcacctaagaagagtaataacaccaggtactatgagattctgggtgtttcgaagaacgcttcccaggatgatttgaagaaagcttataaaaaagccgccattaaaaaccatccagacaaaggcggtgatcctgaaaaatttaaagagttggctcaagcttatgaggtattgagcgatcctgagaaacgtgagatatatgatcagtatggtgaggatgcactcaaggaaggaatgggtggtgccggtgctcatgatccgtttgacatcttctcctccttcttt

SEQ ID NO: 206819 - DNA, 397 bp, Gossypium hirsutum
cccacgcgtccgcaaagattctctcaaaacagtgagggagtagtagttcgggttatcgacgacgttttttttcaacacgaaaaaaaatggattacttttatggaccagggaggaaccatctcttcgttccgggtccggttaacataccggaacccgttattcgagccatgaaccggaataacgaggattaccgttccccggctattccggcaatgacaaaaacccttctcgaagatgttaagaagatattcaagactacgaccgggactccttttatgatcccaacaacaggaaccggcgcatgggagagtgcacttactaatacgttatcccccggtgaccgaatcgtatcgttcctcattggacaattcagtcttctttggatcgatcaacaaca

SEQ ID NO: 206820 - DNA, 403 bp, Gossypium hirsutum
gtccgcacttcccttccctttctcgttgttcactcaaaagaaaagaactctcactttcttttttcaaccatcaaattctcatttctcaccaatttttttctcatccgaaatggagagccagaaaacattaaacgcagaactcgaaaatctatcaccatgcggcagtggaaaaaggagtacaagcagccattcaagttcacccgagttcgagttctggatggtccgaaacccgccttttcccgaacccgacctcatctctgccgatgaactattcgttaatggcgttctccgtcctctccatctcttacccaacaaacaacccgaagagaacccacaaatagactcaaataaacccgcatcacaacctcctatacccgaccctgaccctattataacatcggat

SEQ ID NO: 206821 - DNA, 425 bp, Gossypium hirsutum
  unsure (1)..(425): unsure at all n locations
ctgtcatctgtccgtctctctgttttactccacaaccactatcactaccattatggcttcggctactgtttctgtagccaaacccaaccttcagattcaggcaaaaggaaagggtgttggttttgcagatttctcangcctacacaactcctctactagccttccctttgctaggaaaacctctgatgacttccattcactcgttgcttttcagacatctgctctaggaagcaataatggcgggtacaggaaagggatggcagaggcaaagctaaaggtggctataaatgggtttggtaggattggcaggaatttcttaagatgctggcatggccgtaaggactccccacttgatgtcattgccatcaatgacactggtggtgttaagcaggcttctcaccttctcaaatatgattccacccttg

SEQ ID NO: 206822 - DNA, 382 bp, Gossypium hirsutum
gctaaaggttatgtgcgagcacaagaaccggataaagccgaagaacttctaacaatcatgattgaatcagaagcatcccctaatgttgtgatctttactaccgttatcagtggctggtgcagtgccggtagaatggatcaggcaattaagattttctaccaaatgtgtgaatatggagtatctcccaatttgaaaacctttgagaccttaatatgtggatatagggaagccaaacaaccatggaaagcagaagaacttcttcaagtaatgaaagagtttgaggttcggcccaagaaatcaaccatatttcttatcgccgaagcttggcgtgcctctggattgtcaaaagaagcaacagaattctgggttctggtcatagcaa

SEQ ID NO: 206823 - DNA, 396 bp, Gossypium hirsutum
accacgcgtccggtttgaccctggtgcagtacctacttttaagttgtctgatattaaagctgcaataccaaaacattgttgggttaaagatccatggagatctatgagttatgttgtgagagatgttgttgttgagttaggattggctgctgatgctgcttatttcaataactgggttgtttggccactttattggattgctcaaggaaccatgttttgggcactttttgttcttggtcatgactgtggacatggtagttttttcaataatccagctttgaatagtgttgcaggtcatattcttcattcttcaatccttgttccataccatggatggagaattagccatagaactcatcaccaaaatcacgggcatgtcgaaaatgacgagtcatg

SEQ ID NO: 206824 - DNA, 428 bp, Gossypium hirsutum
atttagatctcaaccactcaaatcactgaaaaaacaacccagcaaaatgtacggattcgaagctatgacctgcaacatccacggcgggtacctggaagcgatcgtgagaggtcaccgggccggtctcttaaccgccgtcgattacaacaatctttgccaatgcgagacccttgacgatatcaagatgcacctattcgccaccgaatacggtacttacctccaaaatgaaccttcaccattgcatacgactactattgcggagaaatgcactcttaaactcgttgatgagtataagcatatgctatgccaggctaccgaaccattgtccacctgcttagagtatatcacatattgtcacatgatagacaatgttgacttgatgttactggaaccttgcatgagagaaatgttcaagagcttttggagaa

SEQ ID NO: 206825 - DNA, 383 bp, Gossypium hirsutum
  unsure (1)..(383): unsure at all n locations
caacttttacccaaatctgtaaaagctgacatctccagcagcaaagagagttcttctctactttctcgacagtatcaatggcagaagtaacaaagcgatatgcagtggttactggtgcaaacaagggaatcggattggaaatatgtaagcagatggcttcaaaaggaaccatggttgttttaacagctagagatgagaagaggggtcttgaagctgttgataagctgaaagatcttggcctgtctgataatgtagtttttcatcagcttgatgttgcagaccctgctagtgttgcttctttggtggatttcatcaaaacacaattcggaaagcttgatatcttggtgaacaatgcanggattggtggcgtcaaaagtgatctt

SEQ ID NO: 206826 - DNA, 274 bp, Gossypium hirsutum
aatataatcctcacaagcatgttcagtgtaagcttcagaatgagcagaaagggaggccgttttccctgaaggaatgtgcaatctccatcattttggcagctgagttaataactggaatcccatcacttgatgcatatgcagctaatcctccattggcagatttatctggtttaatctctgggcctgcaattaaagaccctggagctttgttgagatatgcattgccaattaacaataaagctggtagagaagggcaaaaaccacttggagatat

SEQ ID NO: 206827 - DNA, 373 bp, Gossypium hirsutum
  unsure (1)..(373): unsure at all n locations
agagcttctttctagctatatccttatcagctttcaaagatggcaggaatcgcctttggtcgctttgatgattccttcagtttggggactgtcaaggcctaccttgctgagtttatctcaactttggtgtttgttttcgccggcgttggctctgccattgcttacaacaagttgacaactgatgcagccctagatcccgatgggctagtcgccattgctgtttgccatggatttgctctctttgttgcagtggctatcggtgccaacatctcangtggccatgtcaaccctgcagtcacttttgggttagctcttggtggccaaatcaccatactaactggcatcttttactggattgcccaactttcttgat

SEQ ID NO: 206828 - DNA, 376 bp, Gossypium hirsutum
cttgaaaggccattattttattgccacttatcatcccttccaaccagactatcaagggtggctctaaaaaattgtttccagttgacctcagtttgcaacaccagagctagtgtgcttcaaagctaccatcatcatcatgtttcttctgttgacaagatccatttccagacatttaaagggttgaaattgaataaacccaatttatcattcactgctggtagatgccaaaaatccaggcttatatgcaaagccagtgaggctgttgctcaagttgaagtggtgacagaagcagactgggaagagcttgtggttggcagtaagacaccagttttagtggatttttgggcaccatggtgcggaccctgtcgggtgattg

SEQ ID NO: 206829 - DNA, 422 bp, Gossypium hirsutum
cccacgcgtccgcacaaactggtgctatgagaaaagttgctacttattttgctgaagctttagctcgaagaatttatagaattttcccaccagattcacttgatccatcatataatgataagttacaaattcccttctatgaaacttgtccttatttgaaatttgctcattttacagccaatcaagccatattggaagctttttcaatggctagtagagttcatgttattgattttgggctaaaacaaggtatgcaatggccagctttaatgcaagcacttgcattaagacccggtggaccaccggcgtttcgattgaccggaattggaccgcctcaaccggataatactgatgcgttgcaacaagtggggtggaagctagctcaattggccgaacgcatcgggatcgaattcgagtttcgg

SEQ ID NO: 206830 - DNA, 425 bp, Gossypium hirsutum
  unsure (1)..(425): unsure at all n locations
cgctggtgctatttgacctcattcacaatgcctcgccgtagctctggaaggtctgcttctcgtcctgcttctgctcgcagccctccacctcaaccagctcatcatgctcctcctccagctcctgctcagagtggaagtggtggatccttgctcggaggcataggctctaccatagctcanggcatggcttttggtactggaagtgctgtagctcacagggctgtggatgctgtgatgggtcctcgtactattcaacatgaaaccgtggtttccgaggctgcagctgcccctgcaccagcaactacttccaatagtttagctggcactgattcatgcagcatccactacaaggcattccaggattgcctgaacagctatggaagcgaactcaacaagtgtcagttctacatggatatgttgactga

SEQ ID NO: 206831 - DNA, 338 bp, Gossypium hirsutum
cccacgcgtccgatctaaaccacttgatttctgctactatgagcggcgtaacatgctgcctaaggtttcccggacagctgaactctgacctccgaaaggtggctgcgaacctgatcccgatcccacgtcttcacttctttatggttggatgtgcaccacttacatatcgagggtctcagtagtacggttctctaactgtcccagagctgactcaacacatgtgggaagctaagaacatgatatgtgctgctgacccttggcatgatcactacctgacagtatcagacatgttccgaggcaagatgagcaccaaagagggtgatgaacagatgatgaat

SEQ ID NO: 206832 - DNA, 290 bp, Gossypium hirsutum
cagaaaggtaaagcgctaaggagaagaggaagaagagatggcagtgagcgcaacggtgatcggagcacttctgggactgggcacccaaatgtactccaacgctctccgcaagctcccttatatgcgacatccgtgggagcacctgttggggatgggtctgggagccgtgttcgttaaccagcttgtgaattgggacgctcagcttcaacgggaccttgacaatatgctcgaaaaggccaaagctggcaacgagcgccgctactttgatggagatgatgattaatgctttc

SEQ ID NO: 206833 - DNA, 368 bp, Gossypium hirsutum
gtgagactcttttgtataactgtagcatatagtactagtaagcagtaatagcaatggcgctcctccatgatctcatcggcaaccattgccaccgtgaactgctcctccccggcacaggccaacatggtggcccccttcaccggcctcaagtctgcctctgctttcccagtcactaggaaggccaacaacgacatcacttctcttgcaagcaatggtgggagagtgcaatgcatgcaggtgtggcctcctcttgggaagaagaagttcgagacactctcatacctccccgatcttacacccgtacagttggctaaggaagtagattaccttcttcgctctaaatggattccttgcttggaattcgaatt

SEQ ID NO: 206834 - DNA, 320 bp, Gossypium hirsutum
cccacgcgtccgcccacgcgtccgcattatactcgtactaagaagaaactagttgtaggcagctattatatcgtttctcctttctcccttctcttaagagtagaatgattattggaaggttacgccaatggttaagtctactggtctgtgtgcttgctgttatactactcaaatctgaaggcgctagtgtagggattacttatctgcaggatgccgtagcgaaaggagctgtttgtttggatgggagtccaccagcttaccattttgacaagggctctggcgctggacttgataattggattgttcacatggagggtgga

SEQ ID NO: 206835 - DNA, 424 bp, Gossypium hirsutum
cccacgcgtccgctttagagtaaatttcttttgcaatcctttgtagagctccgggatccattgtcaccatgtcttgctcaaatctgacaatgtgggtgtcctcaaaaccctctctttctgacacttcttcactctctttccgttctttcatcagcccttttcagctcccatctcagagctcaacccccggtaacccttccaggtcctcatctgtaaccccagttcactgtggtcttcgtgagcttagagaccgtattgattcagtaaagaacacgcagaagatcactgaagccatgaaacttgtggctgctgctaaagttaggagagcacaagaagctgttgtcaatggcagacctttctctgagtccctggttgaagttctttacaacatcaatgaacagctccagactgaagacatagatgc

SEQ ID NO: 206836 - DNA, 360 bp, Gossypium hirsutum
cccacgcgtccgcccacgcgtccgcccaaggtaaatatgccgatcagaaacatagcggttggccggcccgaagaggctactcaccccgatgctctcaaggctgctttggctgagttcatctcaaccttgatcttcgttttcgctggatcgggctcaggaatggcctttaacaagttgactgacaacggagcaaccaccccggctggtctcgtagccgccgctctagctcatggcttcggtcttttcgtcgctgtctccgttggcgccaacatctcacgtggccacgtcaaccctgccgtcaccttcggtgcttttgttggcgggaacatcactctcttgcgcggcattctttactggatc

SEQ ID NO: 206837 - DNA, 391 bp, Gossypium hirsutum
ggggggtgagaaaatggagacacacatagggtccacgctctctgtgtccactctgagcacactggccaccgaggacgatctgtcgaggtgcatgtaagtaaaccagccccggttgctcctcctctcaaaccgcaggcagcttggggactaatgtgactacaacgacggcactgacaggtagagagcgcgaatcgaacgcccaagatattccgttgttcggttttagaaagaagttgaagagcgcggaggaagaaacggtggagatcgtgaaagaaggattggagacggcggagaaagggctggagacggcggatagagggatctttacagtggagaaagggttgaagacggcggagaagaagatagaaacagctgaaaaggagattgaaag

SEQ ID NO: 206838 - DNA, 434 bp, Gossypium hirsutum
ggagtgagcgggacggtgaaggaccaagtggcggcgaaactgagcgacttggcggagctcgtgagtaattgcttgtcgattttcgcggcgagcggcggagacgatttcggtggagtgccggtgcagaacaagaggttgctggcgtcgggtgacgatttatcgggagaaaatgtcgacgaggacaaattcccgaagtggctagggaggaaggagagggtactgttgaacactcccgtgtcggcgatccaagctgatataatcgtctcgaaaaacggtaccgttaagacgatcagcgaggcgattaaaaaggcgcaggagaatagtactcggcggatcatcatttatgtgagggcaggaaggtacgaagagaaggatttgaaggtggggagaaaaaaaataaacttgatgttcataggggacgggaagggtaaaac

SEQ ID NO: 206839 - DNA, 415 bp, Gossypium hirsutum
cccacgcgtccggtttctctccttctcgccgactcgcgtgcgctcctgtggctctctgcaaccctcgcatatctcttcaagatctgatctgatctgacaaaaaaatgttcgggagagcaccaaagaaaagcgataatactaaatactatgagatattgggagtgcccaaaaccgcttcccaagatgattggaagaaggcttacagaaaagctgcaattaaaaatcatgcagataaaggcggtgatcctgaaaagtttaaagagttggctcaagcttatgacgtgctgagtgacccagagaagcgtgagatatatgatcagtatggtgaggacacccttaaagaatgaatgggtggaggtggtggtgcccatcatccatttgatatcttacaatccttctttggtggcaaaccttt

SEQ ID NO: 206840 - DNA, 405 bp, Gossypium hirsutum
ctcgcttcatacagagacgaaatgctcgaccatgaaacaattcagagattcgtttcgccggtgacggcgaacatcgaacccgacggtgattatgaagattatataagaactgagcttctttatcaaacggggttatctcaagaccccactaactctctcctcctcgccaattacgctcagtttctttaccttgttgcacatgattatgagagagcggaagagtacttcaagaaagcggtaacagtggaggcggtggatgcggaagcgtacagtaaatacgcgagctttttgtggaaagcgaggaacgatttgtgggcagctgaagaaaccttcttggaagccattgaagcagatccgagcaactcttattacgccgcgaattatgctcattttctatggagcact

SEQ ID NO: 206841 - DNA, 348 bp, Gossypium hirsutum
tgcccacgcgtccggttcaataatttaggtgaactgttatgtaccatcactgggtttgactcattctctttgcaacctaatgccggtgctgcgggcgagtatgctggactaatggttatccgtgcatatcatatgtcaagaggggaccatcaccgcaacgtgtgcatcatacctgtttcggcacatgggacaaatcctgcaagtgctgctatgtgtggaatgaaaattgtttctgttggaacccgattccagggtaacatcaatattgaagaattaaggaaagctgctgaagctaacaaggacaagttgtccgctcttatggttacttaatcctcaacacatggagtg

SEQ ID NO: 206842 - DNA, 355 bp, Gossypium hirsutum
tgacaatttggaagcaatcaggcatcttccttctactaaacattatgaacatcgagagaggcactgtccagaagaaccaccaacctgccttgttcctcttcctgaaagatataagcgtccaatcgagtggccaaaaagcaggggaaagatttggtactacaatgttccccataccaaattggcacaaattaaggggcatcagaattgggtgaaagttactggagaatacctcacatttcctggtggtggaacccagtttaagcacggtgcgcttcattatatcgacttcatagaagagtctgtgcctgatgtagcttggggaaaacggtctcgcgtagtattggatgttggatgt

SEQ ID NO: 206843 - DNA, 359 bp, Gossypium hirsutum
aaaatcagttgcttcacaatggcctctacaaccatggctctttcttccccatcattcgccggtaaggcagtgaagttctccccttccacccctgaaatccggggaactggccgtgtttccatgaggaaaaccaccaagcctgttccttctggtagcccatggtacggtcctgaccgagttttgtacttgggtccactttccggtgagccaccatcttacttgaccggtgagttccctggtgactatggttgggacactgctggactctcagctgatcccgaaacctttgctaggaaccgtgagctcgaagtcattcactgcacatgggccatgttgggagctcttggtgtgtttccctg

SEQ ID NO: 206844 - DNA, 383 bp, Gossypium hirsutum
acgcccacgcgtccgagctaccttaacacaagttacaaactcaaaaaccccaagttctcactgtcaaaaaacttcccacattcaccatgtctgacaggtgcggcaactgtgactgcgctgaccgcagccaatgcacgaagggaaacagcaacaccatgatcattgagactgagaagagctacatcaacactgctgtgatggatgctccagctgagaacgatggcaagtgcaagtgcggtactggctgcagctgcacagactgcacctgtggccactaagccaacatacaatggtcatgcttcaggtcatggcatatatagggatctaaataatgaatttaacgttgaataatttgtcttgtgtagtttgtgtggtgacttata

SEQ ID NO: 206845 - DNA, 304 bp, Gossypium hirsutum
cccacgcgtccggtttttttgttggctgtagtggttgataggtagtaagaagtgaggagtgaaaatgaatgaagagatgaatggcgttgaggttgagaatcatcaagaacatgcgcctgagaaaatagattacgtgttcaaagtggtggtgatcggtgactcggctgttggcaagactcagattctgtccaggtttaccaagaacgagttttgctttgattccaagtccaccattggggttgagttccagaccaggacggttaccattaagagcaaagtcatcaaagcacagatctgggatacc

SEQ ID NO: 206846 - DNA, 284 bp, Gossypium hirsutum
  unsure (1)..(284): unsure at all n locations
cccacgcgtntgaagactcgtgggcggacgcgtggagcgacttgttaggtgctgtccgggcccggggggcctatgagcaagtgatgtaatgggtccgataagtaggacgcaatagtgtctggaaaaagctcgggaactcgagggcagggcgaccatgtttctagctacctacgatgaccattgagaagctgttggagtatggaaacatgcttgttgcataacaagagaacgtgaagaggcgtcaattggctgacaaatatttgagtgaagctgcccttggaaat

SEQ ID NO: 206847 - DNA, 381 bp, Gossypium hirsutum
  unsure (1)..(381): unsure at all n locations
gggattggcactggggaataaacattattaagggagatatatttagctatagcatacactactagtacccactactagcaatggcttcctcaatgatctcatcggctaccattgccactgcctctccggcacaggctaacatggtcgctcctttcaccggtctcaagtctgcctctgctttcccagtcaccaggaaggccaacaacgacattacttctctcgcaagcaatggcggtagagtgcaatgcatgcaggtgtggcctcctactgggaagaagaagtttgagactctctcatacctccccgatcttacacccgtgcagtttgctaaggaagtnagataccttcttcgctcaaaaatgggtccttgcttggaattcg

SEQ ID NO: 206848 - DNA, 304 bp, Gossypium hirsutum
cccacgcgtccgcttcaagctgcagctaccctgatgcaaccaatcaagggtgctgcaccatcaaggaccaatgtgccgctcacgtcctcccagagcgtttctaaggccttcggtttggagcctgttggtgctaggcttacctgctctttgcaaactgacctcaaggacttggctctgaagtgtgttgatgctaccaagctcgctggtttcgctcttgctacatctgctcttgttgtctcgggagcaagcgctgaatgagtttcaaagcggctaacctacgctgaaattcaaagcaagacataca

SEQ ID NO: 206849 - DNA, 420 bp, Gossypium hirsutum
  unsure (1)..(420): unsure at all n locations
ctgggttttttctcttccctctctttttttgataaatcactaatcatcttttttctgcatgcaacttccttttcttggataatagggagggggaaaagaaaaagtaaccggatgttgataagcagcaattcgtaagacttatccgctggctgagaaaggatgccaaaccagctatggtttgcactagaaatgatttatcagcgtggaaggatttcccaaagggtctcacggtccttcttcttgatgaagacaccaattctgctgcagagataaaatcaaagcttgaagctatggattatattgtatataccttctgcaatgaaaatgaagctcttgctgcagtttcaagtagacccgaaagcttccatgtagccattgtagangtctgcacaaatagtaacaatgggggtttcaaagttc

SEQ ID NO: 206850 - DNA, 422 bp, Gossypium hirsutum
gcatatagtaatagtaagcagtaatagcaatggcctcctccatgatctgatcggcgaccattgcgcaccgggaaccgctccttcccggcacatgccaacatggtggtccccttcaccggccgtaaatctgcctctgctttcccagtcaccaggaaggccaacaacgacatcacttctcttgcaagcaacggagggagagtgcaatgcatgcaggtgtggccgactcttgggaagaagaagttcgagactctctcatacctgcccgatcttactcccgtacagttggctaaggaagtagattaccttcttcgctctaaatggattccttgcttggaattcgaattagaggagggattcgtgcaccgtaagtactcgagcttacccacgtactacgatggacgctactggaccatgtggaaact

SEQ ID NO: 206851 - DNA, 432 bp, Gossypium hirsutum
cccacgcgtccgcccacgcgtccgcccacgcgtccgcgtgtaaatgcataatgtgtaagtattattagtaattaccttgcctaaaatgaaatttagtagcaagtttgtgttacatgcattttaagtattgtattgaagggtataggactaacgtaatatattactgtcaatgtaaactttgcaaatttgtagatttattaacttattctagtgcccaaaggactaggatgctgaagcatgcatatcttattgactattaagttcaactcatcatatgttatggaaatatattaatgtgtttctactgttaaaatataattcatgggtcatgctcaatatcatttcacgttcaagatattttttaactgttttgatgaatttgattccattacccctaaaagatgacatgacaaacactggagtaattgatca

SEQ ID NO: 206852 - DNA, 422 bp, Gossypium hirsutum
ctcaaaaatgagctccattgctttcaagcccttccacggcctccgccgtagctccgccgtccccacccctacttccactaccaccaccctttacaaacctgctgtcaaattccatgtctcagccgccaaaacttctccaaaactaagcaaccgcaacctcagggtagccatcatagggggtggtccggcaggaggctcagccgccgaaactctcgcgaaggctggcatagaaacgttcctaatcgaacgaaaactggacaactgcaaaccttgcggcggagccatcccgctttgcatggtgggtgaatttgacttgcccgtggatatcatcgaccggcgagtcaccaaaatgaagatgatttcgccctccaacattgccgtcgacatcgggcaaacgttgaaaccgcatgaatacattggga

SEQ ID NO: 206853 - DNA, 405 bp, Gossypium hirsutum
  unsure (1)..(405): unsure at all n locations
cccacgcgtccgagaataccttaaatgagtttatcatatcaaagaagtttagcttaattgcctactgaatatacagttgaagagttgtatgaaattgaaacagcttgttaaaattgtgtgatggtaattgtgccatccggagaagaagctgtatgatggcaacagctgctattatcggacttactgttggaaagcgattcttgagttcttcgttttcgtattccgatatcattgagaagcactcgtatgccggtgattatggcggagctccacattatcaaactgctcccactaaaagtttaatagttgcaaagaaatcatctaattgtagccaaagtgttccttcatatgatcggcgtagtcggtcgatcaaagctcttaangagcatgtggatgctgctttcc

SEQ ID NO: 206854 - DNA, 430 bp, Gossypium hirsutum
  unsure (1)..(430): unsure at all n locations
acggttggctaaggaagtagattaccttcttcgctctaaatggattacttgcttggaattcgaattagaggagggattcgtgcaccgtaagtactcgagcttacccacgtactacgatggacgctactggaccatgtggaaactgcccatgtttgggtgcactgactcggctcaggtgttggaggagcttgagaattgcaagaaggaataccccaatgcattcattagaatcattgggttcgacaacgttcgtcaagtgcagtgcattagtttcattgcctacaagcctaaaggctactaagttgtttacttncctcctaggaattccatttgtttcaaagttgtacttaaattaagcccctcaaatccccacccccttttttcttttacttttttatttgaggtatttggcttggggtctttctctttg

SEQ ID NO: 206855 - DNA, 429 bp, Gossypium hirsutum
tctggatctataaattaagcgcaaaggcttcaccagggactgctcaagtctccctttgcgccctttacacccttgttcttctaacacgatttcaagatggagattactataaaggagtctgctattgttcgtccagctgaagacactcccaaacgaagtctatggaactccaatttagatatagtgatgataagataccacatccctactgcatactattacaagccaaatggttcttctgatttctttgatactggaaggcttaaagaagctttgagcaagattcttgtcccattttaccctgttgcttgaaagtttggggtatgatgaaaatggaagacttgagataatatgcaacggtgaatgagtttattcgttgaagctgaaactactgcagtcatggaacatttgattggtgcttttgccgag

SEQ ID NO: 206856 - DNA, 379 bp, Gossypium hirsutum
acgcttacagagaccaaagggggggaaatggcgatcacactgaacaatggatttaagatgccagtggttggtttaggtgtttggcgtatggatggaaaagacgttagagacctcatcatcaactccatcaagcttggttatcgtcattttgattgtgctgctgactacaagaatgaagcagaagttggtgaggcattgtctgaagcattcaaaactgggcttgttaagagagaggacctctttattacaaccaagctttggaattctgatcacgggcatgttcttgaggcctgtaaagacagtcttaagaagcttcaattggattatctgggattgtatctaggtcacttttccgttgctggtaaacacactggagtcg

SEQ ID NO: 206857 - DNA, 392 bp, Gossypium hirsutum
  unsure (1)..(392): unsure at all n locations
ctcatttaagtgtcttaaataacccatttcaaagttggtaatggctttgcagactgctgctttggttccagctactttcaccctacctaaagagggaaaatcaagtccatctttcaaggattcaactttctttggggtctcactttctgaacatgccaaagctgatttcagctcttctgcattaagatgcaagagggaattcaacccaagaaatggagctgtgagagccgaaacaacagctactgcaactccagcaatcagcagatctgcggtggatggcaagaaaactctaagaaagggtagtgttatcatcaccggtgcctnctccggattgggtttagccactgctaaagccctggctgaaactgggaaatggcatattatcatggctt

SEQ ID NO: 206858 - DNA, 444 bp, Gossypium hirsutum
cgtcacgcgtccgaaagcactgaaaacgcataaccatggcctctgcttctctcctcaagactggaccagttttagacaagtctgagtgggttaagggtcacacccttcgccaaccttccacttctgcggtgaggtgccaccctgttgcaccctctggactaactgtgcgtgcaagctcatatgccgatgagcttgtcaagactgctaaagctattgcttctcctggccgtggaattttggccatggatgagtccaacgctacctgtgggaaacgtttggcctcaatcgggctagaaaacacagaggctaaccgccaagcctacaggacgttgcttggttcagctcctggccttggtcagtacatctctggtgccatcctctttgaggaaaccctctatcaaaccacaattgatggcaagtagatggttgatgttcttgttgagc

SEQ ID NO: 206859 - DNA, 380 bp, Gossypium hirsutum
acgctattgcccactctcttttatgctctcagttaacaacaaaatccgtaaatggctaccactgcttctccaatggcgactcagctgaagagcagctttacgtcgtctgttacaagaggactggtagtccccaggggcatttcggtatccccgttcaaagtatcttccggaaagaccaagaccccttgcttcactggcaaagctgttcaatccgacaagtcaacatttcaagtaatccaacccatcaacggcgaccccttcattggaagcctggagacttcaatcaccttaagccccttaattgcatggtacctttgcaaccttccagcctataggacggcaatgaacccacttctgaggggactcgaagtgggtctggc

SEQ ID NO: 206860 - DNA, 424 bp, Gossypium hirsutum
acgaaaaccatggcctctgcttctctcctcaagacttcaccagttttagacaagtctgagtgggttaagggtcacacccttcgccaaccttccacttctgtggtgaggtgccaccctgttgcaccctccggactaactgtgcgtgcaagctcatatgccgatgagcttgtcaagactgctaaagctattgcttctcctggccgtggaattttggccatggatgagtccaacgctacctgtgggaaacgtttggcctcaatcgggctagaaaacacggaggctaaccgccaagcctacaggacgttgcttgtttcagctcctggccttggtcagtacatctcaagtgccatcctctttgaggaaaccctctatcaaaccacaattgatgggcagaagatggctgatgttcttgttgagcagaaca

SEQ ID NO: 206861 - DNA, 421 bp, Gossypium hirsutum
  unsure (1)..(421): unsure at all n locations
acgactttagctatagcatacactactagtacccactactagcaatggcttcctcaatgatctcatcggctaccattgccactgcctctccggcacaggctaacatggtcgctcctttcaccggcctcaagtctgcctctgctttcccagtcaccaggaaggccaacaacgacattacttctctcgcaagcaatggcggcagagtgcaatgcatgcaggtgtggcctcctactggaaagaagaagttcgagactctctcatacctccccgatcttacacccgtgcagttggctaacgaagtggattaccttcttcgctcaaaatgggttccttgcttggaattcgaattagaggagggattcgtgcaccgtanatactcgagcctacccacgtactacgatggacgctactggaccatgtg

SEQ ID NO: 206862 - DNA, 404 bp, Gossypium hirsutum
cttgtcgactttgcttgttacaaaccggaagacgatcgtgaaatgtcggtcgactcgtttttgaagatgacggaagatagcggtgctttcacggaggaaacacttcagtttcaaagaaggatatcgacccggtccgggttaggcgacgaaacatattttccgagagggataacgtcaacaccgacgaatctgtgtatggaagaagctcgagctgaagcggaaactgtcatgttcggagccgacgatgaactttttgcaaaaaccggagttgacccgaaggaaattggtatccttatagcgaattgcagcttcggtaatccaacaccatcgttatcctccatgattggtaaccattacgagctacgtacaaacatcaacagctttaatcttggtggaatggggtg

SEQ ID NO: 206863 - DNA, 347 bp, Gossypium hirsutum
atcactatcactaccattatggctatggatactgtttctgcagccgaactaaaccttcagattcaggcaaacggaaatggtgttggtttcgcacatgtctcaggcctacacaactcctctactagccttctctttgcccggaaaacctcggatgacttccattcactcgctgcttttaagacatctgctctaggaagccataatggcaggtacatgaaagggattgcagaggccaaactcaaggttgctataaatggcaatgctaggattgtcacgaacttcttaaggtgctggcatggccgtaaagactccccacttgatgtcattgccatcaatgacacatggcg

SEQ ID NO: 206864 - DNA, 424 bp, Gossypium hirsutum
  unsure (1)..(424): unsure at all n locations
gccacgcgttcgtggaaagcggatctttcttcttccacagtggtatgctgagaaacaagctctcggggaagtgagtccggagcttctggacacccaggtgaacccagctgtgtgggaaattagtgggcatatggcgttaaaaaggaggaaggactatgatgaggcgtctgatgaaaatgcttggaggctcctggctgaggtttctgtctctgatgagaggttccgggaagtgaatgcactcatctttgaagtcattgccagtggcgaacatggcattgaacatgatgctaagagtctgcctaaggagcccgatcctaaagctgaattcactgacgaagaaagcaccatgaccaaaacctcccaccgagctatcgtgggtgggacacaagaatgcgttgntctgcactaggaactggcatttcac

SEQ ID NO: 206865 - DNA, 354 bp, Gossypium hirsutum
gagactctttcggataactgtggcatatgctactggtaagcagtaataccaaaggccggcgccatgatctgatcggcaaccaatgccaccggcaactgttactacatggttcagggcaacatggtggcaccctgcaacggcctaacggctgcctttggttgatcagtcacttggaaggccaaccacgtcattgactatcgtgcaagcaatggacggagagttcaatgcatgcaagacttgcctactactgggccgaagaatcacgagacacttgtattccgaactcggcgtacacccgtacaaatgaataaggcactatattaccaagttcactctaaatgggttccatgcttg

SEQ ID NO: 206866 - DNA, 384 bp, Gossypium hirsutum
ggactccccacttgatgtcattgccatcaatgacactggtggtgttaagcaggcttctcaccttctcaaatatgattccacccttggcatcttcgctgccgatgtcaagcctgttggcactgatggcatctctgttgatggcaaggttatcaaggttgtttctgaccgcaaccctgccaacctgccatggggggacctaggaatagatctagtcatcgaaagaaccggtgtgtttgtcgatagagaaggtgcacgttagcacattcaagcaggagccaagaaagtgctgattactgccccaggtaagggtgacatcctcacctatgttgttggagtgaatgctgacacctacaacccatatgagcctatcatcagcaatgcttc

SEQ ID NO: 206867 - DNA, 393 bp, Gossypium hirsutum
  unsure (1)..(393): unsure at all n locations
gccacgcgtacgcaaaccaccaagtctcttctaccatggtctgaaaacctgaagattgttggaaggtgcattgattccattgcatctaaaacctctgtggatcctgcaaacgtcacttggtcctacacgtataaccggaagttattggcccctgaaataatagtcaagggtggtatgaaataccaagagaagattgaatctgttccaaaggattggtgggttgaagacgtatgtgagctagagatttttctgtacaaacgagtcatgactgctgtgaaatcaaagggaagaatggatggtgcaatcaatctgtgaggcactcaaaacttacgctgacagatggctgccagattctgttgatgcctngatttctgatgtacattcctggagaaa

SEQ ID NO: 206868 - DNA, 319 bp, Gossypium hirsutum
tggatacattcagcaagccttgcacatcggttaccatcacctgtgccgctgtcgctatcccatctgtgaccggccttaaagccgtcgcaaccgcagctaaagttagcgccacagccaaggttgcagcctcttcagtcccaagggtcagcatcaaggcctccctcaaagacgtcggtgttgctgttgcatgaactgctgcaagcgcaatcctagccaacaatgccatggccattgaagtcttgctcggcagtgacgatggcggtctggctttcattcccaaagaattcagcgtaagcccagtggagaagattgtgttcaa

SEQ ID NO: 206869 - DNA, 405 bp, Gossypium hirsutum
  unsure (1)..(405): unsure at all n locations
cccacgcgttcggttctgcatgagccgctgtgggactcatggctctgccttgggctccaccgatggtctcgtcaaggccaagaagcactccaagttcgcttacatttgggtgggtaactcccagacccagtgccccggtcaatgtgcctggccgttccaccagccaatctacggaccacaaagcgcgcctttgattgcaccaaacaacaacgtgggtcttgatggcatggttataaacttggctagcctctttgccgggaccgtcacgaaccctttcggaaatgggtacttccaaggcccagctgaggcaccattggaggcttcatcggcttgtcctggaatatatggtaaaagggcttattcaggctatgcatgaaacctacttgtagacnctacaactggcgc

SEQ ID NO: 206870 - DNA, 403 bp, Gossypium hirsutum
atttagctatagcatacactactagtacccactactagcaatggcttcctcaatgatctcatcggctaccattgccactgcctctccggcacaggctaacatggtcgctcctttcaccggcctcaagtctgcctctgctttcccagtcaccaggaaggccaacaacgacattacttctctcgcaagcaatggcggcagagtgcaatgcatgcaggtgtggcctcctactggaaagaagaagttcgagactctctcatacctccccgatcttacacccgtgcagttggctaaggaagtggattaccttcttcgctcaaaatgggttccttgcttggaattcgaattagaggagggattcgtgcaccgtaaatactcgagcctacccacgtactacgatggacgc

SEQ ID NO: 206871 - DNA, 235 bp, Gossypium hirsutum
aacaaactacatattctgcactttccttcaaatctttgcaaatcttcacaagcaccgcaaggtcggtcgtacagcgacggtacagtgtttcgaatcgtaatgtgttgaatgtaaatcgatacgtgcatgcatttgtgaataattgagttagggtttcgatttatatggtcgatataaaagtcggataccatgtatggagaagtacgagctggtgaaagacataggatcttggaac

SEQ ID NO: 206872 - DNA, 280 bp, Gossypium hirsutum
acgctcataccacaaactctgattacccgagactatcatacacctgcagaatggccgctgcaaccatggctctcacttccacatcagtcgccggtaaggccgataagctctgtacttgcgtgcctaaaatccaatgcaatggccgtgtttccatcagggaaaccgctaccaacggttcatcctctggaagtccatggtacaggaccgaccgaatcttgtacttgtatacattatctggtgagacttcatcttacttgtccggagaatttcctggtgacta

SEQ ID NO: 206873 - DNA, 365 bp, Gossypium hirsutum
acggacatcctctatcgaatgggtctttctgactaagattttgcggcattatctgggggtcacactctggtatcatattcaataaaatgtttctgattgtctatattcctggttatgtccgttatatgatcaatatcaaacctttggcggtggctatggtgttacagggaacggctcatcctgagagatcaggttttgatggcccttggaccaatgaacccctgaagggcgacagctcttactttggggagctgctaaaaggggaatcagaacggcttttggaacttccaacagacaaggctttgttagatgaccctcagttccgtaagtatgtaaagcactatgccaaggatgaggatgcattc

SEQ ID NO: 206874 - DNA, 407 bp, Gossypium hirsutum
gttatgccttatgacaccttgtctccctctcctgatgatccttcttaaaccaagaggcgcggggacaaacttggcgtgctaaagcttaatggagagtttggaaccactatgggatgtactggtcccaaatccggcattgactttcgcaatggctgagacttttcttgacctaagtgatattcaaatcgagaatcttaattctaaatactgatgtaatgttccgtagggtctgatgaactgatagaacacccatgatgacacattgtagattgtcgacatgtactgaaattcaaacattgagattcatactttcaatcagagccgatatcctcgaatggatgctgtagattttgatacattaccaagcaaatgccagcatggcaagggacgatgggatccttctggtc

SEQ ID NO: 206875 - DNA, 312 bp, Gossypium hirsutum
cattacgacacttgtggcaacttgtggttgacatctgtccaggcctcgggtttacattgaccgcgtgaaatctgacccggttcttgttcactagggcatatgataccatgaacctgtatattgcaaatttactgcggatgtatacaagtatcttcctgatgctgcggagcagatgtatgccagctatatatattgcacatcttacatatccattcacctgcatgtgctgcataagaatgccgactaacaccctttactgagatcattgttaatacagtgcggatgtcatcatataccatgcctacagactct

SEQ ID NO: 206876 - DNA, 403 bp, Gossypium hirsutum
cccacgcgtccgaaccctttggatccaactcggctttgttgcacaaaatcaatctgtcatggcaaccatctcggctaccaccacccctgcagctcttgttcacaagacattgcccaggattgcatccccagtccccattgggtcgccaacaatgggaaagagggggaaggtgatgatgatgtgtagcatggagaagaagagtgagaatgggtcaaacatggggatgagtgcatcattgctggcagcagcctgtgcagcaaccatgtcaagcccagccattgctctggtggacgagagaatgtccactgaacgaacaggacttccctttgtttgagcaacaacctccatcggtggatcctgtttgtgtgttcggtctgatctgggctctttactttatctatac

SEQ ID NO: 206877 - DNA, 389 bp, Gossypium hirsutum
gctgttttcgccgctgatcttctaggccatggcagatccgagggtcatcggtgctacttaggtgacatggataaagttgctgcaacatccttatcattcgtcaagcacgttcggaacagcgatgaatacaaaaacttacccagatttctgtttggggaattcatgggaggagcagcaacaatgctcatgtgcttggaatccgaccctgaaacgtggaccggtctaattatgtcagcgacgctctttgtgatgcctgagaacatgaagacgagtcaggtgcatttgttcgcatacggactgctcttcggattaactgatacatgggcaactatgccggataacaagatggttgggaaagcactcatagaccctgctaagcttaagatcat

SEQ ID NO: 206878 - DNA, 442 bp, Gossypium hirsutum
ggaatatttgtcagagatcgactccaatcctagctttgtcgatgaagaagagaaacttaggatcttcccttatcatgacttcaccgagagttcccatggctgcaatctgtgccccccaaatatgtgcaaagggagggtgattgaaacgattcaagcttctttagaagggaagaagaaaatcatataccttggagatggcagcggagattactgcccaagcttcaagcttggagaggcagactacatgatgccaaggaagacttatccagtttgggatttaatttgcaggaacccaatgttgatcaaggctgagatctatgaatggaccgatgttgaagagctcgagaaggttttgctgcaactaatcaacatgattgctcttgaagaagacgattccaatatcttccaattcatcttcagtgactgcaaattgcacaccatg

SEQ ID NO: 206879 - DNA, 418 bp, Gossypium hirsutum
aaaaaactatctttttcatttccttaatactccccctgttactcttcaatcatgtcatcctatggtaaaggacaggcactgccaaaatttggtgaatgggatgtaaatgatccagcctcagctgaaggatatactggcatttttaacatagctagagatgagaagagaactggtgggaatgtcacagttggtgccactgaaggtataaaatcacagcagaaacaaggtacacgcaaggagaaaagtagacataaatattgcattaagagaaaatggttttgcttttgcttgaaatctggaaattagtcaactttatcttaatgctgaagctctcagttgaattgatagtactagacagttgacagtgtcaatgtttgttggcaattttcttggatcttttattctgaatacctttttt

SEQ ID NO: 206880 - DNA, 396 bp, Gossypium hirsutum
  unsure (1)..(396): unsure at all n locations
cccacgcgtccgctctctggtctatactcttgcaacggtggatcgtttctcttttcattcgatcgtccttgactgggactttgcttaggccgtcgattgggactttaatagcgacggtgatcctctcattctacaggttgttttcgatggtgtagacaaggaggacttcgatgaccatctccataactcggagcaccagttgacgctgatcaaatccaagtctgggaaaacctacgcatactaggaggagcacgattaccgactgggagtcttcaaggctaacctgcgtgaagcctagcgttatcagctcctggaccccatggtcgagcattgcgttacatagtttttcgagtaacttcatcggagatacgncggcagtatatatgcttgaaaccg

SEQ ID NO: 206881 - DNA, 410 bp, Gossypium hirsutum
acgcaaaaacctcaggtttccactatgatttaacacccaatttcaaaaacccaacctttcccaaaaaatttccccctttttctgtacatttatacatagtcaacaatatccgtactgatagattcaaaacccaatggcggccgtcagttccctgtctttcccggcaatcggccaaacttccggcgacagaaaacttaatgtcccatcgcctcgttacttggcttccaatttcgaaggattccgtttccgtacaagccttttatatcaatctgttggacttcgggcttccactactgcttctccttccgttgtttactgcatgtctactgctactgataccccgactgtttctgaaacaaagtcgagctttttaaaagcgtataagcgttccattcccagtgtgtacaaca

SEQ ID NO: 206882 - DNA, 390 bp, Gossypium hirsutum
acgcccacgcgtgcggccacgcgttcgcccacgcgtccggtcttccttcaccagcttacctcaatggcagtcttccaggtgataatggctttgatcctcttggattggctgaggaccctgcgaacttaagatggtatgtacaagctgagcttgtgaatggacgttgggctatgttgggtgttgcagggatgcttatgcccgaagttttcactaagattgggataatcaatgctcctcaatggtacgatgccggtaaagccgaatacttcgcatcgtactcgaccctgttcgctatcgagttcattctagtccactatgtggagatcagaacgtggcaagacatcaagaaccctggttgcgtgaaccaggaccctatctttaagcaataca

SEQ ID NO: 206883 - DNA, 323 bp, Gossypium hirsutum
acgcgcacgcgtacgcccacgcgttcgcttgcgctttagatgatattcagatagaaatcatgccggcaggtggattctcttcgggtacaccggcgggggtggaattcgaagcaaagatcactcctataggcatcatttcctgtgtaatggcagccaccggacgccttatgttccgttacgacgtcggcgtttctggtggtgatacgttcatgcccgacttcttgaaaaaatactttacggttgtttaccggaaaaccagaaaccctggaatcgatggaaattattgcaaatatgacaatcaaggccttcaattgctcacttca

SEQ ID NO: 206884 - DNA, 431 bp, Gossypium hirsutum
acgcccacgcgtccgccattttccaccacaagcgtgtccagaaggttcagagattttagagagaacaaacaacaatggctgctacatctggggctgtactaaatggattaggctcttcatttctttgtgggggaaagaggagccaagcccttttgggtgctagcattggggccaaaggctcgccctcccctgctgctggaactagaaagttgatcgttgtggcagccgccgcacctaaaaagtcttggatccctgctgttaaaggtggtggcaacttcattgacccagagtggctcgatggatcgctccctggagactactgatttgacccactaggtcttggaaaagacccatcattcctcaaatggtaccgagaagctgagctgatccatgtacgttgggccatggctgctgtcgtcggcatcttcgtc

SEQ ID NO: 206885 - DNA, 376 bp, Gossypium hirsutum
cagcatgcttgctaggaaacggtctgtctactcacagaactaaatcgaagttgagtaaagacttttatgggaggaatattgtatttacccccgacatttcatcgttgggtcggaaatcgaatgccgtacttgtaaaggcatctttaaaacttaaacaacatgaaggaagaaggggattcttgaagtcattacttggaactgctggaattggagttccggctttactaggaaatggtcaagcgtatgctgatgaacaaggggttacttcctcgagaatgtcgtattctaggattttggagtattcggacaaggacagggttaaaaaagtcgatttgcttgaaaatggaacgatagctatcgtggaagctgtatattc

SEQ ID NO: 206886 - DNA, 375 bp, Gossypium hirsutum
gcctagcgagcattagcattagcactagcactagtagcaaccatggcttccgccgcatgtggcttgcaccaccacgcactcaccaccaatggcagatcatcatcattaccgccgtcgctgcgccaggtttcaaacatgaagcctaaccagcaggtggtgtgcaaggctcagaagcaggaagatgatggaagccttgtgtcccgtaggttggctctcactgtactcattggtgctgccgctgttggctctaaggtttctcctgctgatgctgcctatggtgaagctgcaaatgtatttggaaagccaaaaacagacacagaattcatgccatacaatggggatggattcaagctgtcgataccatcgaaatggaac

SEQ ID NO: 206887 - DNA, 394 bp, Gossypium hirsutum
ggcctgcgttgaagacacaagccatgctctgggcacaacttggccaccaaggtcatatacttgcactttttgccgacgagaattccggtcagctcaagcactcggcggtcacatgaacgttcaccggcgtgacagagctcgtctttaccaaacacaaccactaccccacggtggtgatgctactactgttccattaatcaaccatactctcctctaccaattccctagccctaatggtctgttctttacttcttcacctaccaacaatgcatgttccattgattcaccttaccattcttcgatgccgtcgcaaaattttactgcaacccctacggggttgaatagttcttgttctctatgatcctcatctcaagatctcaaggaaacatcaatg

SEQ ID NO: 206888 - DNA, 394 bp, Gossypium hirsutum
acgcgacgcgtacgcataaacatacgcatattcaatactaactgagtgtaccatgagaacgggatagagagacggacgaagctctaccttccaatgtctctgaaattgcttcaaaaaatatccccagtgccagtcaatcatgagtaacgaatgtcactactctcgctcaagctttctgctcatcggcgattcctccgtcgcaaaatccggctagcttctcagactagctcatgaatcttacgctgatagctacattaacaccattggtgtagatttcacaaatcagatcggtagagttcgatggcaagacagtcatgctgcaaatttgggatactgttgtacatgagcgctgccggactattactagcagatactaccgcatagctcatgggat

SEQ ID NO: 206889 - DNA, 402 bp, Gossypium hirsutum
cccacgcgtccgccaaaatctactcatcaggcattgccaccttttcatattccctttatacatcttcggcccgatcaagaggagtatcgatcatttctacatgtctcctccactttttccaatctcattgtatctactttgttacagaatccagctgctcatgctgcagcaagttttgcagctacattttggccatatgcaaatgttgaaagttctggcgattctcccacaaatgaactaagaggtttcccatctacacaaacaaactctgctcctattatggccgcaattgctgctgcaacagtagcagctgccactgcatggtggacccgccatggactgcttcctgtatgtgctcctctgcacacaggctttacctgtgctcctgcatccactgctgca

SEQ ID NO: 206890 - DNA, 392 bp, Gossypium hirsutum
tagatacagcatacactactagcacccactactagcattggcttcctcaatgatctcatcggctaccattgccactgcctctgcggctcaggctaacatggccgctccgttcaccggtctcaagtctgtctctgctttcccagccaccatcaaggccaacatcgacattacttctatcgcacgcaatggccggagagcgcaatgcatgcaggtgtggcctgctactgagcagatgaactctgagactctctcataccttccagatcttacacccgtgcatttggctaaggaagtagattaccttattagctcagaatggagccctcgctcggaattcgaattggacgagggattcttgcaccgtaagtactcgagcttacccacgtactacc

SEQ ID NO: 206891 - DNA, 389 bp, Gossypium hirsutum
actaaattgtagtttctctgtgcagaagtttcttgcgttgttcaagtattgaaagtttgattctttcaattcctttattcagggattgaataccttcacacaggctgtattcccgccattatacatagggatctaaaaactagcaatattcttcttgacaagcacatgagggcaaaggtttctgattttgggctttcaaagcttgccgtagatggagcatcacatgtgtcaagcatagttcggggaactgtggggaacttggatcctgagtaaggccttgcttctactaaatcctcctttcttttgttgaaatcatttaaacgactgtttgcactgatttatacataggaaacaaatgggagggattagtcttttagattacgtgtatc

SEQ ID NO: 206892 - DNA, 430 bp, Gossypium hirsutum
cccacgcgtccgctctttttctccctcttaagaaaccctttctttcgctttccactcctaagtctttaccagacaatggagctggagtttcagcttctgttcctgccgttgaagacccaaaacccagtcagaatgaccccgtcctcgaaaaggccgtggagggatcttctgggcctaacggggcggctaccagcactgaaattgaggttttgagcaagtttgaggatcctaggtggattggaggaacttgggacttgaaacagtttcagaaaaatggcaccactgactgggatgctgttattgatgctgaggtcaggaagagaaaatggctccaggataatccagaaactaccagtaatgacgaccctgtagtgtttgacactgccatcataccttggtgggcatggatgaagagattccatctaacctg

SEQ ID NO: 206893 - DNA, 396 bp, Gossypium hirsutum
gcatacactactagtacccactactagcaatggcttcctcaatgatctcatcggctaccattgccactgcctctccggcacaggctaacatggtcgctcctttcaccggcctcaagtctgcctctgctttcccagtcatcaggaaggccaacaacgacattacttctctcgcaagcaatggcggcagagtgcaatgcatgcaggtgtggcctcctactggaaagaagaagttcgagactctctcatacctccccgatcttacacccgtgcagttggctaaggaagtagattaccttcttcgctcaaaatgggttccttgcttggaattcgaattagaggagggattcgtgcaccgtaaatactcgagcctacccacgtactacgatggacgctact

SEQ ID NO: 206894 - DNA, 384 bp, Gossypium hirsutum
ctcaaatttagatcacaatttcacagtcgttggcttcactctctctctcagccatggctgcggccatctccaccgccgccgacgctgccgtcgtcaaccgagctctgggagtgtcagtcccaacctcagctttcatggggaagaaagtgagctcgagattcaacaacaccaggcaggttccttcgggaagttttaaggtgatggcggccgaaaaagagatagacgaagagacacagaccgaaaaggaccgatggaaagggttggcttacgatatttctgacgaccaacaagacattactcgacggaaagggatggcggatttcttgttccaagctaccatgaatgatggaactcactatgctgtcatgaggtcctatgaataca

SEQ ID NO: 206895 - DNA, 364 bp, Gossypium hirsutum
ctaccatgttggatggcaacctggttcacacggcttccatgaaagccttactaaggctatgactgtatggaagtacaagagaaattaaggtctacttgactgcactgattgttctatttgcttacgtgagttcttggaagacgacagttcgcgatcgttgcctacatgtaatcatgctcttcatgtcccttgtatggatgcttggtttagatgtcactcctgatgtccagttcggccatccatttttacatccaccaactaacccgtcaccgctgctgccacagcccaagacagtcaccggtctgtacgcgtatcatgatatcgatgtcaacaaacgaaagaatccatgttactgatccacgat

SEQ ID NO: 206896 - DNA, 376 bp, Gossypium hirsutum
ggcagccgaagactttcgtgaccgaattggctatcagcaatggagcaagcaaaacctgaagcacctaatgtcctaatcgtgccaatccctgctcaaggccatctcatacccatgtcgaagctagctgagcttctcagcaacgcaagtttccaaatcaccttcctaaacactggatacttccacaatactttgctttcctctatcgacatacacgccagttctcgacaatttgctaaatttcaattcgtaacaattgcagatggactacctcctgattatccacacgacattaaaggtatcgatcattatgtagtctctctgacggatgcatctaagcctgacggtgctgaggagcttgttacgcgtacatctaaat

SEQ ID NO: 206897 - DNA, 381 bp, Gossypium hirsutum
tccacgcgtccgtccacggctttggtctccggcttctgcctcacttccaactccaccggtggttctaactcactcgggcgttcccacattgcggcggccgtctatcgtcgccaacctcaactcttccacttctgctgctactctcattcgaaatcaacccgttttcgcagcacctactcctttgctcactccttccaattggaaagaaaacatgggagaccagtcatacgaggaagccattgaagctctcaagaaactgctcaatgagaaaggagaattgaagagtgcaccgacggcaaaggtagagcaagtgacagctgagttgaagactgctgcttcttacgatgagtctgttgaccgcttgaaacaaggcttcattta

SEQ ID NO: 206898 - DNA, 360 bp, Gossypium hirsutum
cccacgcgtccgcccacgcgttcggtgaaatattgctgagagtttgtggagatgagtgccttgagtgagggtcttacccaaattgtgatccctttagcttccttggtgggcattggttttgctttgcttcaatggtttttggtctctagggtgaagctattatcacaggattcaagcaatggatataaacaaaaactgattgaatctgatgaagaagaagagggtattaacaatcttgagatttccatcaagtgtactgagattcaacatgccatttctgttggtgcaacctctttcctctttactgaatacaagtatcttggtatcttcatgtgtgtatttggtgctatcatattcctc

SEQ ID NO: 206899 - DNA, 394 bp, Gossypium hirsutum
  unsure (1)..(394): unsure at all n locations
acgcaaccactatcactaccattatggcttcggctactgcttctgtagccaaacccaaccttcagattcaggcaaaaggaaagggtgttggttttgcagatttctcaggcctacacaactcctctactagccttccctttgccaggaaaacctctgatgacttccattcactcgttgcttttcagacatctgctctatgaagcaataatggcggctacaggaaagggatggcacaagcaaaactaaaggtggctataaatgggttntggtagattggcaggaatttcttaagatgctggcatggccctaaggactgaccacttgatgtcattgccatcaatgacatctgtagtgttaagcatgcttctcaccttgtcagatatgattccaccct

SEQ ID NO: 206900 - DNA, 362 bp, Gossypium hirsutum
gtgagactctgttgtatacctgtagcatatagtaatagtaagcagtaatagcaatggcctgctccatgatctcatcggcaaccattgccaccgtgaaccgctcctacccggcacaggccaacatggtggcccccttcaccggcctcaaatctgcctctgctttcccagtcaccaggaaggccaacaacgacatcacttctcttgcatgcaacggtgggagagtgcaatgcatgcaggtgtggccgcctcttgggaagaagaagttcgagactctctcatacctgcccgatcttactcccgtacagttggctaaggaagtagattaccttcttcgctctaaatggattccttgcttggaattc

SEQ ID NO: 206901 - DNA, 359 bp, Gossypium hirsutum
gcagcttccggtgaaaatgcccatcagatggccactaatggaaaggcagggaacatagtatggcgcacaagttcagttgataaagttcatcggcaagagttacttcagcaaaagggttgtatcatatggattacgggtctcagtggttcaggaaagagcacattggcatgcgcgctgtgccatgccttgcattcaaagggaaagttaacttacatccttgatggtgataatgttcggcatggcctataccgtgaccttacttttaaagctgaagatcgtgcatagaacattcgaaggattggagaggtggcaaagctctttgttgatgctggcatcatctgcatcgtcagtgcgatatc

SEQ ID NO: 206902 - DNA, 422 bp, Gossypium hirsutum
cttcactgtgacactggcagaacactcaattaaacgccgtgctaataaaaaaacgctttcttttttattaaccgacttgtttaactcagtggcctctatctacaaaaccgagtcaagtggtgcggtttgatatcggtgatgcttcgtgagtttgttttctttttcaagtgataagattcaagaaacttaaagaaagagagaaaaatggatcgggcagacatgatggtagggccgggtatggatatgccgatcatgcacgacagtgatcgatacgatttcgctaaagatatcgggtcgggtaatttcggagtcagccggcttatgagggataagattaccagagagctcgttgctgttaagtacatcgagagaggcgattagatagatgaaaatgttcgaaaagagattattaatcatagatc

SEQ ID NO: 206903 - DNA, 385 bp, Gossypium hirsutum
cccacgcgtccgccaggattgaagagataagattatagtgaaaaactaaacataatggagccccttcgacttgcttcattgatttgccctctcaaagcccaagaaaaatggcttctgcttccgctactctcctcaagtcttcacctattatcgacaagtccgagtggattaagggccaaaaccttcgccacccttcggtttgttttgtacggtcacaccctacatcggccggctttgccgtccgtgctagttcatatgccgatgagcttgttaagaccgcgaaaactgttgcatcttcaggtctgggtattttggccatggatgaatcaaatgctacatgtgggaaacggcttgcctcgattggtctcgagaataccgaggcaaa

SEQ ID NO: 206904 - DNA, 434 bp, Gossypium hirsutum
gttggttggcaggtgagactccccttctttgtgttgcatggggaagcagatacagtgacagacccagaagtaagcaaggcactgtacgagaaagcgagaagcactgacaaaaccataaaattatatccggggatgtggcacggcttgacagccggagagcccgatgagaacgtggaaatggtgttcgcggatatcataggttggcttgacaagcgctgcaatgctgtaactttagaccaaagtctggatcctttcgatcaaggtttggaagaatgcagtgataatatagtgatttcgatggcaaaagccactggcggaacacaagcaaacgggagatatttgtgtggtttgaagggaccatgcgcacggcctcactcggcaatgtatgctgatcgtatcaagctaactaaacgttgtctttgaaagggggaatt

SEQ ID NO: 206905 - DNA, 386 bp, Gossypium hirsutum
cccacgcgtccggcaaaggaagggtatttgcattgcaagatgaacctgaagtatgtagagtatggttgccatttgacgatgcaccagggctagccatggctcgagcgtttggagatttttgtttgaaggaatacggtgtcatctccatgccagaattttcccatcgtttactcacagaaaaagatcaattcattgtcctagcatcagatggggtatgggatgtattgagcaatgaagaggtagttgagattgtatcatcggctccgtcccggtcatcagcagccaggatgttggttgtctcggctgcacgagaatggaaactgaagtaccctacttcaaagatggatgattgtgcggttgtttgcttttcttttggatgggaaaat

SEQ ID NO: 206906 - DNA, 435 bp, Gossypium hirsutum
gccacgcgtccgtacactactagtacccactactagcaatggcttcctcaatgatctcatcggctaccattgccactggctctccggcacaggctaacatggtcgctcctttcaccggcctcaagtctgcctctgctttcccagtcatcaggaaggccaacaacgacattacttctctcgcaagcaatggcggcagagtgcaatgcatgcaggtgtggcctcctactggaaagaagaagttcgagactctctcatacctccccgatcttacacccgtgcagttggctaaggaagtagattaccttcttcgctcaaaatgggttccttgcttggaattcgaattagaggagggattcgtgcaccgtaaatactcgagcctacccacgtactacgatggacgctactggaccatgtggaaactgcctatgttcgggt

SEQ ID NO: 206907 - DNA, 423 bp, Gossypium hirsutum
cccacgcgtccgcggaaagaatatgtttaccgagaacctcgtgatgtgcgcttgggtgatataatggaaaaacttagtcatatatatgaatctaggatggatggtaatcatacattgcacattattcctgattccagacaggtgaaggcagaggagttgcagcctggagtctgttacctgcagataacagctgttgatccagtcatggaagatgaagatttgggaagcagaagggagagaatcttttctctttctactggaactgtccgtgctcgtgtttttgaccgcttcttatttgacactccattcacgaaaaatggcaagacccaaggtggattggaagaccaatggaaaaggaggactgttcttcagactgagggctcattccctgcacttgtcaataggctcttgggtgataaatct

SEQ ID NO: 206908 - DNA, 314 bp, Gossypium hirsutum
acgcgacgcgtccgtccacgcgtccgattttcatttaaaagattctctcagaacagtgagggagtagtagttcgagttatcggacgacctctctccttaaacacgaaggaaaatggattacttcaatggaccagggaggaaccatctcttcgttccggatgcggtaacatacctgaacccgcaattcaagccatgaaccggattaacgaggattaccgtaccgcggctattccggccatgacaaaataccctatcgaagatgtaaagaagatattcaagactacgaccgggactactttatgatcccaacaaca

SEQ ID NO: 206909 - DNA, 404 bp, Gossypium hirsutum
tcgcctgcggtacgcggttcgcaattcgacctacgcgtacgcattcgcgcgagcggaaaagcatttcatcgtgaggcaaaaacagggaattatagtcttcaggggaacgatcgaacgatgtcctacctactaccacacctgcactcaagatggaccgcatatcaggccatcttgtcagaggaagagcgtctcgtcgtcatccgattctgccactactgggacgaaacatgcatgcatatggatgacatgcttgcttctgtcgctgtatcaataacgaactttgctgcgatttatcttgtatacataacggatgtacctgcttttaacacgatgtatgagcgttacgatctatcaacagcgacgtacttcttcagaaacacgcacattctgattgatcttggcac

SEQ ID NO: 206910 - DNA, 343 bp, Gossypium hirsutum
ctgatctggcaagcaaaggcgattgagcgcactgcatgcaggtgtggactgatactggggaggcgaacattgagactgtctcatacttgcgcgatcttacacgcgtgcagttggctgatggagtatataaccttgttcgatcaaaatggagtccttgcttggaatccgaaccggtcgatggatacacgcacctggagtgcttcagcttacccacgtactacaatggacgctactggaccatgtggaatctgcccaagctcaggcgcaccgacactgatgacgtgttagaggagcttgaggaatgcaagattgcatacctcaacgcatccattagagtcattgg

SEQ ID NO: 206911 - DNA, 361 bp, Gossypium hirsutum
cttcctggtgtctcttctaagcactcctcggcattagtctcccctccatccatatctccttccttcagctctaagagccttaaaacaagttcactatttggagaatcattaagggttgttccaaggtcatcattgaaggtttcaaaggcaaagaacactacttcactagtgacaaaatgtgaaattggagagtctttggaagagtttcttacaaaggcaacaacagataaggcattgattagaataatgatgtgtatgggtgaagcattaagaacaattgcttttaaagttagaacagcttcatgtggtggtactgcttgtgttaattcctttggtgatgaacaactttgctgtgatctac

SEQ ID NO: 206912 - DNA, 391 bp, Gossypium hirsutum
cccacgcgtccgtcatttttctttggaaacaaataacaaagaatagaaaaaataaagagcaagagatatggcaagcacattctcttataattcttttggattccttctcattcttgtcgcctttagttccttgataaatataagttcagctggtaggcaaattgcccctaaaactagcattgagtttatcagaacatcttgtagttcaacgacttaccctaaactttggtacgaatctctcttaacacaggctagcatgatccaaacaagcccccaactcatcgcccatgcaaccctaaacgtgaccctttcaaccgccaagtcaacctcggccatgatggtgaaacttgccaaaagccaatgattgaagcctacagatgtgggcgccatg

SEQ ID NO: 206913 - DNA, 260 bp, Gossypium hirsutum
gccacgcgttcgcagggtcgtaaggactatgtggacccttcaacggctcctttgattgacatggcttaactgacgtcatggtcgttttacagagcccgaatagctgagggcatagccactgtcctctttctctgtgtcactggtgctgctgacatcggtcacaaggaacaaccgggtgcatgtgatggcgttggtctcttgggtatcgcatgggctttcggatgcagcatcgctttccttgatgactgcactggctgaat

SEQ ID NO: 206914 - DNA, 387 bp, Gossypium hirsutum
cggacgcgtggggcggttttgttccaaaattgccaaatcttagccaagcaaggcttaccaagccagaaaaataccatcaccgcgcaaggtcgcaaagacccgaaccaaccgactggcttctccatccagttctgcaacatctcggccgatacggacttattaccttcagttaactccactcctacatacttgggaagaccatggaaactatattcaaggaccattatcatgcaatcctacattagtgatgccataaggccacaagggtggcttgaatggaaccaagattttgccttggatacattatactatgccgagtacatgaataatgggccaggggctagccttaaggagcgagttaagtggcctggttaccatgttttaaat

SEQ ID NO: 206915 - DNA, 429 bp, Gossypium hirsutum
agaagcctcatcgataccgtcctggaactgttgctcttcgtgaaattcgtaaataccagaagagtactgagcttcttatcaggaaattgcctttccagaggcttgttcgtgaaattgcccaggacttcaagactgatttgcgtttccagagccatgctgttctagctctccaggaagctgcagaggcataccttgtgggtctttttgaagacaccaacctttgcgcgatccatgccaagcgtgtcacaattatgcccaaggacatccagttggctcgtaggatcaggggagagcgtgcttaatttccagaagtgtggatcagtcgcttagaagaaactattgtttatttttaggcaaatgtattggttttttgttttttctaatcatcttttaagccatgatggtagtggtaggttcaatgtgatgtga

SEQ ID NO: 206916 - DNA, 412 bp, Gossypium hirsutum
cccacgcgtccgaaaccaccaagcctgttccttctggtagcccatggtacggtcctgaccgagttttgtacttgggtccactttccggtgagccaccatcttacttgaccggtgagttccctggtgactatggttgggacactgctggactctcagctgatcccgagacctttgctaggaaccgtgagctcgaagtcattcactgcagatgggccatgttgggagctcttgggtgtgttttccctgagctgttggctaggaacggtgtcaagttcggtgaagctgtatggttcaaggccgggtctcaaatcttcagtgagggtggacttgactacttgggtaacccaagcttgatccatgctcaaagcattttggccatctgggcttgccaagttatcttgatgggagccgt

SEQ ID NO: 206917 - DNA, 414 bp, Gossypium hirsutum
  unsure (1)..(414): unsure at all n locations
gtgagactcttttgtataactgtagcatatagtactagtaagcagtaatagcaatggcctgctccatgatctcatcggcaaccattgccaccgtgaactgctcctccccggcacaggccaacatggtggcccccttcaccggcctcaagtctgcctctgctttcccagtcactaggaaggccaacaacgacatcacttctcttgcaagcaatggtgggagagtgcaatgcatgcaggtgtggcctcctcttgggaagaagaagttcgagacactctcatacctncccgatcttacacccgtagagttggctaaggaagtagattaccttcttcgctctaaatggattcctngcttggaattcgaattagagganggattcgtgcaccgtaagtactcgagcttacccacgtact

SEQ ID NO: 206918 - DNA, 358 bp, Gossypium hirsutum
gtttatttcttaattttcaaattaccgcaatcagggtttgatatttcccttttttgcatggttcacatttttgaagaaaatacttagagagggtaatttagaatttcaatctgaggtaggggtttttaaagcttccaatggcgtttttaggcgacgcgctacggcaagcgtttatgccgaagcacgagtacgagagcctacgggaggaagataaagcttggacgaagctacaaaggccgatcttaatcggttccatagtgatcatttgtgttgcgatcttcgttggcatgattataagcttgaagattgtgtttccgggagatgatttgaagcgaccgttttgcgatgaccggagact

SEQ ID NO: 206919 - DNA, 445 bp, Gossypium hirsutum
atttagctatagcatacactactagtacccactactagcaatggcttcctcaatgatctgatcggctaccattgccactgcctctccggcacaggctaacatggtcgctcctttcaccggtctcaagtctgcctctgctttcccagtcaccaggaaggccaacaacgacattacttctctcgcaagcaatggcggtagagtgcaatgcatgcaggtgtggcctcctactgggaagaagaagtttgagactctctcatacctccccgatcttacacccgtgcagttggctaaggaagtagattaccttcttcgctcaaaatgggttccttgcttggaattcgaattggaggagggattcgtgcaccgtaagtactcgagcttacccacgtactacgatggacgctactggaccatgtggaagctgcccatgttcgggtgcaccgac

SEQ ID NO: 206920 - DNA, 309 bp, Gossypium hirsutum
cccacgcgtccggagacttatttactttaggaattttctagaaccttctcgaaggcaatggctgaggcgaccagcaccgagagatccactggcacagtcaaatggttcagcgcccagaaatgttttggtttcatagctcccgacgacggaggcgacgaccttttcgtccaccaaacctctattctttcccaaggctttcgtacactctccgataaccaacccgtcgagttcttcgttgatgtcggtgaagatggccgagctaaggccgttgatgtaactcctatgcctcgaccttggccgtccttcccg

SEQ ID NO: 206921 - DNA, 453 bp, Gossypium hirsutum
tcgactacgcgtccgacacgcgtccgcagacaatcgacaccagcaagacatagtttacggttacggtcagacccattttaggccatatgctagtgacgtgaaacgggaaatggcacatattctggcaccttcaactcaatggccgatgagagtaccaaagagctggacctttggaagccccattgcaacaaagatgtggaggtctctgatcttgaaacagaccatgaaaggagcagccaaaagtgctggcaaattcagagtgcttgccttgcactctgagaacagcactgtcaacatgacagacatgctactaaacatggacattactccatacactgacaaaatcattgctgaatatatctctataggaggcactggaatcgacatgcggagcatgtcaaggacaatttcaaagcctgttgaacatccctacgaactttctaagtggaacta

SEQ ID NO: 206922 - DNA, 255 bp, Gossypium hirsutum
cgcgtgcgcttacttgaggctttgggatcacgaggaatcctgccttgtgtgggtgcttacggtgcagggcgagtggactaaagcgacccataggacgcaacgaagacatggaaatacttcaattggtactactttcacatgggggtatccatacttagcgctattacaacgcttgtgtacattcaacataacattgagtggggattgatccgaggagtccgcaccatcgggatattcatagccattatcacgtac

SEQ ID NO: 206923 - DNA, 435 bp, Gossypium hirsutum
  unsure (1)..(435): unsure at all n locations
catttttctcacctcttcattctccaaaactcatggctgccgtaactgctgcagtctcctttccttctaccaactccacctcttttactactcgaacctctatcatctctcctgaaagaatcacattcaagaaggtttctttttactacccagatgtttcaagtggagggagagtggtttcagtgcgagcccaggttacaactgaagctcctgctaaagttgtaaaggaatccaagaaaaatgatgaaggtgttgtggttaacaagttcaagccaaaggaaccttacattggcaggtgccttctaaatactaagatcaccggtgatgatgctcctggagagacatggcacatggtcttcagcactganggagaggttccttacagagaaggacaatccattggagtgattccggatggcgttgaccagaatggga

SEQ ID NO: 206924 - DNA, 360 bp, Gossypium hirsutum
atttgtttctaaggatttaatctccaaaccttcttcccatttcttcattacattgttcaagaaaaaagaagcaaaaaaacatggccaaagttctgttgttcattgcactatgtgtgcttccagctttggttagtgctacacgcattctgaataatcaattggtggtagaaggctatgtgtactgtgatacttgccgtgctggttttgaaacccctaagactagaagcctagctgatgccatggttaggttggtatgctccgacaggaagagcggccaagttgtcttcaaaaaggagggatacaccgacaaaaccggaaaataccagattcgtgtattcgaagatcacttggatcagatct

SEQ ID NO: 206925 - DNA, 436 bp, Gossypium hirsutum
aataatcggaccaaacattataaaaaaatataatcccacatttggatacttacctcatttttgaaagacatttgggttgcaatggcacaagcaatggcatcgatgactggtttacgtggctcttcacaagctgtgttggaaggtagtctccaactcatcggccaaacccggttgaacgttgctagcaccaacatggtggctgtggctagacctggttttaccgttagagctcaacaggtccctgccgagcctgaaactggacgcagagctgtgctgggtcttgttgctgctggtttggctactggctcctttgttcaagctgtgcttgctgatgcacgaagcatcaaggttggcccgccttcaccaccctccggtggattgcccggaactttgaattccgatgagccaagagaccttgatctggcgtacatagatc

SEQ ID NO: 206926 - DNA, 449 bp, Gossypium hirsutum
  unsure (1)..(449): unsure at all n locations
gttagctatagcatacactactagtacccactactagcaatggcttcctcaatgatctcatcggctaccattgccactgcctctccggcacaggctaacatggtcgctcctttcaccggcctcaagtctgcctctgctttcccagtcatcaggaaggccaacaacgacattacttctctcgcaagcaatggcggcagagtgcaatgcatgcaggtgtggcctcctactggaaagaagaagttcgagactctctcatacctccccgatcttacacccgtgcagttggctaaggaagtagattaccttcttcgctcaaaatgggttccttgcttggaattcgaattagaggagggattcgtgcaccgtaaatactcgagcctacccacgtactacgatggacgctactggaccatgtggaagctgnctatgttcgggtgcaccgactcggc

SEQ ID NO: 206927 - DNA, 367 bp, Gossypium hirsutum
gctaggtgtaacatccactgctaggctccactggtaactatgacgatcgtagctaccagagaaattacaaagcgcacagaccgaccaggaccgagggaagggccttgcttataatatcttcaatgaccaacaatgacattaccagaatgaaaggtgtcatcaactcattgtcccaagctcgccatcaacgacggtactcactatgctatcatgagctcgtattactacattaaccaaaggcttgagacatacgacattggacaacaacatggctcgattgtacattgccccagctgtcattgacaagcttggttctcacatgaccaataactacatgaccctttctaacattaaagttcctcttatc

SEQ ID NO: 206928 - DNA, 397 bp, Gossypium hirsutum
cacaaactcccatcacccgagatcatctttccccttcagaatggcggctgcaaccatgggtctctcttccccatctttcgccggaaaggccgtcaagctctctccttccgcccctaaaatccaaggcaatggccgtgtttccatgaggaaaaccgctaccaaggctgctccctctggaagtccatggtacggtcctgaccgagtcttgtacttgggtccactatctggtgagcctccatcttacttgaccggagaattccctggtgactacggttgggacactgctggactctcggcggacccagagacatttgccaggaaccgtgagctcgaagtcatccactgtaggtgggctatgttgggtgctcttgggtgtgttttccctgagcttttggct

SEQ ID NO: 206929 - DNA, 416 bp, Gossypium hirsutum
ggaaagcttaagcaatggcggccgaggaggacagcggtgagttttacctgcgctactacgggggccacatagggaaattcgggcacgagttcttggagttcgagttcaggccagatcggaagctcctgtacgctaacaacttcaactacataaacgacactatgatccgcaaagaggtcttactaactcctgccgttcttaaggaatgccgccgcatcatcgacgagagcgagataatgaatgaagatgataacaattggccagaaccagaccgtgtcgtgcagcaagagcttgagatagtgatggggaatgagcacatctctttcacaacttcaaagattgggtcccttgttgatgttcagagcacttaggatcctgaatgtcttcgcatattttattatctggctcaggatttg

SEQ ID NO: 206930 - DNA, 445 bp, Gossypium hirsutum
gctcaaagcattttggccatctgggcttgccaagttatcttgatgggagccgtcgagggctaccgtattgccggtggaccactcggtgaagtgactgacccattgtacccaggtggcagctttgacccattgggtcttgctgatgacccagaggcattcgctgagctcaaggtgaaagagatcaagaacggtaggttggctatgttctcaatgttcgggttcttcgttcaggccatcgtgaccggaaagggaccattggagaacttggctgaccaccttgctgacccagtcaacaacaatgcttgggcctatgccaccaactttgtccccggaaagtgaacttagagagtgagaagggatttgtcttgtttatgtgtttatttggtggtgtgaatttaaatttgttgcacaatcaatgaaagtataatgtgaattttgtgtgctc

SEQ ID NO: 206931 - DNA, 447 bp, Gossypium hirsutum
ccaattttcatttcaaagattctctcaaaacagtgagggagtagtagttcgagttatcgacgacgttttttttcaacacgaaaaaaaatggattacttttatggaccagggaggaaccatctcttcgttccgggtccggttaacataccggaacccgttattcgagccatgaaccggaataacgaggattaccgttccccggctattccggcaatgacaaaaacccttctcgaagatgttaagaagatattcaagactacgaccgggactccttttatgatcccaacaacaggaaccggcgcatgggagagtgcacttactaatacgttatcccccggtgaccgaatcgtatcgttcctcattggacaattcagtcttctttggatcgatcaacaacaacgtctcaagttcaacgtcgacgttgtcgaaagtgagtggggacaaggt

SEQ ID NO: 206932 - DNA, 414 bp, Gossypium hirsutum
cccacgcgtccgatcagaaactgtatcagaatgaaggcacttattcttgttggaggatttggaactcgattgaggccattgactctcagtgttccgaagccacttgtcgaatttgctaataaacccatgatcctgcatcagattgaggctctcaaggctgttggtgtaagtgaagttgtattggctattaactaccaacctgaggtgatgttgaacttcttgaaggaattcgaaactaaacttgggatcacgatcacgtgttctcaagagactgagccgcttggcactgctggtcctcttgctttggctagggacaaactcgttgacgagtccggtgagcccgtttttgtccttaacagtgatgttatcagtgagtatccattcaaagaaatgattgaattccacaaagctcat

SEQ ID NO: 206933 - DNA, 375 bp, Gossypium hirsutum
ggagtttagttcagaggctaaccagcgcattgccaggctcgcagcccatctccaacctgagatggaggaaagttgtattttgaggcgagctgactgtagagcgaaaggagggtcaccagggttcaaagttgctatcttaggagcagctggaggcattggccagcctcttgcaatgttaatgaagatgaatcctctcgtctcggttcttcatctttacgatgttgtgaactctcctggtgtcacagctgacctcagtcacatggatactggtgctgtggttcgtggtttcctagggcagccgcatcttgagagtgccttgaccggcatggaccttgtgatcatacctgctggtgttccaaggaagccttgaatgac

SEQ ID NO: 206934 - DNA, 410 bp, Gossypium hirsutum
gacggcgccaatcagctgtccgccttgactgaccgtccggcatcgtcttggccctcgattttgcccttttgtaaaccttttttttcaccaattcccgaaatggcagtgaaaccctccaaggccgataagaaaatcgcgtacgacgcgaaactgtgccagctcttagatgagtacacgcagatcttgatcgccgcagccgacaatgttggctcgaagcagctccagaacattcggaaaggtctccgaggtgactcagttgttttaatgggtaagaacactatgatgaaaaggtctgttaggatgcatgctgagaagactgggaacgaagctttccttaaccttatccctttgcttcagggaaatgtgggtttgatctttacaaagggtgatttgaaggaagtcagttagga

SEQ ID NO: 206935 - DNA, 428 bp, Gossypium hirsutum
ctttctctggcatcctgaacaagaaacgtatattcaatccagacgtttacaattggaacagaatcaaagtcaggtattgtgatggatcatctttcaccggcgatgttgcagcagtcaatccagttgctaatcttcacttcagaggtgcaagggtctggcttgctgtcatggaggatctattgagcaaaggaatgagaaatgctgaaaatgctattctttcgggatgttcagcaggtggattggcatcaatattgcattgcgatagcttccgagccctcctacctatgggtactaaagtaaaatgtatttcagatgctggttattttatcaatacgagagatgtgtctggaggacattatattcaaaccttctttgatcaattagttgcgacacatgggtctgcatagaatttgctttcatcatgtact

SEQ ID NO: 206936 - DNA, 425 bp, Gossypium hirsutum
cttccctttcttattactattcttcttctcttcaaccttgatccatttatgctactctgtgtttttcttttccttcatttggtgttgaggaacgttatatagttaggagaaagaaagtattgagaagccaaaagagaggggaaaaaatgtcaatggacttgacatctgaacgtgtttggtatgttcactgcaacttctgcaacaccattttagcggttagtgttccatgcaacagtgcgttcaacatcgtgactgttagatgtgggcattgtgccaatctgctgtctgtaaatatgggaacttcacttcaaacagttcccagtcaagatgctcagaaacagcagataacgattgatgaagatcattcaaataaggaatgttggtcgtctttcaaatgcaacaaggtttctgcaatttgattctac

SEQ ID NO: 206937 - DNA, 434 bp, Gossypium hirsutum
ctcagagagagaaagaaacgaaatacccacgaaacacacagcctgccaatgccattgccattgccagggtgatcggtgattggtgatgcttcgcagttgcctcttccttcatcacccattaatcaacaataccttccaattttagctttgcgcgcaaatatgagttggttatcaattttgtgcggcttgctgttgcttttatgcatcttgaaacccggaattcgttcgtcggcagataggttagatgggagggtgttggagttggacgattccaactttgactccgccatttcctctttcaattacatcctcgtcgacttctacgctccctggtgcggccactgccaacgcctttccctccagttagatgaggctgccccaattcttgctggattaaaggatcccataaccgtagccaaactaaatgctgacaa

SEQ ID NO: 206938 - DNA, 416 bp, Gossypium hirsutum
  unsure (1)..(416): unsure at all n locations
tggagatgtaattccagggcctatgctagcccacaaagcagaagaagatggtgttgcttgtgtcgagtttatagctggtaaacatggtcatgttgattatgacaaggtccctggagttgtctacactcatcctgaggttgcatctgtcgggaagaccgaggagcaggttaaggcacttggtgtcgattaccgtgttgggaaattccctttcttggcaaatagccgagccaaggctattgatgatgctgaaggaatagtcaagatattggctgacaaggagacagacaaaattcttggagtccatattatggcaccaaatgcgggagagctcatccatgaagcagtccttgccattaattatgatgcatcaagtgaggacatcgctcgagtgtgccatgcacatnctacaatgagtg

SEQ ID NO: 206939 - DNA, 412 bp, Gossypium hirsutum
agaaggttcagagattttagagagaacaaacaacaatggctgctacatctggggctgtacgtaaatggattaggctcttcatttctttgtgggggaaagaggagccaagcccttttgggtgctagcattggggccaaaggctcgccctcccctgctgctggaactagaaagttgatcgttgtggcagccgccgcacctaaaaagtcttggatccctgctgttaaaggtggtggcaacttcattgacccagagtggctcgatggatcgctccctggagactacggatttgacccactaggtcttggaaaagacccagcattcctcaaatggtaccgagaagctgagctgatccatggacgttgggccatggctgctgtcgtcggcatcttcgtcggccaagcttggagtggca

SEQ ID NO: 206940 - DNA, 375 bp, Gossypium hirsutum
ctcgtcactcggcggcagaagcagagagcctcaacatctacactgtatcctcaaatcatgactttcaagcgtaggaatggtggccgcaacaaacatggccgtggccacgtgaagttcatccgctgctctaactgtggcaaatgctgccctaaggataagtcgatcaaaaggtttcttgtgaggaacattgtggagcaagctgctgtgagggatgtccaggaagcttgcgtctatgacacctacactctgcctaagctttatgtgaagatgcaatactgcgtttcatgtgctatccactcccacgttgtgagggtccggtctcgcactgacaggaggaaccgtgatccacctcaacgcttcatcaggcgcagggat

SEQ ID NO: 206941 - DNA, 161 bp, Gossypium hirsutum
cccacgcgtacgtgtgcatatctgctttccactacaacaatatgctagtattcattagatatgacatgaatagctgaagggaattccccgaagagaaaatggattatgggagtgtgtgactcgaactattgattggaccgtgcagaaatatcgccttatct

SEQ ID NO: 206942 - DNA, 438 bp, Gossypium hirsutum
caatcactcccaatactttcataacatttcacgaacttcactctgcagtctccaatggcggctgccgtctccaccatcggtgctgtcaaccgagcaccgttgagtttgaatggatcaggtgccggagcttctgctccaagctcagctttcatggggaacagcttgaagaaagtgagcgctaggttcaacaacaacggcaaggctccagtgggaagtttcatgattgtggctgccaaagaaatcgacgaagacacacagaccgaccaggaccgatggaagggtcttgcttatgatatctccgatgaccaacaagacattaccagagggaaaggtatggtcgactcattgttccaagctcccatgaacgatggtactcactatgctgtcatgagctcctatgagtacattagccaaggccttcgcacatacgacttggac

SEQ ID NO: 206943 - DNA, 315 bp, Gossypium hirsutum
cccacgcgtccgcccacgcgtccgggcaaaagagaaataaaaacagtttcatttccattctaagtttgtgttttttatttgccttttgtgggttttttttaaaaaaaattcagcaaaaatgtttattgagagttttaaggtagagagccccaatgtgaagtacacggagaatgaaattcagtctgtttacaactatgaaactacagagcttgttcatgagaacaaaattggaacctatcaatgggttgttaaacccaaaactgtcaaatatgaattcaagactgatatccatgtccctaaattgggggtgatgct

SEQ ID NO: 206944 - DNA, 437 bp, Gossypium hirsutum
tcccttttagcatatagacaatagcaaatacagcaatggcttccagtgggcagcttcatgtggatttcgagctcaagtctcctgcagaaaaagtgtggggaaccattagggactccaccacgattttccctcaagccttgtcccatgattacaagagcattcaagtgctagaaggcgatggcaaggcccctggatctgttcgtcttattaactatgccgaagggtctccaatcgttaaggtatcaaaagagagaatcgaatcagtggatgaagctgagaagaaatatgtttacagcatcattgatggggatctcctgaaatactacaagactttcattggcaagatcattgtggttcccaagggagagtcgagcttggttaaatggtcctgtgagtttgagatggcaagtgaagagatccctgatccaagcgtcatt

SEQ ID NO: 206945 - DNA, 378 bp, Gossypium hirsutum
caagatcccatcttcaagcaatacagcctgcccccacacgagtgcggataccctggtggcgattttcaaccccctcaactttgctcctacacttgaggccaaggaaaaggagcttgccaatgggagattggcaatgttggccttcttgggattcataattcaacacaatgtgactgggaaaggaccatttgacaacctgttgcagcacctctctgatccatggcacaacaccatcatcaacacaatcaggggttattaaattcaatttcccagtttttgagtttccttttttgttttttaattcaagatttcaatcgtcttctcattgcaaacaaagtagctccaatttacaagttaaaaaaacaaatttttggtttt

SEQ ID NO: 206946 - DNA, 425 bp, Gossypium hirsutum
aaaaaatagagattaattaatgaattcattagtgagaggtaaactttatgataaagataaagaaacacaggaggaacccatatacaacttcagacgaagtatacgctttaggtcaacatatatgtatgtctgctcacaaagcacgaagaataattgatcagattcgtggacgttcctacgaagaaacacttatgatactagaactcatgccttatcgagcatgttatcccattttaaaattggtttattctgcagcagcaaatgctcgtcacaataggggtttcaatgaagcgagtttaatcattagtcaagtcgcagtaaatgagggaactactctgaaaagactaaaacctcgagctcgaggactgagttatctgataaaaagacccacttgtcatataactattgcattgaaagatcttgaa

SEQ ID NO: 206947 - DNA, 402 bp, Gossypium hirsutum
gctcccatgaatgatggaactcactatgctgtcatgagttcctatgaatacatcagccaaggtcttaaaacgtacaatttggacaacaacatggatggtttctacatcgctcctgcattcatggacaagcttgttgttcacatcagcaagaacttcatgtccctccctaacattaaggttcctctaatcctgggtatttggggaggcaaaggtcaaggaaaatctttccaatgtgagcttgtgtttgccaagatgggtatcaaccccatcatgatgagtgccggagaactggaaagtggaaacgccggtgaaccagccaagttgatcaggcaaaggtaccgtgaagccgtcgacataatcaaaaagggcaaaatgtgcgccttgttcattaatgatctcgat

SEQ ID NO: 206948 - DNA, 429 bp, Gossypium hirsutum
  unsure (1)..(429): unsure at all n locations
gtccaggtttcaaagaagacgtttgctgaagaggtgaacgctgctttcaaagagagtgcagagaaagagctacagggtatactttcagtgtgtgaagaaccccttgtttcagtggacttcaggtgctctgatgtgtcctccaccgttgatgcatcactcaccatggtcatgggagatgacatggttaaggtgattgcttggtatgacaatgagtggggctactctcaaagggttgtggatttggctgacattgttgccaatagctggaagtgacttcaatgtgctatacatatatgcataacaatgtcaccgatggttgattnttgcatgctcacttcattnntattctttcggcttcagcaatttctcattttgtcaaggctactatataatctgtaatgtaatgttggatacatacaatctctaata

SEQ ID NO: 206949 - DNA, 341 bp, Gossypium hirsutum
cttttgtttgtggcttcatttctgatttggttggagatatatggaggttatcaagtagcgtaattcaacttgcttcagcttctgaagctacagtgagcagcacgtatgaggtttctgtatggcgttcactttggaatgaccttttttcccaggtttttcgtgctgtcagaagtatattaaatggatttgttgccttcttcgcagcctgcaacagacatcgcctaagcatttataatcacgtacaggatgtcattcaaagacgctttggtggagtcccaagatcacagacctcagatcctagacgaagcaaatcaacgtgtggaaatcaatgtcaatcagaa

SEQ ID NO: 206950 - DNA, 369 bp, Gossypium hirsutum
ctgttttagagttgcagaagaactaaattccccagaatttgcttcagtaatggctgcctcagttatggcttcttcagttaccctcaagccttcattcaatgttgagaaatctggtgtaagaggggttccttcccttgctaggtccccttcttctttcaaggttgaagccagtggtggcaagaagatcaagaccgacaagccttatggaatcaatggtggtatgaacttgagggatggtcttgatgcctctggaaggaagggtaagggaaagggtgtttaccaatatgttgacaaatatggtgctaacgtcgatgggtacagtcctatctacaacaccaacgactggtctcccagtggtgatggttatgt

SEQ ID NO: 206951 - DNA, 332 bp, Gossypium hirsutum
gttctggaccagaagtttggtaattccttttaacactatattaatatagatgatatgccctattacgagtttctgactaatgctaatgtaatatatatgacaggtatcatcaagggcaccatgactaccactcactcgtacaccggtgaccagaggcttcttgatgctagccaccgtgacctcaggcgtgctagagccgcagctctcaacatcgtcccgacttcaactggtgcggcgaaggccgtggcccttgtactccctactctcaaaggcaaacttaatggcatcgcattgcgtgtgccaacaccaaatgtgtcggtggtggacctagt

SEQ ID NO: 206952 - DNA, 423 bp, Gossypium hirsutum
cggacgcgtgggcggacgcgtgggttggaaaagccctaatttgacagctctctcagtctctcattttgcctgaaaaccatgtcgaggagaaaggttagggagcccaaggaggagaatactacccttgggccggctgtacgagacggcgaacatgttttcggggtggctcacatttttgcttcatttaatgacacatttattcatgtaacagatttgtctggaagggaaacaatggttcgcattacgggtggtatgaaggtgaaagctgatagggatgagtcttccccttatgccgtcatgcttgcagcacaagatgtttctcaacgctgcaaggagttgggtattacagcccttcatataaagcttcgagctactggagggaacaaaaccaagacacctggtcctggtgcccagtcaggactt

SEQ ID NO: 206953 - DNA, 368 bp, Gossypium hirsutum
aagcgtgtccagaaggttcagagattttagagagaacaaacaacaatggctgctacatctggggctgtactaaatggattaggctcttcatttctttgtgggggaaagaggagccaagcccttttgggtgccagcattggggccaaaggctcgccctcccctactgctggaactagaaagttgatcgttgtggcagccgccgcacctaaaaagtcttggatccctgctgttagaggtggtggcaacttcattgaccctgaatggctcgatggatcgctccctggagactacggatttgacccactaggtcttggaaaagacccagcattcctcaaatggtaccgagaagctgagctgatccatggacg

SEQ ID NO: 206954 - DNA, 416 bp, Gossypium hirsutum
tcgcccactcgttcgcccactcgttcggtggaccactcggtgaagtgactgacccattgtacccaggtggtagctttgacccattgggtcttgctgatgacccagaggcattcgctgagctcaaggtgaaagagatcaagaacggtaggttggctatgttctcaatgttcgggttcttcgttcaggccatcgtgaccggaaagggaccattggagaacttggctgaccaccttgctgacccagtcaacaacaatgcttgggcctatgccaccaactttgtccccggaaagtgaacttagagagtgaaaagggatttgtcttgttcatgtttttatttgttggtgtgaatgtaaatttgttgcacaatcaatgaaagcagaatgtgaattttgggcgctcaaaaaaaaaaaaataca

SEQ ID NO: 206955 - DNA, 398 bp, Gossypium hirsutum
cccacgcgtccgcttgttccttccttcgccgtctattgcttttagttgcctcgatttcaagtgaatcagaatgggtaaggaaaagactcacattaacattgtggtcatcggccacgtcgattctgggaaatcaaccaccactggccacctgatttacaagcttggtggtattgacaagcgtgtgattgaaaggttcgagaaagaagctgctgagatgaacaagaggtcattcaagtatgcttgggtgcttgacaagctcaaggctgagcgtgagcgtggtatcaccattgatattgccttgtggaaatttgagaccaccaaatactactgcactgtgattgatgcacctggacaccgggactttatcaagaatatgattactggtacgtcacaagctg

SEQ ID NO: 206956 - DNA, 472 bp, Gossypium hirsutum
tcggtttaccgtcaaacttgaagacggacgtatcggtgtgtaaagactggatcggagggtgttacaagacggtgcaagaggccgtcaacgcatcaccggcaaatgcagagagtacacgccgtttcgtgatatatataaaggaaggtgtgtacgaagaaactgtgagggtgccactggagaagaaaaatgtggtctttttgggggatggaatgggtaaaaccatcattgcgggtgctttaaatgcagggatgcctggacttaccacttatgagactgctactgtcagtgagtactactaccctcctacactacttacgttaaacatttaactttgtttaagaattgtcagttttacatatatgaatgagcttgataagatactgtctatagactttcatggtttcccagagcttatatatagtagtagtacccataagcctatgtcgagtaaaagtctcttatgtaactcatc

SEQ ID NO: 206957 - DNA, 464 bp, Gossypium hirsutum
ctttgttttccaatagttcgtaacaatgtcggtctcacttcaagctgcagctaccctgatgcaaccaatcaaggttgctgcaccatcaaggaccaatgtgctgctcaggtcctcccagagcgtttctaaggccttcggtttggagcctgttggtgctaggctcacctgctctttgcaaactgacctcaaggacttggctcatacgtgtgttgatgctaccaagctcgctggtttcgctcttgctacatctgctcttgttgtctcgggagcaagcgctgaaggagttccaaagcggctaacctacgatgaaatccaaagcaagacatacatggaagtcaaaggaacaggaactgctaaccagtgcccaaccatcgatggtggtgtcgactcttttgccttcaagcctggcaaatactacgccaagaagttctgcttggagcccacttacttcactgtcaaggctg

SEQ ID NO: 206958 - DNA, 444 bp, Gossypium hirsutum
caaaatccaaaaaggaaaaaaagagaaaaaagaaaaaaaaatcctccaaaaatggcgacttcagctactacactcacttcactttccttcttctcttcttcccttttcctctcttctccttcccctaaactctcaacttccctttccttctctttcaaaccttcttcgaacccgtctctttccatttcttcccaactttccaatctccccattttgtccttcaccggcgaaaaaatcggcgaaacttatctcgacctcaaatcagcccctcccgaaaccgctagagccgtcgttcaccgagcaatcatcactgacttacaaaacaagcgtcgtggcacagcttctacactcactcgtggtaaagttcgtcgtggagggaaaaagccttaccctcaaaagaaaaccggtcgtgctcgccgtgggtctgcgcgcaccacgctccgt

SEQ ID NO: 206959 - DNA, 461 bp, Gossypium hirsutum
cccacgcgtccggcaaaacataaggcaatggccactactacagccacctgttttcacttacaaaacataccatcatcaccatgggtgaacaacaccagcagaataacaacatacaaagccatggatggatcattaagagcttcaaacccccgaacccaaacattcattaaacccgtgaaatgtagtagtagtagtagtagcggaaatgagataggcatagccgatttcatcggtggagatctattaaaattcgatttagggcaatggctatcggatgtagaacaacacaaagcccttgctatttacacccctcacgaaggtggctacgagggtcgttactttacacggcttcgacaccagggttactatttcctcgaccttactgctcgtggccttggtgatcccgaaactacactcactaagatccatcctgtttgccctcctcatgttgggaagcaacc

SEQ ID NO: 206960 - DNA, 341 bp, Gossypium hirsutum
cccacgcgtccgtccacgcgttcgtccacgcgtccgtttttttttaagacaagaacaaagtggagattttataacacaaaaatagaggatgcatatccacttaaatcacaaaaggaaaacaacattcaattaagacacaaaggggggatttcctttgtttgtgcccaatatatatttttttcttcccttagagcttaatttcccatttagaaagctcctctcttgatagcatcgtcattagcatttacaagggcagcttcactcaaatatttgtgagccaattgaaccctctttacattctcttgctcagcaacaagcatgtatacatattccaacagctt

SEQ ID NO: 206961 - DNA, 378 bp, Gossypium hirsutum
aaacaatgctggtaatgtcaagtaccagcgtttcaaccagccatgttgtgaacttgaagagagatcaccctttactccattttcaagctcaagggttaaagcctaaaccctcctctcatttcttattcaatccacactctaacactgttgctgcttcatcatctaaagctttcaccacttttgcactcttcaaaccaaagaccaaagcagctcctaagaaggctgcacctaaaccaaagccaaaggttgaagatggaatctttggcacctctggagggattggttttaccaagcaaaatgagctctttgttggacgtgttgccatgattggctttgctgcatccttattaagtgaaagcaatacaaggaaaggaattc

SEQ ID NO: 206962 - DNA, 458 bp, Gossypium hirsutum
cccacgcgtccgcccactcgtccgcccacgcgtccggttgcttcaaactagaatcttctcctagtctgacactcaaaggcaccggcttggaccgaattatctgcagcttccagctaatgctcccaaatgtgctcatcacaataatcaccatgaaggttttatgaattttatgcatagagatgaggaggtgaactacttcccttcgaggtacgatcctgttcgccacgctgagaagcaccctattcctagcaccgtttacagtggcaaaagagagaagtgcattatcggtaaggagaacaactttaagcagcctggggaacgataccggtccttttcagctgacaggcaagaacggcttattaatcgctggattgatgcattgtctgatccaagggtcacacacgagatccgcagcatttggatctcatactggtctcaggctgacaaatctttgggtc

SEQ ID NO: 206963 - DNA, 475 bp, Gossypium hirsutum
tcgcccactcgttcgcccactcgtccgaagagataagattatagtgaaaaactaaacataataaagccccttcgacttgcttcattgatttgccctctcaaagcccaagaaaaatggcttctgcttccgctactctcctcaagtcttcacctattatcgacaagtccgagtggattaagggccaaaacctccgccacccttcggtttgttttgtacggtcacaccctacatcggccgcctttgccgtccgtgctagttcatatgccgatgagcttgttaagaccgcgaaaactgttgcatctccaggtcgtggtattttggccatggatgaatcaaatgctacatgtgggaaacggcttgcctcgattggtctcgagaataccgaggcaaaccggcaagcttaccgtacccttctcgtgtctgcccctggcctcggtgactacatctcgggagctatccttttcgaggagactct

SEQ ID NO: 206964 - DNA, 433 bp, Gossypium hirsutum
tcgcggactcgtgggcggactcgtgggactaactcaatgaaggcgcttggggtagacattttaactggttttggtactattgtgggtccccaaaaagtgaaatatgggaaggttggtttcactgacaacgtagtaactgcgaaagatatcatcattgctactggttccgtcccttttgttcccaagggcattgaagttgatgggaagactgttattactagtgaccatgccctgaaattggagtttgttcctgattggattgcgatcgtaggaagtggttatattggtcttgaatttagtgatgtatacactgcacttggcagtgaggttacttttattgaagctctagatcaacttatgcccgggtttgatcctgagattagtaagttggcccaaagggtgctgatcaacccaaggaaaattgactaccata

SEQ ID NO: 206965 - DNA, 412 bp, Gossypium hirsutum
acgccgacgcacacgcgcgcgtccactcgtccgaagagataccattatagtgcgaaactaatcatattaaaggccctccgacctgcttcattggtttgtcctctcaatgcccaagactaatgagcttatgcttccgctactctcctcaagtctctacctattatcgacaagtcctagtggatcaatggccataacctccgccacccttctgcttgtcatgtacagtcacaccctacatctgccgcctttgccgtccgtgctagttcatatgccgatgagcttgttaataccccgaaaactgctgcatctccaagtcgtggtattttggccactgatgaatcaaatgctacatgtgggaaactgcttgccttgattggtctcgtgaatacccatgcataccggctagcttacc

SEQ ID NO: 206966 - DNA, 355 bp, Gossypium hirsutum
tcccactcgttcgcccactcgttctaccacacttatcgaatgcttcaaactataaacattttatatggttacactactattcggcgtgctcaaccagattatcatcagcttgcagctaattctcacaaatttgcatctgacaatgatcaccataaagctactatgaactttattcatagacacaaggacattaaactctttcctaagactgacaatactagttaccacgccttgaaacaccctattgctagcaactgtaacactatcataagaaataattacattatccttaaatataacaacttttacccttctcttgaacgataccttacctttatagaagacaatacatcaa

SEQ ID NO: 206967 - DNA, 453 bp, Gossypium hirsutum
cataaacaggcaaagagagtgtgacagagtttaatgaacttcaaccttcaaagcatgaacccatcatcatcatttgtggctaccagagatcaagctctctctgttttcaaccaccctttctcacaatctcactctttccttgtttctaatttcaaaaatggctcctttctatctcccatcaatacccacacaagaaggccaaagacccacacttcttttaccactcctaatcgattccaacccatcactggttgtttaggtgagaggaatacacctgcataggcacttagacagattctggaatcgcctggtgctcaccaaggccctgcttgtttcgatggtctcagtgctaagcttgttgaaagagctggctttcagtattgtttcaccagtggattttccatttctgccggtcgcctgggactaccatacaccggatttatttcttatgga

SEQ ID NO: 206968 - DNA, 455 bp, Gossypium hirsutum
gttttaaatatacatatatttctcacttctattgtaaatagacagtaattcagatcaaagggtatccgtttcttttcttatttttcgttttaatttctcgagcttttacggttcaaaaatggcggacaaagctaaaaccgaaaacccatcttttctccatggaaaatacgagcttggccgtatgttgggtcatggaacgttcgccaaagtctaccatgcgaagaaccttcaaacagggaagaatgtcgccatgaaagtggtgggcaaagagaaagtgatccaggtcgggatgatggatcagatcaagcgagagatctccgtcatgaaaatggtgaaacaccccaacatcgtcgagctgcacgaagtgatggcgagcaagtccaagatttacttcgccatggagctcgtccgcggcggcgagctcttctcgaatatgccaaaggtcgtctcaagga

SEQ ID NO: 206969 - DNA, 188 bp, Gossypium hirsutum
cttcaaatggaattgggaccattcctgccttctttgagatttcaataccattgtctccaccattgaaggttatactcttaactccagggtgcataataaggacttcaccaatttcatagcctttccccgtcacacatattctaatctctatggtaaagccagtctaatcaaatcattcctccttatta

SEQ ID NO: 206970 - DNA, 279 bp, Gossypium hirsutum
gggatctaaagagcattacaagaaatgcatggagcaaaggtttaaggaattggtggcaagcaaggcccgggagggtctccaggctgaggttactgatatggactgggaaagtaccttctatttgcgccatcttcctgaatcaaatatggctgaaatcccacatctaaccgatgaatacaggaaggtgatgaaagaatttgcattgaaatcggagaaactagcacaggagctgctggacttgttctgtgagaaccttggtctcgagaaagggtacctcaa

SEQ ID NO: 206971 - DNA, 422 bp, Gossypium hirsutum
  unsure (1)..(422): unsure at all n locations
ggttcgatgtgaacggctcttgcacatgggttagtcgatcctaagagacgggggaagcccgctcgacagcgcgtccagcgcgagcttccaaagggaatcgggtcaaaactcctgtaccgggacgctgcggctgacggcatcgttagggagtcctgagacgtcggctgtggcctcgggaagagttatctattcagtttaacggcctgaccaccctggaaacggctcagtcggacgtagggtccatcggccggaagagcaccggacgtcgcgtggtgtacagcgcgcccacgacggtcctggaaaatcgccatgaccgagtgccagccgcgcacggtccgtactcataaccgcatgaggtctacaaggtgaacagactgtggtcaatggaacaatgtangcaagggaagtccgctgaatggatc

SEQ ID NO: 206972 - DNA, 264 bp, Gossypium hirsutum
acggactcgatgtgtacggctcttgctcatgggtttgtagatcctaagagacctgttaagcccgtgcgacagcgccttcttcgcgagcttcgaagggtaatcggattaaaactcctgtaccgtaacgcggctgctgtcggccactttagatagtcccgagacctcggtctaagccttcggaacacggatcttttctgcttaacggccttaccaccctggaaacggctcagtcagttgtagtgcccagccggacggaacagcacc

SEQ ID NO: 206973 - DNA, 435 bp, Gossypium hirsutum
cttcactgcatcatcgttcttatggagcatctaaagcctatggagccgaccagaatccactcaaatggcgattctctgattcaggacatgacctttgctccggatattccagtctacgtgacatcagctgcttacaacatggacccctgccccaataagctgcatttggatattggcgtttaccgaacagaggacggaaaatgccatacattaaatggtgttaaacaagtggagcacacactagctaatgatctgtcatgctgacaaggagtatcttcctatgacaggaattcctgaatttaataaattaagtgctaacctaatcggtggctctggcagccctgccatcaaggaaagtcgagtagttactgtccaatgtgttactggttgactatcactgatggttgcagctgacattttagcaaaacattacca

SEQ ID NO: 206974 - DNA, 467 bp, Gossypium hirsutum
gtccaatcactcccaatactttcataacatttcacgaacttcactctccagtctccaatggcggctgccgtctccaccatcggtgctgtcaaccgagcaccgttgagtttgaatggatcaggtgccggagcttctgctccaagctcagctttcatggggaacagcttgaagaaagtgagcgctaggttcaacaacaacggcaaggctccagtgggaagtttcatgattgtggctgccaaagaaatcgacgaagactcacatgaccgaccaggaccgatggaagggtcttgctcatgatatctccgatgaccaacaagacattaccagagggaaaggtatggtcgactcattgttccaagctcccatgaacgatggtactcactatgctgtcatgagctcctatgagtacattagccaaggccttcgcacatacgacttggacaacaacatggatggattctacattg

SEQ ID NO: 206975 - DNA, 375 bp, Gossypium hirsutum
cttttcgcaccatcccgaaagcttgcacatgttcaccttcctgtttgatgacatcggtgttccacaggattataggcacatggatggctctggtgttcatacctacacactaatcaacaaagctgggaagtcacactatgtgaaattccattggaaacccacttgtggtgtaaaatctttgttggaggatgaagccataagagtaggtggcgcgaatcacagtcatgccacacaagatctttatgactcgattgcagccggaaactaccctgaatggaagctgttcattcaaataatggatcctcttcatgaggacaggtttgattttgacccacttgttgtaaccaagacatggccagaggacatcttcccgtt

SEQ ID NO: 206976 - DNA, 402 bp, Gossypium hirsutum
acgcagacgcgtgcgaccacgcgtccgagatggcagtgagcgcaacggtgatcggagcacttctgggactgggcacccatatgtactgcaactctctacgcaagctcccttatatgcgacatccgtgggagcacctgttggagatgggtctgtgagccgtgttcgttaaccagctcgtgaattgcgacgctcatctacaacgggaccttgacaatatgctcgaaaaggccaaggctggcaacgagcgccgctactttgatggagatgatgattaacgctttagcgctatcatcagatgagacattcatgcgccaagctactgaggtcataaaccggctcagattgcgagtgggccactctggactcttgctttgggccgattccaagcccgttgaaccttct

SEQ ID NO: 206977 - DNA, 470 bp, Gossypium hirsutum
tcgcccactcgtccgagagaactagcgttagggctgcagctgcagatgaagctgctgctgccgctgccacaaaggaagctccggtgggtttcacccctccagaattggacccaatcaccccatcacccatcttcggaggaagcactggtggactgctgagaaaagcccaagttgaagaattctatgtcatcacatgggattcacccaaagaacaaatctttgagatgccaactggtggtgcagccatcatgagacaaggacctaacttgctcaagctggccaggaaagaacaatgcttggctttgggtaccaggctgaggtctaagtacaagattaagtaccagttttacagggtttttcctaatggtgaagtccaataccttcaccccaaagatggagtttatcctgagatagtgaacccaggtcgccaaggatttggccagaacttcagatcaattgggaagaatgtc

SEQ ID NO: 206978 - DNA, 426 bp, Gossypium hirsutum
acgatcttgctctccacccttgaaccatgtcggctttagctggcaagtgtgcagaggagttgatcaagaacgccgagtacatcgccacgccaggcaaaggtattttggcggctgacgagagcacaagctccatcgggaaacgtctctcgagcataaacttcgataacatcgattgcaatcgccaagacctccgtgagctcctatttacctctcgcaacgcattatcctggctctacagtgtgattcttttcaaggaaacactctaccagagataatctggcaggtaacccttcagcgaaatcctcgtagagaacaatgtcattccaggtatcaaggtccataatggcaccgttgagatagcccgcaccaatggcgagaccactactcatgggttcgactccttgagtgcgcgttgtgagcaattct

SEQ ID NO: 206979 - DNA, 469 bp, Gossypium hirsutum
tctttctacccacccttaaaccatgttggcttttgttggcaagtatgcataggagttgatcaagaacgccaactacatcgtcacgccaggcaaaggtattttggcggacgacgagagcacaggctccatcgggaagcgtctctcgagcatcaacgtcgagaacatcgagtacaatcgccaagcccttcgcgagctgcttttcacctataccaacgcattatcctgcctctccggcgtcattcttttcgaggaaacactttaccagaaaacatctgacgggaaacccttcgatgaaatcctcgatgagaacaatgtcattccaggtatcaaggtcgataagggcaccgttgagatagccggcaccaatggcgagaccaccactcaagggttcgactccttgggtgctcgttgtcagcaatactataaagctggtgcccgtttcggcaaatggcgtgcggagctcaagatc

SEQ ID NO: 206980 - DNA, 455 bp, Gossypium hirsutum
cccacgcgtccgcactggtggtgttaagcaggcttctcaccttctcaaatatgattccaccggtggcatcttcgctgccgatgtcaagcctgttggcactgatggcatctctgttgatggcaaggttatcaaggatgtttctgaccgcaaccctgccaacctcccatggggggacctaggaatagatctagtcatcgaaggaaccggtgtgtttgtcgatagagaaggtgcaggtaagcacattcaagcatgagccaataaagtgctgattactgccccaggtaagggtgacatccccacctatgttgatggagtgaatgctgacacctacaacccacatgagcctatcatcagcaatgcttcttgcaccaccaattgccttgctcctttcgtcaaggttctggaccagaagtttggtatcatcaacggcaccatgactaccactcactcgtaca

SEQ ID NO: 206981 - DNA, 330 bp, Gossypium hirsutum
gttttctgctctgtttttcattgacaagtttcaatggcaaaaccagtttccattgaagtgtggaaccgaaatgggaaatacagagttattagcaccaaacctatgcctggaactcgatggatcaacctcttaatcgagcaagattgccgtgtcgaaatatgtactgagaagaaaacgattttgtccgttgaggatatcatttctttgattggcaataagtgcgatggggtgattggacagttgactgaagactggggggagactttatttgcagctttaagcagagcaggaggcaaagcatttagtaacatggctgttggttacaacaat

SEQ ID NO: 206982 - DNA, 458 bp, Gossypium hirsutum
acgcagacacgctttgactgaaactagctgatgctgcaaccgatggacgcatgatgtctaaatggcggggcttctgtccaggtcggcatgatacattattgccaaggcaggatctaattatgatttccatccattaactaatgattcctgcataagtgacgctgtttacactgttttgcttgaagcataacaccgaatcgtctatgctattgcaacccaagacatccctagtctgaaagacctgtcaccacgacaaattaaggttatggcagcactcatatcgattaatgatgtactagacgatctaattgagtcatgcagcatgagtggagaagaagaacagctactgctttgtaatgagtatgtgaatgaacaacatcctagccttctggagtttctgctgatgttatgggatgatgcatctagcaagcttctgcgagatgattcaatgacaatgc

SEQ ID NO: 206983 - DNA, 339 bp, Gossypium hirsutum
accaaagctccctgtaagaattgcttgaaagatgctggcatttccacaaatgatgttgatgaggttcttcttgttggagggatgacacgtgtacctaaagtgcaagaagtagtttcagggatctttgggaagagtccaagcaaaggagtcaatcctgatgaggctgttgctatgggggcagcaattcatggtggtatacttcgtggggatgttaaagagttgcttctgcttgatgtaacttctttgtcacttggtattgagacactaggtggaatattcactaggctaatcaaccggaacacaaccattccaacaaagaaaagtcaggtgttctctact

SEQ ID NO: 206984 - DNA, 275 bp, Gossypium hirsutum
cccacgcgtccgcatcggtcggtggcggaggcagatacatggccttctctccgtcgccttgcgcccctgactctccccatctatgcggccttcgttccgccgccgccgctctccttgaccaagagaaatatctctcggagttactggcagagcgttacaagcttagtccatttatgacagtgattcctcatacctgtagactgttgaaccaagaaattttgcgtataactacactgttggggaatgcatcagttttaggtcaaaatgggcttgaa

SEQ ID NO: 206985 - DNA, 461 bp, Gossypium hirsutum
aagaaaatgaagatccaactgttaccaaaatgtttcactacaaaatgttgtccgacttgcttggaagcaaggaagcagcaaaaagttcaatgctttatagctataaacatggcttttccgggtttgcagccaggttgacagattcccaggcaaaggaaattgaagcatttcctggtgttgtccaagtgattcctaatcaagttcacaagtttcatacaactagaagttgggacttcatggggctaaatgatcattctacaacaaatcttttaactaaaagcaacatgggtgaaggaataatcattggagtaatagactcaggagtgtggccagaatctgagagtttcaatgataggggtatgaatccaattccacctcattggaaaggtatatgccaagagggacagttgttcaactcctcaaactgtaacaagaaacttatcggagctcgttggttcgtc

SEQ ID NO: 206986 - DNA, 372 bp, Gossypium hirsutum
tcgtccacgcgttcgcttgattttgatttaagttcattgcttgatccatttcgattggatcaaaggcctgatacagtagtaatcgtctatataacggaaggactaggtgatgatgttaggctgggatcatataagttcagggaaaggcagcctataggaactgctgctcaaactcaagataccatggactacaaggatccaactgctgatacactgtttgatcctgactagttatgcttatgggactattacagggctggcattgccgctttcgtcgccacttgctagtgtatttacattaccgttataactgcaatagttgtcgctaaatcttcaacctagagtgatactgtaatgaatcaagtcacagct

SEQ ID NO: 206987 - DNA, 392 bp, Gossypium hirsutum
attccttttctcctttttctttttctcagacaagatgggttctcagggatcgggtatggctatgcttttgctgatgatgttcactttatcatcagcttccgacatgtccattatatcctacgatgaagcccatcccgacaagtcaacgtctagttggagaacagacgacgaagttatggccatgtacgaggagtggcttgtaaagcatggaaaaacatacaacggtttgggtgagaaagagaggaggctccagatttttaaggataaccttaggttcatcgatgaacataacgccgatgagagtcacagttttaaggttggtttgaaccgctttgctgatcttaccaacgaggagtaccgagccatctacttgggaatcaagtatcccaacc

SEQ ID NO: 206988 - DNA, 422 bp, Gossypium hirsutum
cctgctttgagctgggagaagtgtgtagggaggttgatcttcctgctggtgtcctcaacattctgcccggactaggccctgaagctggtgcatctttggcatctcatccacatgttgacaagatttcatttactggaagcacagtcacagcggttaagataatgacagctgctgctcaaagggtcaagcctgttaccttggagcttggtggcaaaggtccaatagttgtgtttgaggatgttgacattgataaggctgttgagtggaccatattcggatgcttttatacaaatggccagatctgcagtgcatcatcacgccttattgtgcatgaaagtattgcagcagaatttttggacaggcttgtgaaatggagtgagaacattaaaatttcagatcccttggaagaagggtgcaagctt

SEQ ID NO: 206989 - DNA, 339 bp, Gossypium hirsutum
cccacgcgtccgggggaaacaatatttcttggggttcgagaagtactttggagggtctggtgagccggcataccctggaggaccactgtttaacccacttggttttgggaaagatgagaagtcattgaaggatttgaagctgaaagaagtgaagaatgggagattggcaatgttggcaatcttgggttacttcatacaatggctcgtgacaggtgtaggaccataccagaacctgttggatcacttggctgaccctttcaataacaatgtcttgactaacctcaagttccattatatgaaagtgcctatatttgttccatggaactacccttccccccc

SEQ ID NO: 206990 - DNA, 408 bp, Gossypium hirsutum
ataccacaggctcccatcaaccgacatcatctttccccctcagaatggcggctgcgaccatgggtatctcttccccatctttcgcgcggataggccgccaagctctctccttccgcccctaatatccaaagcccaggccgtgtttacatgaggaaaaccgttaccaatgctgctcactgtggaagtgcatggtacggacctgaccgagtctagcacctgggtccactatctggcgagccttcatctcactcgtccgaagaataccgtggtgactacagttgggacactgctgaactctacacggacccatagacatatgccaaggaccgtgagctctaagttattcactgtacgtggactatgttgggtgctataacgtgtgttttccatgagattttagctaggcat

SEQ ID NO: 206991 - DNA, 400 bp, Gossypium hirsutum
acttgatgtcattgcaatcaatgacactggtggtgttaagcaggcttctcaccttctcaagtatgactctacccttgggatatttgaagccgatgttaagcctgttggtgataacgccatatctgtcgatggcaaggtcatcaaggtcgtttctgaccgcaaccccgtcaacctcccatggaaagacttatggatagacctggtgatcgaaggaactggtgtgttcgtcgatagagatggtgcacgaaagcacgtccaagcaggagcgaagaaagtgctcataactgccccaggaaagggtgacatcccgacctatgttgtcggagttaatgctgacatatacaacccagatgagcccataatcagtaatgcttcttgcaccaccaattgccttgctccc

SEQ ID NO: 206992 - DNA, 451 bp, Gossypium hirsutum
gaaaaaagggattcgcttaacagccaacattttgtttccttctgctactggctagggtttaaatcaggggttttccttcttctgctcactgcttcaccactattccaccatcaacaaccaatggatagataccagaaagtagagaagccaaagcctgaatcacccattaacgagaatgagatccgaatcacttcccaaggtgctattcggaactacatcaactatgctattgctcttcttcaggacaagcatgtgaaggaaattgtcttgaaagcaatgggacaggcaatcagtaagacagtagccattgccgagattttaaagaaacggattcctcgcttgcatcaagatacttccattagctcggtgagcataactgatgtgtgggagcctattgaagagggccttgttcctgtggagatgattcgccatgtctcaatgatatctatta

SEQ ID NO: 206993 - DNA, 472 bp, Gossypium hirsutum
caatactttcataacatttcacgaacttcactctccagtctccaatggcggctgccgtctccaccatcggtgctgtcaaccgagcaccgttgagtttgaatggatcaggtgccggagcttctgctccaagctcagctttcatggggaacagcttgaagaaagtgagcgctaggttcaacaacaacggcaaggctccagtgggaagtttcatgattgtggctgccaaagaaatcgacgaagacacacagaccgaccaggaccgatggaagggtcttgcttatgatatctccgatgaccaacaagacattaccagagggaaaggtatggtcgactcattgttccaagctcccatgaacgatggtactcactatgctgtcatgagctcctatgagtacattagccaaggccttcgcacatacgacttggacaacaacatggatggattctacattgccccagctttcatggacaa

SEQ ID NO: 206994 - DNA, 391 bp, Gossypium hirsutum
cccacgcgtccgcgaagcctgcccaacaactccctgaatatccggatgccgatgagctcgattcggtactcaaaacgatcgggtccttcccgccaattgtgtttgctggggaggcaagaagactggaggaaaagctagccagcgccgtcgtcgggaaagcgtttctgttacagggtggtgactgtgcagagagtttcaaagaattcaatgggaccaacattagagacactttcagagtccttttgcagatgggaattgtcctcacttttggtgcccaaatgcctgtcatcacttgtgggaggatggcatggcaatttgcaaagccaaggtcagatccatttgagataaaagatggcgtaaagttaccgagttatcgaggagattacataaa

SEQ ID NO: 206995 - DNA, 304 bp, Gossypium hirsutum
gccactcgtgcttcaagcctgagcaacaactccgtgaatatccggatgccgctgagctctatgcgatactcaaaacgatcgggtgcttcccgccaattgcgattgctggggaggcaagaagactggaggtaaagctagccagcgccgccgtcgggaaagcgtttctgttacagggtggtgactgtgcagagagtttcaaagacttcaatgggacccacattagagacactttcagagtcctattgcagatgggaattgtcctcacttttggtgcccatatgcctgtcatcactgttgacaggat

SEQ ID NO: 206996 - DNA, 235 bp, Gossypium hirsutum
tgacaacttggaagcaatcaggcatcttacttctactaaacattatgaacatcgagagaggcactgtccagaaaaaccacggaggtgccttgttcctcttgctgaatgatataagcgtacaatcgagtggccaaatagcacggaaaagatttggtactacaatgttccccataccaaattgacacaacataaagggcatcagaattgggtgaaacgtactggagaataccttaca

SEQ ID NO: 206997 - DNA, 315 bp, Gossypium hirsutum
gaaagcatggacttcagttttaatatctgtcacttcctatgcattggggatcttcatgatttcaaaagccccatggtatctacttcctttagcttgggcatggacaggaacagcaataactgggttctttgttataggccacgattgtgctcacaaatcattttcaaaaaacaaattattggaagacattgtgggaactctggcctttctaccactaatatacccatatgagccatggcggtttaagcatgacaggcaccatgcaaagacaaacatgttatcagaagatacagcttggcaccctgtttgtgaaaa

SEQ ID NO: 206998 - DNA, 425 bp, Gossypium hirsutum
tcgggatgtttaatgaaattagaccgaaaagaattccgtgcatctacaatcatattttgattttgggtctgtgaattcccgaaggtgtgtttgaaacgctggacgacagttcctttgattttgagagaaaagagagagagagagaagagtagatcttggcttctctccttcgttcgattccgcttaattatagcccgcgtttctctcatacgtgaaaaatggggctgtctttcacaaagctatttagccggcttttcgccaagaaggagatgcgtatactcatggttgggcttgatgctgctggtaaaactaccattctatacaagcttaagttgggagagattgtcactaccattcccaccatcggtttcaatgttgagaccgttgaatacatgaacatctgctttactggtcgggatgttggt

SEQ ID NO: 206999 - DNA, 420 bp, Gossypium hirsutum
tcctcaaatatctcatacaaggaattaaattgaatcaatggctcaaaccatgttgctcatgtctagccatgcattgagcttgaagagagatcaccctttactccatttccaagctcaagggctcaagcctaaacctgtctctcatctcttcttcaatccattgtctaacggtgtccatacttcatccaaagctttcaccactttagctatctttaaatcaaagaccaaagcagctcccaagagggttgagccaaagtcaaagccaaaggttgaagatgggatctttggcacctctggagggattggttttaccaagcaaaatgagctctttgtgggacgtgttgccatgcttggttttgctgcatcattgctaggcgaagcaataacagggaaaggaatcctagcacagcttgatttgga

SEQ ID NO: 207000 - DNA, 189 bp, Gossypium hirsutum
ctttccattttcaatctgttctttcatatctgggcgaaagatatggaccgcgtgctattcactttcgaatctgacaatgagggccacccccacaagatttgcgaccaggcttcacatgctattcttgatgcatgcctagaacaagatccacatagcaaagtagcttgtgaaacttgtaccaagacaaac

SEQ ID NO: 207001 - DNA, 388 bp, Gossypium hirsutum
ctaatttctggagttttagccccgattagaaagggtccagaaaaactttctagttatgaatcgggtatagaaccaatgggcgatgcttggttacaatttcgaatccgttattatatgtttgctctagtttttgttgtttttgatgttgaaacggtttttctttatccatgggcaatgagtttcgatgtattgggggtacccgtattcatagaacctttcatttccgggctaatccaaatggtgggttaagttaatgccatggcgaaaaggagcattggaatggtcttagttcctgaatattcagataataaaaagaaagaaaaaagtcaaaatattaataacattgagtatgaattccatcgaattttccttacttgttcgaacaacc

SEQ ID NO: 207002 - DNA, 440 bp, Gossypium hirsutum
tgacaatttggaagcaatcaggcatcttccttctactaaacattatgaacatcgagagaggcactgtccagaagaaccaccaacctgccttgttcctcttcctgaaggatataagcgtccaatcgagtggccaaaaagcagggaaaagatttggtactacaatgttccccataccaaattggcacaaattaaggggcatcagaattgggtgaaagttactggagaatacctcacatttcctggtggtggaacccagtttaagcacggtgcgcttcattatatcgacttcatagaagagtctgtgcctgatgtagctgggggaaaacggtctcgcgtagtattggatgttggatgtggggtttgcagctttggaggtttctttttgacagaaagtgttgtgccatgtcctttgcacccaaagatgaacatgaagctcaagt

SEQ ID NO: 207003 - DNA, 475 bp, Gossypium hirsutum
tcgcgagatagcttccagcgctacaatatggatggaattgctgagatattattagcacttcagaggatcgaacaagatgaagagttgacatatgagcaattacttgttctagagaccagcttgttccttaatggcctagacttttatgaccagcatagagacatgagactggatatagataatatgtcatatgaggaattactagccctagaagagaggatgggtaatgtgagcactgggctatcggaagaagcattgtcgaaatgcctcaaaaaaagcatctatgacacagcatcttcggagtttgcaaatgtgagctatgagggtgaaaaggatgatgtaaaatgcagcatatgtcaggtactttttctatatgactttccactaccatgctttttcatttcttctactcatctatgtatggaaagggatgattttgcacatttgcaggaagagtacgtgaatggagatgaaa

SEQ ID NO: 207004 - DNA, 426 bp, Gossypium hirsutum
cccactcgttcgcccactcgtccgtctttcttttcattttttttcactcaaagaggcaagcagaaaattttagggagcacaacttcccccccccccccagtttcgctgttcagtgacaatggcgattgtgaatatggtgatggctgcggttatcatggcagcgaccctcggagggaaattgggtgcagcacaagtacaccatgtggtcggaggtgaccgtgggtgggacctttcctctgacgtggcatcttggtcctccggtaggagcttcagggttggagacaaaatctggttcgcctactccgcagcacaggagagcattgctgaggtgaatagcccggaagaatatgagtcgtgcgatgtgagctaccccattagaatgtacactgacggcatagatggcatcccgctggatggggaaaggat

SEQ ID NO: 207005 - DNA, 358 bp, Gossypium hirsutum
tcgcgagatagcttccagcgctacaatatggatggaattgctgagatattattagcacttcagaggatcgaacaagatgaagagttgacatatgagcaattacttgttctagagaccagcttgttccttaatggcctatacttttatgaccagcatatagacatgagactggatatagataatatgtcatatgaggaattactagccctagaagagaggatgggtaatgtgagcactgggctatcggaagaagcattgtcgaaatgcctcagaaaatgcatctatgacacagcatcttcggagtttgcaaatgtgagctttgaaggcgaaaaggatgatgtataatgcactatatgtc

SEQ ID NO: 207006 - DNA, 209 bp, Gossypium hirsutum
cggacgcgtgggcagacgcgtggactgactcgtgggctgaacatgaagttttcaacttcactggagaaggatgagttgcactggccatgtataacacatatgaggctattcgggcttttgccgaggcttccatgaacactgcttatcagaagaagtggcctatatatcttagcacgaagaatactattcacaagaagtatgatggaaga

SEQ ID NO: 207007 - DNA, 461 bp, Gossypium hirsutum
caaaatcaatccccattgacaaacaatggcttccatgcttagctctggaactgttcttaggccaaccccatttcttggccaaaccaaaaatgctaaccctcttagagatgttgtctctctgggcactcccaaatatgcaatgggaaatgaactatggtatgggccagacagagtgaagtacttgggaccatcttcagctcagactccatcttacttgactggagaattccctggagactatggttgggacactgctggtttgtcagccgaccctgaggcctttgccaggaatagggctcttgaagtcatccatggaagatgggcaatgttgggagcactaggctgcatcacaccagaagtacttgagaaatggcttagggttgatttcaaggaaccagtatggttcaaggcaggagctcaaattttctcagaaagtggctcggattacttaggcaacccta

SEQ ID NO: 207008 - DNA, 392 bp, Gossypium hirsutum
ggaacgtcacagttactggtgtggaaatgtttcaaaagacattagatgacgccatggctggtgataatgttgggttgttacttagaggtgttcaaaaggccgatattcagagagggatggttttggctaaaccagggacaatcactccccataccaagttcagcgccattgtctatgtgttgaagaaggaagagggtggcagacattctcccttcttcgcaggttataggcctcagttctacatgaggaccactgatgtcactggaagggtggcttccattatgaatgataaggatgaggagtctaagatggttatgcctggtgaccgtgtaaagatggtagttgagcttatcatgcctgtggcttgtgagcaaaggatgcggtttgctatc

SEQ ID NO: 207009 - DNA, 354 bp, Gossypium hirsutum
cttctttgttttccaatagttcgtaacaatggcggtctcacttcaagctgcagctaccctgatgcaaccaatcaaggttgctgcagcatcaaggaccaatgtgccgctcaggtcctcccagagcgtttctaatgccttcggtttggagcctgttggtgctaggcttacctgctctttgcaaactgacctcaaggacttggctctgaagtgtgttgatgctaccaagctcgctggtttcgctcttgctacatctgctcttgttgtctcgggagcaagcgctgaaggagtttcaaagcggctaacctacgctgaaatccaaagcaagacatacatggaagtcaaaggaacaggaac

SEQ ID NO: 207010 - DNA, 352 bp, Gossypium hirsutum
gtttcattgtttatcagagcaagaaaaagaagggaaaatggaagggaaagaagaagatgttagattgggagctaacaagttctcagaaaggcaacctattgggacagcagctcagtcccaagatgataaggattacactgagccacccccagcacccttgtttgagcctagtgagttgacttcatggtcgttttaccgagctggaatcgctgagttcgttgctactttcctattcttgtacatctcggtgttgactgtgatgggagtccttaaggacaaaaccaagtgtacaacttgttgggattcaagggatttgcttgtgcttttggtggtatgatcctttggctcttgt

SEQ ID NO: 207011 - DNA, 276 bp, Gossypium hirsutum
ggagagaagagaagaatgccgtgaccccattgacggaaatgaagcctgagaggatttttcggaagatgggtctcttgcataggcgagtggatcggatcctgtctagtaagcctacagacttggctaagagtcgtaagatgatctggattgcctgcgatcctgttgagcaacaaagtgttcagctatatgcacttacttataaggtatgggcatggttgcttgacagatttcttgacatagagttcccatattgtgagcaggcattggatgcatatg

SEQ ID NO: 207012 - DNA, 485 bp, Gossypium hirsutum
  unsure (1)..(485): unsure at all n locations
gaaaccctcaaaattccactaaaaaatggcctccacagcttccctctccaccgccgtagccacgacctctttcctccgcgggcatgcggcgccgaaaaccctaaactcccttcctttcaaccaatctcttttcgggctaaaaccccaacgaaatggccgtctcaccatggcagcatacaaggtgacactgttaacacccgaaggaccccaagaattcgtgtgccccgacgacgtatacatcgttgaccaagctgaggaagaaggcattgatcttccgttctcgtgtagggctgggtcttgttcttcgtgtgccggagtgattaagcaaggctccgtcgatcaatccgacggtaatttccttgatgatgaccagattgctgcaagttttgtcctcacttgtgttgcttaccctcagagtgatgttgttattgagacccacaatgaggaacagnctacccgctggatatatatgatactatataata

SEQ ID NO: 207013 - DNA, 361 bp, Gossypium hirsutum
gtttcattgtttatcagagcaagaaaaagaagggaaaatggaagggaaagaagaagatgttgggttgtgagctaacaagggctgggaaaggcaacctattgtgacagcagctcagtcccaagatgataaggattacactgagccacccccagcacccttgtttgagcctagtgagttgacttcatggtcgttttaccgagctggaatcgctgagttcgttgctactttcctattcttgtacatctcggtgttgactgtgatgggagtccttaaggacaaaaccaagtgtacaactgttgggattcaagggattgcttgggcttttggtggtatgattcttgctccttgttactgcactgct

SEQ ID NO: 207014 - DNA, 471 bp, Gossypium hirsutum
cccacgcgtccgcggacgcgtggggtttgtgcttcttctgccgttgcagccgttgccatctcatcccccagttcccagaggagtggatcagtagtgaggacaacaaaggcttctttccttacagggaagaaacttcgatcagtcaaaaagtacacaaaaccagcagcagtccgaaccgttccggtgtgtgcagtggctgaccccgaccgacctctttggttcccaggcagtactcctcctccatggctcgatggcagcctccctggagacttcggttttgatcctctaggccttggatcagaccctgagaccttgagatggaacgtacaggcagagctcgtccattgcagatgggcaatgttaggagccgctgggattttcatcccagagttcctaaccaaaattggcattttaaacactccaccatggtactctgctggaaccgaggaatacttcactgacaccaccacc

SEQ ID NO: 207015 - DNA, 448 bp, Gossypium hirsutum
cccacgcgttcgcccacgcgttcgcccacgcgtccgggcaaatatctttattggattaacataaaggtaaagagtacaaagacagacggtggggaatttattttggaatacatgagagtattataatcagaacctaataatttccccttaagaacaagcttgtagaggaaaattattgtaattttcaaagagtgaccggtttaatgagcaatatgctgataataaccttagttgctttcccaacatatgtatagccatcaccttcgttgtaaatcacattcatcacccttgcaagatttaatatacgattcataacttctattggcatttcggttggtttcaaaaaccctttattcacattcttacaggcactctcgatatgcttgttaaacacattgtatgcttcttgttccattacaccatattcttacatgtaacactcaattcc

SEQ ID NO: 207016 - DNA, 250 bp, Gossypium hirsutum
tcaaaaccctgaccggcaagaccataactttggaagtcgaaagctctgacaccattgacaacgtcaaggccaagatccaagacaaggaaggcatcccaccagaccagcaaaggctcatctttgccgggaaacaactcgaggacggtcgcaccttggccgattacaacatccagaaggagtcgaccctccatttggtattgaggcttcgtggtgggatgcagattttcattagaaagctgactaaccaaaa

SEQ ID NO: 207017 - DNA, 428 bp, Gossypium hirsutum
ctttctcatcttgtgatttgagcttcgtgtttgtgttgggttaagcaattcgccaagatgcagaacgaatagggtcaaaacatggatctttacatccccagaaaatgttcggccactaataggctgatcacctcgaaggatcatgcttctgttcagaattaatggtgggcatttggatgagcttggcagatacactggaactttctccacttttgctctttgtggttttgtccgtgcccagggtgatgctgacagtgcacttgacaggctttggcagaagaagaaagctgaagtccgacagcagtagtgggagttggattgctttttactacttgcttggtctctgaattttggagggaaaatgtgtttttttttttaaataagggaccttaagttctatcttggcttttttaaaatggattatggtg

SEQ ID NO: 207018 - DNA, 375 bp, Gossypium hirsutum
aggcaatgacctttaccctggtggccaatactttgaccctcttggtcttgctgatgaccctgtcacatttgctgaacttaaggttaaggaaatcaagaatggcaggctagccatgttctctatgtttggtttcttcgttcaagccattgtcacaggcaaaggtccactggaaaatctcttggaccaccttgacaaccctgttgccaacaatgcttgggtctatgctaccaagtttgtgcctggatcgtaaattaacagccctggatcgaactcgttccattatttgcttgtatctatcctctatgtacctgtagatttcgcatcactctgaaattttaaacctgtatcactaagaagtcaatgaaattcatgatc

SEQ ID NO: 207019 - DNA, 356 bp, Gossypium hirsutum
cccacgcgtccggagattcttggagtcgaaaaagcagcatctcagcaagagattaagaaagcagattataagttggcactgagacttcatcctgataagaaccctggtgatgaggaagccaaagagaaatttcagcagttgcaaaaggtcatatcgattctcggtgacgaagagaaacgggctgtctatgaccaaacaggttgcgttgatgactgatcttgctggggatgttgttgagaatttgaaaagctttttcaggactatgtacaaaaaggtcaccgatgctgatattgaagagtttgaagcaaattatagggggtctggtccagaaaagaaaggattgattggactttaca

SEQ ID NO: 207020 - DNA, 220 bp, Gossypium hirsutum
ctttctcatcttgtgatttgagcttcgtgtttgtgttgggttaagcaattcgccaagatgcagaacgaatagggtcaaaacatggatctttacatccccagaaaatgttcggccactaataggctgatcacctcgaaagatcatgcttctgttcagattaatgttgggcatttggatgaacttggcagatacactggaaccttcttcacttttgctcttt

SEQ ID NO: 207021 - DNA, 374 bp, Gossypium hirsutum
gtcatctgtctgtctctctgttttactccacaaccactatcactaccattatggcttgggctactgtttctgtagccaaacccaaccttcagattcaggcaaaaggaaagggtgttggttttgcagatttctcaggcctacacaactcctctactagccttccctttgccaggaaaacctctgatgacttccattcactcgttgcttttcagacatctgctctaggaagcaataatggcgggtacaggaaagggatggcagaggcaaagctaaaggtggctataaatgggtttggtaggattggcaggaacttcttaaggtgctggcatggccgtaaagactccccacttgatgtcattgccatcaatgacact

SEQ ID NO: 207022 - DNA, 424 bp, Gossypium hirsutum
atatttatacaatctttgcttaagcaaagatagacactgttcgaagctagtatggggaaattgaaggcggtggtggttgttacaatgatttccaccgttcttctatctattctatggagggcaacgttacatttagaggataatgaaagttttgttcgatgtcttttagatcattctcacccttctcatcccatttcatcagcaatctatacgcctaaatcctcctccttttcatctgttttggaattttacattagaaacctacgattcaacgagtcctccacaccaaagcctttccttattctcactgcactccatgaatcccacatccaagctgccgttacttgcggtaaaagccattgggttcaagtggaaaatccgaaggggggccatgattacgagggcctatcttatggatctactc

SEQ ID NO: 207023 - DNA, 334 bp, Gossypium hirsutum
gcgctttataacactttacgaacttcactctccagtctccaatggcggctgccgtctccaccatcggtgctgtcaaccgagcaccggtgagtttgaatggatcaggtgccggagcttctgctccaagctcagctttcatggggaacagcttgaagaaagtgagcgctaggttcaacaacaacggcaaggctccagtgggaagtttcatgattgtggctgccaaagaaatcgacgaagacacacagaccgaccaggaccgatggaagggtcttgcttatgatatctccgatgaccaacatgacattaccagagggaaaggtatggtcgactcatt

SEQ ID NO: 207024 - DNA, 396 bp, Gossypium hirsutum
  unsure (1)..(396): unsure at all n locations
gtgcattaccactttgatctaatcctcaatttcccaatttctcttgaaaccctaatcctaaagcgatttcccaacttcggcgttgtaatggccactgaggaaccaactgtcgccgtggaatctgcgcctgagctggcggaagagaatcccgctgaggctacagccaatcccaaatctggcaaagcatagaaagctaaagagcccaaagccaagaatgctgcagctcctaggaagcgacgagctcctcctgctcatccntcttacgaagagatggtcaaggatgcaatcgttcctttgaggagaagactggatcaagtcagtatgctatcactaaattcattgaagagaaacagaggaatcttcctggaaattttaagaaggctctgcttttccatt

SEQ ID NO: 207025 - DNA, 371 bp, Gossypium hirsutum
cttcactctgggtcacttagtttctttgctttttgctcttggagtgaggaaatccatatgaaggaagtgcgtttcgtctcttttgaattttcataatggctgggactggagtgttttcagacatattggatggagatgtttacaagtactatgctgatggtgaatggaagaagtcttcttctggaaaaactgttgcaattatcaaccccaccaccagaaaaactcagtataaggttcaagcttgtacacaagaagaggtgaacaaggttatggaatcagcaaaaactgcacataaatcatgggctaagactccactttggaagagagctgagctcctttataaagctgctgctatcctaaaggagcataaa

SEQ ID NO: 207026 - DNA, 379 bp, Gossypium hirsutum
tgagatcataaagcaaaggtgctatttcagggaaaaaggatatggatttaatgatacggcagcgtgaaaagactagcagtgaattacatcagtacacagcaacagatgctacatagcaattaatgttacagctttcagagacatatctataatctaagttcattttccggggacaaagttagtggcataagcccatgcgttgttggccaccggatcggcaaggtggtcaaagaggttctcaatgggaccctttcctgagactacaataaccatcggcatacaaaccaagtcaacctaaagccttaggcaccatggcaacctctgctatccaacaatctgctttccttggccagaccgctttgaagcagtccaatgagct

SEQ ID NO: 207027 - DNA, 327 bp, Gossypium hirsutum
  unsure (1)..(327): unsure at all n locations
gcgtncggactacatagttgttgagttaagtcttgaatcttgagtccgatcatgagttgcaacggctgccgagtcttacggaaaggatgcagtgagtcttgtatattacgtccttgtttgcaatggattgagagccctgaagctcaaagccacgccactgttttcgttgccaagtttttcggccgtgctggtctcatgtcttttatttcagccgttcctgaatctcaacgccctgctttattccagtcgctgttgttcgaagcttgtgggagaacagtgaaccctgtgaacggagccgtggggcttttgtggaacggaaactggcac

SEQ ID NO: 207028 - DNA, 418 bp, Gossypium hirsutum
cccacgcgtccggcagattatctccaaaatcccagccgagaaagcgcaagaaaattaaagaaggaaaatgggagatttatacgctttggatttcgatggagttctctgcgatagttgtggagaaagttccatctctgctgttaaggctgctaaagtgagatggccggctttgtttgacggtgtggattcggtcttggaagactggattgttgatcagatgcatatggtgcgacctgtggtcgaaacggggtatgagaatctgctacttgtgaggttgttggtggagagtagattaccttcgattcggaaaacttcggttgcagaaggactaactgttgaagatattttagagaactggtcaaaaataaagccagtaatcatggaagaatgggttgaaaacagggatgcttaattgatc

SEQ ID NO: 207029 - DNA, 343 bp, Gossypium hirsutum
tcgtccacgcgttcgtccacgcgttcgtccacgcgttcgcattattgtaacaaaagctagagccttgaaggtgacggaagaggttgaaaggctattgtccgtgagccggccggtgaggatgcattggaccggttgtcccaacacgtgtggtcaagtccaagtggcggatataggtttcatggggtgcatggcaagggatgagaatgggaaaccatgtgaaggggcagacatattcttgggagggagaattgggagtgactcacatttaggagagctttataagaagggtgtcccttgtaagaacttggtaccctgtgttgctgacattttgggggaacacttt

SEQ ID NO: 207030 - DNA, 104 bp, Gossypium hirsutum
cggacgcgtgggcggacgcgtggggttactattttgttgtatgtgtacgttttgaaatattcaattcctctactttttaatgccaacttctctctagttcttct

SEQ ID NO: 207031 - DNA, 378 bp, Gossypium hirsutum
ctctgtcatctgtccgtctctctgttttactccacaaccactatcactaccattatgggttcggctactgtttctgtagccaaacccaaccttcagattcaggcaaaaggaaagggtgttggttttgcagatttctcaggcctacacaactcctctactagccttccctttgccaggaaaacctttgatgacgttcattcactcgttgcttgttagacatctgctctaggaagcaataatggcgggtacaggaaagggatggcagaggcaaagctaaaggtggctataaatggctttggtaggatttgcaggaatttcttaagatgctggcatggccgtaaggacttcccacttgatgtcattgccatcaatgacact

SEQ ID NO: 207032 - DNA, 420 bp, Gossypium hirsutum
agctgctcctgttgggactcctgtgattaaaccttatctacttaccaggcgtcctcgtcgtaaccgtaagtcccctgcattgagagcatcattccaggaaacaagtatatctcctgcaaattttgtatatcctctttttattcatgaaggtcaggaggacacacccattggagctatgccaggatgttataggcttggatggagacatggacttgttgaagaggtggcaaaggcctgggatgttggagttaatagtattgtgctcttccccaaagttccagatgctctgaagtcttccacaggagatgaagcctacaatgacaatggtttaatgcctcgaacaattcgtctgcttaaggacaagtccctgaccctgttatctataccgatgttgctttagatccatactcctcaaaatgg

SEQ ID NO: 207033 - DNA, 358 bp, Gossypium hirsutum
cccgaaatgattggaagcattatcggtgtgtacaatggcaaggcattcaaccaggttgaaatcaagcctgaaatgatcagccattaccttggcgagttctccatttcgtacaagccagttaagcatggtagacctggtattggtgctacccattcttctagggtcattgctctgaaatgaagtccacttctgcatctttacctggaagagacattttgggtgctgcacctataggattttgatttaatgacagacttatatgctttaagttatattcgatactgatacttacgcttgctcatttattattaaggttggtaaggatgacgacttcgcggatttgatatatcttgtgttg

SEQ ID NO: 207034 - DNA, 422 bp, Gossypium hirsutum
cccacgcgttcgggcaccttgtaattgacttgaaccaattctgattctctcttgcatactatcaaatggcagctactgcagcaatcaccactctcccccagttcagtgggttaagacccaaagtttctactgctccagttaggagcctggcagcagttcaaccaatgaaggcgcaaggggaagggtgctctcggtgctcgatgtgatttcatcggatcccccacaaatttgataatggtgactacaacaaccctgatgctgtttgctgggaggtttgggttggctccatcagcaaacagaaaggccaccgctggattgaagcttgaagtaagggactcatgcttgcagactggtgaccctgctgtttttacactagctgacactttggcttgtgggggttgtggccatatttttgggggtgg

SEQ ID NO: 207035 - DNA, 377 bp, Gossypium hirsutum
  unsure (1)..(377): unsure at all n locations
tcgtccacgcgttcgtccacgcgttcgaagagacaccatctacgatgtctcaggggggcggcgctggtgccgcantatgaggcatggagtttgatctgtcggaagagattctggcggtgataccgacggatccttacgagcaattggatctggcacgtaagataacgtcgatggctatcgcctcgagagtatcgaagatggaaacggagattgggaggatgagagcaaagattttcgaaaaggatcgtatgatttacgaattggaagagaaagtatcaagattgcagcaagcgaatcatgaggccgaatctcgattaaagcttgtttttgacgaaaatatgaagcttgcaaaggagcgtgattcattggcaatgacc

SEQ ID NO: 207036 - DNA, 342 bp, Gossypium hirsutum
tccacgcgttcgtccacgcgttcgtccacgcgttcgtccacgcgtccgtgagactcttttgtatacctgtagcatatagtaataggaagcagtaatagcaatggcctcctccatgatctcatcggcaaccattgccaccgtgaaccgctccttcccggcacaggccaacatggtggcccccttcaccggcctcaaatctgcctctgctttcccagtcaccaggaaggccaacaacgacatcacttctcttgcaagcaacggtgggagagtgcaatgcatgcaggtgtggccgcctcttgggaagaagaagttcgagactctctcattcctgcccgatcttac

SEQ ID NO: 207037 - DNA, 307 bp, Gossypium hirsutum
cccacgcgtccgcccacgcgtccgcattggcttcctcaatgatctcatcggctaccggtgccactgcctctccggcacaggctaacatggtcacccctttcaccggcctcaagtctgcctctgctttcccagtcaccaggaaggccaacaacgacattacttttctcgcaagcaatggcggcagagtgcaatgcatgcacgtgtggccttctactggaaagaagaagttcgagactctctcatacctcccccatcttacacccgtgcacttggctaaagaagtagatttaccttcttcgctcaaaat

SEQ ID NO: 207038 - DNA, 370 bp, Gossypium hirsutum
cccacgcgttcgaacagaccagcaatggaagttcgtctcgtgcaggtccaatctgcatctgatggagctgattccactctttcaaacccgctgtgcgaggagtctcctcaaaattctccaaaatactctaacagacagagcatacattcaccacctgcctttggctcatcgcctaatcttgaagcccttgcacttgaagcaaataagtctaaggatcaagatggagatagttctttacttgacagttcacatctttcccgacccatgcatgaagttacattttcaacagaagacaaaccaaaacttcttagtcagttgaccgcattgcttgctgaggttgggctgaacatccaggaagcacatgtggttt

SEQ ID NO: 207039 - DNA, 363 bp, Gossypium hirsutum
gggggaaagaggagccaagcccttttgggtgcttgcattggggccaaaggctcgccctcccctgctgctggaactagaaagttgatcgttgtggcagccgccgcacctaaaaagtcttggatccctgctgttaaaggtggtggcaacttcattgacccagagtggctcgatggatcgctccctggagactacggatttgacccactaggtcttggaaaagacccagcattcctcaaatggtaccgagaagctgagctgatccatggacgttgggccatggctgctgtcgtcggcatcttcgtcggccaagcttggagtggcattccatggttcgaggcaagagctgacccaagtgccatagct

SEQ ID NO: 207040 - DNA, 435 bp, Gossypium hirsutum
tcgcccacgcgtccgagaaaaatggcttctgctttttctactctcctcaagtcttcacctattatcgacaagtccgagtggattaagggccaaaacctccgccacccttcggtttgttttgtacggtcacaccctacattgggcgcctttaccgtccgtgctagttcatatgccgatgagctttaagaccgcgaaaactgttgcatctccaggtcgtggtattttggccatggatgaatcaaatgctacatgtgggaagcggcttgcctcgattggtctcgagaataccgaggcaaaccggctagcttaccgtacccttctcgtgtttgcccctggcctcggtaactacatctcgggagctatccttttcgaggagactctctaccaatctaccatcgatgggaaaaagatggtcgatgttcttgttgaacaaaa

SEQ ID NO: 207041 - DNA, 365 bp, Gossypium hirsutum
gaagatattaccccaaaaagagttattgagatagttgagatgctaagaaggggagagaagctgcgacctggcactcaaaatccaaaacgaatcaagagtggaccagaaggtggaaataccactttgctaaccgatccgaaacctcctccatgccgtgatcttgatgcctgctaatgttaacatgccaccgcagtctcaaataatgtgaagcttggattttgccaaggcttttttggatgtatgttcttgttgaatttgtgaagctcaaccaatattttgaattttccatgcaatttaaacttggtacaagttatgagatgactaaatttgcattgtaccaaataattgatgttaatgcttttgcc

SEQ ID NO: 207042 - DNA, 403 bp, Gossypium hirsutum
atttagctatagcatacactactagtacccactactagcaatggcttcctcaatgatctcatgggctaccattgccactgcctctgcggcacaggctaacatggtcgctcctttcaccggcctcaagtctgcctctgctttcccagtcaccaggaaggccaacaacgacattacttctctcgcaagcaatggcggcagagtgcaatgcatgcaggtgtggcctcctactggaaagaagaagttcgagactctctcatacctccccgatcttacacccgtgcagttggctaaggaagtggattaccttcttcgctcaaaatgggttccttgcttggaattcgaattagaggagggattcgtgcaccgtaaatactcgagcctacccacgtactacgatggacgc

SEQ ID NO: 207043 - DNA, 401 bp, Gossypium hirsutum
atttagctatagcatacactactagtacccactactagcaatggcttcctcaatgatctcatcggctaccattgccactgcctctccggcacaggctaacatggtcgctcctttcaccggtctcaagtctgcctctgctttcccagtcaccaggaaggccaacaacgacattacttctctcgcaagcaatggcggtagagtgcaatgcatgcaggtgtggcctcctactgggaagaagaagtttgagactctctcatacctccccgatcttacacccgtgcagttggctaaagaagtagattaccttcttcgctcaaaatgggttccttgcttggaattcgaattggagggtgtttcgagctctacattattccattcctccactctttagtggggatatt

SEQ ID NO: 207044 - DNA, 411 bp, Gossypium hirsutum
  unsure (1)..(411): unsure at all n locations
gggcaaatgagccccatgcatacttgagtggagagtgcattgaatgcatggcaacgtgagacagtgttgtccgggcgggtcttactcccaagcaccgtgatatcataactctttgctccatgctaacatataagcagggctatcccgacatcctgaaaggatttccattgagtccatacatcacaaggtatctcccacctttcgaggagtttgaggttgattcgtgcattcttacaaaaggggcatcaacggtctttccagccattccaggcccttctattttccttgtatttatcgggaagggcacatttcgcattggatcacgggaggacatantgactgaaggagatgtgctctttgcaccattcaacacggagattaccattactacatcgtctgaactgcagctat

SEQ ID NO: 207045 - DNA, 404 bp, Gossypium hirsutum
tcgcgctcaccaccgaggtactactcgctgtcaatggggttcgcaaaactgagctgaagcctgttggtaccgagttagaaccagaggcgctttccacccctgttattttcggtacgagccaagggagtggggagtattttacccgggtcggagtcggtaacccggctaaacaattctacatggttcttgataccgggagtgatgttaattggatccaatgtgaaccatgtacggattgttaccaacaatccgacccgatttttgacccgtcggcgtcgtcgacttacagtccggttacttgcgagtcaaggcaatgttctcttctacgacaatcggcttgtcgtggcgggaaatgtctttaccaggtgtcctacggtgatggatcttacacagtaggggatttc

SEQ ID NO: 207046 - DNA, 299 bp, Gossypium hirsutum
tcgtccacgcgttcgtccacgcgttcgtccacgcgttcgcaaataccatggtctaataaggaaccggtcggattcgttgataattttttgaaagatttcttcgaaaaggtttcattaactcctcatttatatcgagtagaccttgttgttgcgagaattcttaattcatgagttgtagggagggacttatgtcaccacaaacagagactaaagcaagtgttggattcaaagctggtgttaaagagtataaattgacttattatactcctgaatatgaagtcaaagatactgatatcttg

SEQ ID NO: 207047 - DNA, 361 bp, Gossypium hirsutum
gttgcacttgagggaaagaaaaaaatagaagatgaagcttgaatctatttttttgaagatggagggtaaagaagaagatggtaagctaggatcaaacaagttctcagagagacaacctattgggacatcagcccagacagacaaggactacaaggagccaccagcagcacccttctttgagcctggtgaactcaaatcatggtctttttacagagctggtattgccgagtttgtagccaccttcttgttcctttacatcaccgtcttgactgtcatgggtgtgtctcagtctaaaaccaaatgtgcaaccgttggtattcaaggcattgctttggcttttgggtggcatgatcctttgccc

SEQ ID NO: 207048 - DNA, 311 bp, Gossypium hirsutum
gttttctgctctgtttttcagtgacaagtttcaatggcaaaaccagcttccattgaagtgtggaacccaaatgggaaatacagagttattagcaccaaacctatgcctggaactcgatggatcaacctcttaatcgagcaagattgccgtgtcgaaatatgtactgagaagaaaacgattttgtccgttgaggatatcatttctttgattggcaataagtgcgatggggtgattggacagttgactgaagactggggggagactttatttgcagctctaagcagagcaggaggcaaagcatttagttacat

SEQ ID NO: 207049 - DNA, 394 bp, Gossypium hirsutum
caagaaattgcgaagcaaaaggtgtcaaagattgtgtatgactactacgcatctggtgctgaggaccaatggacattgcatgagaatagatttcctttcaccatgatactgtttcgtcctcgcattctcattgatgtaaacaagatagacatgaccacaactgtgttgggtttcaagatatcaatgcctatcatgattggcccaactgccatgcataaaatggctcatcctgaaggggagtatgcaacaactatggctgcatctgctgctggaactatcatgacattatcctcatgggcaacttctagtgttgaggaagttgcttagacaggaccctgcattcggcttgtccaactctatgtatacaaggacaggaatgtacttgcacagctcg

SEQ ID NO: 207050 - DNA, 357 bp, Gossypium hirsutum
caattgctctcaaatatctcatacattgaattaaattgaattaatggctcaaaccatgttgctgatgtctagccatgcagtgagcttgaaaagagatcaccctttactccatttccaagctcaaggactcaagcctaaacctgcctctcatctcttcttcaatccattggctaatggtgtccatacttcacccaaagctttcaccactttagctgtctttaaatcaaagaccaaagcagctcccaagagggttgagccaaagccaaaggctgaagatgggatctttggcacctctggagggattggctttaccaagcaaaatgagctctttgtgggacgcgttgccatgcttgggtt

SEQ ID NO: 207051 - DNA, 299 bp, Gossypium hirsutum
caaagataaacataaccaaaaagaaaaatggcttctgcttccgctactctcctcaaggcttcacctattatcgacaagtccgagtggattaagggccaaaacctccgccacccttcggtttgttttgtacggtcacaccctacatcggccgcctttaccgtccgtgctagttcatatgccgatgagcttgttaagaccgcgaaaactgttgcatctccaggtcgtggtattttggccatggatgaatcaaatgctacatgtgggaagcggcttgcctcgattggtctcgagaataccga

SEQ ID NO: 207052 - DNA, 322 bp, Gossypium hirsutum
gagaggtggcagcagctcatgtgtgataacctgctcagctggtgattcacaaacagttgtgattggtttagctgctgactcaggatgtgggaagagtacctttatgaggaggctaacaagtgtgttcggtggtgcagctgagccaccaaatggaggcaaccctgattccaacacactgatcagcgacatgaccactgcgatatgttcagatgattatcattcacttgacagaactggaaggaaagagaagggagtgacagcacttgacccaagagccaatgactttgacctcatgtatgaacaagttaaggctctcaagagt

SEQ ID NO: 207053 - DNA, 354 bp, Gossypium hirsutum
atccctctctctctctacctcgtccgtacgggatctctagggtttcaaccttcgacttcgattgaatcgctagggttttgattatatcctctctcctttgatcgtacattaaattgaatcaagaaattcggaaaaaaatatggtactttctcagaggattcatgaggcattcaaaggaactgtggaaagaataacagggcctcgaacagtctctgcttttaaagagaaaggagttttaagcgtctccgagttcatcctggctggtgataatcttgtatccaaatgccctacctggtcttgggaatctggagagccaagcaagaggaagtcctatttacccgcccgaaaagcaat

SEQ ID NO: 207054 - DNA, 313 bp, Gossypium hirsutum
ccggccggaattccgggtcgggcacgcgtgcgctcagttctccctcactttcaaaccctcaccgtcaccgctcttttccaacttccctcgaacccggttcgggcctttcacaaccgcgggggcaatcgcttcccgtttcaaagtcctggctagtcagaccgggttcttcactcggctcggccggttgatcaaggaaaaggccaagagtgacgtctaaaagatcttctcaggtttctccaaaaccagagacaacctcgccgtcatcgacgaactcttattatactggaacctcgccgacaccgatcgcgtcctc

SEQ ID NO: 207055 - DNA, 241 bp, Gossypium hirsutum
tcgcccacgcgttcgcgagtggagactttgagacaacatcttttaggtcccccctaaaaaagggtttgtaagagaaatggctactttggcagtgatcaacttatagaagcttaatggtgatgagagatcaagaatcatggagcaaatcaaggatgcctgtgaaaactggggattttttgaggtgatgaaccatgggattccacatgattttatggacactgttgagagattaacgaaagaa

SEQ ID NO: 207056 - DNA, 299 bp, Gossypium hirsutum
cccacgcgtccgtccacgcgttcgaaagcttttactataccttttgcttataagctgaaccaagtcgtcttcttcgtcttattattattatcttgcttcactgcttccaccattcccctatagcttctctaatctaatggaaaccaaaggttatacccaagatggcactgttgatcttcgtggtcgtcccgtgcttgcctctaaaactggaaaatggaaagcctgtgctttccttgttggatatgaagcatttgaaaggatggctttctatggaatagcttcaaacttagtgaactact

SEQ ID NO: 207057 - DNA, 230 bp, Gossypium hirsutum
gccacgcgtccgggcactcaatgtgaccgtcgaggaagtcagtgaagcccttttacaaggtaatgctggtgcactcggcactgaacttctgtgaaagtttattgaaaatggctccgaccaaggaagaagaacgcaggttgaaggactccaaaatgattcaccagtcaagcttgggccagctgagaagtttttaaaaaccattctttatataccctttgcgttcaaaaagg

SEQ ID NO: 207058 - DNA, 403 bp, Gossypium hirsutum
  unsure (1)..(403): unsure at all n locations
attgctttaccggttagacttgtaagagttttcgatagatccgtcgaaaattaagaaaaaatgggaggagcagaacatggagggcatggagcagaggatttcaggacgaaggtgtggagcatgtctggtggcccatattgccggcccaagcactggcgtcgcaatactgcgattgctatgttcggcgttttcctcatttgtatcccgatcgccatgaaatccgccgagctcgagcaaaggcctcatcagcccgttcgtccaattccttcacagctgtggtgcaagaactttggaaacaaagattatagatgaagcagcaatgatagttcagacaaacctacgggtgggcagntcagttgtgtatttgcaagtggatttggtaacatgccctatgatttgaatt

SEQ ID NO: 207059 - DNA, 180 bp, Gossypium hirsutum
aaaaaagtgagcaaaaatgcttattgagagttttaaggtagagagccccaatgtgaaatacacggagaacgaaatacactctgcttacaactatgaaactacagatctcgttcatgagaacaaaaatgggacctatcaatgggttgtttaacccaaaactgtcaaatatgaattcaagac

SEQ ID NO: 207060 - DNA, 416 bp, Gossypium hirsutum
cccacgcgtccgttctgatttccttgttcttttttacattcagcgaaggggtgctctgagatcacataccaaaatggtgaaggccgttgccgtccttggcagcaatgaaggtgttagcggaactgctttcttctcccaagaaggagatggtccaactaccgtgactgggaacctttctggtcttaagccgggactccatggcttccatgttcatgcccttggggacacaactaacgggtgcatgtcaactgtaccccattttaatcctgctggcaaagagcatggtgctccagaagatgagaaccgccatgctggtgatctatggaatgtcactgttggtgatgatggctgtgcaagcttgtccatcaccgacaaacagattcctgtcaaggcccaaactccattatcggaagagc

SEQ ID NO: 207061 - DNA, 299 bp, Gossypium hirsutum
ctacttcttatcaacgcagaatatcttattttagatcgggatggctagtaattgctaatatgttgaagaacattgagcctctcgacaattccgttgtttccaagggggtttctgattccgccaaggaatccatgaagcggactatctccactatgctagggattcttccatctgatcacttctccgtttcggtttccgtctccacccctcctcttcatcgccttctattctcttctatcatcactgggtatacgttgtggaacgcggagtatagggtttcactgatgaggaatctggaa

SEQ ID NO: 207062 - DNA, 327 bp, Gossypium hirsutum
cagtgaagttctccccttccacccctgtaatccagggaactggccgtgtgtccatgaggaaaaccaccaagcctgttccttctggtagcccatggtacggtcctgaccgagttttgtacttgggtccactttccggtgagccaccatcttacttgaccggtgagttccctggtgactattgttgggacactgcttgactcttaactgatcccgaaacctttgctaggaaccgtgagctcgaagtcattcactgcagatgggccatgttgggagctcttgggtgtgtttttcctgagcttgtggctaggaacggtgtcaagttcggtg

SEQ ID NO: 207063 - DNA, 331 bp, Gossypium hirsutum
cccacgcgtccgcccacgcgtaggctcgggtctagaatttttttataaccaaaggcacaacggctactacgtatgcatatactggtgaccaacgatcactcgatgctagccaccgcgacctcatgcgtgctagagctgcacctctaaacattgttacgacttcaactggtgcagctaacgctgtggcccttgtactccctactctcaaaggcaaactaaatggcattgccttgcgcagaccaacaccaaatgtttcggtcgttgacttaattgaccaggtcacaaagaagaccttcgctgaagacgcgaatgctgcctacagagaaagtgc

SEQ ID NO: 207064 - DNA, 335 bp, Gossypium hirsutum
gaacgggcggtgctttacctctctttcttcctccaccaccacctggtctttttccgctcgtcgacgacctacattgcggccttcggtcgtcgctagccttaactcttctccttctcctccgactcttatccaagaccgtccggttttcgctgcccctgttcctttgctcaccccgagagaagagatgggaaacaagtcctacgacgaagccattgaagctctcaagaaacttctcagtgagaaaggagaacttgaagctgaagcagcgtgcagggttgatcaaataacagcagagtttaacacaacatcagctgacggcaaaccatctgactctt

SEQ ID NO: 207065 - DNA, 299 bp, Gossypium hirsutum
gacccacgcgtcgcggatatagatatagcatacactactctgtcctatctttagcaatggcttcctcaatggtctcaggggctaccattggcactgcctttccagcacaggctaacatggtacctcctttgaccggactaaagtatgcctctgctttgccagtcaccaggaaggacaacaacgacattacttctctcgcaagcaaaggcggttgagtgcaatgcatgcaggtgtggcctcctactgggaagaagaagattgagactctatcataccatcccgatcttacacacgtgcag

SEQ ID NO: 207066 - DNA, 262 bp, Gossypium hirsutum
tctagaatgaccctggcttttcacaccaacaaaaagattatcgaagaagtagctataatcccatccaagaggctccgtaacaagattgccggtttctcgacccatcttatgaaacgtatccataaaggaccagttcgcgggatttctcttaagctctaaaaacaaaagcgcgcgcgtcgcatggattttgtccccgatgaatcggccatcaaggtcgaccaaatcgaagttgataaggaaacactagatatgctttcggtta

SEQ ID NO: 207067 - DNA, 323 bp, Gossypium hirsutum
ggccaaccccatttccttggccaaaacagaaatgctaaccctctcagagatgtctccgtgggcactgccaaatacacaatgggaaatgaactgtggtatggaccagacagagtgaagtacttgggacccttttcagctcagattccatcctacttgaacggcgagttccctggtgactacggatgggacactgccggtttgtcagctgaccctgaggcctttgctaggaacagggctcttgaggtaatccatggaagatgggcaatgctgggagcactaggctgcatcaccccagaagtccttgagaaatggcttagagttga

SEQ ID NO: 207068 - DNA, 437 bp, Gossypium hirsutum
cccactcgtccgcgaacatcatcgtttctaattgttagacggcatcgacatggatgttccaagctaccttgaagcccgtgtcgtgaccaatgctttctcaaaatccatatgggttatcttccaactcttcttctatgcgctccgacctttgtttctcaaaccgaaaccccctggttgttgggagttcataaacttattcgttcagctcgccctcgatgcaaccatggtttactttcacgggtggaaatctttcgcttatttgatcctttcgacattcgttggtggtggaatgcacccgatggcacgccattttatctacgaacattatatgtttaaacccgaacaagagacttattcttattatggtcctcttaatcttttgacattgagtgttggctatcacaatgaacatcatgatttccctatgatccctgggt

SEQ ID NO: 207069 - DNA, 302 bp, Gossypium hirsutum
aaaaaacactctggcgcagcagctttttctgtctatagcatcaatggccgcattacgtggctggtcacaggctgagctggacgggacctttcaactcagcggccaaacacgcttcaacattcctagcaacaacagagtgcctgtgcgtaggtctagtatcactgtcacagctcatcagacaccgtccgtgcctgaaactgcacgcatagccctgtaggctcccgttgctgatgtgatggccaatgactcctttgatcatgctgtgcttgccaatgccagacgcattaaagttgtcccaccta

SEQ ID NO: 207070 - DNA, 353 bp, Gossypium hirsutum
  unsure (1)..(353): unsure at all n locations
cttttgttctcttgtgacactgctaatattttttttattgtcgactccggcgttcgaagatcataaaaaaccggagtcgtttgagatggctacaagaacggatctagatgggaggccaataaagccgatgactatatgcatgatcggtgccggaggcttcatcggctcccacctttgcagagaaattgatgtctgagacgccgcacaaggtgctcgccttggacgtttacaatgacaagatcaagcacctactngagcctgactctctcgcttgggctggccgtattcaggttcaccgacttaacatcaaacacgattctaggctcgaaagcctcatcaagatggcagatctc

SEQ ID NO: 207071 - DNA, 326 bp, Gossypium hirsutum
  unsure (1)..(326): unsure at all n locations
gatatgggaagggcacgagcgtcagaatgtcatctacttcccaatcaacagcaaaggccgccgcgaagggtggcaagaaagctgccaaaaccgccatcaaagagaccctctttgacaccaaggttttacaccaccgactttgatgaaatggaggcgcttttcaacactgagattaacaagaaccttaaccagtcctagtttgaggcactgctgcaagagttcaagactgattacaatcagactcactttgtaaggaacaaggagtttaaagaagctgctgataagatngatggtcccttgagacaaatcttcgttgagttcttgga

SEQ ID NO: 207072 - DNA, 440 bp, Gossypium hirsutum
cgtcttgagatcatgacaattcctgtttaaccaatgagtgattctttacgggatgtggaagacatatctcttagattctccatagagggagatatcaaactcaatggagagatcgatgcatcagctagacagaagaaaattgttgaagcctttactcgaatggcttctttaaacagcaacaccggcattgtttacagtcctggtagaagacagatgctattcgtaatagcagctgattgctatgatagtaatggagaaactagagacctttcaagcaatgatcatgaatgtgatgaaagatgcaggcttatgtttcggcttacgaaagataggctttgtattgctaaccgggtcaagtttcatagagaccatgcaagcattaagttgttgtccggttaacattgaagattttgatgcactggtctgtaatagtggaagtg

SEQ ID NO: 207073 - DNA, 430 bp, Gossypium hirsutum
aagtagcttactactgcattatttttctcattctgcttttgctagctagctagcctgcttccatggcaccctcaattgttcttgtttcatggatggttttaggccttgtaatggcaacttcaactattcaagttgaagctgccagggcattttttgtattcggtgattccctggttgacaatggcaacaacaacttcctagcaaccactgctcgagctgattcccctccttacggcatcgatactcccagtcgtcgtgccagcggtcgcttctcaaatggcaaaaacattcctgattttatcagtgatgcacttggttcatagccaacattgccctacttgagtccagaactcaagggagataggctacttgttggggccaactttgcgtcagctggcattggaatactcaatgacaccggagtccaatt

SEQ ID NO: 207074 - DNA, 230 bp, Gossypium hirsutum
ttgcttggcttccttttcagctgtgtcggcatttgcacatgatgaggaagaccaaggtcttgttatgaacttctacaaagattcttgtcctcatgctgaagacattatcaaggagcaagttaagctactgtacaagcgacacaaaaacactgctttttcttggctgagaaacattttccatgactgtgctgtccagttatgtgatgcttcactgctgctggactccacaa

SEQ ID NO: 207075 - DNA, 233 bp, Gossypium hirsutum
cccacgcgtccgcccacgcgtccgtttttacacatttattctaaggcctgatgcctgttatagcgtcttaattgataacagagagagagaaacaggcagcatgtatactgattgggatatccttcctccacgaaaaataaaggatgttaaagccaaaaagcctgcagattgggatgatagagaatacattgaggatcctaatgatgtcaaaccggagggatatgataaaattc

SEQ ID NO: 207076 - DNA, 213 bp, Gossypium hirsutum
cattgtgggaaagatcaacatcggaatcaatggatttggaaggatcgggcgtttggttgcaagagttgctctccaaagcgatgatattgagctcgttgctgttaacgatcctttcatcaccactgtattcatgacgtacatgtttaagtacgacagtgttcacgggcaatggaagcatcattagctttacggggaggactcaaagaccccttc

SEQ ID NO: 207077 - DNA, 424 bp, Gossypium hirsutum
ctggagccggtcgtatgggaggaactacacttttcacagtgaacaaccaaatggggaacgccacactcatgaacatcgctgataaccccaccaacgttcagctccccggtatgtacaacaaggaagagaaccctcgtgttccgatcattgtcaccggtaacgatttctcgacgctgtacgcgccgctcatccgtgacggtcgtatggagaagttttactgggcacccaccagggaagataggatcggttttgcacaggtattttcaagaccgacaatgttcccgatgatgacattgataagcttgttgacaccttcccgggccaatacattgactttttctgtgctctgagggccagagtttacgatgacgaagtgaggaaatggatcggagaggtaggaatcaataatgtcgggaaaaagctc

SEQ ID NO: 207078 - DNA, 254 bp, Gossypium hirsutum
atcaatctcaccaagaagatattttcgttaacatatgatattacatcaagagcagcattcggtaacacatgcaaggaccgagactctttcataatagttatagatgaaataataaagttgtcttctggattcggtctagcagatctgtacccttcttttggattgcttgagctaattagtggagtgagacaaaaagctgaggctctccgtgagaagagtgatgagatacttcaagggcatcgttaatgaaacac

SEQ ID NO: 207079 - DNA, 441 bp, Gossypium hirsutum
  unsure (1)..(441): unsure at all n locations
cccaagtttgatttaagttattgaggtcctttttttcctcataagngaagcanggcccaaaggaagaggatggagtgccaactcgagatcaagtcctcagctgataagttctttgatgcctacaagaccaaagcccagcttatgccaaaaatggccaatcaagtcgttagagatgtaaaacttgttgagggtagtggttgggattccgagggttcggttagacaatggtattttgttgccggaggtaagcttgagacttgtaaggaaatgatggaaaaggtgaatgataaagacaggactattgtttacaaattggtggaaggtgaaatcatgaaagctttcaaaagctggaactccatcctcaacgtgatgccgataggggagggaaggttggtgaaatggactatggaatttgaaaagcaaaatgatgatgtccctgat

SEQ ID NO: 207080 - DNA, 326 bp, Gossypium hirsutum
  unsure (1)..(326): unsure at all n locations
ctctgtctaacatagaaaagaaaatgacaatttctgcttcttttttgcaagcnncnaccatgctgctcaccggctgtgttttgggtcctatatctcttgtttcagctaaacatggtgttccatcttatgctcataagaaaatcgcttctaaaccttttgaagggtatcttgaaaatggcaactttgaagaacagcccatcccgactgccttaaagaaaacagtactcaaaggagcacacgcacttcccaaatggactatcacagggctagtcgagtacatctcgggtgggcctcaacctggtgggatgttttaccccgtcgctcat

SEQ ID NO: 207081 - DNA, 444 bp, Gossypium hirsutum
cccctttcctcccatattcctcttttttcaattccttttcacccttgctaataaaaccaccttattaacatacctaaccatgtcgtggcaaacctacgttgatgagcacttgatgtgtgacatcgatggcactggtcatcacctttctgccgctgctatcgttggtcatgatggcagtatctgggctcagagctctaactttcccaagtgtcagcccaaggagatcactgacatcatgaaagatttcgacgaaccaggtcaccttgcccctacaggcttgcaccttggtggcgcaaagtttatggtcattcagggtgagcctggtgctgtcattcgtggaaaaaagggatctggacgggtgactattaagaaaacagcacaagcacttgtgtttgggatatatgaagaatcagtgactccggggcaatgcaacatggttgtgga

SEQ ID NO: 207082 - DNA, 438 bp, Gossypium hirsutum
  unsure (1)..(438): unsure at all n locations
ataaaagttactacagaccacggttttgagttgatagcagatgttgtactctttgccacaggcaggttaccaaactcgaagaggttgaatctggaagctgtaggtgtggaacttgataacacaggagctgtgaaggtggatgagtactcacgtactagcattcctagtatatgggctgttggtgacgttacaaatcggatgaacctaactcctgtagccttaatggaaggaacctgctttgcgaaaactgtttttggtaatgaacctatcaaaccagactacagccatgtaccttgtgctgtttttagcatccctccactttctgttgttggtctcagtgaagagcangcaattgagcaagcaaatggtgatgttctggttttcacatcaaccttcaatccgatgaagaacactgtatctggacggcaagaaaagact

SEQ ID NO: 207083 - DNA, 353 bp, Gossypium hirsutum
  unsure (1)..(353): unsure at all n locations
cccacgcggtccgtccacccgnccgctcagctctcatagttttcnnccccnnaggncagnggagggcaggagcttctctctggatcacaatgactatcctcattgatcaacccgagcttggtgttgaagcatgngttaacaagctcgataatgcagacaatgaactggtgttggatgggggatttgtggtgccacagacaatactctttggccaaacctttagagattatcatgttgaaagtgagaggcaacagggtgtggagaacttctaccggaccaatcatattaattcagacttctgactttgtcaagagaatgagaacagagtatggtaaaactgaacaaagatggag

SEQ ID NO: 207084 - DNA, 413 bp, Gossypium hirsutum
  unsure (1)..(413): unsure at all n locations
gcggttattaaaacgtgggattcatcccattctaatntgtataggggaatgaaatggcttcaagaatcgccgttgagcatttggagcacatatctcagaagtttgattttggagcatcaaatatagagcctttggttcaaacatgcatgaccactttgtcctcaaaaattgtgaaccgatgcaagcgccatttggctgagatttctgttaaagcagttctttctgttgctgatctagagaggaaagatgtcaatttagatatgattaaggttgagggggaaagttgggggaaaattggaggatactgagctaatatatggaatcaactgtgataaggacatgagtcatccacagatgccaaaacaaattgaagattgctaaattgccatattaacttgcccatttgagccccc

SEQ ID NO: 207085 - DNA, 302 bp, Gossypium hirsutum
  unsure (1)..(302): unsure at all n locations
gacccacgcgnccgctaattgtaccctatactatcaaaggccactttatatgttttcatcggcaaccanagccaccggcgctccggcgcaggctaacatggacgctcctttcacctgcctcaattctgcctctgctttcccagtcaccatgaaggccaacaacgacatttcttctctcgcatgctatgactgcagagtgcaatgcacgcatgtgtggcctcctactgtaaagaagaagttcgagactctgtcatacctccccgatattacaccagtgcagttggcttaagaagaagattacc

SEQ ID NO: 207086 - DNA, 299 bp, Gossypium hirsutum
ctaaggcctgcccatctaatgtgcttttcattttttctgatgaagcggaactggaccgtaatgtggctaacatggtgccaccatatgaccacattaaatatgccggcattggatctgctattgaatatgcagttttgcatctcaaggcacaagaaattgtggtgattgtacacagggccatgggtggaaacaaggggcttatgtctttgccatttgatggaaacaactcaactgatttcatacaggattgggttaagattggaatcccagctaagaccaaagtgctagctgaacatggt

SEQ ID NO: 207087 - DNA, 380 bp, Gossypium hirsutum
acgatactcaacggtgttttgtgatttaaatttcttccaagattgtggcaaaacaagatggcttccctgcatgaaccatggctagtggacaacgggttgaaggggtctagcaaggagattcgccatggcaggactgcacacaacatgtcgtcttcgtcgttgcggaaaaaatcggacctgacgcttgtttccaaggttcggtatgcaatgcttaggcagttactcgccaatcttcaagaggtcatattagggaccaagctctccgttctcttcccagctattccattggccattgttgctgagtgttatggatttggaagaccctgggtgtttgcattaagtttacttggacttacaccattggctgaacgagtcagctt

SEQ ID NO: 207088 - DNA, 316 bp, Gossypium hirsutum
accacgcgtccgttaagagttcaattttgatataataaaaacaaacagaaaataactcttctgcggatgggaaagccaggattgttggatcttgagaaccattttgcgttttatggggcatatcacagtaacccaattaacatcttgatacatactatatttgtgtggccgatatctttcacatctcttatactcttctactttacccccagctttctatgatctttctcaatctgggattttcccttctggaattaatcatgcgtacgttctcaattattgatctgctttctctatttcctaggcttgtttatgt

SEQ ID NO: 207089 - DNA, 267 bp, Gossypium hirsutum
ttcctcagctttgttcacccctatcttctccaccgtccaaaagaagaatggcattgttaccccctccagcatctcattccacggccttagacccctaagcaagggcaaatcttcatccaacgccatctccttctcaagaaactcaacttgctagtgccaggcttgcaatcaaaacagagctgagcgcccaagttgtgataagcgtcagcactgctctctcccttttcttgggtagatttgtgttcttcaacttccaaagagagaacg

SEQ ID NO: 207090 - DNA, 398 bp, Gossypium hirsutum
  unsure (1)..(398): unsure at all n locations
nccacgcgtccgtccacgcgtagcgccacgcgtttctgatttcttgtgtgacagttctccttttgactgggttccttgcaacaattctcatgcgggtcttgaagaatgatttcattaagtacggtcaagatgaagaagcagctgatgatcaagaagagactggatggaagtatattcatggagaacgtattccgtttgccaaagtacaaatctctctttgctgctgctctcggatctggaacacagctgttcactttaacggtgctcattttttatgctgcaactgttggtgtcttttatgcatacaaccgaggagctctatttactcgcctggtggtaatatacgccctcacgtcagggattgcaggctacgtagcaacttctttctactgtcagct

SEQ ID NO: 207091 - DNA, 248 bp, Gossypium hirsutum
  unsure (1)..(248): unsure at all n locations
aagtggaaacgccggtttanatctcttgttgatcaggcaaaggtaccgtgaaggtgccgacataatcaaaaagggcaaaatgtgcgccctcttcattaacgatctcgatgctggtgccggtcgtatgggaggaaccacccaatacaccgtcaacaaccagatggttaatgctaccctcatgaacatcgccgataaccccaccaacgttcagctccccggtatgtacaacaaggaagagaacccccgtg

SEQ ID NO: 207092 - DNA, 312 bp, Gossypium hirsutum
cccgtccgcgcagatagaccaatgcttgttggcaactctttttttaatttgttcgagaacaggcttaaaaagtccagatgttgttacttcccaaaatcctctttaatggtgccagtcaaagtattcatcgaaagatcaatttcttttaaattcaacgctacaacgggttttggtatctcaccggacagattattcttgaagagataaacatgcgttagattcttcaaagaaaacagcctacttggaattggaccttccaagttgtttctagctaagtccatatgctgcagattggtaaggtcgctgaaagat

SEQ ID NO: 207093 - DNA, 413 bp, Gossypium hirsutum
cccacgcgtccgcgacggcttctattttcgggtgttgccttacctgctcttattacaccactaccaccttctatgtgtccgctcgtcgacaacctacattgcgggcttcagtcgggggtagcctaaactcttcttcttctcatccggctcttatccaaaaccgcccagtttttgctgcccctattccttagctcaccccgagagaagagatgggaaacaagtcctacgacgaagccattgaagctctcaagaaactttcaagcgagaaaggaaaactgaaagctgaagcagctgcaagggtagatcaaataacaacagagttaaacacaacatcagctgatggcaaaccatctgactcttctgttgagagactgaaagaaggctccgtctactttaagaaagaaaaatatgaa

SEQ ID NO: 207094 - DNA, 135 bp, Gossypium hirsutum
ccacccctcaaatccagggaactgaccgcgttttcataacgaaaaccaccaacccctgttcctacctgcaacacaaggtacggtcctgaccaaggtatgtacttcggtccacaccccgctgagacaccatcttac

SEQ ID NO: 207095 - DNA, 244 bp, Gossypium hirsutum
ggcacagaagctgactggcgctatttttgttttgattaaaactatgattgacccaagcttggtggctggttttactatcaggtatgggagttcagggtctaaattgattgatatgagggttaagaagcaattggaagagattgctgctcagcttgatttgggtgatattcaacttgctgtatgagttttgaattctttttttccctttgtgagaattgggtttgaaacatctctggttattatt

SEQ ID NO: 207096 - DNA, 444 bp, Gossypium hirsutum
aacggagtttcgtgattaaaaaaactaccattattgtggcaaaacaagatggcttccctgcatgaaccatggctagtggagaacgggttgaagggatctagcaaggagattcgccatggcaggactgcacacaacatgtcgtcttcgtcattgcggaaaaaatcggacctgacgctagtttccaaggttcggtatgcaatgcttaagcagttcctcgccaatcttcaagaggtcatattaaggaccaagctctccgttctcttccctgctattccattggccattgctgctgagtgttatagatctggaagaccctgcgcgtttgcattaagtttacttggacttacaccattggctgaacgagtcagccttctcaccgagcaaattgcttattacactggtccaacagtgggagggcctgtgcatgcaacatgcgggaatgca

SEQ ID NO: 207097 - DNA, 285 bp, Gossypium hirsutum
  unsure (1)..(285): unsure at all n locations
cccacgcgtccgaaaccaagtcaacctaaagttttatgttctatggcaaccacngcnanccaagaatctgctntcgttggccagaccgcttctaatcattccaatgagctcttacgcaaagtcggagctttcgatggtggtcgtgttaccatgcgcagaactgtgaaaagtgcccctaccagcatcttgtacggtcctgaccgtccaaagtacttgggtccattctcagaccaaatgccatcatacctgacatgtgaattccctggtgactatgggtgggacact

SEQ ID NO: 207098 - DNA, 365 bp, Gossypium hirsutum
atagttcgtaacaatggcggtcgcttttcatgtttcagctacccggatgcaaccaatgaaggttgctgcaccatgaaggaccaatgtgcctctcaggtcctgccagagcgtttgttaagccttcggtttggagcctgttggtgctaggcttacctgctctttgcaaactgacctgacggacttgtctctaaagtgtgttgatgctaccaagctcgcaggttgcactctcgctacatctggtcttgttgtctcgtgagcaagcgctgtacgagtgtcaaagcggcttacctacgctgaaatccaaagcaagacatacatggaagtcagaggaacaggtactgctaaccagtgcccaaccatagatg

SEQ ID NO: 207099 - DNA, 443 bp, Gossypium hirsutum
gttcgtcacaatggcggtctcactttttgtctttttctaccctgatgcaaccaatcaaggttgctgcaccatcaaggaccaatgtgccgctcacgtcctcccagagcgtttctaaggccttcggtttggagcctgttggtgctaggcttacctgctctttgcaaactgacctcaaggacttggctctgaagtgtgttgatgctaccaagctcgctggtttcgctcttgctacatctgctcttgttgtctcgggagcaagcgctgaaggagtttcaaagcggctaacctacgctgaaatccaaagcaagacatacatggaagtcaaaggaacaagaactgctaaccagtgcccaaccatcgatggtggtgtcaactcttttgccttcaagcctggcaaatactacgccaagaagttctgcttggagcccacttccttcactgtc

SEQ ID NO: 207100 - DNA, 122 bp, Gossypium hirsutum
gaaaaaaagaatggcagaggagcatagatgccaagcgccagaaggccatcgtctttgcgtcaataactgcggctttttcggaaattcggcgacgatgaacctttgctccaaatgttacagag

SEQ ID NO: 207101 - DNA, 210 bp, Gossypium hirsutum
gagacccacgattatatggcaaaactttattatgcaattatccggtttaataatatattgattgactttgacagagatatatggggatacatatctttaggatactttaagcagattaccaaggcaggtgagattggttcatcaacaatgctctataaaagtaaccctattgattttgaaaacagtgaatgtattcttgttaggctaatg

SEQ ID NO: 207102 - DNA, 262 bp, Gossypium hirsutum
cttctttgttttccaatagttcgtaacaatggcggtctcacttcaagctgcagctaccctgatgcaaccaatcaaggttgctgcaccatcaaggaccaatgtgccgctcatgtcctcccagagcgtttctaaggccttctgtttggagcctgttggtgctaggcttacctgctctttgcaaactgacctcaaggacttggctctgaagtgtgttgatgctaccaagctcgctggtttcgctcttgctacatatgctcttgtt

SEQ ID NO: 207103 - DNA, 362 bp, Gossypium hirsutum
gcgcgagtgggaatcagcaactcaaatacctgtatcctttggatattagtattaaagagaaaatagaggcaattgctaagtcatacggtgccagcggcgttgaatacaccgaacaggctgagaaacagatcgagatgtacaccaaacaagggttttcgggtctaccaatctgcatggcgaaaactcagtactcattttcacacaatgctgctgagaagggagcaccaagtggatttatcttaccgataaaggatgtgcgagccagcataggagccgggttcatttatcctttagtgggtacaatgagcacaatgccagggctaccaacaaggccatgcttttatgaaatcgatcttgacact

SEQ ID NO: 207104 - DNA, 292 bp, Gossypium hirsutum
gatcgagtggtaattagcaactcaaatccctgtgagctgtggatattagtcttaaagagaagacattggcagctgctaagtcatacggcgccagtggcattttctacaccttaccgggtgcgaaacagatcgagatgtacaccaaacactgtgttacggagctaccaatggggatggcgaaaacttattacttattttcacacaatgctgttgagaagggagcaccaagtggatttatgttaccgatcatggatgtgcgagccaacataggagccaggttcatttatgcttt

SEQ ID NO: 207105 - DNA, 156 bp, Gossypium hirsutum
tcgcccacgcgttcggcccgtccgacagcgcgtccagcgcgagcttcgaaagggaatcgggttaaaagttctgaaccgggacgcggcggctgactgcaactttagggagtccggagacgtctgctggggcctcgggaagagttatcttttttgttt

SEQ ID NO: 207106 - DNA, 171 bp, Gossypium hirsutum
gatggagccctgaatgtggatgtgaccgagttccagacaaacctggtcccttatcccaggatccattttatgctttcctcctatgctcctgttatttcagctgcaaaagcttaccatgagcaattatctgtggctgagatcaccaacactgcttttgaaccctcttccgtg

SEQ ID NO: 207107 - DNA, 134 bp, Gossypium hirsutum
ttttgcctgcagtatacaccaagattgggctgatcaatgctccccaatggtacgatgctgggagattctgatacttcgtatcctgctccaccctatttgtgatcgagtgcatattgttccactacgtggagatc

SEQ ID NO: 207108 - DNA, 390 bp, Gossypium hirsutum
ccgggcgaccacgcgtcgaaggtgctaacctcacgtttggccgataactcgcggccgatcgtacgcacaccattaaggcgttgggtgttgtttacaacgaaaccgctactggagttaccaacaacttggccacagtgagaaaactactatatcattacgggcacccagcactgcttttcgtcgatggagtttcctcgatttgtgctctcgatttccctatggatgaatggggagttgacgtatcattaactggcttgcaaaaggcgcttttctctttcaacctggaatcggtatttgtttgcgctagctcctaaagctcttgaggctaatcaaaactgctaatatttcttcgggtttttttactatttggtactaataacctttaatgtt

SEQ ID NO: 207109 - DNA, 357 bp, Gossypium hirsutum
  unsure (1)..(357): unsure at all n locations
gactggtnacgtggctcttcacaagctgtgttggaaggtggtcttcaactcagcggccaaacccggttgaactttgctagcaccaacagggtggctgtggctagacctggttttaccgttagagctcaacaggtccctgccgagcctgaaactggacgcatagctgtgctgagtcttgttgctgctggtttggctactggctcctttgttcaagctgtgcttgctgatgcacgaagcattaaggttggcccgtcttcaccaccctacggtggattgccccgaaactttgaatttctatgatccaatagacctttattctgtcgatcaaagattcgggttttccttctaccatttgac

SEQ ID NO: 207110 - DNA, 294 bp, Gossypium hirsutum
  unsure (1)..(294): unsure at all n locations
cccacgcgtncgcccacgcgttcgtccacgcgttcgatcaccaacaaaatcaactgcttcacagtggcctgtacaaccatggctctttctttcccatcattcgccggtaaggcagtgaagttctccccttccacccctgaaatccatggaactggccgtgtttccatgaggaaaaccaccaagcctgttccttctggtagcccatggtacggtcctgaccgagtttttgacttgggtccactttccggtgagccaccatcttacttgaccggtgagttcctctgttgacctatt

SEQ ID NO: 207111 - DNA, 393 bp, Gossypium hirsutum
  unsure (1)..(393): unsure at all n locations
nctgtctctaccactgaaaacaaagaaaaaatggcaacggagatggcccttgtgaagcctatctccaaattcagtacaagcagtccaatttttagcaactcccgatatgggaagttcaccaccgtcagaatgtcatctacttcccagtcaacaacaaaggccgccgcgaagggtggcaagaaagctgccaaaaccgccatcaaagagacccttttgacaccaaggttttacacaaccgactttgatgaaatggaggcgctttttaacactgagattaacaagaaccttaaccagtccgaatttgaggcactgctgcaagagttcaagactgattacaatcagactcactttgtaaggaacaagaattcaaagaagctgctgataagattgatg

SEQ ID NO: 207112 - DNA, 366 bp, Gossypium hirsutum
  unsure (1)..(366): unsure at all n locations
ccggngaccacgcgtccgattcctcgctctctcttttatcctcactttctcagccatcaaagacaccctttttttcttaaggtgaaaagatggcagatgggaggatattcagccacttgttgcgacaatggaactggaatggtgaaggccggattgccggtgacgatgctcgaagccgcgtccctacattgtggccggctcgtcacaccgggtgatggtggatggccaaaaagatgcatatgtggtgataggctaatctaaagaggatttgacattgaatacctatgagcacgattgtgaacaatggatgattggaaagattggcatatacatttacaacagcttctgttggcccgaagagcaccc

SEQ ID NO: 207113 - DNA, 343 bp, Gossypium hirsutum
gatatatttagctatagcatacactactagtacccactactagcaatggcttcctcaatgatctcatcggctaccattgccactgcctctccggcacaggctaacatggtcgctcctttcaccggtctcaagtctgcctctgctttcccagtcaccaggaaggccaacaacgacattacttctctcgcaagcaatggcggtagagtgcaatgcatgcaggtgtggcctcctactgtgaagaagaagtttgagactctctcatacctccccgatcttacacccgtgcagttggcttaagaagtagattaccttcttccgctcaaaaatgggttctctttgcctt

SEQ ID NO: 207114 - DNA, 265 bp, Gossypium hirsutum
  unsure (1)..(265): unsure at all n locations
gatacattcagcaagccttgcacaatggccaccatcacctctgccgctgtcgctatcccatctgtcaccggccttaaagccggtgcaaccgcagctaaagttagcgccacagcccaaggttgcaagcctctccagtcccaagggtcagcatcaaggcctccctcaaagacgtcggtgttgctgttgcggcaactgctgcaagcgcaatccttgccaacaatgccatggccattgaagtcttgctcggcagtgacgatggnggtct

SEQ ID NO: 207115 - DNA, 378 bp, Gossypium hirsutum
  unsure (1)..(378): unsure at all n locations
cccacgcgtncggtgctgattactgctccaggtaagggtgacatccccacctatgttgttggagtgaatgctgacacctacaactcagatgagcctatcatcagcaatgcttcttgcaccaccaattgccttgctcctttcgtcaaggttctggaccagaagtttggtatcatcaagggcaccatgactaccactcactcgtacaccggtgaccagaggcttcttgatgctagccaccgtgacctcaggcgtgctagagccgcagctctcaacatcgtcccgacttcaactggtgcggcgaaagccgtggcccttgtactccctactctcaaaagcaaacttaatggcatcgcattgcgtgtgccaacaccaaatgtg

SEQ ID NO: 207116 - DNA, 429 bp, Gossypium hirsutum
  unsure (1)..(429): unsure at all n locations
gggagactcttttgtataactgtagcatatagtactagtaagcagtaatagcaatggcctgggccatgaactcatcgggaaccattgccaccgtgaactgctcctccccggcacaggccaacatggtggcccccttcaccggcctcaagtctgcctctgctttcccagtcactaggaaggccaacaacgacatcacttctcttgcaagcaatggtgggagagtgcaatgcatgcaggtgtgggctcctcttgggaagaagaagttcgagacactctcataccttcccgatcttacacccgtacagttggctaagggaagtagaataccttcttcgctctaaaatggattcttgcttggaattcgaantagaagagggattcgtgcacccgtagtactcgagcttacccacgtactacgatggacgctac

SEQ ID NO: 207117 - DNA, 385 bp, Gossypium hirsutum
  unsure (1)..(385): unsure at all n locations
tttttaaaaagggttgcccccttctaactctgaaaggcaatggcttcaatgcttagctcaggaaccgtccttaggccaaccccatttcttggccaaaacagaaatgctaaccctctcagagatgtctccgngggcactgccaaatacacaatgggaaatgaactgtggtatggaccagacagagtgaagtacttgggaccctttttcagctcacattccatcctacttgaacggcgagttccctggtgactacggatgggacactgccggtttgtcagctgaccctgaggcctttgctatgaacagggctcttgaggtaaaccatggaagatgggcaatgctgggagcactaagctgcatcaccccagaagtccttgagaaatgg

SEQ ID NO: 207118 - DNA, 300 bp, Gossypium hirsutum
  unsure (1)..(300): unsure at all n locations
cgcgtccgnccacgcgtacgnccacgcgtacaaccacgcgtccggtcttctgtttatatcaacaggaggtgccttacctgctgttatatcaccactaccacctnctcttttttcgctcgtcgacgacctacattgtggccttcactcgtcgctagacttaactcttctacttctactacgactcttatacaaaacacgcctgcttttgctgcccctattcctttgctaacccccagagaagagatgggaaacatgtcctacgacgaagacattgaagctctctacaaacttctcaatgac

SEQ ID NO: 207119 - DNA, 410 bp, Gossypium hirsutum
  unsure (1)..(410): unsure at all n locations
cccacgcgtncgctttcattgcggttcttggtaatgaaaaagccaacaggggggtgttcaggatttcgggagaaaagaacgtgaccttcgttggattagcatatgcgtgcgccaaggctggtggatttcccgaacctgatattgttcactacaacccaaaggagtttgacttcggtaaaaagaaggcattcccgttccgagatcatcatttcttctcattactcgagaaagcaaagcatgtgctatgatggaaaccggaatttggcctggtctaaggactcacagactcgtataacctatatttcggcaggggaacattcatgaaggaagcttatttttcgaccgatgacatgattctgggcaaaacttttgttctccaatcataaggcatttatctcatcatcactttc

SEQ ID NO: 207120 - DNA, 446 bp, Gossypium hirsutum
ctttgtgtcctctctgtgtgcttttcttcactgtttgttccccgtcaaaatattgtgtcggaggaagaaaatcccaatttccacgagaaattttaaacaaaaaaagaaacccaaaaatggacaaagaaaagaaattaaaacaaacccaagaagaagaggaaatggaattcaaagactgtgaaaaccatagccaacaagctcaacaagaagaagaagaagaagaagaagaaaaaatcgagataggcgatgaaataattcgaagcaaaattggtatcatgagagcacttgcagagagagatgacccatcagttaaggaagtggatgattttatgatacggagattccttagagctcgtgatttggatatagagaaagcaaacaccatgttattgaagtatttgagttggagaagaacgtttttgcctaaaggattcgtatctgaatcg

SEQ ID NO: 207121 - DNA, 425 bp, Gossypium hirsutum
tgagactcttttgtatacctgtagcatatagtaatagtaagcagtaatagcaatggcctgctccatgatctgatgggcaaccattgccaccgtgaaccgctcctccccggcacaggccaacatggtggcccccttcaccggcctcaaatctgcctctgctttcccagtcaccaggaaggccaacaacgacatcacttctcttgcaagcaacggtgggagagtgcaatgcatgcaggcgtggccgcctcttgggaagaagaagttcgagactctctcatacctgcccgatcttactcccgtacaggtggctaaggaagtagattaccttcttcgctctaaatggattccttgctgggaattcgaattagaggaagggattcgtgcaccgtaagtactcgagcttacccacgtactacgatggacgc

SEQ ID NO: 207122 - DNA, 328 bp, Gossypium hirsutum
  unsure (1)..(328): unsure at all n locations
cccacgcgtncgatactcccaaaatgtctcttacaatccccactaacctatccaaatccctggtgaagccagagattaactcccaactcacccccaaactttcacgatcattggtggtatgctccaccgacaagacttcatcgccaccatcatcagcttcaccactccaagccttctcagcagatcttgctctttcttccattcttctctcagccccgcagactgccgtagctgatattgcacgcctcacaccatgcaaagagtgcaagcaattctgcaaacgtgagaagcagctgatcaagaagctggaatcgtcgttgaagctata

SEQ ID NO: 207123 - DNA, 359 bp, Gossypium hirsutum
gtttctggaaaaaagagccgcaaaaagtctggttctttaattatcttcagcattaaggaggacaacaccacagtggagttcttttggtcaccatttctggttgaatctaattcagacaatccatggcggcacagtataaaagaccgtataatcaagcctgaatcaatcaagaacaatggagatgattggaaaggcgtagattacttgattttcaacacatatatttggtggatgaacagtggatatatgaaagtcttacgaagatcgcttgatgcagaaccggtcgagtacgatgaaatcgaaaggcctatagcttatgggaaggtagtaaaaagaagggctaaatgggttgatgaaaa

SEQ ID NO: 207124 - DNA, 319 bp, Gossypium hirsutum
aaataaatcataccacccaaaattttctcttttctcttctcttctcgggttacataaatcgcttcggtttaggaactgctggggttcgattttgtcttcaagatcggccaaattaaaacttcaggcgatcggagaagatggagtctcatgatgaaactgggtgccaagctccagaaggtcccatcctgtgcgtcaacaactgtggcttctttggaagtgcggctaccatgaatatgtgctccaagtgtcacaaggcaatgattctgaagcacgaacaggtgcaacttgcagcagcatccattggaagcattgttaatgg

SEQ ID NO: 207125 - DNA, 271 bp, Gossypium hirsutum
aacggtgttttgtgattaaaaaaacgaccaagattgtggcaaaacaagatggcttccctgcgtgaaccatggctagtggagaacgggttgaagggatctagcaaggagattcgccatggcaggactgcacacaacatgtcgtcttcgtcattgcggaaaaaatcggacctgacgctagtttccaaggttcggtatgcaatgcttaggcagttcctcgccaatcttcaagaggtcatattagggaccaagctctccgttctcttccctgcta

SEQ ID NO: 207126 - DNA, 309 bp, Gossypium hirsutum
gcgcttgctcctgttgttattggtgtatccatggcatcactgactgagctgtcattcaattgggcgggtttgattaacgcaatgatttccaacatctccttcacttacaggagtatctattccaagaaagccatgacggatatggacagtacaaatgtctatgcttatatttccatcattgctctcttcgtctgtattcccccagccctcatttttgagggtcctcaattgttgaagcatggcttcaatgatgctattgctaaagtgggtatgactaagttcatctcacatctttttctgggtgggaat

SEQ ID NO: 207127 - DNA, 335 bp, Gossypium hirsutum
cccacgcgtccgagaaaagcagtttccgaatcttttacgactcgtaaaatagttgaattgggtcatggcttccgccgttgcttccgttgcgaagaagaaaactgctggctctaagaagtctaaatcagctccttcacatcctccatttcttgagatgatttcagatgcaatcgtttcgttgaaagagaggacagggtcgagccaatatgcgatcgcgaaattcatcgaagagaagtataagcaattaccggcgaatttccgcaaagtcttacttgttcagacgaagaagtttgttgcttctggaaagcttgtcaaagtaaaagcctcttttaagc

SEQ ID NO: 207128 - DNA, 293 bp, Gossypium hirsutum
  unsure (1)..(293): unsure at all n locations
cacgcgtncggggatcggtattgtttgcgctagcccgaaagctctcgaggcgaccaaaactgcgaaatcggttcgggttttcttcgattggaacgattaccttaagttttacaaactaggaacattttggccatacactccttcaattcaactcttgtatggactaagagcagcattggaccttatttttgaggaaggacttgataatatcattgaaaggcatagtcgcttgggcaaagcaacaaggcttgcggtggaagcatggngctngaagaattcacacaaaaggagga

SEQ ID NO: 207129 - DNA, 355 bp, Gossypium hirsutum
gtttaagggatttttttcattcgtttcttctcacgctcgattaccttacaaaaagagaaaatgaccaagtgttacccaactgtgagcgaggaataccagaagtcagttgaaaaggccaagaggaagctcagaggtctcatcgctgagaagaactgtgctccactcatgctccgtttagcgtggcactcagctggaacttttgatgttaagaccaagaccggaggtccattcggaaccatgaagcatcctgctgagctcgcacatgctgctaacaacggcctagatatcgccgtcagacttctcgagccgatcaaggagcagttccctaacctcacctacgctgacttctatcagc

SEQ ID NO: 207130 - DNA, 423 bp, Gossypium hirsutum
agacattatacaaccctaacttctacattaggcaagaagctcctaaggtttgagagagatggcttcaaggagatcggcatcggttgccctcttttttgcactcaacattctcttcttttcacttgtcagtgctaattgttcttgcccttcccccaagccaaaaccaaaccccactccctccccaactcctgctgcggaaggaaagtgccccataaatacccttaaactacgtgtatgtgctgaggtgcttggtttagtcaatgtaactgttgggtcacccccagttcaaccttgctgcacccttatcaaaggccttgctgatcttgaagctgctgtttgcctttgcacagcgatcaaaggcaacattttgggtatcaatcttaatatcccaggttccctcagcttgcttctaaatgtctgctc

SEQ ID NO: 207131 - DNA, 417 bp, Gossypium hirsutum
  unsure (1)..(417): unsure at all n locations
ggttacttctctctccaccattatttccaatccttttcactttatctcctccgctcctctctcggtctcgctttccattgttggacgtagccaaggtctgttctttgctctttataatgttctgtccgattatagtttcctcttaaaaccttagattaccttgcgatagcaaaaattatctgtaaggaaaaaatggagataactaatatcactgaatatgaggccattgcaaaagaaaagttacccaagatggtttatgactactatgcatcangtgcagaggaccagtggactctcaaggagaatcgaaatgcattttctaggattttgtttcgaccccgcattcttattgatgttagcaagattgacatgaccaccactgtcctgggattcaagatttcaatgcctatcatgatt

SEQ ID NO: 207132 - DNA, 367 bp, Gossypium hirsutum
gtccgcttgatttccatcagacggtgataaccatgccgatccgaaacatagccgtgggccgacccgaagaggcgactcaaccggacgcactcaaagcagctttggctgagttcatctccacactcatcttcgttttcgccgggtcaggctccggcatggcctttaacaagttgaccgacaacggagccaccactccggccggtcttgttgccgcttctatagctcacggcttaagacttttcgtcgctgtatccgtcggcgctaacatctccggcggtcacgtcaatcccgccgtcactttcggcgctttcgtcggcgggaacatcagtcttttacgcggcatcctctattggatcgctcaactact

SEQ ID NO: 207133 - DNA, 323 bp, Gossypium hirsutum
cccacgcgtccgagctcgaagtcattcactgcagatgggccatgttgggagctcttgggggggttttccctgagctgttggctaggaacggtgtcaagttcggtgaagctgtatggttcaaggccgggtctcaaatcttcagtgagggtggacttgactacttgggtaacccaagcttgatccatgctcaaagcattttggccatctgggcttgccaagttatcttgatgggagccgtcgagggctaccgtattgccggtggaccactccgtgaagtgactgacccattgtacccaagtggcagctttgacccattgggtctt

SEQ ID NO: 207134 - DNA, 275 bp, Gossypium hirsutum
ggctctccaagcagcttcattgctcccacccaccatctccattcacaaagaggccaaatgcaatgcttgtcttaaagagacaactctgtttggtgttccattttcaacccatttcagctttcctcttcatttaactcaggaactcaggaaaaagggagtagctgccggaattgttcgagcacaaacagctgctacaacaccggcagtcgatcgggctgctccacaagggaagaagaccttgagaaagggtactgtgataataaccggtgcgtcgt

SEQ ID NO: 207135 - DNA, 392 bp, Gossypium hirsutum
cggacgcgtgggcggacgcgtgggcggagcgtgggcgatgatcaacgaggactgtttcgagagggagttcactacaccaaaagccttcccttatggctacaactacaactgtaactacaaccctcactgtcttagtcacagcgtatcatcttcttctctggatgttggggtagttccagatggcggtagtacgattacggatgtatcagtcccgtgcgcgaaagtgacggagacgacttatcagactgtgcaactctcgttggcggagagaaaagcgagggtgctgaagtacagagagaagagaaagaacaaaaaattcgagaaaacgatacgttacgcttctaagaaagcttacgcggaagtgcggccgaggattaaaagaagatttgcaa

SEQ ID NO: 207136 - DNA, 390 bp, Gossypium hirsutum
ggaagacgaggcggacgaagtatcttttactctctacctaagcttatttgtgtgcctatgcaaaggcacatgatggttaaaacggccccatggaagggttcccggtcacacctaacatccgggaagtgaggcctgagtccggttttgagaatttcgggttttgcactgacccctgtcgtgtcccgggcggtgaacccaactcgggaataagaagagtgagtttgaaggctgagattgacacttcacctcctttcggatcggttaaggaagctgtgacccggtttggtggcaacggacattgcgtgccattgaacaagtttggagaatatcatggaattgaagagtttgatttaaagaaagtggaggaacaagcagcggaattggagaaag

SEQ ID NO: 207137 - DNA, 380 bp, Gossypium hirsutum
gcgaaaatctcgaagcttccttttccgttttagatctcaaaattcaaaaagctctcttttcatctcatggctgctactatcgtctccgtcaaagctaggcagatcttcgacagccgtggaaatccaacggttgaggttgatgtggaaacatcgaacggtataaaggctagggccgcagttcctagcggtgcatccactggaatttacgaggctcttgagttgagagatggaggttccgattacctcggtaaaggtgtatcgaaggctgttgctaatgttaacacaatcatcggccctgcattgattggaaaggacccaaccgagcagactgcaattgacaatttcatggttcaacaactggatggaacccaaaatgagtg

SEQ ID NO: 207138 - DNA, 280 bp, Gossypium hirsutum
cccacgcgtaccaaacatacactactattactcactactagcaatggcttcctcaatgagcgtatcagcggccattgtcactgcctttaacgctcacgctaaacatggaacggtcctttcaccggtctcaagtatgcctctgatttcccagccaccacgaaagccaacaacaacattacttttttcgcaagcaatgtcggtagattactatgcatgcaggtgtggtctcctactgataagaaaaaggttgagactctctcatacctacccgatcttacac

SEQ ID NO: 207139 - DNA, 349 bp, Gossypium hirsutum
  unsure (1)..(349): unsure at all n locations
attcattgaactagtttgtttctttattgtcagacatttctcatttttagagaagacatgggagacaagtcatacgaggaagccattgaagctctcaagaaactgcttagtgagaaaggagaattgaaagctgtagcagccgcaaaggtagatcaagtgacagctgagttaaagacaacatctgatgattctgtggagaggttgaaacaaggattcgtttacttcaagtcacaaaaatatgagaagaatcctgctntgtatgctgagcttgccaagggccaaagccccaagtatatgattgttgcctgctccgactccagggtatgcccatctcatgttctggacatgc

SEQ ID NO: 207140 - DNA, 301 bp, Gossypium hirsutum
gccgataatggttgcagcagttgcagcaacagcatcatctcaacttctggtatcaagttcccgctctttggggcggatgttaccatttcagctatgcgtatttgaattcaaggccctcgtgttatgccccagcaatggcaatggcattaacaacagtatcaagagaaggcatgttatgtgcctggctgtggggacagcacccgacgcagaaaccaagaaaagtgggttcgaaatacatacactaacagggtggctgttgaaacaagaacaggcgggtactattgatgctgagctcactatt

SEQ ID NO: 207141 - DNA, 312 bp, Gossypium hirsutum
gcacgaatcgccttttttcgcttccatgattccttcagcttggggtgcgtcaaggcgtaccttgcctcacttatctcaactttggagattgttttcgccagccttggctctgccatttcttacaacacgttgacaactgatgcagacctagatcccgacgggctagtcaccattgctgtttgccacagattttctctctttgttgcacttgatataggtgccaacatatcatgtggccatgtctaccctgcactaactatttgagtagctcttggtggcaaataaccatactcactggcattttttactgga

SEQ ID NO: 207142 - DNA, 372 bp, Gossypium hirsutum
gaaaccctcaaaattccacttaaaaaatggcctccacagcttccctctccaccgccgtagcgcccacctctttcctccgcggccacccggccccgaaaaccctaagctcccttcctttcaaccaatctcttttcgggctaaaaccccaacgaaatggccgtctcaccatggctgcatacaaagtgacactgttaacacccgaaggaccccaagaattcgtgtgccccgacgacgtttacatcgttgaccaagctgaggaagaaggcattgatcttccgttctcgtgtagggctgggtcttgttcttcgtgtgccggaatgattaagcaaggctccgtccatcaatccgacggtaatttccttgatgatgacc

SEQ ID NO: 207143 - DNA, 431 bp, Gossypium hirsutum
ggccccgaaaaccctaagctcccttcctttcaaccaatctcttttcgggctaaaaccccagcgaaatggccgtctcaccatggctgcatacaaagtgacactgttaacacccgaaggaccccaagaattcgtgtgccccgacgacgtttacatcgttgaccaagctgaggaagaaggcattgatcttccgttctcgtgtagggctgggtcttgttcttcgtgtgccggaatgattaagcaaggctccgtcgatcaatccgacggtaatttccttgatgatgaccagattgctgcaggttttgtcctcacttctgttgcttaccctcagagtgatgttgttattgagacccacaaggaggaacagcttaccgcttaattatatatgatactatataatataatcatcaactagaccaagatttaatcatctt

SEQ ID NO: 207144 - DNA, 278 bp, Gossypium hirsutum
cccacgcgtacgggcaacttcattgaccctgaatggctcgatggatcgctccctggagacggcggatttgacccactaggccttggaaaagacccagcattcctcaaatggtaccgagaagctgagctgatccatggacgttgggccatggctgctgtcatcggcatcttcgtcggccaagcttggagtggcattccatggttcgaggcaggagctgacccacgtgcgatagctccattctctttcggctcactccttggtactcaggtcatccttat

SEQ ID NO: 207145 - DNA, 283 bp, Gossypium hirsutum
gatttttgaagatggcccgtaccaagcagacagcccgtaagtcgactggtgggaaggctcgaaggaagcaacttgctaccaaggctgcccgtaaatctgccccaaccaccggtggtgtgaagaagcctcatcgctaccgtcctggaactgttgctcttcgtgaaattcgaaagtaccaaaagagtactgagcttcttatcaggaaattgcctttccagaggcttgttcgtgaaattgcccaggacttcaagactgatttgcgtttccagagccatgctgttct

SEQ ID NO: 207146 - DNA, 366 bp, Gossypium hirsutum
accacgcggcgaacaaataactgcttacaatggcctctacaccatggctctttctttcccatcattcgggcggaaggcagtgaagttctccccttccacccctgaaatacagggaactggccgtgttttcatgaggaaaaccaccaagcctgttccttctggtagcccatggtacggtcctgaccgagttttgtacttgggtccacttttcggtgagccaccatcttacttgaccggtgagttccctggtgactatggttgggacactgctggactctcagctgatcccgagacctttgctatgaaccgtgagctcgaagtcattcactgcagatgggccatgttgggagctcttgggtgtgtttt

SEQ ID NO: 207147 - DNA, 392 bp, Gossypium hirsutum
agtgcaggcaccatggcagcttcctcagctttgttcacccttatcttctccaccgtccaaaagaagaatggcattgttaccccctccaacatctcattccacggccttagacccctaatcaagggcaaatcttcatccaacgccatctccttctcaagaaactcaactgctagtgccaggcttgcaatcaaagcagagctgagcgcccaagttgtgataagcgtcagcactgctctctcccttatcttgggtagatttgagttcttcaacttccaaagagagaacgttgtcaagcaagtgcctgagcaaaatgggttgacccactctgaggctggggacgcacgatccaaggagtatgttagccttctcaagccaacgaccctgtgggattc

SEQ ID NO: 207148 - DNA, 366 bp, Gossypium hirsutum
caaaatcaactgcttcacaatggcctctacaaccatggctctttcttccgcatcattcgcgggtaaggcagtgaagttctccccttccacccctgaaatccagggaactggccgcgtttccatgaggaaaaccaccaagcctgttccttctggtagcccatggtacggtcctgaccgagttttgtacttgggtccactttccggtgagccaccatcttacttgaccggtgagttccctggtgactatggttgggacactgctggactctcagctgatcccgagacctttgctaggaaccgtgagctcgaagtcattcactgcagatgggccatgttgggagctcttgggtgtgttttccctgagct

SEQ ID NO: 207149 - DNA, 268 bp, Gossypium hirsutum
agcatacactactagtacccactactagcagtggcttcctcaatgatctcatcggctaccagtgccactgcctgtccggcccaggctaacatggtcgctcctttcaccggcctcaagtctgcctgtgctttcccagtcatcaagaaggccaacagcgacattacttctctagcaagcaatggccgcagagtgcaatgcatgcacgtgtggcctcctactggaaagaagaagttcgagactctcttatacctccccgatcttacacccg

SEQ ID NO: 207150 - DNA, 338 bp, Gossypium hirsutum
  unsure (1)..(338): unsure at all n locations
ctctagagtaaatttcttttgcaatcctttgtagagctccgggatccattgtcaccatggggggctcaaatctgacaatgtgggtgtactcaaaaccctctctttctgacacttcttcactctctttgcgttctttcatcagcccttttcagctcccatctcagagctcaacccccggtaacccttacaggtcctcatctgtaaccccagttcactgtggtcttcgtgagcttagagaccgtattgattcagtaaagaacacgcagaagatcactgaagccatgaaacttgtggctgctgctaaagntatgagagcacaataagctgttgtcaatggc

SEQ ID NO: 207151 - DNA, 355 bp, Gossypium hirsutum
tcgctttgtgatgctgacgttgctctcatcattttctcggcaactgggaaactatttgaattcgctagctggcagtatgaaagatattttgggaagatataatttgcactccaacaatatcaacaaattggaccaaccttctcttgatctccagctggagaacaataacaacatacgattgaacaaggaaatagttgataagacccgccaattaaggcagatgagaggggaagatcttcaaggactgaacgttgaggaattgcagcaactagaggggatgcttgaatctggacttaaatgcgttttggaaaccaagagcaatcggattatgaacgacatctcttcacttgaaaat

SEQ ID NO: 207152 - DNA, 378 bp, Gossypium hirsutum
aagtattttggggaatgcaaaattccatggtttctaagttggacaaagtccttgtggacagtgatgcagcatttgaagtcgttatttcatcttgtggtgagcaagggcatactccagcaataatgttgagtgcaggtttcaagcctcagacagaacctcatttacgaggaatgttgacttgtgtgagagcatctcaactttggggccttagggaaaaatctaggatttttattcattcaggcagatggttaatgggcgttttggatgaactaagtgtacttgaacaaagtcagtgctttatccaagtgtcaaatccatctctacaaaactgcttcctcaaacatggttctaggtttggtgaaacaaagaaaaattttg

SEQ ID NO: 207153 - DNA, 254 bp, Gossypium hirsutum
cccacgcgtccgctgctgctctcgttttctcctgtatgggagcggcgtacggaacggccaggagcggtgtcggagtggcgtcgatgggagtgatgaggccagagctggtaatgaaatcgatcgtccccgttgttatggctggtgttttaggtatttatgggttgattattgcggttattataagcaccgggattaacccaaaggccaaatcttactaccttttcgatggttatgctcatctttcctctggtctc

SEQ ID NO: 207154 - DNA, 391 bp, Gossypium hirsutum
cccacgcgtccggcaatccatatatggagaggaatatggaatttttgattgaatgcatggatgatttgtcagtggaacagcagaagttccaattttactacaggagcctgtcacgtcaacaagcccagcaacaggcatggcttcagaaaagaagggcagataacatgcaacgaaaagctgctggggaggatcctttgcctgaggaggacccttcaaatcccatcttcaagccaatccctgagccatcaccgttggagagcttcctcataacaaatcaaatcgcaaattactgcaaccaaatcaacggggtttctgggcagagcttcaacagattgtatttaatgaaatcggtgcacgataactgaaacttgcaatgtcgtctgcaattttt

SEQ ID NO: 207155 - DNA, 238 bp, Gossypium hirsutum
cgtgcgtcaagtgcagtgcattaatttcattgtctacaagcctccaggcttctaagctttggataaactgtgtctctccatttgtttgaatttgtactcagaaaaaccatgttctttacttttgcttttctctttctttgagttattggcctttgcttctcgatttctgggttttaatcctttttggattttcattggaagaaaggctgagaactaatgaataaaagttggttttctt

SEQ ID NO: 207156 - DNA, 386 bp, Gossypium hirsutum
gccaaagatgccattaccgaggttgtgaggtccggggatcttatttcttacactgctgaagaaggggtggggattcttggtgaagggaaattcttggtatctgatagttttcctggaaatcagagaaccaaatattgcctcacgtccaagattccgcttggagtgattctggccattccaccattcaattatccagttaacctggctgtttcaaaaatcgcaccggctttaattgctggaaacttccttgtactcaagccaccgacacagggtgctgtttctgctcttcatatggtacactgctttcatttggctggttttcccaaaaggctaattagctgtgtgacagggaaaggctccgagatcggggactttctcaccatgca

SEQ ID NO: 207157 - DNA, 298 bp, Gossypium hirsutum
  unsure (1)..(298): unsure at all n locations
cccacgcgtncgcccacgcgtncgagctggatgagaagaaactctcatgtccagttctgtagtagagatggaattcataaacaacaaccatcaactataaccccaaaagaaaccgatttcgtaaacaacatagaggaagaatgaaggggatatcttatcgaggtaatcggatttgtttcggtagatatgctcttcaagcacttgaacccgcttggattacatctagacaaatagaagcggngcgccgcgcaatgacacgaaatgtacgccgtggtggaaaaatatgggtacgtatatt

SEQ ID NO: 207158 - DNA, 454 bp, Gossypium hirsutum
ctggactctagactatatatagtttagataacccgcgaaaattttcgacatatttgattgcgatcttgagatagacagggcgctccttcgtctcaaaatctgaatagaacaatctttattatttgaagcggttctttcgggcagttatcaaaagagggcaattgcttcgaatttgatcaattgagatatatggaaacaaaaacaatatcaatataacaataatatatatatttcattcgaattcaaagtggattcttattttctatattctttattctttttagattcaattagattcaagggctaagcactgaatcaaaaaaaaaaaaaaaaacagagaatagattcatgggcccctactttataatataatgaaaggcatgcttgatagaaagattacatcacataaagtcaacgaatgaggtgggttcattaacaactcacagatgaaaaa

SEQ ID NO: 207159 - DNA, 284 bp, Gossypium hirsutum
aacaaactcaactgcttcacaatggcctttacaaccatggctctttcttccccatcattcggcgggaaggcagtgaagttctccccttccacccctgaaatccatggaactggccgcgtttccatgaggaaaaccaccaagcctgttccttctggtagcccatggtacggacctgaccgagttttgtacttgggttcactttccggtgagccaccatcttacttgaccggtgagttccctggtgactatggttgggacactgctggactctcatatgatcccga

SEQ ID NO: 207160 - DNA, 186 bp, Gossypium hirsutum
cccacgcgtccggcgagttatccgcatgtccaggggacactttctggacttctgaacgccatcgacggcctattgtcgtgctgcggagacgagaggatcattgttttcaccaccaactacaaggataaaattgatcctgcgctgttgcgagccggtcgcatggacaagcacatatgcttgtcttac

SEQ ID NO: 207161 - DNA, 313 bp, Gossypium hirsutum
ggctcgccctccactactgctggaactagaaagttgatcgttgtggcagccgccgcacctgaaaagtctgggatccctgctgttagaggtggtggcaacttcattgaccctgaatggctcgatggatcgctccctggagactacggatttgacccactaggtcttggaaaagacccagcattcctcaaatggtaccgagaagctgagctgatccatggacgttgggccatggctgctgtcgtctgcatcttcgtcggccaagcttggagtggcattccatggttcgaggcaggagctgacccacgtgcgatag

SEQ ID NO: 207162 - DNA, 400 bp, Gossypium hirsutum
cttcggtctccggcttctgcctctcttccaataccacctctccttctaactcactccgggggcccacattgcggcggccctctatcatcgccaacctcaactcttccacttctcctcctacactcatccgaaatcaaccagttttcgcagcacctactcctttgctcactccttccaattggaaagaaaccatgggagacgagtcatacgaggaagccattgaagctctcaagaaactgctcaatgagaaaggagaattgaagagtgcagcgacggcaaaggtagagcacgtgacagctgagttgaagactgctgcttcctccgatgagtctgttgaccgcttgaaacaaggcttcatttacttcaagactgaaaaatacgaaaagaatcctgctctgta

SEQ ID NO: 207163 - DNA, 448 bp, Gossypium hirsutum
  unsure (1)..(448): unsure at all n locations
aaatggcttctgccaccacttccaccactttttccctcctcaaaaccaccgcctncaccaggggttnctgcgcctcccgctcttctgcatccctcatacgccttccctccactcgccgccacctcaaatcctcttctctcatccacagcctaggcttctcctccgctgcttctggggactctctgctttccctccatgcctcctccaaagttcgatctttcaagggaaaagggtcaagaggggttgtttcaatggccaagaagagtgttggggacttgactgccgctgatttgaaagggaagaaagtgtttgtgagggctgacttgaatgttccattggatgatagccagaacatcactgatgacaccaagattcgtgctgctattccaccatcaagcatttgattcagaatggagctaaagtcattctctctagccacttggggcgg

SEQ ID NO: 207164 - DNA, 455 bp, Gossypium hirsutum
cggacgcgtgggcggacgcgtgggaaaaaattcacctcatgctctcattgatttgcaacaggtttacatgacatcaacagagaaaacttataccacaaactcccatcacccgagatcatctttccccttcagaatggcggctgcaaccatggctctctcttccccatctttcgccggaaaggccgtcaagctctctccttccgcccctaaaatccaaggcaatggccgtgtttccatgaggaaaaccgctaccaaggctgctccctctggaagtccatggtacggtcctgaccgagtcttgtacttgggtccactatctggtgagcctccatcttacttgaccggagaattccctggtgactacggttgggacactgctggactctcggcggacccagagacatttgccaggaaccgtgagctcgaagtcatccactgtaggtgggctatgttgg

SEQ ID NO: 207165 - DNA, 307 bp, Gossypium hirsutum
  unsure (1)..(307): unsure at all n locations
cccacgcgtncgattctctctagccacttggggcggccaaagggtgttactccaaaattcagcttggctcctgttgtacccaggctttctgaattacttggcattcaggttgtcaaggctgatgactgcattggtccagaagtagaaaagttagttgctgcacttcctgaaggtggtgttcttcttcttgaaaatgttagattttacaaggaagaggaaaagaatgaacctgaatttgcaaagaagcttgcttcgttagctgatctctttgtcaatgatgcatttgggactgcacatcgagcacatg

SEQ ID NO: 207166 - DNA, 210 bp, Gossypium hirsutum
  unsure (1)..(210): unsure at all n locations
gtcgagctggtagaactgggccaggcacatgttataggttgtatacagagagtgcatactggaatgagatggggccagctcctgtgcccgagatacaaaggaccaaccttggcaatgtggtgttgctgctcaagtctcttaaaatagagaacttgctagattntgatttcatggatccaccaccacaggaaaatatccttaattctatgt

SEQ ID NO: 207167 - DNA, 381 bp, Gossypium hirsutum
ctgcactccattatgctgcagcatattgtgaccccaaagttgtctctgaggtacttggccggcgtctggctgatgtcaatctgcggaattctcgtggttacacacttcttcacatagctgcaatgcgaaaagaaccatcggtgataatggcacttctagcaaaaggggcatctgcttcaacactaacattggatggacaaagtgctgttaacatctgccggaggttgacaagaccaaaggattatcatgccaagacagagcaagggaaggaaacgaataaagaccggatatgcattgatattttaaagaaggaaatgaagagaaatccaatggctggagatgtttcttgtgcttcccatgcattgtctgatgatctgcata

SEQ ID NO: 207168 - DNA, 207 bp, Gossypium hirsutum
gaaatgtatcagcgagggaagatcaaatcagacggtggctgctgattgagatggaaccctgcttgtgtcacgtagtgctttcccttactacatgcttattgccctcgaagctggcagcctgttaagagcactgcttctcttactatccgttccagtcgtgtattttacctaccttgttcatctctgaatctttcgccataaatacct

SEQ ID NO: 207169 - DNA, 178 bp, Gossypium hirsutum
  unsure (1)..(178): unsure at all n locations
atttttctttcttttgttccttctttttgcagaaagaatcctgctctgtgtggtgagctggccaagggtcaaagccctaagtatatgattgttgcctgctcggactctatggtctgcccatctcatgtgctggacatgcnaacctggtgaagctttttgtgggcccgtaaatgtttgc

SEQ ID NO: 207170 - DNA, 350 bp, Gossypium hirsutum
  unsure (1)..(350): unsure at all n locations
ttgggttgcaatggcacaagcaatggcatcgatgactggtttacgtggctcttcacaagcggtgttggaaggtagtctccaactcancggccaaacccggttgaacgttgctagcaccaacagggtggctgtggctagacctggttttaccgttagagctcaacaggtccctgccgagcctgaaactggacgcaaagctgtgctgggtcttgttgctgctggtttggctactggctcctttgttcaagctgtgcttgctgatgcacgaagcatcaaggttggcccgccttcaccaccctttcgtggattgcccggaactttgaattcgatgagccaagagaccttgatct

SEQ ID NO: 207171 - DNA, 418 bp, Gossypium hirsutum
gcaggacctgaatagggctgcactctctcgccccttggacgagactcagcaaagctggctgcgtggggcccggggagcaaaagaagaagaataagtacgtccatctcggatgtatcattgtgagccgcaagatctttgtatggaccttggggaccctgctcgtctccgccctcctggccggactcatcaccctcatcggcaagactgtcccacgttatgaccaccgccactcttcgaccgataactacactttggctcttcacaaggcgctcatgttctttaatgctcaacgttctggaaagctgcccaagcatattaatgtgtcgtggagagggaactctggcctccaagatggcaaatcccatcccttcgttttgatgaaagatctggtcgggggaatattccatggctgagatgc

SEQ ID NO: 207172 - DNA, 375 bp, Gossypium hirsutum
  unsure (1)..(375): unsure at all n locations
cggacgcgtccgcccacgcgtccgcccacgcgtccgcccacgcgtccggcttcagggaattataaaagcatggtattctatcttgaagcttgtgagtcaggtagtatctttgagggtcttcttcctcaggggttgaatatctatgcaaccacagcatcaaatgcggaagagagtagctggggaacctattgtcccggagagtacccaagtcctcccccagaatatgaaacctgcttgggagacttgtacagcgtcgcttggatggaggacagtgacatgcataatctgcggacagagactnttgcaccagcatatgaacttgtgaaaagaggactatcaatggtcatcttgatatggctctcatgtcatgcatat

SEQ ID NO: 207173 - DNA, 372 bp, Gossypium hirsutum
  unsure (1)..(372): unsure at all n locations
gggtacggttcagataaattctgcaccagctcgtggaccagatcatttcccatttcagggggggaaagacagtggaataggatcacagggggttaccaacagcattaacatgatgacaaagatcaagagcacagttatcaacttaccaaccccgtcttacaccatgggttaggcatttcataaatatcagaataacaaccagggttatcttagttaagatagtatttgtgttttagagcttatttccatatgatgtttagtgaaaaaggataaaaaatggagacaagcaaataatgaagaccagtacatatgcataatatattggctctgntatcgaatggatcaaaagttcttcgagtgatggttttgagg

SEQ ID NO: 207174 - DNA, 283 bp, Gossypium hirsutum
aacaaaatcaactgcttcacaatggcctctacaaccatggctctttcttccccatcattcgccggtaaggcagtgaagttctccccttccacccctgaaatccagggaactggccgtgtttccatgaggaaaaccaccaagcctgttccttctggtagcccatggtacggtcctgaccgagttttgtacttgggtccactttccggtgagccaccatcttactggaccggggagttccctggtgactatggttgggacactgctggactctcagctgatcccg

SEQ ID NO: 207175 - DNA, 263 bp, Gossypium hirsutum
cgactctggcaagtcgaccactactggtcatttgatctacaagctaggtggtattgacaagcgtgtgattgagaggttcgagaaggaggctgctgaaatgaacaaaaggtcattcaagtatgcttgggtgcttgacaagcttaaggctgagcgtgaacgtggtatcaccattgatattgccctgtggaagtttgagaccaccaaatactattgcaccgttattgatgcacctggacaccgtgactttatcaaaaacatgatta

SEQ ID NO: 207176 - DNA, 320 bp, Gossypium hirsutum
cgaagtgtcatttgaaaatcactcgtcctggtatcaacggtacagcgtttcgattttcatagagaaacctcgaaacttctacgtagtgagaggaaagtttgagtacgtgcgatggctcgctcgtggagagcaagcggctttttggtggttctagctatagtcttgtccggatgcttctttgcaatcgcaattgccaaggaggaagccgcgaaattgggaacagtcatcggaattgatcttggtacaacctattcttgtgttggggtatacaaaaacggtcatgttgaaattatagccaatgaccaaagtaaccgtattac

SEQ ID NO: 207177 - DNA, 440 bp, Gossypium hirsutum
  unsure (1)..(440): unsure at all n locations
cccacgcgtccgtgcaactatgctatctcaggcactggatcatctgagcttaatgccaaacttgcttcagcgccatcagttgcttccccagttatgtgcggtggtcgcaagttgcctgtgatcagagcccagcaggctaaattttctgattccaaaggatcaggtgccagtgaaggaagaagagctgctgtgctctacttggcagctggccttttcaccacagctgttgcttcttctgcanatgctggngtcattgacgagtcccttgaaaggagcaaagctaacagggatttgaatgacagaaaaaggtggcaacaagtggaaccaaccttttcagaacatacactggtcaatttggcacttgcaaggtccctgagaacttcactggctggcaagatcttgcgaagcaaaagaaagtaccattcatctctgatgatttg

SEQ ID NO: 207178 - DNA, 385 bp, Gossypium hirsutum
gcgcttaaaacaacatatgtgcccgtcgaggtctctaacgcatatttctactagcccacggctgggccttgttgcaaggttgacatgttcggccactaccaccacaaccaagcctaagtccagtcagaaccagttggttatcgagccacggcttgagacaaaaccggactctatcactcccattatccctagtgttggccctcccttgtccaatgatccaagtttacaatcaacatggtcccaccgagcatgggtgggcagtggttggaccaacgctttttttttcctaacccaaaatggaacgggtgccgcttatacacatatttgggttgaacctaataatagaagcttttgtgggtattgtttaacttaccctttgtctggg

SEQ ID NO: 207179 - DNA, 286 bp, Gossypium hirsutum
acgatactcaacggtgttttgtgattaaaaaaactaccaagattgtggcaaaacaagatggcttccctgcatgaaccatggctagtggagaacgggttgaaggggtctagcaaggagattcgccatggcaggactgcacacaacatgtcgtcttcgtcgttgcggaaaaaatcggacctgacgcttgtttccaaggttcggtatgcaatgcttaggcagttcctcgccaatcttcaagaggtcatattagggaccaaggctctcgttctctttccagctatttcat

SEQ ID NO: 207180 - DNA, 378 bp, Gossypium hirsutum
atttttcattgccaatcagtcccttattaataagtagagtatttccataactggtttaattgccgtcatgcactgtgctccatagtcttggaacccaaggacagaagactcttttagcatttcaccgcaaagatggagataacaaatgtgagcgagtatcaagaaattgcgaagcaaaagttgccaaagatggtgtatgactactacgcatctggtgctgaggaccaatggacattgcatgaaaatagatttgctttcaacaagatactgtttcggcctcgtattttcattggtggtaaccagatagacatgaccaccaccggggtggggttcaagaatataatgcctatcatgattggcccaactggcatgccaaaa

SEQ ID NO: 207181 - DNA, 217 bp, Gossypium hirsutum
agaacacacaacaatggccgccaacacactaatgagctgtggcatagccaccacatttcctgcagttctttcctcatcaaagtccaagttcagtggcgccgccgtatcgttgcctagtgctgttggtaccaatgttggccaccgtgttagcatgtcagctgactggatgcctggtcaacctagaccaccttaccttgatgggtcagcaccaggtgac

SEQ ID NO: 207182 - DNA, 257 bp, Gossypium hirsutum
attacacttccggaaaaaaatcatggccaccgtcacgacgcaagcctctgccgctgttttgcggccatgtgcatcgaaaacacggttccttactggttcttccggtaagttaaaccgagacgtttcatttaaaccagtggcttctacatcgactagctcattcaaagttgaagcaaagaaaggggagtggttacctggtcttccttcaccagcttacctcaatggcagtcttccaggtgataatggctttgatcctc

SEQ ID NO: 207183 - DNA, 310 bp, Gossypium hirsutum
cggacgcgtgggctcttttgtataactgtagcatatagtactagtaagcagtaatagcaaggggctcctccatgatctcatcggcaaccattgccaccgtgaactgctcctccccggcacaggccaacatggtggcccccttcaccggcctcaagtctgcctctgctttcccagtcactaggaaggccaacaacgacatcacttctcttgcaagcaatggtgggagagtgcaatgcatgcacgtgtggcctcctcttgggaagaagaagttcgagacactctcatacctcccccatcttacacccgtaca

SEQ ID NO: 207184 - DNA, 295 bp, Gossypium hirsutum
gtccgtctctctgttttactccacaaccactatcactaccattatggcttcggctactgtgggtgtagccaaacccaaccttcagattcaggcaaaaggaaagggtgttggttttgcagatttctcaagcctacacaactcctctactagccttccctttgccaggaaaacctctgatgacttccattcactcgttgcttttcagacatctgctctaggaagcaataatggcgggtacaggaaagggatggcagaagcaaagctaaaggtggctataaatggggttggtaggatt

SEQ ID NO: 207185 - DNA, 238 bp, Gossypium hirsutum
  unsure (1)..(238): unsure at all n locations
ttgaccggtggacccacgcgtaattanaggatgatattagtgcacctgtatatactctttcctacccacgaactacaatgtacgctgggggaccatgtggaagctgcctatgttctggtgcaccgactcagctcacgttttgaaggagcttgaggaatgcaagaaggaataccccaatgcattcattaaaatcattggcttcgacaacgggcctcaacgtcagtgcattagtttcatt

SEQ ID NO: 207186 - DNA, 434 bp, Gossypium hirsutum
ggcaggtgaataaaggtacagttcctccagcatttactttgaaagatcaagatgggaaaagtgtaagcctttcaaagtttaaagggaagcctgttgtggtttatttttaccctgctgatgaaacccctggttgcaccaaacaggcatgtgcttttagagtcttatgagaagtttaagaaagctggagctgaagttattgggattagtgttgatagtgcagaatctcacaaggtaaaatttctatgattttgagttgaaaatgtatatggttgtgtttcaaattttcgcgggaaaataaattggtgattaattggtaaaacaaccatggacatggtctttggggtaattgaattgagtgttacattgtattttattttttgtacttaaaaaatgataaattaattgttttattatatatcaaaaaataaattgat

SEQ ID NO: 207187 - DNA, 387 bp, Gossypium hirsutum
ccgagcgacccacaccgtacacccacacgttcacccacacgttctctctttctttctatatttagctataacatacactgctgattcccactactatcaatgactccctcaatcatctcatctgctaccattaccactgcctctccatcacacactaacatttttgctcctttcatccatctcaaatcttccttttctttttcactcaccatgaatgccttcaaccacattacttctttcttaaactatatccgtttatttcaatgcatgcccttatttccctctacttttaagaaaaattttgatactctctcataccttccccatcttacacccatacacttttctatatatatatatacctttttttcttcaaaatttatttct

SEQ ID NO: 207188 - DNA, 223 bp, Gossypium hirsutum
cccactcgttccggaaatggttgacttacaatattttggacgaccaacaggacattactcgagggaaacgaatggtggattccttcttccaagctcccatgaatgatataactcactattctgacataagtttctatgaataccgcaaccaaagctttataacgtacaacttggacatcaacatgaatggtttgtacattgctccggcattcatagacaagct

SEQ ID NO: 207189 - DNA, 233 bp, Gossypium hirsutum
cggacgcgtgtgcggactcgtgggcggacgcgtgggaaggaagtcgttaggaattacttcaatagttccggtttccaaaggtggaagaagatttatggagagaccgatgatgtgaataaagtccagcttgatattaggttagggcattccaaaaccgctgaaaatgtgatgaaaatgttgaccgatgatggctcactgaatggcgtcactgtttgcgatgctggctgtggcac

SEQ ID NO: 207190 - DNA, 410 bp, Gossypium hirsutum
aacattggtgggttttggttgttttagtcactacttggggtacaggggacaagttaccgcggcgggaattatttagaatttgttgtattctacagcaattgagacgacactatggtcgatcgagtggggcattgcggagctggtgaaccaccctgaaatccagaagaagctgcggcatgaacttgacactgttctaggacctggtaaccagatcactgaacctgacacccacaaacttccctaccttcaggctgtgatcaaggagactttgaggttacgaatggcaattcctctactcgtgccccacatgaacctgcatgatgcgaaattgggtggctatgatatccctgctgagagcaaaatcttgggtaatgcatgggggcttgccaacaaccctgcttactggaaaa

SEQ ID NO: 207191 - DNA, 422 bp, Gossypium hirsutum
ctttgccttcacaacttacaactcagcctctcctctctctttctctcttcgcctccaaatggctggtgccaccacttccaccactctttccctcctcaaaaccaccgcctccaccacctcttcctccgcctcccgctcttctgcatccctcatccgccttccttccacgcgccgccacctcaagtcctctcctctcatccacagcctaagcttctcctccgctgcttctggggactctctgctttccctccatgtctcctccaaagttccatctttcaagggaaaaaggtcaagaggggttgcttcaatggccaagaagagtgttggggacttgactgccgctgatttgaaaaggaaaaaaatgtttgtgagggctgacttgaatgttccattggatgatagccaaaacatcactgatgaca

SEQ ID NO: 207192 - DNA, 267 bp, Gossypium hirsutum
gcgccaggatgagcatgaagaaattctaaagaacatataagatgccaattctggacttgtatgggaggagtacaaatccatgacgttcactcgctacgtgattaatgaaacacttacgttagaaaaagttcttcctgggatgctgaagaaagttatagctgacattcacgtctattgatatacaataccaaaagggtggatcctattgcttatgcccacagcacttcatttaaaccctaatatatatgaatatcctcttaccttcaa

SEQ ID NO: 207193 - DNA, 273 bp, Gossypium hirsutum
cagacagttgatctcattgagacttttatgaattatcaggagaatattaagaggtgtgtatgcaggatctatgattcgaggtctaatcaaagtgtcttggctcttaaggctttgaagctatctgattcttttatggaactttaccgagctaatagctttactggagaaaagttgagggagaaaaacttgtcatggatggatattttcgaggaaattcctatcaaagtttcaaattctgcccttatcagtgcctttatgactgacctggattct

SEQ ID NO: 207194 - DNA, 455 bp, Gossypium hirsutum
cttcactttgacaacaatactcactttctcttacagagattgagagaaaatcacaaacacacatttatatagcacagtgatcatcatggctcttcacttgtcttgggttttcgtttttggtattctaggcaacgctgtttcattcatggtttccttggctccactgccaacattttaccaaatattcaagaagaaaacatcggaaggtttccagtcgattccctacgtggtttcgctcttcagtgcgatgctttggatttactatgcactgcttaagaaagatgccattttcctcattaccatcaacactttctgcgttttcattcaaactttttacattgttacttacttttactacggcccaaagaaagaaaagatcgtcacggtgaaacttatgcttctcttcaacagtttcgggttcggagttatctttctcgcaacttactttctaaaaa

SEQ ID NO: 207195 - DNA, 307 bp, Gossypium hirsutum
  unsure (1)..(307): unsure at all n locations
cgtncgnccacgcgtncggggcaatcgatgattcagngattactaaggggaaagatgatcacatatatctggttgtgaatgcaagctgcaaggataaggatctggctcacattgaagagcatatgaaagcattcaaggccaaaggtggtgatgtctcgtggcacatccatgatgagagatctcttctagctcttcagggtcctcttgctgccccagttcttcaacatctgacaaaggatgatttgagtaagatatatttttgggaattcctaatattggatatcaaccgggcaacatgtttttttac

SEQ ID NO: 207196 - DNA, 308 bp, Gossypium hirsutum
  unsure (1)..(308): unsure at all n locations
cccacgcgtncgnccacgcgtccggaaagtgagcgctaggttcaacaacaacggcaaggctgcagtgggaagtttcatgattgtggctgccaaagaaatcgacgaagacacagaccgaccaggaccgatggaagggtcttgcttatgatatctccgatgaccaacaagacattaccagagggaaaggtatggtcgactcattgttccaagctcccatgaacgatggtactcactatgctgtcatgagctcctatgagtacattagccaaggccttcgcacatacgacttggacaacaacatggatgga

SEQ ID NO: 207197 - DNA, 394 bp, Gossypium hirsutum
cccacgcgtccggcctttgaattgaaaccctcaaaattccactaaaaaatggcctccacagcgtccctctcgaccgccgtagccaccacctctttcctccgcggccatccggcgccgaaaaccctaaactcccttcctttcaaccaatctcttttcgggctaaaaccccaacgaaatggccgtctcaccatggcagcatacaaggtgacactgttaacacccgaaggaccccaagaattcgtgtgccccgacgacgtatacatcgttgaccaagctgaggaagaaggcattgatcttccgttctcgtgtagggctgcgtctcgttcttcgtgggccggagtgattaagcaagggctccgtcgatcaatccgacggtaatttccttgatgatgac

SEQ ID NO: 207198 - DNA, 348 bp, Gossypium hirsutum
gaaaaatggcttctgcttccgttactcttctaaagtcttaacctattatggacacgaccgggtggagaaagggccaaaacctacgacacccttgggtttgtgatgtacggtcacaccctacatcggtcgcctttgccgtgcgtgctagttcatatgacgatgagcttgttaagaccgtgaaaactgttgcatgtccacttagtggtattctggccatggatgaataaaatgctacaagagggaaacgggttgccttgattggtcttgagaataccgtagcaaaacagaaagcttaccgtacccttatcgtgtctgcccttggcatgagtgactacatctcatgagcta

SEQ ID NO: 207199 - DNA, 426 bp, Gossypium hirsutum
gccagccctcgtttccctcattttcctcttcattttctcgggaaaaaagaagcatgggaaaaggtcctggtctctactccgatatcggcaaaaaggctagagatcttctttacaaggattaccaggttgaccacaagttcactgtcactacttacacttccaatggagtcgcaatcacatcaaccgggactaagaaaggtgatttgcttttggctgatgtaaatactcagctcaagaacaagaacatcacaactgatgtgaaagtcgactccacatcgaatcttttcaccactgtcactattgatgaacctgcaccaggattgaagaccattctttagtttcgttgttcctgatcaaaagtctggcatggtggaactgcaataccggcatgaatatgctggcataagcactggcattggattgact

SEQ ID NO: 207200 - DNA, 359 bp, Gossypium hirsutum
cccacgcgtccgaaaatcaactgcttcacaatggcctctacaaccatggctctttcttcccgatcattcgccggtaaggcagtgaagttctccccttccacccctgaaatccagggaactggccgtgtttccatgaggaaaaccaccaagcctgttccttctggtagcccatggtacggtcctgaccgagttttgtacttgggtccactttccggtgagccaccatcttacttgaccggtgagttccctggtgactatggttgggacactgctggactctcagctgatcccgagacctttgctaggaaccgtgagctcgaagtcattcactgcagatgggccatcgtgggagctcttgg

SEQ ID NO: 207201 - DNA, 228 bp, Gossypium hirsutum
  unsure (1)..(228): unsure at all n locations
cccacgcgtncggagacattttaatttctcataagctaatcagactatgtcggagctcgagagcatgacatcattgggacgtacaaagcaaacagctaggaagtggaccggtggtaaagctccaaggaagcaattaggcacgaatgccgcccgcatgaatgctcctgtgatcggcggagtgataaaaactcacacgattcacgtcacgaaccttgcatttgagagaga

SEQ ID NO: 207202 - DNA, 392 bp, Gossypium hirsutum
  unsure (1)..(392): unsure at all n locations
ggaaggttcaaggccactgatgcaagccgacttcgtgctgaatacaaccgacttgtagagggcttggcattgagaggaaacctacctatcactgacaactggctttcaaatcctgcactgcctgatgatattctaaaggaagctgtgcctggaaatatccgtcgagctgagcactttttgcatgtcctacgtagattagttcagtatctaaggggccgactagacaccgagaatgttgagaaagaaagcccagttagctttgttgcatctatcaatagtcatgccggaattgaccagaaaacattgaagntctgntatgaccgtctgcattcactcatgttgactctagaaattactgacacagatgaggtcttacacatncaaacaatatg

SEQ ID NO: 207203 - DNA, 314 bp, Gossypium hirsutum
tcgatatcggcaagagagccaaacatctcttgaccaaagattatacgtcccagcggacggggacggcttccacttatactggcgctggagtggtcatcacatcaacttctctaaagaaaggaggactttctactggggatgttgctgccctatacacgtacaagaacactcaccttgatgtcaaagtcgataccgactctaatatctcgacgaccatgacattcactgatattcttccctccactaagactattgcgtcatctaacgcgcctgattataacgctggccagctggacgttcagcattttcatcac

SEQ ID NO: 207204 - DNA, 340 bp, Gossypium hirsutum
cccacgcgtccgatcataataaattgcaaaatttaagtctttccccaaactgaaaattgaagcttgagaaaccaggaatggaatcagaactgactgtaataaagttaaagccaatagaagcaaccccagaaagcttcaaagaattcggacaagtcattgaagcatccccagacggagcagaattcggtccgactgatgctcagctagacctttccaaaggaattcccaggttttacatcatgaaccttcagaaccggccgctcaagttttcaacgattacgcatcatgccagtgtgacacaatgccttggatctatagggggtcatgtttggtatctcgg

SEQ ID NO: 207205 - DNA, 436 bp, Gossypium hirsutum
cccacgcgtccggtcagcaattaataaccaggttgttcccaaaaaccagttttctggttttggtccccaacggatccaaggagcgcagcatacgggaatgcatccacagcaaatgccagctaaccagatggcttccatgcatcctcaacaaatgtacgggaaccaaatgggagcatatggctatggagagttgcagcatatacatcagaaaatggatgggctatccatcagagatgataatagcctgagaaactcttactaccaggttcccactgtatcttatgttccacctgggaaggcttcgaaagcagaggataagctgcttggggaccttcttgacatggcaagaattaaatcaataaacaccaccccaaaaacctgggtagcttgtggaacctggggttggttttttttttttcctttaagcttttaattt

SEQ ID NO: 207206 - DNA, 405 bp, Gossypium hirsutum
aaagatggcaagggaattggcattgaaagaggggcttatggttggaatatcatcgggggccaacactgttgcagcactcagacttgcaagaatgcctgagaacaaaggcaaattgattgtgactgttcatccacgttttggagagcgttacttgtcatcggtcctgttccaagaactaaggaatgaagctgaaaacatgcagccagttgcagtcgactaaatgccttttcaggggacatgttaggaagctccctcgggaaacaaaagccctgtctgttaataccaaatgtttccaccgaaacattggtatccattgttattatgaatccgctgtgcacccattcgttttagtttcaatgtttaactctgtctgaaatgaaatcagtaataattggaatttgcatt

SEQ ID NO: 207207 - DNA, 390 bp, Gossypium hirsutum
cccacgcgtccgcccacgcgtccggagaacatctcaagcaactcctcaactctcagttctgccatcctattctggttcgcctaggatggcatgatgctggtacctacaacaagaacattgaggaatggccacaaaggggtggagcgaatggaagtcttaggtttgaagtagagctaaaacatgccgccaatgctggcctagtgaatgcattgagtcttattcagcctatcaaggacaagtactctgatgtaacttttgctgactcgttccagttggctagtgctactgctattgaggaggctggaggacccaaaattcccatgaaatatgtgaaggggtgatgtctccggtcctaatgagtgtcctgaggagggcaggctacctgatgct

SEQ ID NO: 207208 - DNA, 436 bp, Gossypium hirsutum
  unsure (1)..(436): unsure at all n locations
gcaaaaggagtgtctcttttgttacccactgatgtggttatcgccgacaaggttgcccctgaggcaaacagcaagatcgtgccagcatctgctatccctgatggctggatgggattggatattggacctgattctgtcaagacattcaatgaagctttggatactacccaaaccatcatctggaatggaccaatgggagcgtttgaatttgagaaatttgcagttggaactgaggctattgcaaagaagctagctgaacttagtggcaagggagtgacaacaatcattggaggtggagactctcctgctgctgtataaaacgttggagttgctgatgtcatgagccacatatcaactggtggtggtgccagtttagaatcgttggaagggaaggagcttncacgtgtgattgccctgtatgaggccgttccggctg

SEQ ID NO: 207209 - DNA, 365 bp, Gossypium hirsutum
caaagccctaagtatatgattgttgcctgctcggactctagtgtctgcccatctcatgtgctggacatgcaacctggtgaagcttttgtggtccgtaatgttgctaacatggtgccaccatatgaccagattaaatatgctggcattgcatctgctattgaatatgcagttttgcatctcaaggtacaagaaattgtggtgattggacacagtgcctgtggtggaatcaaggggcttatgtctttcccatttgatggaaacaactcaactgatttcatagaggattgcgttaagattggaatccctgctaagaccaaggtgctagctgaacatggtggtgagcctttgggagtccaatgtacaca

SEQ ID NO: 207210 - DNA, 420 bp, Gossypium hirsutum
  unsure (1)..(420): unsure at all n locations
cccacgcgtncgcccacgcgtncgcggacgcgtggggttccgtcggtggcgggtcatttgagcggcggaatgtcactggacttgccggcgaaaaattatttgataccggtggactcatcgggaacgtattgcttggcgtttgcccccacgacgtcgtctttgtctataattgggaacgtacaacagcaagggacacgtgtgagcttcgatttggctaataataaggtcgggttctctcctcataaatgttaagacagtaaataaatagcttattggtgataatttactaatttacctatccatttcttctctggtaaaagaaagtgaagaatataccgaagtttgcttggttgtaatatggatgggaaatttatatttaagggtaaattttaccatttaggccgacctttttacattggg

SEQ ID NO: 207211 - DNA, 414 bp, Gossypium hirsutum
tcattgttgataatttgaaactgagacgaagacttcaatggcgcttccagtcggcgataccgcgtatctcaaggacatcgataaagctcgtcgagacgttcgcgctctcatcgccttgaagaattgcgctcctatcatgcttcgcttagcgtggcacgatgctgggacgcatgacgtgagcactaaaaccggaggtccaaatggctctataaggaatgaagaagagttcactcatggcgccaatagcggcttgaaaatcgctattgactctcgtgaggaagtgaaggctaaacatcctaaaattacgtatgcagacctataccagcttgctcgtgttgttgctggtgaagtaactggacgtcctaccattgactttgtacctggaagaaaagattcaaacatttgccccaggga

SEQ ID NO: 207212 - DNA, 341 bp, Gossypium hirsutum
ctaagttcaaatgcggtggtgtttgtttgggagttgggtttcaacatactttaggagatggcacatcggctattcatttcatcaatagttgggcagaaaccgcccgaggcgtcccgcctgccattgcaccattcatcgatcgaactcttcttcgtgctcgagtcccaccaatgcctaaattccaccatcttgaatatgagccttatactccgttgaaggctgttgaatctgatcttaagccatgcactgtctccacatttaagcttacagttgatcaattgaatgccctgaaagccaaagctgctgcaaacagtagtggtacatagtacagtagttacaac

SEQ ID NO: 207213 - DNA, 296 bp, Gossypium hirsutum
gccttggtatggtattgagcaagagtacactcttcttcaaaaggatactacgtggcctcttggatggcccgttggaggattccctggaccacatggtccgtactactgtggtgaaggtgctgacaagtcctttggtaaggacatcgtggactcccactacaaggcttggctttatgctggcgtgaacatcagaggaatcaacggtgaatttatgcctgagcaatggagaattccaagttgatccatctgttggaacatctgcaggtgatcaaatatggattgcacgatacatacta

SEQ ID NO: 207214 - DNA, 299 bp, Gossypium hirsutum
cggctactgaatcaccaaacgagttaaggaaaagagagacgagtttcaccgaaccatggggtccatccccaatcctggcgagttgaccgagttaacccatccgagtttcgatgagttccagcgtcaaacgtctctgatgaccagctgtactctcctctggaaagaactgtcggatcacataaattcacttgagcagaacctgatgaagcagtcggagaccttgaaacgcataatcgaggcactggactcggagaccaaggcttcactcgactcactcaagaagcgggaactcagtatcg

SEQ ID NO: 207215 - DNA, 386 bp, Gossypium hirsutum
gagcctacccacgtactacgatggacgctactggaccatgtggaagctggctatgttcgggggcaccgactcggctcacgtattgaaggagcttgaggaatgcaagaaggaataccccaatgcattcattagaatcattggcttcgacaacgtgcgtcaagtgcagtgcattagtttcattgcctacaagcctccaggcttctaagctttttataaactttgtctctccattcgtttgaatttgtactcagaaaaaccatgttctttactttcgcttttctctttctttgagttattggcctttgcttctcgatttctgggttttaatcctttttggattttcattggaagaaaggctgagaactaatgaataaaagttgcgcttt

SEQ ID NO: 207216 - DNA, 437 bp, Gossypium hirsutum
cactcaccattgttccaagtttgttgtaaaccaagctagaaccagcagccggcatggccgggttagcagcctccaccgctgccgcctcccttggcgtctctgaaatgctcggtaaccctctgaatttcagtggtggagctaggtcatcggctccaacaccatccaactcatccattttcaagaccgttgctcttttctccaagaagaaggccgctcctccaaagcccaaggctgctgctgtcgccccggccgatgaagagctggctaagtggtaccgtccggacagaaggatcttcttgcctgaaggtctgttagacacatcggacatcccagagtacttgaacggagaagttcccggagactatggataccatccgcttggtctgagcaagaagccaaaagactttgcaaaatatcaagcatatgagttgatacac

SEQ ID NO: 207217 - DNA, 320 bp, Gossypium hirsutum
caaaatcaactgcttcacaatggcctctacaaccatggctctttcttcccgatcattcgccggtaaggcagtgaagttctccccttccacccctgaaatccagggaactggccgcgcttccatgaggaaaaccaccaagcctgttccttctggtagcccatggtacggtcctgaccgagttttgtacttgggtccactttccggtgagccaccatcttacttgaccggtgagttccctggtgactatggttgggacactgctggactctcagctgatcccgagacctttgctaggaaccgtgagctcgaagtcattcact

SEQ ID NO: 207218 - DNA, 362 bp, Gossypium hirsutum
  unsure (1)..(362): unsure at all n locations
cccacgcgtccgctctcttcaaaaaagctttccccagagagtggaaaggaacaaaaaatcttgtactcaaagaaaaggaaagagagaaagatcttccttagcgaaactatttgcaggaaaatcacatagaaaaacgatgagttattacaaccaacaacagcctccagttggtgttcctgctcctcaaggttatccaccggaaggatatccgaaggatgcttatccaccaccgggatatcctccacaaggatatcctcaaggttatcctcctcaaggatatgctcctccttacgcccctcaatatcctgctcagncgtcctcctaagaaacagcaaagaactggttcctaaaaaggctggttg

SEQ ID NO: 207219 - DNA, 336 bp, Gossypium hirsutum
  unsure (1)..(336): unsure at all n locations
cccacgcgtncggcggctcaggctcagcttaatggaacagtgcattgtgattaccctcggtggattgaggtcctctgccatgatatcaatgtccacattccacatcatgtatcttcaaggataccaagttataatctacgagcagcacataagtctattcaagagaactggggaccgtatctgaacgaggctacatggaattggcgtctgatgaagacgataatgacagtgtgccatgtttacgacagggagcaaaattacatcggctttgatgaacttgcacctaatgaagcttctccaatcacattcctgaaaagagtaatgcctgattatgct

SEQ ID NO: 207220 - DNA, 444 bp, Gossypium hirsutum
cccacgcgtccgctttcacaccacattcttcagtgcaggcaccatggcagcttcctcagctttgttcacccctatcttctccaccgtccaaaagaagaatggcattgtcacccccttcagcatctcattccacggccttagacccctaagcaagagcaaatcttcatccaacgccatctccttctcaagaaactcagctgctagtgctaggcttgcaatcaaagcagagctgagcacccaagttgtgataagcgtcagcactgctctctcccttttcttgggtagatttgtgttcttcaacttccaaagagagaacgttgccaagcaagtgcctgagcaaaatgggttgacccactttgaggctggggacacacgagccaaggagtatgttagccttctcaagtccaacgaccctgtgggattcaacatcgttgatgttcttgc

SEQ ID NO: 207221 - DNA, 290 bp, Gossypium hirsutum
gctcgtttcgccaaatggcgtactgttgtgagcattccaaatggtccatctgccttggcagtgaaagaagcagcttggggacttgctcgctatgccgacatttctcaagacagtggactggtcccgattgtggagccggaaatcttgcttgatggtgaccatggaatcgataggactttcgaagtaacgcacaaagcttgggctgatgttttcttctaccttgctgagaacaactgcatgtttgagggcatccttctcaagcccagcatggtcactcctggtgctgaatg

SEQ ID NO: 207222 - DNA, 359 bp, Gossypium hirsutum
  unsure (1)..(359): unsure at all n locations
aaatacaaatacccattttcaccaccatcaaaccacatcccacagacatgggtgcccacgaggaagaagccggaggtgaagagtacttgtttaagatcgtgctgatcggtgactcagctgtgggaaaatcgaaccttttgtcacgttttgctaggaacgagttcgacaataactcaaaggcaactattggagtagagttccaaacgcaatgcgtggaaattgatgggaaagaagttaaagcacacatctgggacactgctggtcaagaaaggcttcgagctgttacttctgcttactatagaggagcttgtggngctcttattgcttatgatattactaggaggagtagctttgacagc

SEQ ID NO: 207223 - DNA, 308 bp, Gossypium hirsutum
accaccaccatagtccaacattttcataacaatggctgccatcacaaacgccgctgctacagcctccttcatggggacactcttgcccgacgtctacacaagttcagggagattcgtcgccaggtttggctttggcggcaaaaaagcagctcccaagaaagtctcgaaacgaaccccagaccgccctctatggtacccaggagcagtggcgcctgattggctcgatggaagtttggtgggtgattacgagttcgacccgttcgggttagggaaaccggcggagtacttgcaatatgacatggattctt

SEQ ID NO: 207224 - DNA, 293 bp, Gossypium hirsutum
  unsure (1)..(293): unsure at all n locations
ncacaaactcccatcacccgagatcatctttccccttcaaaatggcggctgcggccatggggctctcttccccatctttcgccggaaaggccgtcaagctctctccttccgcccctaaaatccaaggcaatggccgcgcttccatgaggaaaaccgctaccaaggctgctccctttggaagtccatggtacggtcctgaccgcgtcttgtacttgggtccactatctggtgagcctccatcttacttgaccggagaattacctggtgactacggctgggacactgctggactc

SEQ ID NO: 207225 - DNA, 359 bp, Gossypium hirsutum
cccacgcgtccggtgagactcttttgtatacctgtagcatatagtaatagtaagcagtaagagcaatggcctcctccatgatctcatcggcaaccattgccaccgtgaaccgctcctccccggcacaggccaacatggtggcccccttcaccggcctcaaatctgcctctgctttcccagtcaccaggaaggccaacaacgacatcacttctcttgcaagcaacggtgggagagtgcaatgcatgcacgtgtggccgcctcttgggaagaagaagttcgagactctctcatacctgcccgatcttactcccgtacagttggctaaagaagtagattaccttcttcgctctaaatggatt

SEQ ID NO: 207226 - DNA, 327 bp, Gossypium hirsutum
gtctgaaatcttggattactaattggtgggatactaggcaatccgaaacttttttgaatgaggttcaagaagagagtattctagaacaattcatagaagtagaggaactcttcctgttggacgaaatgataaaagaatacccggaaacacatctacaaaagcttcgcataggaatccaaaaagaaacgatccacttcatcaagctgcacaatgaggatcatatccatacgattttgcacttctcgaccaatctaatctgtttcgttattataagagcgtattctatcttggggaatgaaaaacttcttattttaactcttggggtta

SEQ ID NO: 207227 - DNA, 442 bp, Gossypium hirsutum
cagtgagactcttttgtataactgtagcatatcgtactagtaagcagtaagggcaatggggggctccatcatctcatcggcaaccattgccaccgtgaactgctcctccccggcacaggccaacatggtggcccccttcaccggcctcaagtctgcctctgctttcccagtcactaggaaggccaacaacgacatcacttctcttgcaagcaatggtgggagagtgcaatgcatgcacgcgtggcctcctcttgggaagaagaagttcgagacactctcatacctcccccatcttacacccgtacagttggttaaggaagtagattaccttcttcgctctaaatggattccttgcttggaattcgaattagaggagggattcgtgcaccgtaagtactcgagcttacccacgtactacgatggacgctactggaccatgtgg

SEQ ID NO: 207228 - DNA, 327 bp, Gossypium hirsutum
ttggcttctaaaagcagtagtcctatgtggtatgctattaggcgtgcatccgctcatataggcatgctatcaagctactctccgcttgtgaaatatacacctcaatggaaatggctcgaggaagaattaaacagggttgacaggaagaagaccccatggctcattgttcttgtgcatgttccgatctacaacagtaacgaagcacatttcatggaaggtgaaagtatgcgagcagcgttcgaagaatggttcatccatcacaaagttgatgtaatctttgctggtcatgtccatgcttatgaaagatcctatcgaatctcaaatata

SEQ ID NO: 207229 - DNA, 440 bp, Gossypium hirsutum
ctgccttgtgtgaagcaggagttatctatgttatgacccatgattccattggtcttggggaagatggaccaacccaccagccaattgaacacttggcaagcttccgtgcaatgcctaatgttttgatgcttcgtccagctgatggaaatgaaacagctggtgcatataaggttgctgttctgaacaggaagagaccttctattcttgccctctctaggcaaaagctgccccaacttcctggaacttccattgagggagttgaaaaaggtggctacattgtttcagacaattcgtctggcaacaatcccaatgtaattctgattggaactggttctgagttggagattgctgctaaagctgcagatgaactaaggaaggaaggcaagaccgttagcggcgtctcctttgcttcttgggagctctttgatgagcaatcagat

SEQ ID NO: 207230 - DNA, 439 bp, Gossypium hirsutum
ttttgcacttaaatctcttttgatggcagatgctattcgattattatcatggccgtcgtcgtctttaattcattcgctgcgcttctcttcgccttcactgctcaccactttccacttcgcttcgaattatccactatcgtctcttggaccaaccaatcagaattcggataagattttttcttattcttcttctattggtcttgctccgcttgctctgattcccagaaaaccatcgctctctttcaaggtgcatgcaacagtcgaagaaactgagcagccaaaatggtgggaaaggaatgcgggaccaaatatgattgatattcattctacaaaagaatttatcagtgccttaagtgaagctggggatagattagttattggaaattttatggaacttgggtgcttcctgcagagcattatttcccaagctctgcagaac

SEQ ID NO: 207231 - DNA, 364 bp, Gossypium hirsutum
ccacgcgttcgcccacgcgtccgcaacgacatcacttctcttgcaagcaacggtgggagagtgcaatgcatgcacgtgtggccgcctcttgggaagaagaagttcgagactctctcatacctgccccatcttactcccgtacagttggctaaggaagtagattaccttcttcgctctaaatggattccttgcttggaattcgaattagaggagggattcgtgcaccgtaagtactcgagcttacccacgtactacgatggacgctactggaccatgtggaaactgcccatgttcgggtgcaccgactcggctcaagtgttgaaggagcttgaggaatgcaagaaagaatacccccatgcattca

SEQ ID NO: 207232 - DNA, 433 bp, Gossypium hirsutum
  unsure (1)..(433): unsure at all n locations
ccaagatgcacacagagatgctcagctacagcatacaagaaaccatgcatgttcttctgccggaagtgttgtgccaagtgcttgtgtgtgcctccaggcacttacggcaacaaacaatcttgcccttgctacaataattggaagaccaagagaggaggccccaaatgcccttagatccctaactatatctatgttgttctctagttaaagtgcttaattatccaattataggccatcgatcttcttcttttttccctaaatgatggtaaattgtactagtatttncttttaaaaggaagtatgtgctttgcatttaaaaacttggctttttgggtaaaggtatctaaaaagaatggaaagtggtatgggttaccttttttgtaaacgcaactaatatgaaaaatgaattagtaaaaatacattttctctattt

SEQ ID NO: 207233 - DNA, 440 bp, Gossypium hirsutum
  unsure (1)..(440): unsure at all n locations
cccagcgtncggcggnagatagtaagcaaagaagataatttctatttcaaaccactcatgcgttttaaccgctaaaacaccaaaaaccaggggaagaagaagtaggaaatgcccaccttgaatttatacaccaacgtacctgtggacgccgtgaccacctctgacattcttaaggacgccaccaaagctgttgtcaaaatcatcggcaaacctgaatcttacgtgatgattttggttaatggcggagttcccatggcatttgctgggacggaggcccctgctgcttatggagaattgatttctattgggggccttggaccttctgttaatgccaaattgagttcaactgtcgctgatattcttcataccaagctctcaattgatagctcccgcttctacatcaaattctatgatgttcagcggccattctttggatttaa

SEQ ID NO: 207234 - DNA, 307 bp, Gossypium hirsutum
  unsure (1)..(307): unsure at all n locations
nccacgcgtncgatggccgncaacacactaatgagctgtggcatatccaccacacttcctgggcttctttcctcatcaaagtccaccttcagtggcgccgccgtatcgttgcctagtgctgttggtaccaacgttggccaccgcgttagcatgtcagctgactggatgcctggtcaacctagaccaccttaccttgatgggtcagcaccaggtgactttgggtttgacccactaagactaggtgaggtccctgagaaccttgagaggtacaaagaatctgacttgattcactgcagatgggctatgc

SEQ ID NO: 207235 - DNA, 384 bp, Gossypium hirsutum
aggattttcaatccattgatctttgatttccatttagaggttaattgggtcatatcttatgttggagaagggcgttcgtatttaggttctggtaagaggaaaagccatgagggtatgataaagcttggtttcagcctagtaaaagggaaagctaatcatcctatggaggattatcatgtcggtaagttcatgcagattctatagcatgagttagggcttttttctatctacgatggtcatttggtagatattatatcatcttacctaaagaagcactcgcttgccaatatcctaaagaaagtgggatgtgccatatcattttcgaatggcttgcttttattatttttaaaacatcatatgcttacattttctcacttattattg

SEQ ID NO: 207236 - DNA, 323 bp, Gossypium hirsutum
gcgagacaaaaatggcgacttcagccatgtcggaaaaacgggtcgtcctgctctgcggcgactatgccgaggactatgaggttatggtccctttccaggctctgttggcttatggtatatcagtggacgctgctcgtcccggcaagaaggccggcgaaacttgccgcaccgctattcatcaactttccggccatcagacctataccgagatccgtggtcacaatttcacactaaatgcatcatttgaagatatagaccatactaaatatgatgcgttagttatagccggaggacgagctcctgaatatcttgctatggatgca

SEQ ID NO: 207237 - DNA, 438 bp, Gossypium hirsutum
  unsure (1)..(438): unsure at all n locations
cccacgcgtncgcaaacatcaaagtgtaaagcatttgagcattaaaatcatacatgacatagctttttacatgtcatcttcaacatcttcactgcaatggcaaccatgctctcactctctccaaatcctcccatcacaactttaccctctcttcgttccagtttcaagggaaatctgaagaatttaaaaccaaacccttttcacattattcgtatcaggaccaagcagcaaggggtagaggcacgaaaggggacaccgtctttagtggttgtgaaccaagcagcaacaacccaagtgtcggttacagcttctaatatgacgcttcggttggacaaccttggacctcagcctgggtcaaagaaagaaaaggaagagaaaggggagaggaatatcggctggacaaagtgggagctgtgggcttggaatgaggggtcaaaa

SEQ ID NO: 207238 - DNA, 440 bp, Gossypium hirsutum
catcaagcaaaatcttatagccgctccttttcgcgctttctctctctctctgaaagtttcagctttagagcctctggcttcctcttctccttctttttgcttaccagataatgtaaaagaatataacaagcttttcccatttataagcccaaaaggagcctttctttcttgaccttgaaaaagaatgactttgagtaggttctggcgttggcttcttatccacattgctttgtttttaagctcgcgttatgctgaggatccactcgctttctatgctctcgaggacacttacatcactgcttctcctttgcgtgatccccaacaggttattgctatagataacacgttccctggccctactatcaacttaactaccaacaacaatcgctgcgttaatgttggaaacaaattggacgaaagattacttatgcattggtctg

SEQ ID NO: 207239 - DNA, 444 bp, Gossypium hirsutum
gctgctcttaccggttctctatattatgtggctgcctctccgaaagatcctacttacgtaggtgcaccagttcaacgatccggttctgctcgtgaagatctgaaaaagctattcgcagcctggtatgagaggagacaaatgaaaaagatctactctccccttttggaaggaatattggccctttaccttggatttgaatggatcgagacaaacaacattcttgcacctattataacacatggtatatactccgccgttattctgggacatggtctttggaagatacatgaccaccggagaaggctacgccagaggattcaacagcttaaatcagaaggaaagaactcaaccaaactatgaagaagctgctgacgcgtaaaaaaaaatcaaggcatggaggaattttgtatatcgcacacgagtctagtgaaaagtagaaataat

SEQ ID NO: 207240 - DNA, 383 bp, Gossypium hirsutum
gaaggacgttgctgaattcattgagaggcgtgatgcgtatcctagtgacgcagagctcatgtttctcactgacggtgccagcaaacgtgtgatgcacatcttgaattgtcttatccgtggtcaaggggatggcgccttggttcctgtatcacagtatccactttactcagatacaatatccgtcttcggcgattcactcgttccttactacctacaagagactgcaaactgtgggctgtacgtaaacaatcttcaggaatcaggtgcacacgctcgatcaaacgaataactgctagaagaatagtcattattaaccctgggaaccctactggtcacggaatcagtgaacctaattttaaaaaaatcttgaacttctgttacca

SEQ ID NO: 207241 - DNA, 349 bp, Gossypium hirsutum
gaaaggaaaaataatcccatcatcatcaacaacagcaatgcttcacattttcgggcttttgtgccttatcttctcttccaccaatgtcctcgcccaagacttttgtgttgcgaacacggcttcgggcattgttaccccatcaggttacccttgcataatggaagcaaatgtaacctccgacgacttcgctttttcgggtctcggtctcccacgtaatacgtcgaacatcataagtgcagctgtgacaccagcattcgttggtcaatacccagccgtcaacggactatgcctgttcgccgcacggctggactttgcttctggtggtgtaatcccaatgcacactcaccct

SEQ ID NO: 207242 - DNA, 408 bp, Gossypium hirsutum
  unsure (1)..(408): unsure at all n locations
ntncggaaaatcaccattacaagtcccaaagaagacccccgctaattctaaaagaaagaaccagagggttctttctctttagtttacgtttattgtccttttggaatttttgatactaaaaaaaggaagcaacgaagaagggaaatggagggcaaagaagaggatgttagattgggagccaacaagttcacagagaggcaaccaattgggaccgcggctcagagtcaagatgacgggaaagactacactgaaccaccaccggctccatttttcgagcctggcgagttaacctcatggtctttttatagggctgggattgccgagtttgtggcgactttccttttcttgtatatcactattttgactgttatgggagtcgtaaggaaaaaataagtgcccaactgttgg

SEQ ID NO: 207243 - DNA, 350 bp, Gossypium hirsutum
  unsure (1)..(350): unsure at all n locations
cccacgcgtccggtcgttgcgctaaaacacaaacatggagcttgtgcagctctggtaaatccttcatcagcagaacctcttgtctggccagcaactttaaagttcattaccgagcttaatgaagaggcaaaatcactattagaacaggccttaatggaggcaaaccgggaaagggaaaagaacatcttaaagggaacagcttactcacttncatcaccctcacattctgactcagggttagatgacagcgcttctgaggctagcgatactgaagtatgctgtatatgctttgagcagctctgcactattgaagttcaagactgtggccaccagatgtgtgcacaatgcac

SEQ ID NO: 207244 - DNA, 348 bp, Gossypium hirsutum
cggacgcgtgggcggacgcgtgggttccggtgagccaccatcttacttgagcggtgagttgcctggtgactatggttgggacactgctggactctcagctgatcccgagacctttgctaggaaccgtgagctcgaagtcattcactgcagatgggccatgttgggagctcttgggtgatttccctgagctgttggctaggaacggcgtcaagttcggtgaagctgtatggttcaaggacgcggctcaaatcttcagtgagggtggacttgactacttgggtaaaccaagcttgatccatgctcaaagcattttggccatctgggcttgccaagttatcttgatgggag

SEQ ID NO: 207245 - DNA, 409 bp, Gossypium hirsutum
cttctattctactaccacttccacacaacaacagcaatggcaattagaaaaccatccaaacggcctcaaaccgcagttctgaagcaaatcctgaagaaatgttcaagcttaggcaggaaacatggatatgacgaagatgggctcccacttgacgtaccaaaaggtcactttgccgtttacgttggtgaaaacagaaacagatacatcgtccctatctcattcttgacccaccctgagttccaatgtttgcttcgacgagcggaggaagagtttgggtttaaccatgatatgggccttaccatcccttgtgaagaagctgcttttcgctctcttgcatctatgcttaaatgaaaatgggaaaaaagaatttattgaggtgcgaaatgaagggggtcttgcctttcatttt

SEQ ID NO: 207246 - DNA, 295 bp, Gossypium hirsutum
cccacgcgtccgatcgagtaacgaaccaagccaacctaaagccttaggcaccatggcaacctgtgctattcggcaatgtgatatcgttggccagaccgctttgaagcagttccatgagctcttacgcaaagacggagctttcgatagcgggcgcgttaccatgcgcagaactgcgaaacgtgcccgtaccagcatttggtaccgtcctgaccggccaacgttcttgggtccattctcataccaaatgccatgatacctgacaggtgacattcgtggtgactatgggtgggacact

SEQ ID NO: 207247 - DNA, 390 bp, Gossypium hirsutum
gccacgcgtcctctcacaccatccgtgatgtccaccaaataccgtctatatagaatgcatgagggatactataacttatgttccaatactatcgtacctgcataacacatatgtataacatgcacaatcaattatacaacatcaatatagttacaaagtatatgcaaatgattgaggctgccaaagaaatcgacgaagacacacagaccgaccaggaccgatggaagggtcttgcttatgatatctccgatgaccaacaagacattaccagatggaaaggtgtgggcgactcattgatgcaagctcccatgaacgatggtactcactatgctgtcatgatctcctatgaccacattagccaaggccttggcacattctacttggacaaca

SEQ ID NO: 207248 - DNA, 439 bp, Gossypium hirsutum
ccgacatcatctttccccttcagaatggcggctgcaaccatggctctctgttccccatcgtgcgccggaaaggccgtcaagctctctccttccgcccctaaaatccaaggcaatggccgcgtttccatgaggaaaaccgctaccaaggctgctccctctggaagtccatggtacggtcctgaccgagtctcgtacttgcgtccactatctggtgagcctccatcttacttgccggagaattccctggtgactacggttgggacactgctggactctcggcggacccagagacatttgccaggaaccgtgagctcgaagtcatccactgtacgtgggctatgttgcgtgctcttgcgcggttttccctgagcttttggctaggaatggagtcaaattccgtgaggctgcgtggttcaaggccgcatctcacatcttcagc

SEQ ID NO: 207249 - DNA, 337 bp, Gossypium hirsutum
cccacgcgttcgggcaaaaccagtttccattgaagcgtggaacccaaatggtgaatacagaggtattagcaccaaacctatgcctggaactacatggatcaacctcttaatcgagcaagattgccgtgtagaaatatgtactgagaagaaaacgattttgtccgttgaggatatcatttctttgattgacaataaatgacatggggtgattgcacagttgactgaagactggggggagactctatttgcacctttaagcatcgcaggaggaaaagcatttagccacatggctcttgactacaacaatctggatgatcatgctgacaacatgtatggt

SEQ ID NO: 207250 - DNA, 341 bp, Gossypium hirsutum
ctttcttacaattttaccattttcttatcttcttcttcttcttcttgagacttgcctagaagatcactgagaaacaaatacagatagaaaaaatggcggcctcaataagtggaattggaattgggttaggtctttcttgttcttccaacctttctaaatcacttcattcttcacaatcctctggttttcgtgttaagatgactgtttctgttgaagataaaaagaagaattatacccttcaaaaatctgaagaagctttcaatgctgccaagaatttgatgcctggaggtgtaaattctcctgtccgtgcctttaaaaatccgttggtggacaaaccgatt

SEQ ID NO: 207251 - DNA, 248 bp, Gossypium hirsutum
  unsure (1)..(248): unsure at all n locations
gctnngacgcctgcntcgactctggatatattcatcaagccttgcacaatgtccaggatcaccggtgccgctgtcactatcccatctttcaccggccttaaagccggtgcaaccgcagctaaagttagcgccacagacaacgatgcagcctctccagtcccaaggggcagcataaaggcctccctcaaagacgttggtgttgctgatggggcaactgctgcaagcgtaatccttgccagcaatgccat

SEQ ID NO: 207252 - DNA, 428 bp, Gossypium hirsutum
gcaatggagagcaacccgtttactggaaaagagcatcaagtatggatgaggtgcttcgggaggcagatgtgataagtcttcacccggtcttggataaaaccacctatcatctgatcaacaaagaaagccttgcaacaatgaagaaggaagcaatacttgtaaactgtagcaggggcccggtgattgatgaagtagctcttgttgagcatctgaagcaaaatcctatgttccgagttggtcttgatgtctttgaggatgaacctttcatgaaacctgggcttgctgagatgaagaatgctgtcatcgtaccacacattgcttctgcttccaagtggactcgtgagggaatggcaacgttagctgctctaaacgtcttgggcaacatcaaaggatatccaatttggggtgattcaaatcgcgtcgaacca

SEQ ID NO: 207253 - DNA, 450 bp, Gossypium hirsutum
cgatttttgtattaagagtcgccctttggtgtttttctaattcaatcagtgaggtgaagaaaaatgtcttgctgtggtggaaactgcggttgcggctccggttgcaagtgcggcggcggcggcggctgcggctgcggcggttgcaagatgtaccctgagatgaactttgctgagcaaaccacaactgagacacttgttcttggcgtggcaccccggaaagtgaactttgatggaagctgaaatggaaactggggctgaaaatggctgcaaatgtggagataactgcacttgcaacccttgcaattgtaaatgaggggaaaaaaaaaaccgaagcatattatggaagctgatctaaataatatatgatgtatttgggtttttattattagaataaagcagccatggttcattaggtgttttgcttcttgtatccatggttgcttggtatgt

SEQ ID NO: 207254 - DNA, 431 bp, Gossypium hirsutum
ggaaaggctccgtattccagtgttataacgcatggatttgtattggatgagaagggtttagagatgagcaaatctttggggaatgttgtacatcctcataccattattgagggagggaagaaccagaaggaagcacctggctatggagctgatatcatgagactctgggtttctagtgtagattatactggtgatgtgatgattggggccacagatcctccgtcaaatatctgatgtatataggaagctgagaggaacattgagatatctccttgggaatctgcatgactggaaggttgaaaatgctgtctcttaccaggaactgcccatgattgatcggcatgcactgtttcagcttgaaaatgttgtaaagaatataagggagggttatgaaaattatcagcttttcaaaatattccacatcatacaac

SEQ ID NO: 207255 - DNA, 432 bp, Gossypium hirsutum
cccacgcgtccgcccacgcgtccgcttacaaaagtggttgtgaaagactctttgatcctaaaggtaaaaacccttgctccatccctttcccttggtacttatgaactgccccatatgaaactactttttaactttgccttacagggcccttgcccaaactgtggtactgagaacgtctccttctttggcaccatactatcaatttccagtggtggaaccaccaacacccttaaatgttcaaagtaagtccaccattaaccataatctttgtcttttcacccttcacattgctgcaaaatttttaagttcccaactcttcttttcacttcagttgtgaaaccacgttggagtataatgcgaaaacgaggttgattacattgccagaaggaagccaagcttaattgcaggagaaagtacatccagagatcaaca

SEQ ID NO: 207256 - DNA, 259 bp, Gossypium hirsutum
caaaatcaactgcttcacaatggcctctacaaccatggctctttcttccccatcattcgccggtaaggcagtgaagttctccccttccacccctgaaatccagggaactggccgcgtttccatgaggaaaaccaccaagcctgttccttctggtagcccatggtacggtcctgaccgagttttgtacttgggtccactttccggcgagccaccatcttacttgaccggtgagttccctggtgactatggttgggacact

SEQ ID NO: 207257 - DNA, 341 bp, Gossypium hirsutum
gattaatctaaaacctctgtcatctgtccgtctctctgttttactccacaaccactatcacgaccattatggcttcggctactgtttctgtagccaaacccaaccttcagattcaggcaaaaggaaagggcgttggttttgcagatttctcaggcctacacaactcctctactagccttccctttgccaggaaaacctctgatgacttccattcactcgttgcttttcagacatctgctctaggaagcaataatggcgggtacaggaaagggatggcagaggcatagctaaaggtggctataaatggttttggtaggattgcagggatttcttaagatgct

SEQ ID NO: 207258 - DNA, 420 bp, Gossypium hirsutum
  unsure (1)..(420): unsure at all n locations
accgtccgtcttgaccagatcaatgagcccaagaggccttcagacaagccacttcggctcccacttcaggatgtctacaagattggtggcggtggaactgtacctgttggtcgtgttgagactggtgtccttaagcctggtatggttgtgacctttggcccctctggtctgaccactgaagttaagtctgttgagatgcaccatgaagccctctctgaggctctccccggtgacaatgttggattcaacgtcaagaacgttgctgttaaggatctcaaggatggtttcgttgcttcaaactcttaaggatgatcctgcaaaggaggctgccagcttcacctctcaggtcatcatcatgaaccaccctgngcagattggaaacggatatgccccagtccttgattgccatacctnccacat

SEQ ID NO: 207259 - DNA, 409 bp, Gossypium hirsutum
cgatacatgtatgggtgtagtgcccctgtcgcattattgatgggactaggaatgtggagtctcccaccatcaccacgttggttaattctcagagcggttcaaggtaaagggtctttacaagaactcaaagagaaggccatccttgccctaagcaaacttcggggtcgggctccgggtgatgcagcatctgagaaacaaatagaagataccctaatctcagtgaagtctgcctatatggaacaggaatctgaaggaaatatcttggaggtatttcagggaccaagtttgaaagccttcataattggtggaggtttagtcctttttcaacagataactggccaacccagtgttctgtattatgctggtccaattctacagagtgctggattctctgcagctgctgatgcta

SEQ ID NO: 207260 - DNA, 438 bp, Gossypium hirsutum
cccacgcgtccgctcagaacagctcaaaaaagcttccaacattttgaagaaacaaagaatcagaacatgtcgaaggaagtgagtgaagaaggggtgagccgaaaggactatgtggatcctccaccggcaccgctcatcgacgtggctgacatcaagctttggtctttttacagagctctcaccaccgaattcatcgctactctcctcttcctatacgtcaccatagccaccgtcatcggccacaagaaacaacacgatgcatgcgatggtgttggtcttttgggcattgcttgggcttttgggggcatgattttcattcttgtttactgcaccgccggtatctcaggtggtcacattaacccggcggtgacatttgggttggttttggctaagaaggtgtccttaataagggcggtggcttacatggtagctcaatgg

SEQ ID NO: 207261 - DNA, 444 bp, Gossypium hirsutum
aattgagctccatttccctagtaaacagagttctttttttcacagcaatggcagccatgaactccagtgttttggcatgcaacgatgctatctcaggcactggatcatctgagcttaatgccaagcttgcttcagcaccatcagttgcttccccagttatgtgcggtggtcacaagttgcctgtgatcagagcccagcaggctaaattttctgattccaaaggatcaggtgccagtgaaggaagaagagctgctatgctctacttggcagctggccttttcaccacagctgttgcttcttctgcaaatgctggggtcattgacgagtaccttgaaaagagcaaagctaacaaggaattgaatgacaagaagaggttggcaacaagtggagcaaacttttccagagcatacactgttcaatttggcacttgcaaagttcctgaga

SEQ ID NO: 207262 - DNA, 431 bp, Gossypium hirsutum
gtaaggcctgtctctggcctagtggctgcagattacttcgctcctggatattttgtgtggggagttctgattgctaacttggctcggattggatatgaggataaaaccatgtacatggctgcttacgattggagactctcatttcaaaacaccgaggtacgtgatcaaacactgagccgtattaagagtaatattgaactgttggttgctacaaatggagggagaaaagttgtagtcattccacattcgatgggagttctgtatttcctacactttatgaagtgggttgaagcacctgctccgatgggtggtggtggtgggccagattggtgttctaagcatattaaagcccgtgttaacattggtgggccatttctcggcgttccgaaagctattgctgggcttttctcggctgaagcaaaggatattgc

SEQ ID NO: 207263 - DNA, 437 bp, Gossypium hirsutum
cccacgcgtccgcccacgcgtccgcccacgcgtccggcctttgaattgaaaccctcaagatggcactaaaaaatggcctccacagcttccctctccaccgccgtagccaccacctctttcctccgcggccatccggcgccgaaaaccctaaactcccttcctttcaaccaatctcttttcgggctaaaaccccaacgaaatggccgtctcaccatggcagcatacaaggtgacactgttaacacccgaaggaccccaagaattcgtgtgccccgacgacgtatacatcgttgaccaagctgaggaagaaggcattgatcttccgttctcgtgtagggctgggtcttgttcttcgtgtgccggagtgattaagcaaggctccgtcgatcaatccgacggtaatttccttgatgatgaccagattgctgcaggttttgg

SEQ ID NO: 207264 - DNA, 359 bp, Gossypium hirsutum
cggcgagacgagccgtttatcattacgataggtgtcaagtggaagtgcagtgatgtatgcagctgaggcatcctaacagaccggtaattgacttgaaccaattctgattctctcttgcatactatcaaatggcagctactgcagcaatcaccactctcccccagttcagtgggttaagacccaaagtttctactgctccagttaggagcctggcagcagttcaaccaatgaggcgcaaggggaagggtgctctcggtgctcgatgtgatttcatcggatcccccacaaatttgataatggtgactacaacaaccctgatgctgtttgctgggaggtttgggttggctccatcagcaaac

SEQ ID NO: 207265 - DNA, 444 bp, Gossypium hirsutum
cccacgcgtccgcccacgcgtccgagaacatagcttgaaacttcccatctctcacttcttcagaaactaagagtcgaaaacgatggcgtatgctgctatgaaaccgaccaagcctggtttggaggaatcccaagagcaggttcacaaaatcaggatcactctctcctccaagaatgtgaaaaacctcgagaaagtttgtgctgacttggtccgtggtgccaaggataagagactgagggttaagggaccagtgagaatgcccaccaaggttcttcacatcaccacaaggaagtctccctgcggtgaaggtatttaattaacctggctggtgggggattttggaccctacctttatggaaaccttggttcttattttggaagcattccttgggaacctattatggttatgaatcccctggtttatactggaaatctgaattattc

SEQ ID NO: 207266 - DNA, 415 bp, Gossypium hirsutum
cggacgcgtgggtttcaagctcaagggttaaagcctaaaccctcctctcatttcttattcaatccacactctaacactgttgctgcttcatcatctaaagctttcaccacttttgcactcttcaaaccaaagaccaaagcagctcctaagaaggctgcacctaaaccaaagccaaaggttgaagatggaatctttggcacctctggagggattggttttaccaagcaaaatgagctctttgttggacgtgttgccatgattggctttgctgcatccttattaggtgaagcaataacagggaaaggaattctagcacagttgaacttagagacaggaattccaatttatgaagctgaaccccttcttctcttcttcattcttttcaccctcctcggagcaatcggagctttgggcg

SEQ ID NO: 207267 - DNA, 267 bp, Gossypium hirsutum
gctgattacaccctcaagctcctccacaggagaatccccccagctgtccctggaatcatgttcttgtctggcggacaatccgaggttgaagcaaccctcaacttgaacgcaatgaaccaatctccaaacccatggcacgtctcgttctcgtatgccagagctctccagaacacttgcttgaagacatggggaggcagacctgagaacgttaaggctgctcaggattcacttcttgtccgtgctaaggccaactcacttgctcagctc

SEQ ID NO: 207268 - DNA, 436 bp, Gossypium hirsutum
ctcaagcttgctttccaagttatctgatatcttccttttcttcccttttgaagcataggtgcaccaaaaacaacaatggctatccgcctgcctcgtatggttagttctaagaaggttcccaagggatactttgcagtttatgttggagaaagccagaagaggttcgtgataccggtatcattcttgaaccatccttcatttcaagatttgctagggaagtcagaagaagagtttggatatagtcatcctaccgggggtctcacaattccatgcaacgaagacacctttctcgaagttacctctcgcatgtattgatcgtgagatgattaacacaaaccagtcaatacaattttgtaaagcaaagatcactaatacatgtaaacacttttttctccatccattgtcttggggagctgatatataagtcaccccaagt

SEQ ID NO: 207269 - DNA, 365 bp, Gossypium hirsutum
cccacgcgtccggtatatttgtgcattgttggagtgtgggtttcttcctctctgtaaggggtgcttgagagaaagaggaagggtaaaaaactcggggttttatgagttttttgagtgatgaaggggagaaagacatagcttcatttaagtgggtttctcttgctaaaagcttttaagcgctgttttgttgttgggggttgggagctaaatggacactaaaggaagactcgttgctggttctcacaaccggaatgagtttgttctcatcaatgccgatgaggttgcaagaatgacatcttgtaaaaaattaaatgggcaaatttgccaaatccggggggatgaaatagagatatcctgtgatgggg

SEQ ID NO: 207270 - DNA, 414 bp, Gossypium hirsutum
agcaacattcgccattaattctccatatttcattgcaaagaacatcaccttcaagaacagaagcgaccattaccgccgtcaggtgcattatgaaagcaagcagtggcactgaggatatcagcagatgcagcagcctttatcggttgcaagtttattggagcacaagatactctttacgatcacattggcaggcactacttcaaacgctgctacatccaaagttcagtagatttcatattcggaaatgggctttgcctctataaacactgccacttgcatgccgtaaccaacagctatggagccttgacaagccaaaaaaaggaaagcatgcttgaggaaacaggcttctccttctgtaaatgcaagggcacggggtcgggcgccctctaccttggtcgggcttggggcgttttc

SEQ ID NO: 207271 - DNA, 437 bp, Gossypium hirsutum
cacggctttggtctccggcttctgcctcacttccaactccacctctccttctaactcactgcggcaacccacattgcggcggccgtctatcgtcgccaacctcaactcttccacttctcctcctactctcattcgaaatcaacccgttttcgcagcacctactcctttgctcactccttccaattggaaagaaaacatgggagaccagtcatacgaggaagccattgaagctctcaagaaactgctcaatgagaaaggagaactgaagagtgcagcgacggcaaaggtagagcaagtgacagctgagttgaagactgctgcttcttccgatgagtctgttgaccgcttgaaacaaggcttcatttacttcaagactgaaaaatacgaaaagaatcctgctctgtatggtgagcttgccaagggtcaaagcccaacgt

SEQ ID NO: 207272 - DNA, 309 bp, Gossypium hirsutum
gaaccagaaaccaaggcaatggcttctcttgcaaccttagctggtgttcaaccaacgaccatcaagggccttggtggcagctctctcaatggaaccaagctcttggtgaagtcaactcgccagagtttcaaacccaaaaactacagggctggtgctgtggtagcaaagtatggtgataagagtatatactttgatttggaggatattggcaacacaactgggcaatgggacttgtatggatccgatgcaccttcaccgtacaacccactccagagcaagttctttgagacatttgcagctccatttacc

SEQ ID NO: 207273 - DNA, 329 bp, Gossypium hirsutum
  unsure (1)..(329): unsure at all n locations
ccaccatcacccccaaaaaacaaagcaaattgtagaagatggcaacacaagcacttgtatcatcgtctcttacctactcagtggagactgcaaggcagattcttggagctaaacgacaaattgggccttcaaggaaaggatcctttgttgttaaggcagcttcgactccacccgttaagcaaggagctgatagacctttatggtttgcatctaaacaaagcctttcatacttggatggcagccttccaggtgattatggatttgaccccttgngactctcagaccctgaaggtccaggagggttcatcgagcctaaatggctaccctac

SEQ ID NO: 207274 - DNA, 428 bp, Gossypium hirsutum
cctttcctttccttttctctctctctagcaatggaggcgcgattgttatcacgcgcttctgttatcaccggcttacctcagctcaggccgaagctttcgccggggattgtcaacgtttcgtatgcttcggctaagccgatcggagccgtcggtgaaggcgggaacgtcatatggcggaggcaactaaggccctccttgctactcgaatgctcgtcggttagcaagcgagaggttctgaaaccggtttcggctgccgcgtcgtcaccggccgagggaggaagcgattccgccggggaggggaagatcgctccggttggattcttcgagaagtatcctgctcttgttaccggatttttcttcttcatgtggtacttcttgaatgtaatattcaacattctcaacaagaagatctacaattacttccctta

SEQ ID NO: 207275 - DNA, 380 bp, Gossypium hirsutum
  unsure (1)..(380): unsure at all n locations
gcacaagcaatggcatcgatgactggtttacgtggctgttcacaagctgcgttggaagggagtctccaactcagcggccaaactcggttgaacgttgctagcaccaacaggttggctgtggctagacccggttttaccgttagagctcaacaggtccctgccgagcctgaaactggacgcagagctgtgctgggtcttgttgctgctggtttggctactggctcctttgttcaagctgtgcttgctgatgcacgaagcatcaaggttggcccgcctccaccgncctccggtggattgcccggaactttgagttccgatgagccaagaaaccttgatctgccgaccaaagatcggtttttcttccacccattgactccggc

SEQ ID NO: 207276 - DNA, 434 bp, Gossypium hirsutum
  unsure (1)..(434): unsure at all n locations
cccacgcgtccgcgtgtttttcccttcaaagaacaacaacaattccaggcttgtggtgacgagggcagctgacgaggctgctgcaccagcaccagctaccaccactgcaccatcagaaggcggtgaagcccctaaacctaagccaccaccaattggaccaaaaagaggaaccagggttaagattcttagaagagagtcctactggtacaacagctttgggtcagttgttacagtcgaccaggaccctaagactcgctatccagtggtggttcgattcaacaaagttaattacgccaatgtatcaaccaacaactatgccttggatgagattgcagaagttaactgagtcatttaattcttaacattttttcgngcattaatattgtccttcttccctttcatctctagaattaagcttaatatttgtacccccc

SEQ ID NO: 207277 - DNA, 356 bp, Gossypium hirsutum
cccacgcgtccgaatttgacccaaaatggcctctgtttgtgcttcttcggctattgcagcggttgccatctcatcccccagttggcagaagactggatcagtagtggggacaacaaaggcttctttccttacagggaagaaacttagatctgtgagaaagtacacaaaaccagctgccggaccaacatttccagtgtgcgccgccgccgaccccgacagacccctttggttcccaggcagcactcctcctccatggctggatggcagtctccctggtgactttggtttcgatcctctcggtcttgggtctgaccctgagacattgagatggaacgtacaagcagagctggttcact

SEQ ID NO: 207278 - DNA, 336 bp, Gossypium hirsutum
gtaaatggttaccactgcttctccaatggcgactcagctgaagagcagctttaggtcgtctgttacaagaggactggtagtccccaggggcatttcgggatccccgtttaaagtatcttccggaaagaccaggaccccttgcttcactgtcaaagctgttcaatccgacaagtcaacatttcaagtaatccaacccatcaacggcgaccccttcattggaagcctggagactccaatcacctcaagccccttaattgcatggtacctttccaacctcccagcctataggacggcagtgaacccacttctgaggggaatcgaagtgggtctggctca

SEQ ID NO: 207279 - DNA, 323 bp, Gossypium hirsutum
  unsure (1)..(323): unsure at all n locations
cggacgcgtncgcccacgcgtccgcggacgcgnggggggnaaaaccattcattctttccaggtagtacgtaatattttaacccccaacccccactatctgtccatctttcagtaagagaaaggaaatggagtttagttcagaggctaaccagcgcattgccaggctcgcagcccatctccaacctcagatggaggaaagttctattttgaggcgagctgactgtagagcgaaaggagggtcaccagggttcaaagttgctatcttaggagcagctggaggcatttgccagcctcttgcaatgttaatgaagatgaatcctctc

SEQ ID NO: 207280 - DNA, 363 bp, Gossypium hirsutum
  unsure (1)..(363): unsure at all n locations
cggacgcgtggggccgggtcagcctgaaggggtggattttgatcaatatgcaggctatgtaacagtagatccggtggctgatcgagcattgttctatttttttgtggaatcaccggttaattctccgaataagcctctggttttatggttaaatggaggtccaggatgctcgtctttaggatatggagccatgcaagaacttggacctttcagagttaacagtgacggaaaaacgctttacagaaatgaatatgcatggaacaatgttgcanacgtgatattcctggaatcaccagccggagttggatattcttattccaaaaattcctcagacaatacccaagtaggtgacaagagaacagc

SEQ ID NO: 207281 - DNA, 351 bp, Gossypium hirsutum
accacttccacacaacaacagcaatggcaattagaaaaccatccaaactgcctcaaaccgcagttctgaagcaaatcctgaagagatgttcaagcttaggcaggaaacatggatatgacgaagatgtgctcccacttgacgtaccaaaaggtcactttgccgtttacgttggtgaaaacagaagcagatacatagtccctatctcattcttgacccaccctgagttccaatgtttgcttcgacgagcggaggaagagtttgggtttaaccatgatatgggccttaccatcccttgtgaagaagttgtttttcgctctctggcatctatgcttagatgaaaaatgggaaaaa

SEQ ID NO: 207282 - DNA, 224 bp, Gossypium hirsutum
gaacattttcacagcttaaaacacaatatgactaaggatattgagaccacggcggagcaaggcggcggagcggagttctcagcgaaggactaccaggacccaccaccggcaccgttgattgacttggaagaactcaccaaatggtcgctttatagggcggcgatcgctgagttcattgccacccttcttttcttgtatgtcacggtgttgactgtgatcgggta

SEQ ID NO: 207283 - DNA, 316 bp, Gossypium hirsutum
cccacgcgtccgaaaaccgaagaactaaaagaaaaatggcgtctttggctcaacaattcacaggtctaagatgtccaccactctgctcatctcggttttctgtgaaaccaaagcaaacccagaaagtgggcgcttttgcttctcctatagtttcagccgtcgctgtctcaaatgcacagaccaaagataggcttgaactcaagaagatgttcgaggatgcttacgaacgctgtcgaactgctcctatggaaggcgtggcttttactgttgaggattttcaaaatgctcttgagaaatatgactttgattctgagct

SEQ ID NO: 207284 - DNA, 437 bp, Gossypium hirsutum
cccacgcgtccggtgagcgctaggttcaacaacaacggcaaggctccagcgggaagtttcaagattgtggctgccaaagaaatcgacgaagacacgcagaccgaccaggaccgatggaagggtcttgcttatgatatctccgatgaccaacaagacattaccagagggaaaggtatggtcgactcattgttctaagctcccatgaacgatggtactcactatgctgtcatgagctcctatgaataccttagccaaggccttcgcacatacgacttggacaacaacatggatggattctacattgccccagctttcatggacaagcttgttgttcacatcaccaagaacttcatgacccttcctaacattaaggttcctcttatcttgggtgtttggggaggcaaaggtcaaggaaaatctttccaatgtgagcttgg

SEQ ID NO: 207285 - DNA, 331 bp, Gossypium hirsutum
atttggattctttggaccagaacctggctaagaatatggctggtgagatcattggaactaggaccgaagttgccgacgtgaaggcgacgccgtttcagccttacagcgaggtttttggtctacagaggtttagggagtgtgaattgatccatggacggtgggccatgttggctacgcttggtgcacttaccgttgaatggctcactggtgttacatggcaagatgctggcaaggttgagttagttgagggttcatcgtatctcggccaggcccttcccttctcgatgacaacattgatttggatagaagtattggtgatcggattcatcga

SEQ ID NO: 207286 - DNA, 398 bp, Gossypium hirsutum
  unsure (1)..(398): unsure at all n locations
acgcgnccggaaagatctgatgatcttttagaaccgtatgttgaatcacttggagacaaccaagcgatagagcaggactttggggagagtcgggtttcgaatttggagataggctttgatggactcctttgggcttaattattaacgattgtgaattgagttcgacaaaaggtcaggggataaaagaaaatcatcactcggaaattatggtcggttttgcgagcagcttcagttcgcctttgccaagtcaaagtttcagagtagcttatgatgctgatttccatggagcccttagcagaataacagagtgccatatctttctttctttaaaccttgaacttggggttatccctttttttaaaaaaaaaaaaaaaaaaaaaaattgggtggaacaagtt

SEQ ID NO: 207287 - DNA, 278 bp, Gossypium hirsutum
  unsure (1)..(278): unsure at all n locations
cggacgcgtggggtgagcttgtgtttgccaagatgggtatcaaccccatcatgatgagtgccggagaactggaaagtggaaacgccggtgaaccagccaagttgatcaggcaaaggtaccgtgaagctgccgacataatcaaaaagggcaaaatgtgcgccctcttcattaacgatctcgatgctggtgccggtcgtatgggaggaaccacccaatacaccgtcaacaaccagatggttaatgctaccctcatgaacatcgncgataaccccaccaac

SEQ ID NO: 207288 - DNA, 250 bp, Gossypium hirsutum
  unsure (1)..(250): unsure at all n locations
cccacgcgtccgcccacgcgtccgcccacgcgtncgatatttagctatagcatacactactggtacccactactagcaatggcttcctcaatgatctcatcgggtaccattgccactgcctctcccgcacaggctaacatggtcgctcctttcaccggtctcaagtctgcctctgctttcccagtcaccaggaaagccaacaacgacattacttctctcgcaagcaatggcgggagaatgcaatgcatgc

SEQ ID NO: 207289 - DNA, 271 bp, Gossypium hirsutum
cccacgcgtccgaaggaaagtaaagtttctagcagagggtaattacggaattcgtaaggttagaggagctgtccctcatgatctagggacacatgatccttggaatgaaatgaatgcatataatatacatgatacaagcaaatggaaggatctgaattccaagtttgtgcttcaagtgtacagagattttgctgccacaggagatatggcatttggtattgaagtttgccctgctgtacgcactgcaatggaatacatggaacatattgat

SEQ ID NO: 207290 - DNA, 325 bp, Gossypium hirsutum
  unsure (1)..(325): unsure at all n locations
gcgtncgtctagactactctttcgaaccagctccaccatcacccccaaaaaacaaagcaaattgtagaagatggcaacacaagcacttggatcatcgtctcttacctactcagtggagactgcaaggcagattcttggagctaaacgacaaattgggtcttcaaggaaaggatcctttgttgttaaggcagcttcgactccacccgttaagcaaggagctgatagacctttatggtttgcatctaaacaaagcctttcatacttggatggcagccttccaggtgattatggatttgaccccttgggactctcagacccttgaagt

SEQ ID NO: 207291 - DNA, 274 bp, Gossypium hirsutum
cccacgcgtccgcgtaaatggctaccactgcttctccgggggcgactcagctgaagagcaggtttacgtcgtctgttacaagaggactggtagtccccaggggcatttcgggatccccgttcaaagtatcttccggaaagaccaggaccccttgcttcactgtcaaagctgttcaatccgacaagtcaacatttcaagtaatccaacccatcaacggcgaccccttcattggaagcctggagactccaatcacctcaagccccttaattgcatg

SEQ ID NO: 207292 - DNA, 434 bp, Gossypium hirsutum
cccacgcgtccgcccacgcgtccgtgatttcattctttttcgttcttttttcccctaaattgtattttctcaaaaatgtcgctcctccaatcctccgtctatcctccgtcaacacttcgttcttcgccgtcactgtcatgcacagcggcacacccgatcgcttcctcccatagagttccttccacttcgaattccttcgtcgcgttagaatcgtcatcgttaaagaccgttaactctatttcgagcgctaagaacaacagaaggaaaggcgttgtcggaaaggtgaggtcgagcctggagacagcgggagcaactgtggggcaggtgacggaggttacaaaggacaccttctggcccatcgttaacgccgcgggggataaaacccgcgtcctcgatatgtacactcaatggtgtggtccatgcaaagttatagc

SEQ ID NO: 207293 - DNA, 296 bp, Gossypium hirsutum
  unsure (1)..(296): unsure at all n locations
cccacgcgtccgaaccccaactattgtttatcatggcttcctcaactttctcccctgcagctgcttcgcagctatgctccggcaagagtggcatgttctgcccatcacaagcgtttcttgtgaaaccaacgaggacccatttggtcaaaaacgaaaagggaatgaggatcacatgccaggccactagcatccccgctgatagagtgccagacatgggcaagaggcagctcatgaatctgcttctgttgggagctatttcactcccctcaggtttcatggngggttcttatgcagca

SEQ ID NO: 207294 - DNA, 408 bp, Gossypium hirsutum
cccacgcgtccgcccacgcgtccgctactctttcgaaccagctccaccatcacccccaaaagacaaagcaaattgtagaagatggcaacacaagcacttgtatcatcgtctcttacctactcagtggagactgcaaggcagattcttggagctaaacgacaaattgggccttcaaggaaaggatcctttgttgttaaggcagcttcgactccacccgttaagcaaggagctgatagacctttatggtttgcatctaaacaaagcctttcatacttggatggcagccttccaggtgattatggatttgaccccttgggactctcagaccctgaaggtccaagaaggttcatcgagcctaaatggctagcctacggtgagatcatcaacgggcgttatgctatgttgggt

SEQ ID NO: 207295 - DNA, 272 bp, Gossypium hirsutum
atttagctatagcatacactactagtacccactactagcaatggcttcctcaatgatctcaggggctaccattgccactgcctctccggcacaggctaacatggtcgctcctttcaccggcctcaagtctgcctctgctttcccagtcaccaggaaggccaacaacgacattacttctctcgcaagcaatggcggcagagtgcaatgcatgcaggtgtggcctcctactggaaagaagaagttcgagactctctcatccctccccgatccta

SEQ ID NO: 207296 - DNA, 292 bp, Gossypium hirsutum
ggaactttaagctttttcgcattgagaaaccacatcagagggaaaaaaactaatgatttcagggattctctatatatgtctgtggtgacaatgaccactgttggttatggagaccttgtccctcacgatttcctttcacaactggtctgcactggtttcatcaccgtagggatgcttctgtttggaatagtagtgaaactagctgctaaatacttggttttcaagcaacaaaaggtgctgattaatgccctgcacacagctaggaaaatgggtccgatggaagcccttaacg

SEQ ID NO: 207297 - DNA, 316 bp, Gossypium hirsutum
gcgtccgcccacgcgtccgcccacgcgtccgaaactacacataaaatctgtgcctgcccttttctctgcacacctcgggatatcagtttcgactccactcatcccacgggttgagtaccgagtccatatatcgttaagttcaaggaaggaacttgggcatcatgggtcttaaggcattagactatgagacaatgaatgaaaacgtgaagaaagttcaatatgcagttagaggtgagttgtatcttcgagcttctgagcttcagaaggaagggaagaagattattttcacaaatgttggcaatcctcaagctcttgg

SEQ ID NO: 207298 - DNA, 363 bp, Gossypium hirsutum
ctcagttttcgttatttttcttctttgttctttacattcttttcgtctacacaacagataggtagtaatggccggtaaaggagaaggtccagctatcggtatcgatctcggtacaacttattcttgcgttggtgtttggcaacatgaccgtgttgaaatcatcgctaacgatcaaggtaacagaacgacgccgtcttatgttggttttactgataccgagcgtttgatcggagatgcagcaaagaaccaggttgcaatgaacccgattaacaccgtcttcgatgctaagaggttgattggtcgtagattcactgattcttcagtgcaaagtgatatcaaattgtggccattcaaggtcatagc

SEQ ID NO: 207299 - DNA, 338 bp, Gossypium hirsutum
atcggaatcaatggattcggaaggattggacgtttggttgcgagagttgctctccaaagcaatgatattgagctcgttgctgttaacgatcctttcatcaccactgattacatgacctacatgtttaagtacgacagtgttcacggtcaatggaagcaccatgaacttaaggtgaaggactcaaagaccttgctctttggcgaaaggcctgtcactgtttttggcatcagaaaccctgaagaaatcccatggggtgaaaccggcgctgattatgttgttgagtctaccggtgttttcacttgacaagacaaagctgctgctcacttgaaaggtggtgc

SEQ ID NO: 207300 - DNA, 250 bp, Gossypium hirsutum
aaggtaagaaaaccgcggggctaaaaggctaacccgggaccaatcccccgacccggcgggggcaatggggccaatccatgtcaattccaccatcatgtcgctcgacggtcggcagccgttaaaaaccgaacctgagattaaagacgacggtaagttgcatgttacggttcgaaaatctaatgcttcgaggtctgatattttttcgagaaggccacaaggtttgtcttcaactaccccccggccatcgaat

SEQ ID NO: 207301 - DNA, 267 bp, Gossypium hirsutum
cttccatcaacggttggtgccttacctccttttcttcctccaccaccacctcctctttttgcgctcgtcgacgacctacattgcggccttcggtcgtcgctagccttaactcttctccttctcctccgactcttatccaagaccgcccggttttcgctgcccctgttcctttgctcaccccgagagaagagatgggaaacaagtcctacgacgaatccattgaagctctcaagaaacttctcagtgagaaaggagaactgaaagctg

SEQ ID NO: 207302 - DNA, 429 bp, Gossypium hirsutum
gagaaaggaaaaataatcccatcatcatcaacaacagcaatgcttcacattttcctccttttctcccttatcttctcttccaccaatgtcctcgcccaggacttttgtgttgcgaacacggcttcgggcattgttaccccatcaggttacccttgcataatggaagcaaatgtaacctccgacgacttcgctttttcgggtctcggtctcccaggtaatacgtcgaacatcataagtgcagctgtgacaccagcattcgttggtcaatacccagccgtcaacggactaagcctgtccgccgcaaggctggacttggctccgggtggtgtaatcccaatgcacactcaccctggtgccaacgagctcctttacgtggtccatggtcacaatacttgtgggttcatttcatcggctaataaagcttacttg

SEQ ID NO: 207303 - DNA, 277 bp, Gossypium hirsutum
cccacgcgtccgcccacgcgtccggaaggcatgttaggtgcatggctgtggggacagcaccgtaggcagaaaccaagaaaagtgggttcgaaatccaaacactaacaggttggttgttgaagcaagaacaggcgggtactattgatgctgagctcactattgtcctttccagcatttccatggcctgtaagcaaattgcttctttggttcaaagggctagcattttaaacttgactggcgttcaaggagctgtcaacgttcaaggagaggatcaaaa

SEQ ID NO: 207304 - DNA, 318 bp, Gossypium hirsutum
agcaatcctttgagagctccgggatccattgtcaccatgtcttgctcaaatctgacggtgtgggtgtcctcaaaaccctgtctttctgacacttcttcactctctttccgatctttcatcagcccttttcagctcccatctcagagctcaacccccggtaacccttccaggtcctcatctgtaaccccagttcactgtggtcttcgtgagcttagagaccgtattgattcagtaaagaacacgcagaagatcactgaagccatgaaacttgtggctgctgctaaagttaggagagcacaagaaagctgtgtcaatggc

SEQ ID NO: 207305 - DNA, 283 bp, Gossypium hirsutum
  unsure (1)..(283): unsure at all n locations
gcgtncgctttagagtaaatttctcttgcaatcctttgtagagatccgggatccattgtcaccatgtcgtgctcaaatctgacaatgtgggtgtcctcaaaaccctctctttctgacacttcttcactctctttccgttctttcatcagcccttttcagctcccgtctcagagctcaacccccggtaacccttccaggtcctcatctgtaaccccagttcactgtggtcttcgagagcttagagaccgtattgattcagtaaagaacacgcagaagatcactg

SEQ ID NO: 207306 - DNA, 314 bp, Gossypium hirsutum
gcggtggtcgcaagttgcctgtgatcagagcccagcaggctaaattttctgattccaaaggatcaggtgccagtgaaggaagaagagctgctgtgctctacttggcagctggccttttcaccacagctgttgcttcttctgcaaatgctggggtcattgacgagtaccttgaaaagagcaaagctaacaaggaattgaatgacaagaagaggttggcaacaagtggagcaaacttttccagagcatacactgttcaatttggcacttgcaagttccctgagaacttcactggctgccaggatcttgcaaagcaa

SEQ ID NO: 207307 - DNA, 331 bp, Gossypium hirsutum
cccacgcgtacgctttgatactggaaggcttaaagaagctttgagcaagattcttgtcccagtttaccctgttgctggaaggttggggtatgatgaaaatggaagacttgagataatatgcaacggtgaaggagttttattcgttgaagctgaaactactgcagtcatggaacatttgattggtgcttttgccgagaaccatcaagtgttacgtttagtccctaaagtcgactattctgaaggaatatcttcctatccacttattttattgcaggtaactaagttcaaatgcggtggagtttgtcttggagtatggattcaacatacttta

SEQ ID NO: 207308 - DNA, 345 bp, Gossypium hirsutum
tcggctatagcatacactactaggacccactactagcaatggcttcctcaatgatctcatggggggcgcattgccactgcctctccggcacaagctaacatggtcgctcctttcaccggtctcaagtctgcctctgctttcccagtcaccaggaaggccaacaacgacattacttctttcgcaagcaatggcggtagaatgcaatgcatgcaagtgtggcctcctactgggaaaaaaaagatttgagactcttttcatacctcccccaatcttacaccccgggccagttggcttaaggaagtaaattacccttcttctgctcaaaaatggggtcccttgccttgg

SEQ ID NO: 207309 - DNA, 448 bp, Gossypium hirsutum
cccacgcgtccgtaataagcaaggcaatggtttcactatgcttgaattcattgccacttcgaccttcttcatgcccccaaaaacttactgaaacttcctcttcttttagtaatggtagtataggaacagccttgaaacccattgtcgtcaatggaaatcctcccacttttgtttctgctcctggtcgccgtatagttgcagttggagatctacatggagaccttgatcaagcaagatatgcgcttgaaatggctggtgtcttgagttcggatggtcaagacctatggactggagaagatgcggtacttgttcagctaggagatgtgcttgatcgaggagatgatgaaatagctatcttatccttgttgcgatcattagatatacaagccaaggctaaaggtggagctgttttccaggtcaatggaaatcatgaaactatgaatgtgga

SEQ ID NO: 207310 - DNA, 429 bp, Gossypium hirsutum
attgaacctaaaacctctgtcatctgtccgtctctctgttttactccacaaccactatcagtaccattatgggttcggctactgtttctgtagccaaacccaaccttcagattcaggcaaaaggaaagggcgttggttttgcagatttctcaggcctacacaactcctctactagccttccctttgccaggaaaacctctgatgacttccattcactcgttgcttttcagacatctgctctacgaagcaataatggcgggtacaggaaagggatggcagacgcaaagctaaaggtggctataaatgggtttggtaggattggcaggaatttcttatgatgctggcatggccgtaaggactccccacttgatgtcattgccatcaatgacactggtggtgttaagcacgcttctcaccttctcaaatatg

SEQ ID NO: 207311 - DNA, 421 bp, Gossypium hirsutum
cacgcgtgcgtgttgacctaatcaattttccctatatgcttctatacattttacttcacatccaccttcagtacctttacgacattgtttactctttctctatccctccccatccttttgatactggcgtacttaaccctcgtatgttttttacctttctcccctctactctgcccacttactttacttccttttacatgcaccatgaatccctctttcatgctctccccgcttacaatacatgattcatcgctaacaacgttgctcgtaacgatctcaaggatgcatacgctacttcaaactcttaatgatgatcctgctaatgaagctgccagccttacctctcatgtcatcatcatcaaccacccttcgcacattgtatacttatattcaccagcccttgattgccatacctcccaca

SEQ ID NO: 207312 - DNA, 390 bp, Gossypium hirsutum
cgatacatgtatgggtgtagtgcccctgtctcattattgatgggactaggaatgtggagggtcccaccatcaccacgttggttaattctcagagcggttcaaggtaaagggtctttacaagaactcaaagagaaggccatccttgccctaagcaaacttcggggtcgggctccgggtgatgcagcatctgagaaacaaatagaagataccctaatctcagtgaagtctgcctatatggaacaggaatctgaaggaaatatcttggaggtatttcagggaccaagtttgaaagccttcataattggtggaggtttagtcctttttcaacagataactggccaaccaagtgttctgtattatgctggtccaattctacagagtgctggattc

SEQ ID NO: 207313 - DNA, 446 bp, Gossypium hirsutum
aattgagctccatttccctagtaaacagagttctttttttcacagcaatggcagccatgggctccagtgttttggcatgcaactatgctatctcaggcactggatcatctgagcttaatgccaagcttgcttcagcaccatcagttgcttccccagttatgtgcggtggtcacaagttgcctgtgatcagagcccagcaggctaaattttctgattccaaaggatcaggtgccagtgaaggaagaagagctgctatgctctacttggcagctggccttttcaccacagctgttgcttcttctgcaaatgctggggtcattgacgagtaccttgaaaagagcaaagctaacaaggaattgaatgacaagaagaggttggcaacaagtggagcaaacttttccagagcatacactgttcaatttggcacttgcaagttccctgagaac

SEQ ID NO: 207314 - DNA, 434 bp, Gossypium hirsutum
ttatcattacgataggtgtcaagtgtaagtgcagtgatgtatgcggctgatgcaggctaacagaccggttattgactttgaaccaaatttgattctctcttgcatcctatcaaatggcagctactgcagcaatcaccactctcccccagttcagtgggttaagacccaaagtttctactgctccagttaggagcctggcagcagttcaaccaatgaggcgcaaggggaagggtgctctcggtgctcgatgtgatttcatcggatcccccacaaatttgataatggtgactacaacaaccctgatgctgtttgctgggaggtttggcttggctccatcagcaaacagaaaggccaccgctggattgaagcttgaagtaagggactcaagcttgcagactggtgaccctgctggttttacactcgctgacactttg

SEQ ID NO: 207315 - DNA, 420 bp, Gossypium hirsutum
gctgattacaccctcaagctcctccacaggataatccccccagctgtccctggaatcatagtcttgtctggcggacaatccgaggttgaagcaaccctcaacttgaacgcaatgaaccaatctccaaacccatggcacgtctcgttctcgtatgccagagctctccagaacacttgcttgaagacatggggaggcagacctgagaacgttaaggctgctcaggattcacttcttgtccgtgctaaggccaactcacttgctcagctcggcaaatacaccggcgagggagaatcagaggaggccaagaaaggaatgttcgtaaagggatatgtctactaagctgctgcaaacaaagcttagctgagatgatggaaatttcatgatatgggttctctttcattctcaatggggttaaaggtc

SEQ ID NO: 207316 - DNA, 280 bp, Gossypium hirsutum
  unsure (1)..(280): unsure at all n locations
gcgtgcggccagtcttaccataacatttcttgaaacttacaatctctcacttnttgagaaactaaagttcgatttcgatggcatttcctgctattaaacccaccaaccctgacttggaggaataccatgaacaccctcacaaaatctggatctctctctcctccaataatgtgaaaaacctcttgaaaacatgtgctgacttacctcgtaacgccaaggataatagacttaagctttatgtaccactgagaatgcccaccattggtctttacatcaacac

SEQ ID NO: 207317 - DNA, 425 bp, Gossypium hirsutum
cctttcctttccttttctctctctctagcaatggagtcgcgattgttatcacgcgcttctgttatcaccggcttacctcatctcatgccgaagctttcgccggggattgtcaacgtttcgtatgcttcggctaagccgatcggagccgtcggtgaaggcgggaacgtcatatggcggaggcaactaaggccctccttgctactcgaatgctcgtcggttagcaagcgagaggttctgaaaccggtttcggctgccgcgtcgtcaccggccgagggaggaagcgattccgccggggaggggaagatcgctccggttggattcttcgagaagtatcctgctcttgttaccggatttttcttcttcatgtggtacttcttgaatgtaatattcaacattctcaacaagaagatctacaattaccttcc

SEQ ID NO: 207318 - DNA, 432 bp, Gossypium hirsutum
gaaccagaaaccaaggcaatggcttctcttgcaaccttagctggtgttcaaccaacgaccgtcaagggccgtggtggcagctctctcaatggaaccaagctcttggtgaagtcaactcgccagagtttcaaacccaaaaactacagggctggtgctgtggtagcaaagtatggtgataagagtatatactttgatttggaggatattggcaacacaactgggcaatgggacttgtatggatccgatgcaccttcaccgtacaacccactccagagcaagttctttgagacatttgcagctccatttaccaagagaggattgttgctcaagttcctgatcttgggaggcggttccctcggtctttacctcagtgccactgcttccgatgaccttctaccgatcaagataggtgcgcaactcccacccaagcct

SEQ ID NO: 207319 - DNA, 398 bp, Gossypium hirsutum
ccaccatctaccccaaaaaacccatcacattggtgaagatggcaacacacggccttgcatggtgggcctcttacctactcattgaagactggaaggcggcactcttggagctaaacgacgaatggaagccttcaaggaaaggatcctttggggttaaagcagcttctactccacccgttatgcacggagctgatatacctttatggcttgcatctaaacaaagcctttcatacttggataggctccttccaactgattcatggatttgaccccttgcgactctgagaccctgaaggtacaagagggatcatggagcctaaatggctaccctaccgcgagatcattagcgcgcgatatgctctgtcgtatgcagtcagtgcgattgcacctgaaatact

SEQ ID NO: 207320 - DNA, 420 bp, Gossypium hirsutum
ggaacaacatgaaaacctccctttttttcttgtacttattatctctctcatatttcaatgtaggaaactaaattccctagtcttgtttttgctctatattgtcttttctacattttcatttgatatacttacattctagactttgttgctttaatttatttatttctatttccaggtggtgcaagtatccggtacaagcagaagcgatggtaatgagaacccatttacagccaaagcctcgttgattcgttactggaacaatcacatttccaacaatcttcccaagccaccatttcttatctccaaagcttacccactaaacgccattgacttggccaagctcactcaacttgccaatcataactctctgtcttcccacattgaatctttttgttccttatccaatcttttctgctcatt

SEQ ID NO: 207321 - DNA, 431 bp, Gossypium hirsutum
gcacaagcaatggcatcgatgactggtttacgtggctcttcacaagctgcgttggaagggagtctccaactcagcggccaaactcggttgaacgttgctagcaccaacaggttggctgtggctagacccggttttaccgttagagctcaacaggtccctgccgagcctgaaactggacgcagagctgtgctgggtcttgttgctgctggtttggctactggctcctttgttcaagctgtgcttgctgatgcacgaagcatcaaggttggcccgcctccaccgccctccggtggattgcccggaactttgagttccgatgagccaagagaccttgatctgccgtacaaagatcggtttttcctccaaccattgactccggcacaagcggctcagagggcaaaggaatcagccaaagacatccttggtgtcaa

SEQ ID NO: 207322 - DNA, 447 bp, Gossypium hirsutum
  unsure (1)..(447): unsure at all n locations
cccacgcgtccgaatttgacccaaaatggcctctgtttgtgcttcttcggctattgcagctgttgccatctgatcccccaggtcccagaagactggatcagtagtggggacaacaaaggcttctttccttacagggaagaaacttacatctgtgagaaagtacacaaaaccagctgccggaccaacatttccagtgtgcgccgtcgccgaccccgacagacccctttggttcccaggcagcactcctcctccatggctggatggcagtctccctggtgactttggtttcgatcctctcggtcttgggtctgaccctgagacattgagatggaacgtacaagcagagctggttcactgcagatgggcaatgttgggagctgctggtattttcatcccagagttcttaaccaagattgtgattntaaacactccatcgtggtactcagc

SEQ ID NO: 207323 - DNA, 418 bp, Gossypium hirsutum
cggactcgtccgcccacgcgtccgcggactcgtggggtttaaatccattcattctttccaggtagtacgtaatattttaacccccaacccccactatctgtccatctttcagtaagagaaaggaaatggagtttagttcagaggctaaccagcgcattgccaggctcgcagcccatctccaacctcagatggaggaaagttctattttgaggcgagctgactgtagagcgaaaggagggtcaccagggttcaaagttgctatcttaggagcagctggaggcattggccagcctcttgcaatgttaatgaagatgaatcctctcgtctcggttcttcatctttacgatgttgtgaactctcctggtgtcacagctgacctcagtcacatggatactggtgctgtggttcgtggtttcct

SEQ ID NO: 207324 - DNA, 428 bp, Gossypium hirsutum
accactcctacacaacatcttcaatggcagtttgaaaaccatccaaactgcctcataccggggatctgaagcaaatcctgaagagatcttcaagcttatgcaggaaacatggatatgacgaagatgtgctcccacttgacgtaccaaaaggtcactttgccgtttacgttggtgaaaacagaagcagatacatagtccctatctcattcttgacccaccctgagttccaatgtttgcttctaccagcggatgaagagtttgtctttaaccatgatatgggccttaccatccctcgtgaagaagtagtgattagctatctggcatctatgcttagatgaaaatgcggaaaatgaatatattgagttgcgacatgaaagggttctgcctttgcatctgttgagaaagatgaccaatataagcatagcaac

SEQ ID NO: 207325 - DNA, 437 bp, Gossypium hirsutum
ggggttcaactttaccttttagctttttggtatttccaatcccacgctgcggaaaaacaggctctcctccccctctctcaccctctaatctgatcactgatttcttcgatttcaagttgaagtcaagctgcagctatactgtgattcggttaatatagaattgaaacaatgggggagctgttgggactgctaaaagtggtggttgtgcaaggtaaaaggttggttatccgggattttaagagcagcgatccttatgttatagccaagctcggtgatcaggtagcacagactaaggttatcaacagctgcctcaatccagtatggaatgaagagctcactttctccctcactgaacctgttggagttctaaatttggaagtattcgacaaagatcgtttcaaggctgatgacaagatgggacatgcttatctgaacct

SEQ ID NO: 207326 - DNA, 436 bp, Gossypium hirsutum
ctctattgagttggaattgaaaaaaggttctctgaaatggcttatcgttctctagtttccggttacaagtgccttttcaggcacccttttcaatcatctgcaaaacccacgtctccttttctctttaaatccctttctccgtttcaaactcaactcgcggccaactctgtcccatctccgagacctgcctcttttcgattcccagtcttccaaacctcacaagttcagcacccaatttaccacatcctgaggaagtacagttctgagtcaccagcatccaagttggatgtgaacaaggaggtggactcgatcaacctcaagtttgcagaggcaagagaagagatagagatggcaatggagtctaaagagaccgtttatttcaacgaagaatcacagtgtgctcgtgctgttgttaaagaggttttggacatgtttg

SEQ ID NO: 207327 - DNA, 439 bp, Gossypium hirsutum
cggacgcgtggggccgggtcagcctgaaggggtggattttgatcaatatgcaggctatgtggcagtagatccggtggctgatcgagcattgttctatttttttgtggaatcaccggttaattctccgaataagcctctggttttatggttaaatggaggtccaggatgctcgtctttaggatatggagccatgcaagaacttggacctttcagagttaacagtgacggaaaaacgctttacagaaatgaatatgcatggaacaatgttgcaaacgtgatattcctggaatcaccagccggagttggatattcttattccaaaaattcctcagactatacccaagtaggtgacaagagaacagcagaggactcctatgtttttctcctcaactggcttgaaagatttccccagtataagacccgacatctctttataacc

SEQ ID NO: 207328 - DNA, 406 bp, Gossypium hirsutum
atttggattctttggaccagaacctggctatgaatatggctggtgagatcattggaactaggaccgaagttgccgacgtgaaggcgacgccgtttcagccttacagcgaggtttttggtctacagaggtttagggagtgtgaattgatccatggacggtgggccatgttggctacgcttggtgcacttaccgttgaatggctcactggtgttacatggcaagatgctggcaaggttgagttagttgagggttcatcgtatctcggccagccccttcccttctcgatgacaacattgatttggatagaagtattggtgatcggattcatcgagttccaaaggaacgccgagcttgaccctgagaagaggttgtaccccggaggaaagtcccttgatcctcttggcct

SEQ ID NO: 207329 - DNA, 439 bp, Gossypium hirsutum
cggacgcgtggggtgagcttgtgtttgccaagatgggtatcaaccccatcatgatgagtggcggagaactggaaagtggaaacgccggttaaccatccaagttgatcaagcaaaagtaccgtgaagcttccgacataatcaaaaagggcaaaatgtgcgccctcttcattaacgatctcgatgctggtgccggtcgtatgggaggaaccaaccaatatacacgtaacaaccagatagttaatgctacccttattaacattggcgattaccccaccaacgttcagcttcccggtatgtacaacaaggaagagaacccccgtgtccccattatcgtcactggtaacgatttctccacactgtatgctcctctcatacgagacacgcgtatggagaaattttactgggcaccaactatggacgaccgcgtcggtgtttgcaa

SEQ ID NO: 207330 - DNA, 429 bp, Gossypium hirsutum
ggaaagatctgatgatcttttataaccgtatgttgaatcacttgtagacaaccaagcgatggggcacgacgttggggagagtcccgtttcgaatttggagataggctttgatggactcctttgggcttaattattaacgattgtgaattgagttcgacaaaaggtcaggggataaaagaaaatcatcactcggaaattatggtcggttttgcgagcagcttcagttcgcctttgccaagtcaaagtttcagagtagcttatgatgctgatttccatggagcccttatcagaataacagagtgccatatcttccttcctttaaccctgtactttgggttataccatttttctaaaaaaaaaaaaaagaaaagaatttggttgtaacagttttccagaattcttgaatgattaaagggagaataatagcat

SEQ ID NO: 207331 - DNA, 378 bp, Gossypium hirsutum
gagagccttaacattagctctagcactagtttcaaccatggcttcctccgggtgtttctggcaccaccactcactcaccaccaatggcacatcatcatcattaccgccgtcgctacgccagttttgaaacatgaatcctaaccagctcgtggtgtccaaggctcacaatcaggaatatgatggaagccttgtgtccctaaggttgactctcactatactcattgatgctgccgatgttggctctaacgtttctcctgctgatactgcctattgtgaagctacaaatgtatttggaaagccaatatcagacacagatttcttgccatacaatggtaacggattcaagctgtcgataccatcttaatgcaccccaagcaa

SEQ ID NO: 207332 - DNA, 426 bp, Gossypium hirsutum
cccacgcgtccgcgtaaatggctaccactgcttctccaatggcgactcaggggaagagcgggtttacgtcgtctgttacaagaggactggtagtccccaggggcatttcgggatccccgttcaaagtatcttccggaaagaccaggaccccttgcttcactgtcaaagctgttcaatccgacaagtcaacatttcaagtaatccaacccatcaacggcgaccccttcattggaagcctggagactccaatcacctcaagccccttaattgcatggtacctttccaacctcccagcctatatgacggcagtgaacccacttctgaggggaatcgaagtgggtctggctcacggcttcctcctggtgggtccattcgttaaggccggccctctaaggaacactgcgggggcgggtcaagctgtgtcct

SEQ ID NO: 207333 - DNA, 446 bp, Gossypium hirsutum
gcagctcaggacagaaaagaaatgctggaataaatcatgcggagaggaacaagctcacttggaacagatgttccaagtgagagggaaatcaatcgacttgcagctcggtcagatgatgagttccggatgtttgagcaaatggatgaggaaagaagagtaaaggagaattatcggtctcgtctcatggaagaccatgaggtacctgagtgggtatttgtacttaatgatgataggaagggcaaaatttcagaaagctatgttgaattagggaagcgaaaaagaaaaggtgggaactattatccagatacattaagtgacttacagttcatgagggctgtggaaaatgcagaagacatggcaaagaagttaccaagcaaaaggaagagaaaagaccatcttccagctgatgaggactccgagttgcctattaataacataggagtaga

SEQ ID NO: 207334 - DNA, 405 bp, Gossypium hirsutum
tatcaatgaattatgaatgactggccaccatgttgcaagagtagctctacaaatgaatgttattgagctcgcttctgcaaacaatccttttatcaccacttattacatgacctacatgtttaagtacgacagtgctcacggtcaatggaagcaccatgaacttaaggtgaaggactcaaagaccttgctctttggcaaaaggcctgtcactgtttttggcatcagaaaccccgaggaaatcccatggggtgaaaccggcgctgattatgttgttgagtctaccggtgttttcactgacaaagacaaagctgctgctcacttgaaaggtggtgcaaagaaggtggtcatttctgattccaggaaggatgcccccacgtttgttgtgggtgtcaatgaaaaggaata

SEQ ID NO: 207335 - DNA, 386 bp, Gossypium hirsutum
cgaccacgcgtccggaactttaagctttttctcattgagaaaccacatcagagggaaaaaaactaatgatttcgttgattctcgatatatgtctgtggtgacaatgaccactgttggttatggataccttgtgcctaactaattcctttcacaactggtctgcactggtttcattaccgaatggatgcttctgtttggaataatagcgaaactagctgctaaatacttggttttcaagcaacaaaaggtgctgattaatgccctgcacacagctaggataatgggtccgatggaagcccttaacgagattgaaagcatagaaatagactacaccaagtgtttaatatcattgatcgctatggcggtgcattttgtcatcggaatct

SEQ ID NO: 207336 - DNA, 452 bp, Gossypium hirsutum
cgcgtccgccacgcgtccgcccactcttccgaaactacacataaaatctgtgcctgcccttttctctggacacctcagaatatcattttcaactccactcatcccacgggttgagtaccgagtccatatatcgctaagttcaaggaaggaacttgggcatcatgggtcttaaggcattagactatgagacaatgaatgaaaacgtgaagaaagttcaatatgcagttagaggtgagttgtatcttcgagcttctgagcttcagaaggaagggaagaagattattttcacaaatgttggcaatcctcaagctcttggacagaagccactgactttccctcgccaagtggttgctttgtaccaagctccatttctgctagatgatcctaatgtaggacttatattttctgctgatgccattgcaagagcaaaacattatcttttcgtgacttct

SEQ ID NO: 207337 - DNA, 421 bp, Gossypium hirsutum
ctcagttttcgttatttttcttctttgttctttacattcttttcgtctacgcaacagatgggtagtaatggccggtaaaggagaaggtccagctatcggtatcgatctcggtacaacttattcttgcgttggtgtttggcaacatgaccgtgttgaaatcatcgctaacgatcaaggtaacagaacgacgccgtcttatgttggttttactgataccgagcgtttgatcggagatgcagcaaagaaccaggttgcaatgaacccgattaacaccgtcttcgatgctaagaggttgattggtcgtagattcactgattcttcagtgcaaagtgatatcaaattgtggccattcaaggtcatagcatgacctggtgacaaaccaatgattgtcgtcaattacaagggcgaggagaagcaattt

SEQ ID NO: 207338 - DNA, 341 bp, Gossypium hirsutum
atcggaatcaatggattctgaaggattggacgttcaggttgcgagagttgggctccaaagggatgatattgagctcgtttcttctaaccatccttttatcaccacttattacatgacctacatgtttaagtacgacagtgttcacggtcaatgttagcaccatgaacttaaagcgaaggactcaaacaccttgctcttttgctaaaggcccgtcactggttttggcatcagaaacccttgagaaataccatggggtgaaaacggcgcttattatattgttgagtctaccgatgtttttactgacaaagacaaagcttttgctcacttgaaaggtggtgcaa

SEQ ID NO: 207339 - DNA, 345 bp, Gossypium hirsutum
  unsure (1)..(345): unsure at all n locations
natgttttaatatcacctttttaaaatacttatctctgaacaattccccggcactactgggtctattgtgtctatccatgttcattccaacatcatgtttctcgaccgttgtaaacctttataaaccgaagctactattaaatactaccgtttattgcatgttactgttcgaaaatgtaatacttcgacgtcttatattttttttagaacgtcacaaagtttgttttttactaccccccggccatcgaatttaactaatgctaagatttactctttactatcatctacgaatccaacacctagaagctccagtcttatccatactgatttttattttatgatgac

SEQ ID NO: 207340 - DNA, 429 bp, Gossypium hirsutum
cgtccgttttgcaatcctttgtatagctccgggatctattgtcaccatgtcttgctcaaatctgacgagtgtgggtggcctcaaaaccctctctttctgacacttcttcactctctttccgttctttcatcagcccttttcagctcccatctcagagctcaacccccggtaacccttccaggtcctcatctgtaaccccagttcactgtggtcttcgtgagcttagagaccgtattgattcagtaaagaacacgcagaacatcactgaagccatgaaacttgtggctgctgctaaagttaggagagcacaagacgctgttgtcaatggcagacctttctctgagtccctggttgaagttctttacaacatcaatgaacagctccagactgaagacatagatgctcctctcacaaacgtcaggcctgtca

SEQ ID NO: 207341 - DNA, 421 bp, Gossypium hirsutum
ctttagagtaaatttctcttgcaatcctttgtagagatccgggatccattgtcaccatgtgttgctcaaatctgacaatgtgggtgtcctcaaaaccctctctttctgacacttcttcactctctttccgttctttcatcagcccttttcagctcccgtctcagagctcaacccccggtaacccttccaggtcctcatctgtaaccccagttcactgtggtcttcgtgagcttagagaccgtattgattcagtaaagaacacgcagaagatcactgaagctatgaaacttgtggctgctgctaaagttaggagagcacaagaagctgttgtcaatggcagacctttctctgagtccctggttgaagttctttacaacatcaatgaacagctccagactgaagacatagatgctcctctcac

SEQ ID NO: 207342 - DNA, 299 bp, Gossypium hirsutum
cacaacacacccactggtgttatcgtgtgtcacctacggagtccacactaccctctatatcttacactctaaacaacaaatttgcccttcataaaaaagactctttatttttaatgtaacttctactccacccgttaagcaaggagctgataaacctttatcgcttgcatctaaacaaatcctttcatacttgaatggcatccttccaggtgattatggatttgaccccttgtgactctcaaaccctgaacgtccactaaggttcatcgagcctaaatggctatcctactgtgagatca

SEQ ID NO: 207343 - DNA, 327 bp, Gossypium hirsutum
tctctacttgtcatctagccttttcaccacatctgatgcttcttctgcaaatgctggggtcattgactagtacctctaaaagagcaaaactaacacggaatcgaatgacaagaagaggctgtcaacaaattgagccaacttttccagaacatacactgctcaatttggcacttgcacattccctgagaacttcactggctgccaacatcttgccaagcaaaatatagtaccattcatctcttatcatttggccttggaatgtgaacgtgaaagacaaatacaagctgttgtccaacgtactctggaaatggtgataccatccaaatg

SEQ ID NO: 207344 - DNA, 424 bp, Gossypium hirsutum
cccacgcgtacgctttgatactggaaggcttaaagaagctttgagcaaggtgcttgtcgcgttttaccctgttgctggaaggttggggtatgatgaaaatggaagacttgagataatatgcaacggtgaatgagttttattcgttgaagctgaaactactgcagtcatggaacatttgattggtgcttttgccgagaaccatcaagtgttacgtttagtccctaaagtcgactattctgaaggaatatcttcctatccacttattttattgcaggtaactaagttcaaatgcggtggactttgtcttggagtaggtattcaacatactttatgagacagctcagcggctcttcatttcatcaatagttgggctgacacttcacagtgctggactcctgccattgcaccattcattgatcgaact

SEQ ID NO: 207345 - DNA, 440 bp, Gossypium hirsutum
  unsure (1)..(440): unsure at all n locations
gatgaagggtttaaggttcgagttgtctccccagacaaggatttctttcagatcctatgtccttcattacgcctactacgaattgcaccacgtggctatgagatggtttcatttggaatggaggatttctcaaaaagatatggagatctgaaaccttctcagtttggtgatgtagtctctcttgtgggtgatagatgtgataatatcccaggagttgatggaattgggaatgtccatgctgttcaacttatcactaagtttggcacattggagaatttactgaagtgtgttgatgaagttgaagtggaccacatcaggaaggcctngatagcanatgctgatcaagccgtcttaanngcaaaacttggcatgctgagatgtgatctttcattctatatggtaccatttttcaaccagagatctcacatttaataaacccg

SEQ ID NO: 207346 - DNA, 424 bp, Gossypium hirsutum
  unsure (1)..(424): unsure at all n locations
cccgaattgaccgcacgcgtccagcccacgcgtccggacacagtgtctgaggcgtgcatttgccttcaagataacaacatancgtacaatgggctcatctctgattgtggaaagcgcatcttcctcctccctcagtgttatgctgagaaacaagctcttggggaagtgagcgtagagcttttggacacccacgtgaacccggctgtgtgggaaattagtggtcatatggtgttgaagaggaggaaggactatgatgaggcgtccgacgaaaatgcttggaggctacttgcagaggtatctctctctgacgagaggtttgatgaagtgaatgcacttatctttgaagccattggcgggggcaaagatgcaactgaaaatgttgaggagcctgatacaaaaactcaatctattgaaaaagaaaatg

SEQ ID NO: 207347 - DNA, 344 bp, Gossypium hirsutum
gctaaacgtccggtctctgtctttgtggacggcagcgttcgccatgaaaccaacttctttagagcttgggccatgtgagacggtggtatatttatcgtgcgaccattggtggttttactggctactaaaagcttagctaacagggggtaagtcctttcgacactcagccaggagtgcaagctaaccatcactatgagcagatggcgttcgattaaagaaatgactcttgaccacattgcgacaaaaatggacagtggatactctcatacggtcccgaccctgaagagccctatatattatgggcctgccactttatcctagcgaatggcaaggagaacttaggt

SEQ ID NO: 207348 - DNA, 352 bp, Gossypium hirsutum
cccacgcgtccgcacggtgcagtactaagactccagtttctgaaaaaccacttcctcttggcatcaataaacaaatttgggcagcttcattatcaggatgttacaatgggtgagatggtaggcaatttccggactggtttaggccgcactgatgttatgcaggtcaatccatttaacggagttgttgcattgggtcattctagtggtacagtaaccatgtggaagcccaccagttctgtcccacttgtaaagatgctatgccatcctggacctgtctcatcattggcgttccatccaaatgggcatctcatggctacatctggtaaagaaaataaaatcaagatttgggact

SEQ ID NO: 207349 - DNA, 426 bp, Gossypium hirsutum
cccacgcgtccggggtgacatccccacctatgttgttggagtgaatgctgacacctacaacccagatgagcctatcatcagcaatgcttcttgcaccaccaattgccttgctcctttcgtcaaggttctggaccagaagtttggtatcatcaagggcaccatgactaccactcactcgtacaccggtgaccagaggctacttgatgctagccaccgagacctcaggcgtgctagagccgcagctctcaacatcgtcccgacttcaactggtgcggcaaaggccgtggcccttgtactccctactctcaaaggcaaacttaacggcatcgcattgcgtgtaccaacaccaaatgtgtcggtggtggacctagtggtccaggtttcaaagaagacgtttgctgaagaggtgaacgctgctttcaaaga

SEQ ID NO: 207350 - DNA, 411 bp, Gossypium hirsutum
cccaagcgtttgtggacgcgtgggcggacgcgtgggccccatccctttattaaggctgctattgaacctaggactagagctgatttctataaaatggctaatggtttgatcaagcttgctcaagaagacccttctttccacttctcacgggatgaagacatcaaccagaccgtaattgaaggaatgggagaattacatctcgagattatcgttcatcgtttgaagagagagttcaaggtccaagccaatgttcgtccaccacaagttaattaccgggaaagtatttccaaagtttcataagtgaaatacgtacacaagaaacaatcatgtggacaagggcagtttgctgatattactgttcgtttcgagcctatggaagcaggtaatggatacgatttcaagagtgaaatc

SEQ ID NO: 207351 - DNA, 365 bp, Gossypium hirsutum
tttgctttcagttaacaacaaaatccgtaaatggctaccactgcttctccaatggcgactcagctgaagagcagctttaggtcgtctgttacaagaggactggtagtccccaggggcatttcgggatccccgtttaaagtatcttccggaaagaccaggaccccttgcttcactgtcaaagctgttcaatccgacaagtcaacatttcaagtaatccaacccatcaacggcgaccccttcattggaagcctggagactccaatcacctcaagccccttaattgcatggtacctttccaacctcccagcctataggacggcagtgaacccactttctgaggggaatcgaagtgggtctggctcacg

SEQ ID NO: 207352 - DNA, 435 bp, Gossypium hirsutum
  unsure (1)..(435): unsure at all n locations
attttctctcaaagttcactacttgtgtgcagacaaaaatggcttttgctgggtttttcttgttgggtttactttcaatggtctcagctgttcatggatatggtggtggatggactaatgctcatgctactttctatggtgggagtgatgcttcaggcacaatgggtggtgcttgtggttatgggaacctgtatagccagggatatgggacaaacaccgcagctttgagcacagctctgttcaacaatgggcttagctgtgggtcttgctatgagattaagtgtgtgaatgatggcaagtggtgcctgcctggttccattgtggtcactgctaccaatttctgccctccaaacaatgctctcccaaacaatgctggtgggtggtgcaaccctcccctgcaacactttgacctttctcagcctgtcttncaacaca

SEQ ID NO: 207353 - DNA, 449 bp, Gossypium hirsutum
  unsure (1)..(449): unsure at all n locations
ctatgaaaatcaccattacaagtcccaaagaagacccccgctaattctaaaagaaagaaccggagttttctttctctttagttgacgtttattgtccttttggaatttttgatactaaaaaaaggaagcaacgaagaagggaaatggagggcaaagaagaggatgttagattgggagccaacaagttcacagagaggcaaccaattgggaccgcggctcagagtcaagatgacgggaaagactacactgaaccaccaccggctccatttttcgagcctggcgagttaacctcatggtctttttatagggctgggattgccgagtttgtggcgactntccttttcttggatatcactattttgacttgtatggggagtgttaaggaaaaaactaagtgcccaactgttgggattcaaggaatngcttgngcttttcgtggtatgatcttt

SEQ ID NO: 207354 - DNA, 456 bp, Gossypium hirsutum
cccacgcgtccgatgagaggccaatatagagggaaagaagaggcatgaagaacacaatccggtgctgcatctcttgcattctgccctgtggagcactcgatgtgattcgaatagtacactccaatggccgcgttgaagaaatcagtggctccatcaaagccagcgacatcatgaaggcttaccctaaacacgttctaaagaagccttcctcttcttccgatgatgggatggtcccaaaaatcgtcatcgtcccacccgacgccgaacttcaacgtggcaagatttatttcctaataccactcccttcaacacccgataaaacccgttccaaaacttcctcaacaaccaagaagaaaaaaagagacaggcttgacaccaccaacaacaacaacggccggggcgccagcagcaacggccgcacccgccagcataatcacagtcgaagcatgagcaacg

SEQ ID NO: 207355 - DNA, 448 bp, Gossypium hirsutum
gaaggcaggactctcagactactctttcgaaccagctccaccatcacccccaaaaaacaaagcaaattgtagaagatggcaacacaagcacttgtatcatcgtctcttacctactcagtggagactgcaaggcagattcttggagctaaacgacaaattgggtcttcaaggaaaggatcctttgttgttaaggcagcttcgactccacccgttaagcaaggagctgatagacctttatggtttgcatctaaacaaagcctttcatacttggatggcaaccttccaggagattatggatttgaccccttgggactctcagaccctgaaagtccaggaaggttcatcgagcctaaatggctagcctacggtgagatcatcaacgggcgttatgctatgttgggtgcagtaggtgcgattgcccctgaaatacttgggaaggccggtctta

SEQ ID NO: 207356 - DNA, 263 bp, Gossypium hirsutum
  unsure (1)..(263): unsure at all n locations
cagactcatgataatagtgagatatatgagaaggcagtcaagattctcgagacttactggctggaggaggatgaagagacgctacctcctgctgacggtactcancaaagttttcagtttggggagaatgggcttcaagttccatccggtggattcaacttcagttgaagggtttatagaataaacagttcgtaatgcgggttacgactgatacttggggtcgaagtttggtcagggcaccatgatgtttctggttacataaa

SEQ ID NO: 207357 - DNA, 450 bp, Gossypium hirsutum
tattgacattcttgtgaatgctgctgctggaaactttcttgtgcctgctgaagatttgtccactaacgggtttcgaacagttatggatattgattctgttggtaccttcacaatgtgccgcgaagcactcgagtatctcaaaaagggaggacgtggaaggaactcaccgagtggaggatcaatcttgaatatcagtgctactttacattatacagcctcttggtaccaaatacacgtctctgcagccaaggcagcagttgatagcattaccagaaacttagcactcgagtggggaactgactacgatatccgggtcaatggtattgctcctggccctattgccgatacacccggcttaagtaaactcgcacccgacgagattaccatcaaggctcgagagcacttgccttcgtataaaataggggacaaatgggatattgctatgtcagc

SEQ ID NO: 207358 - DNA, 443 bp, Gossypium hirsutum
cccacgcgtccggttttcgccacatagaactgtttgacactgttaaaaacgagtttactgagctaactcggcatgtttctcctacaacccatcacttaaacccgttcatatcacccgactcagcccgagttgggtaccataagtgtaggggagaaagtaatggagcaaaagctactcaattattgcttgaaaatgttaaaagcccagtgccgaatctctctcttttcagaatgtacggttcattcccatctttctcacccgcgggtgaccgaatagcctacgtggatttccccggtgtttatgtagtgaaccgggacggttcaaacctgcgccaggttttccacttgaatgcttttggaagcgcttgggacccggtccgaaagggaattgtatacacaagtgctggaccggagttttcaagtgtgagtactgaagttgatatt

SEQ ID NO: 207359 - DNA, 447 bp, Gossypium hirsutum
cccacgcgtccgggttatgcttgttccatggcctgccattatgcttactatgctgcctttggaccttcagtaacattgagaggctttggtcccaagaacagagaacccaggccttttcaagtacatctttcttccattagcagtcctgttagagcctcctacaatacccttgtctctgaggctgcaaggcttttggttcctacagcaattttcgaagcttcaaaactcaaagttgtcttcatgggagaggggctaaaaagttattctgcaataatcccaagaacctacatcctctcccactgtgacttcactgctaacttaacattgaccatctcaaatgtcatcaaccttgatcagttgaaagggtggtataacaatgatgatgtggttgctgagtggaagaaagtgaaagaaaccatgtttctgaatgtgcattgttttgtaagc

SEQ ID NO: 207360 - DNA, 445 bp, Gossypium hirsutum
gccagggcttattcagggaagatttggctcgcatatatgctgcagagatagtatcagctgtgtctcatctccattctaatggcataatgcacagggatctcaaacctgagaatattcttctagacgcagagggacatgttatgctgactgatttcggcctggcaaaggaatttaacgaaaatacaagatccaattccatgtgtggaactctggaatatatgtccccagaaattgttcttggcaaaggccatgacaaggcagctgattggtggagtgtgggaattctattgtatgaaatgcttactgggaagccaccctttagtggtggaaacagacagaagatacaggataagataataaaggaaaagataaagctgccagcatttttgtctagtgaagcacactcaattctcaaggggctgctgcagaaagatgcaagcaagcg

SEQ ID NO: 207361 - DNA, 447 bp, Gossypium hirsutum
atttagctatagcatacactactagtacccactactagcaatggcttcctcaatgatctcatcggctgccattgccactgcctctccggcacaggctaacatggtcgctcctttcaccggcctcaagtctgcctctgctttcccagtcaccaggaaggccaacaacgacattacttctctcgcaagcaatggcggcagagtgcaatgcatgcaggtgtggcctcctactggaaagaagaagttcgagactctctcatacctccccgatcttacacccgtgcagttggctaaggaagtggattaccttcttcgctcaaaatgggttccttgcttggaattcgaattagaggagggattcgtgcaccgtaaatactcgagcctacccacgtactacgatggacgctactggaccatgtggaagctgcctatgttcgggtgcaccgactc

SEQ ID NO: 207362 - DNA, 452 bp, Gossypium hirsutum
  unsure (1)..(452): unsure at all n locations
gtgccacgtncgaatacataaatgctttacctacttacaagttcaaggtgaaaaaaaatagggatggtgatggtagggaaataaacttgggtgccagtgagggtggtgttgtaactgccggaactgaaaaggaacgtgtcatctctggagaagatgcaatctgctgcatttgtttggcgaaatacgcaaacaacgatgagttaagggagttgccatgttctcatttcatgcacaaggaatgtgttgacaaatggcttaagatcaatgcttcctgccctctttgcaagagcgaggttggcgagaacttactggacgcaatctcgggtacaagtgccaccatcttgagttctctctctggaccgaatgacaaccaccgacgaggagaaatgaggactggtaacagttataccaggtgcagcttcagctacatgttttaatattataatgatgat

SEQ ID NO: 207363 - DNA, 412 bp, Gossypium hirsutum
cccacgcgtccggctaacttgataagtgatcaagaagcaaattatgcgatggaaaggtatgggacaaaatttatggacgattatcaagcaatactgagccaaaagcttggcctccaaaaatacaataaacagcttgtcaataaacttcttagtaatttggctgttgataaagtggattacacgaacttctttcgggcactttccaatatcaaagcagatcctagcattccaggtgatgagttgttggtgccattgaaagctgttctgctagacatgggcaaggaacgcaaggaggcgtggactagttgggtacaaacctacattcaagagctggttgcgagtggcgtctcagatgaggagaggaaagcttcaatgaactcagttaaccctaaatatgttctcaggaactact

SEQ ID NO: 207364 - DNA, 377 bp, Gossypium hirsutum
cggatgtatcagtcccgtgcgcgaaagtgacggagacgacttatcagactgtgcaactctggttggcggagagagaagcgagggtgctgaggtacagagagaagagaaagaacagaaaattcgagaaaacgatacgttacgcttctaggaaagcttacgcggaggtgcggccgaggattaaaggaagatttgcaaagcgcagtgacgttgaagtcgaagtcgacggcggtaacatgtatggatttggcgtcgttccgtcgttttgaaattaactaaggtagccatgtagtaatattctacgttaaattttggaattgtaattttccaagtgtttttttttcttcttttctttcttttttacttcattgctcacttaa

SEQ ID NO: 207365 - DNA, 375 bp, Gossypium hirsutum
caaattgactgtggtgaagggaagaaggttttccagaaggaagatatggcagaaggaagccgattttgttatgttgatgagggcatttttagaacaaaacctacatttgctcgtttttgttctctcttggataattacaacccaaatgctgggtgcaaggaagttgttacatctgaggagaaacaagagcaggctgcatttatagaagaaatcagtagaactgcgcctattaaatatcttcacaagtacctgtctcggaagggcattgtatctgaaaactatcaagatttcaaaagaatgttgacaagcctatggtttgatctttatggtcgaggaggtacatctggttcctcttctgcttttgaacatgttttt

SEQ ID NO: 207366 - DNA, 419 bp, Gossypium hirsutum
  unsure (1)..(419): unsure at all n locations
aagcaaggaacccattttgaggagggattcgtgcaccgtaagtactcgagcttacccacgtgctacgatggacgctgctggagcatgtggaagctgcccatgttcgggtgcaccgactcggctcaggtgttggaggagcttgaggaatgcaagaaggcataccccaatgcattcattagaatcattggcttcgacaacgtgcgtcaagtgcagtgcattagtttcattgcctacaagcctccaggcttctaagctttttattaactttgtctctccatttgtttgaatttgtactcagaaaaaatcatgttctttacttttgcttttccttttctttgagttattggcctttgtttctcgatttccgggttttaatcctgagaactaatgaataaaaagttggttttcttcccnnnnna

SEQ ID NO: 207367 - DNA, 451 bp, Gossypium hirsutum
gaattatcaagtataaagaaacagcttcttgagggcttttcacccgatgatgcatgttcatgaggtgttccggtgtggagaccatgttctcctcttgcgcagatggagtttcagtcatttgatgagatgcctctagctgcagtaacagatgaagccaatggaagtcagtcaggtcgcaaagcatcattatccataagtaaactagatgtcttaagtgccaatgagctattggattcagctctggaaacagcccggcaagttgtaagcttttcggtttccccagcaccgattccttatgaccagatgaagagtcagtgtgaagctagtgtaatgggtaaacagcagaagatgtcaatacttcatcacttcaagcatcaacaggaagccagtgcaacctcagaggaaattgaaaatgaaattctctatttaccaagtgagaaagcggagtcta

SEQ ID NO: 207368 - DNA, 440 bp, Gossypium hirsutum
  unsure (1)..(440): unsure at all n locations
cggacgcgtgggcggacgcgtggggtcggtctcacttcaagctgcanctaccctgatgcagccaatcaaggttgctgcaccatcaaggaccaatgtgctgctcaagtcctcccagagcgtttctaaggccttcggtttggagcctgttggtgctaggctcacctgctctttgcaaactgacctcaaggacttggctcagacgtgtgttgatgctaccaagctcgctggtttcgctcttgctacatctgctcttgttgtctcgggagcaagcgctgaaggagttccaaagcggctaacctacgatgaaatccaaagcaagacatacatggaagtcaaaggaacaggaactgctaaccagtgcccaaccatcgatggtggtgtcgactcttttgccttcaagcctggcaaatactacgccaaagagttctgcttggagccca

SEQ ID NO: 207369 - DNA, 433 bp, Gossypium hirsutum
  unsure (1)..(433): unsure at all n locations
aaacttcaccgttacctcaaaaggaggagatgatggagaattttccgaactgtggctattcgggtggacatctttgttgattccccccatgacattgttgatcatcaacataatcggagtcatagtcgggatttcagatgccatctctaatggatacgactcatggggccctctattcggtagactgttctttgcattctgggtcattgttcatctttaccccttcctcaaggggttgatggggaaacaagacaggcttcccaccattattgtggtttggtcaatacttntagcatcgattttctctcttttggggctcgagtcaacccctttatatcgaaaggaggcattgttttagaggtgtgcgggttgaactgggaactaaaaataaattgtggaagaaaaaacaaaggagtagaattagatgttcagt

SEQ ID NO: 207370 - DNA, 413 bp, Gossypium hirsutum
  unsure (1)..(413): unsure at all n locations
cccacgcgtccgccccattctcatagctttcatcatcttcaaatggctaaatcacttgtcattgttatgttatgtgttctcttagtaattgttttacttggagaaatccaggcatcaagcccttctcaaaaacaaagacaaggcaaccatggaaatggaatgtatggtgccacccaagggagccttcgtcctcaagagtgtggtccaagatgcacacagagatgctcagctacagcatacaagaaaccatgcatgttcttctgccaaaagtgttgtgccaagtgcttgtgtgtgcctccaggcacttacggcaacaaacaatcttgcccttgctacaataattggaagaccaagagaggaggccccaaatgcccttagatccctaactatatctatgtntgtctctagttaaa

SEQ ID NO: 207371 - DNA, 452 bp, Gossypium hirsutum
cccacgcgtccgagttgatcaactattatgtaagagagaaatacacattgaggtgcactgggggaatggtacctgatgtcaaccagatcattgttaaagagaaaggaatatttacaaatgtggcctcaccatctgccaaggccaagctgagattgttatttgaggtagcaccattggggttcttgattgagaaagcgggtggttatagcagcgatgggcaaaaatcggtgcttgacaaagtgatcgagaacctcgacgataggactcaagtcgcgtacggttctaagaacgagattatacggtttgaagaaacgttatacggatcgtcgaggcttaatgcaggggtccctgttggagctactgcttaagcaacaatgtttttacttttgtttgccttttcaagacattttgttttcgttgtaccttaatgatctcaaacaaaacttttaagt

SEQ ID NO: 207372 - DNA, 455 bp, Gossypium hirsutum
cacagaggagttctcaggggaaaatggagaaatctttcttgtggtatactccattgcttggggaatatagtttgggaatctaatgttacagtattctatgcgataaaaagcttacagcatcctttgaatatactatctgatgaggcataatatgctaatgctttgtaacaaatttcatttacatacaacttacgattattcatgattaatctctgctttttatattgtgttgaatctcttctgatgtataatttcagctcgactaattttttattccgattgcagtttcaagagtagctatccttcatgggaaccagattctcaaggaaagcatttcttgtcaaatattcgaactttccgggatcaaatgttgcaagggcagggagctagacatgtatattcttctgatagactgtggcgaggtagcccgctgagagcttacagtgatagaaatg

SEQ ID NO: 207373 - DNA, 375 bp, Gossypium hirsutum
ttttgatgtaagaacatcatccatctcttcttttttttgaatgcaaatatagcatgtcccggttgcaactggaggatttctattacatggctgaagacatcatcgatgatatggatgaagacgactatggtagagctggtggagacatggatgcccatgaatatgacatgctgaccaaggtgactgatacatcttctggtcaagcacggaaggggaaggacattcaggggattccatgggaaagattgaacataaccagggaagattatagattgacaaggcttgaacagtataagaattatgagaatatcccggcctctggtgatgctgttgtcaaggaatgcaaacagatggaaaaaggggggaactactatg

SEQ ID NO: 207374 - DNA, 449 bp, Gossypium hirsutum
  unsure (1)..(449): unsure at all n locations
gccagtgattgtttattgggtttatggtggactgtatacgattttaggctacacttgtaacaattagaggttgcatcctaaagaagatgaggatganaagaactttgcctccaaaaagaccgtcatcaaaggcgtccttgggcaacaatttcgtcagttcatcgccactaacctattatatatgataacaagaggaaacgatgccgaagcttcttcagggcagtcaacttccttctttgttatagcgagacagtttattgtagcaatgttcgtattcgatacgtaccaatattttcttcacagatacctacaccagaacaagttcttgtacaagcacctccattccaagcatcatcgactggtggtttcgtacccatttggtgctatctacaggcatccgatcgagggacttctttttgacatcatatgcggtacaatggctatttaca

SEQ ID NO: 207375 - DNA, 439 bp, Gossypium hirsutum
  unsure (1)..(439): unsure at all n locations
cggacgcgtgggcggacgcgtgggcggacgcgtgggcccgctgagtttaagcatatcaatgggcggaggaaaagaaacttacgaggattcccctagtaacggcgagcgaaccgggaaaagcccagcttgagaatcggtcgccatcggcgtccgaattgtagtctggagaagcgtcctcagcgacggaccgggcccaagtcccctggaaaggggcgccggagagggtgagagccccgtcgtgcccggaccctgtcgcaccaagaggcgctgtctacgagtcgggttgtttgggaatgcagccctaatcgggcggtaaattccgtccaaggctaaatacgggcgagagaccgatagcgaacaagtaccgcgagggaaagatgaaaaggactttgaaaagagagtcaaagagtgctngaacatgtcgggagggaagcggatg

SEQ ID NO: 207376 - DNA, 453 bp, Gossypium hirsutum
gtctttgccaagatgggaatcaaccccattatgatgagtgccggagaattggagggggggaacgccggagaaccaggcaagttgatcaggcaaaggtaccgtgaggccgccgacattatcaagaaagggaaaatgtgttgcctctttatcaacgatctcgacgctggagccggtcgtatgggaggaaccacacaatacacagtgaacaaccaaatggtgaacgccacactcatgaacatcgctgataaccccaccaacgttcagctccccggtatgtacaacaaggaagagaaccctcgtgttccgatcattgtcaccggtaacgatttctcgacgctgtacgcgccgctcatccgtgacggtcgtatggagaagttttactgggcacccaccagggaagataggatcggtgtttgcacaggtattttcaggaccgacaatgttcccgttgat

SEQ ID NO: 207377 - DNA, 410 bp, Gossypium hirsutum
cctataattatttgatctgtgaaaacacagaattttgtgagggctattatctcgttttgggatgaattaagtgaataaagtttagttctctttgcgcgtgtcccgttctcttctccaatcctccaaaacttgaacttaaaaccccattttagttgatcccaaagttgacccctttttttgtttcagtatagtaatataccaagcctttgcttaaatggaggttaagctatggaacgacaagcgcgagagagaaatgtatgagaattttgcagagctgtatgccattatcaaggcaacagagaagcttgaaaaagcttatgtgagggatattatttcatcatctgaatatgagactgaatgccaaaagcttattgcccatttcaagaccttggcttcaacactcaaagata

SEQ ID NO: 207378 - DNA, 451 bp, Gossypium hirsutum
ctgggttcttctttctctctctccaaagttcttcgatcctttccgtctccaaaggtctccggagttagctgcatacgagttgagtagaaactggatattgcaagttttttagggtttcatttaatcaaaggccgttgaaggaggacgatttaatggaggcggcaacggcgcaagggatggacccagcggtactagacaatataatcagacggccgacggaagtccggtcagccaagctagtgaaacaagtgcaattatctgaatctgagatcaaacagctttgtgttgcttcgaaagatatcttcgttcaacaacctaatttgcttgaactcgaagcacccatcaaaatttgcggtgacatacatgggcaatatagtgacttactaaggctgttcgagtatgggggttttcctcctcatgctaattattttctggttcagtagcaacaaat

SEQ ID NO: 207379 - DNA, 450 bp, Gossypium hirsutum
aacaaaatcaactgcttcacaatggcctctacaaccatggctctttcttccccatcattcggcggtaaggcagtgaagttctgcccttccacccctgaaatccagggaactggccgtgtttccatgaggaaaaccaccaagcctgttccttctggtagcccatggtacggtcctgaccgagttttgtacttgggtccactttccggtgagccaccatcttacttgaccggtgagttccctggtgactatggttgggacactgctggactctcagctgatcccgagacctttgctaggaaccgtgagctcgaagtcattcactgcagatgggccatgttgggagctcttgggtgtgttttccctgagctgttggctaggaacggtgtcaagttcggtgaagctgtatggttcaaggccgggtctcaaatcttcagtgagggtggacttgac

SEQ ID NO: 207380 - DNA, 435 bp, Gossypium hirsutum
ggtacctcacaggctgactgtgctgttctcattattgactcaaccactggtggttttgaagctggtatctctaaagatgggcggactcgtgagcatgctttgcttgcttttaccctcggtgttaggcagatgatttgctgctgcaacaagatggatgcaacaaccccaaagtactcaaaggcaaggtttgatgaaattgtcaaggaagtctcttcttatcttaagaaagttgggtacaaccctgagaagatcccgtttgttccaatctccggttttgagggtgacaacatgattgagagatctacaaacctcgattggtacaagggtcctactctccttgaggctcttgaccagatcaccgagcccaagaggccctcagataagccacttcgtcttccacttcaggatgtctacaagattggtggtattggaact

SEQ ID NO: 207381 - DNA, 417 bp, Gossypium hirsutum
cttgattggtggaatcccaattgctatgcccactgtgttgtctgtcaccatggctattggtgcccacaggctttctcaacagggggctatcacaaagagaatgacagccattgaggaaatggctggcatggacgttctctgcagtgataagactgggactctgactttaaacaagcttactgttgatagaaacctcattgaagtatttacaaagggagtcgaaaaagagcatgttattctttatgcagcaagggcttcaaggactgaaaatcaggatgctattgatgctgcaattgtaggaatgcttgcacatccaaaagaggcacgggctggtgtccgagagattcacttcctaccattcaaccctgtagacaagagaactgctctaacctacattgataatgatggaaactggca

SEQ ID NO: 207382 - DNA, 450 bp, Gossypium hirsutum
cccacgcgtccggcttcctccaaacatggtcttagctcaagtctcagcttccctttctctgaccgttcgtgatgtctcccctatgatcggtccaaaaacaacccacaaactttctcgtgtacccatttccagtttttcaggaactggttccatttttgccactggttcccctttcttgataagggaatcatttaaccaaaggaaacctgtatgtaaagcaacaacatttaccattacatgtgagcaaagcaccaaggggggtagcaccaacagtttggatgtatggcttggcaggcttgctatggttggttttgcagtagccattactgttgaaatatccactggcaaaggactcttggagaattttggccttacaacacctttgcctacagtggccttagcagtgactgcgttggttggtgttttgacagctattttcatctttcaatc

SEQ ID NO: 207383 - DNA, 354 bp, Gossypium hirsutum
  unsure (1)..(354): unsure at all n locations
agctgtccttcaagatattgccattcttactggtgccgagttccaagcaaatcagctgggtttgttaatcgagaacgcctctgtttancatcttggtatagccaggaaagttatcatcaccaaggattcaacccaaataattgctgatgccgcttcgaaggatgaaatacaagctagggtgcaacaattaaagaaagaactagccgagacagattctgtttacgacacagaaaaactggcagaaaggattgccaaactatctggtggtgttgcagtcattaacgttggggctgcaactgagactgaactctaggatcgcaagctacgtattgaagattccaataatgctacctt

SEQ ID NO: 207384 - DNA, 448 bp, Gossypium hirsutum
cccacgcgtccgcactactagtacccactactagcaatggcttcctcaatgatctgatcgggtaccattgccactggctctcgggcacaggctaacatggtcacccctttcaccggcctcaagtctgcctctgctttcccagtcaccaggaaggccaacaacgacattacttctctcgcaagcaatggcggcagagtgcaatgcatgcaggtgtggcctcctactggaaagaagaagttcgagactctctcatacctccccgatcttacacccgtgcagttggctaaggaagtagattaccttcttcgctcaaaatgggttccttgcttggaagtcgaaattggaggagggattcgtgcaccgtaagtactcgagcttacccacgtactacgatggacgctactggaccatgtggaagctgcccatgttcgggtgcaccgactcggct

SEQ ID NO: 207385 - DNA, 303 bp, Gossypium hirsutum
cccacgcgtccgaacagtttcatttccattctaagtttgtgtttttgatttgcctgttgtgggtttttttttataaaaaagttcagcaaaaatgtttattgagaattttaaggtggagagccccaatgtgaagtacacagagaatgaaattcagtctgtttacaactatgaaactacagagcttgttcatgagaacaaaaatggaacctatcaaggggtggttaaacccaaaactgtcaaaattaattcaaaaattgatttcaatgcccttaaatggggggtgatgcttgtggaatggggagg

SEQ ID NO: 207386 - DNA, 441 bp, Gossypium hirsutum
cggacgcgtgggcaaacctctggtggctaaaaccaaaaaacctgttggggttcgtcaaaggaagtggggcaaatgggctgctgagatcaggcatccactcaagaaaaccaggatttggttgggaacttacgatacccttgaagaagcagccaaggcttatgaagctaagaagctcgagtttgaggctctcactgttgctgccgccgcctctgcttcatctgataaaaccaacgacctttcatgttctgcagctgcttctcacaacaacactgttccctctgcttcagaagagtctgagagccttgtatcgcatacttcaccatcctcgatgcatgaattggatacttctgcatcttgttcagtctctaataacaatgatgattgcggtgatgccaacaaagaggtgttcgatgcgaactttgctgatataccgatacctga

SEQ ID NO: 207387 - DNA, 425 bp, Gossypium hirsutum
aaggaaatgagcttcctcgtctcgtctatgtatctcgagagaaaaggcctggttggttgcgtcacaagaaagctgggggcatgaacgcccttgttcgggtctcgggggtgctcacaaatgctccttttatgttgaacttggattgtgaccattatttaaataacagcaaggctgtaagagaggctatgtgtttcttgatggaccctcaaattggaagaaaggtttgctatgtccaattccctcaacgtttcgatggtattgatagacatgatcgatatgccaatcggaacacagttttctttgatattaacatgaaaggtctagatggtatacaaggccctgtatatgtcggcacggggtgtgttttcagaaggcaagctctttatggttatgaaccttcaaagggacctaagcgcccgaaaatg

SEQ ID NO: 207388 - DNA, 398 bp, Gossypium hirsutum
cccacgcgtccgcaaagttccatggacaagatggaattgtggctaattttttcagcctgcgggcttggatgggtttgagctgtgtcagcttgtttggagctcagagggtggtgggctttctaagcttttggcaccgacgtgaagtgcggacgacaagagcatatgtgttgccggggcatatcttccttggtctctacacttatggcttatccaaggcaacagcggaaacagggctggtagagaaattgacattcttgcaaagcacgcggactgcattcaaacactgtccggagaccatgattgttaatagtctatgtctggggttggatctcctctgtggcattgtcatattgacagcagatgcgcctaaatatcatgctctgcaaaccaaacttatg

SEQ ID NO: 207389 - DNA, 403 bp, Gossypium hirsutum
gcacgatgccgggacgtatgatgtgagtactaaaaccggaggtccaaatggctctataaggaatgaagaagagttcactcatggcgccaatagcggcttgaaaatcgctattgatttttgtgaggaagtgaaggctaaacatcctaaaattacgtatgctgacctataccagcttgctggtgttgttgctgttgaagtcactggaggtcctaccattgactttgtacctggaagaaaggattcaaacatttgccccagggaaggccgactgccagatgctaaaagaggtgcacctcatctgagggacatcttctatcgaatgggtctttctgacaaagatattgtggcattatctgggggtcacactctgggaaaggctcatcctgagagatcaaggttttga

SEQ ID NO: 207390 - DNA, 447 bp, Gossypium hirsutum
  unsure (1)..(447): unsure at all n locations
gcgcccacgcgtncgcatctctctcatggttatcagacggacaccaaaaagatatctgctgtgtgcatgggtttttagacaatgccggatgggttgaatgaaaacactggctatatcgactatgatcagttggagaagagtgcaactcttttcaggccaaaattaatagttgctggtgccagtgcttatgcacgtctgtatgattatgcacgcattcgaaaggtttgtgacaagcagaaagcaataatgttggcagacatggcacacatcagtggtttggttgcagccggtgttatcccttcaccttttgagtatgccgatgttgttaccaccacaactcacaaatcacttcgtgggcctcgtggagccatgattttcttcagaaagggagtgaaagggattaacaaacaagggaaagaggttctgtatgattatgaagacaaaatc

SEQ ID NO: 207391 - DNA, 454 bp, Gossypium hirsutum
caaacatcagcaaaacataaggcaatggccactactacagccacctgttttcacttacaaaacataccatcatcaccatgggtgaacaacaccagcagaataacaacatacaaagccatggatggatcattaagagcttcaaacccccgaacccaaacattcattaaacccgtgaaatgtagtagtagtagtagtagcggaaatgagataggcatagccgatttcatcggtggagatctattaaaattcgatttagggcaatggctatcggatgtagaacaacacaaagcccttgctatttacacccctcacgaaggtggctacgagggtcgttactttacacggcttcgacaccagggttactatttcctcgaccttactgctcgtggccttggtgatcccgaaactacactcactaagatccatccttgttgccctctcatgttgggaagca

SEQ ID NO: 207392 - DNA, 438 bp, Gossypium hirsutum
cccacgcgtccgctagtacccactactagcaatggcttcctcaatgatctcatcggctaccattgccactgcctctccggcagaggctaacatggtcacccctttcaccggcctcaagtctgcctctgctttcccagtcaccaggaaggccaacaacgacattacttctctcgcaagcaatggcggcagagtgcaatgcatgcaggtgtggcctcctactggaaagaagaagttcgagactctctcatacctccccgatcttacacccgtgcagttggctaaggaagtagattaccttcttcgctcaaaatgggttccttgcttggagttcgaattggaggagggattcgtgcaccgtaagtactcgagcttacccacgtactacgatggacgctactggaccatgtggaagctgcccatgttcgggtgcaccgactc

SEQ ID NO: 207393 - DNA, 323 bp, Gossypium hirsutum
cccacgcgttcgataataagcacctccccgtaagcaaaccacaaaggaaaactgggggagagacccaaaaacagtgggtaaggaagttagtgaacaaggacaaggtcctaaggactatgtggacccttcaccggcacctctgattgacatggctgaactcaagtcatgggctttttacagagccctcataactgagttcatagccactctcctcttactgtatgtcactgttgctactgtaattgggcacaagaaacaacaagatgcatgtgatggtgctggtctcttgggtattgcatgggctttcagtggcatgatcttta

SEQ ID NO: 207394 - DNA, 338 bp, Gossypium hirsutum
agttgcttcacaatggcctctacaaccatggctctttcttccccatcattcgccggtaagggagtgaagttctccccttgcacggcctgaaatccggggaactggccgtgtttccatgaggaaaaccaccaagcctgttccttctggtagcccatggtacggtcctgaccgagttttgtacttgggtccactttccggtgagccaccatcttacttgaccggtgagttccctggtgactatggttgggacactgctggactctcagctgatcccgagacctttgctaggaaccgtgagctcgaagtcattcactgcagatgggccatgttgggagctc

SEQ ID NO: 207395 - DNA, 451 bp, Gossypium hirsutum
  unsure (1)..(451): unsure at all n locations
gctattgggacaattcccaagtggccagacaggctaacaacagctccttcaagggccttgggcatgaaaaacgggattgacttgtttgaggcanacacgaggcggtgggcaaggagagttgcctattataagaatactttgaacgtgaagcttggtactccagcaatacgcaatgtcatggacatgaatgcattctttggagggtttgcagcagcactcaaatctgatccagtatgggtgatgaatgttgttcctgctcggaagccattaactcttgatgttatatatgacaggggtcttatcggggtataccatgattggtgtgagcctttctcgacataccctcgtacttatgatctcatccatgtagctggcattgaatcactaataaagctcccgggttcaagcaagagcaggtgtaatcttgtggatctaatggtggagatagatc

SEQ ID NO: 207396 - DNA, 349 bp, Gossypium hirsutum
gggagcaagcgctgaaggagttccaaagcggctaacctacgatgaaatccaaagcaagacatacatggaagtcaaaggaacaggaactgctaaccagtgcccaaccatcgatggtggtgtcgactcttttgccttcaagcctggcaaatactacgccaagaagttctgcttggagcccacttccttcactgtcaaggctgaaggtgttaacaagaatgcccctcctgagttccaaaacaccaagctcatgacccgtttaacctacacccttgacgaaatcgagggccctttcgaggtatccaccgatggcaccgtcaaattcgaggagaaagatgggattgattatgct

SEQ ID NO: 207397 - DNA, 412 bp, Gossypium hirsutum
cggacgcgtggggttaattataaggttaagtttatgtgcagctatgggggcaaaatccaacgcgcgttcccacgataaccagctggcttatgttggtggagataccaaaatcctcgtcgttgatcgcaacatcaagttctctgctatcatggccaagttatcttctctttacggtggggattctgaggtttgtttcaagtatcagcttcccggtgaagatctcgacgctttaatttccgttaccagtgatgaagatctggagcatatgatgatggaatatgaccggttgcatcgttcctttgccaaaccggcccggttgaggttgtttctattcccgttgaattcgcccgtggtggcgtcaggatttgaagggagtgaaccgaagtccgataggcaatggttcattgacgca

SEQ ID NO: 207398 - DNA, 427 bp, Gossypium hirsutum
atcatagcactctttcttgcatagcatgcaaccgttaagcagagaagatatgatgttgcacgccatgaaatctataataacctttatgcaaacctacttacaaacgacctgacgggctattatgcaacacaagaaactgaacactactgacatcttgacttgacaacagctttcccaagaggatttgctttcgaagttatccaagtctactctggcccgccatcgattgtgtataagttcaggcactgggggtataaggaaggtcctttcaaaggccatccccctactggggaacttgttcaactttatggaatatcaatttttgaggttgacgatgagatgaaaatcttgaaggtggagttcttttttgatcgtggggagctgcttggaggtcttatgaaaggtgataaattgactagtggaactg

SEQ ID NO: 207399 - DNA, 443 bp, Gossypium hirsutum
cccacgcgtccggctaatttaagagaaatattgaatttttgttaccaagaaaacttggtattacttggagatgaggtttaccaacagaatatataccaggacgagcgcccctttatcagttctagaaaggtgttgatggatatggggccaccaattagcaaggaagtccagctcgtttctttccacactgtgtctaaaggatattggggtgaatgtgggcagcgagggggatactttgagatgaccaacattcctccaaagacagttgacgagatatacaagattgcatcaatatccctcagtcctaatgttcccgctcagatatttatgggattgatggtcaacccactcaaacctggagatgtttcatatgatcaaaattgtagggaaaagcaaagaatcctttgatcattgagaagagagcaaggatatgactgatggat

SEQ ID NO: 207400 - DNA, 418 bp, Gossypium hirsutum
ggcgcttcaaccaacaccgacctcaacttcctcaacggcgagatgaagaagttgaggcccggaaaagagaagctgaaaaagaacgagcccgacgtgaccgtctttataatctcaaccgatcgaaccagaaccagcaacgtcgtgaagctgcgattttcaaatcctccgtcgatatccaaccagagtggaacatgctggatcaaatccctttctcaacattctccaaattatccttttccgttccagaacctgaagatttacttctctgcggtgctttagagtattacgatcggtcctttgatcgaattaccccgaagaacgaacggagactcgagaggttcaagaacagaaacttctttaaagtcaccacgactgacgacccggtgatccgaagattggcaaatgaggacaaagcaac

SEQ ID NO: 207401 - DNA, 410 bp, Gossypium hirsutum
atggttagctgctgcaacatggcatcggctgcttcaggtttcttgctaacacccaatgtttgtgcagggacttctaagaccaacaacaacaacatggtgtttttcccatccaagaccaacaacacctcaaggcttgttgtgagggcagctgatgaggaggcttcaccaccaccaccctctccaaccccagcaaccaccactgcaccacctgaagggggtgaagctcctaagcctaagccaccaccaataggaccaaaaagaggcaccaaggtgaagattcttaggagggagtcctactggtacaacagctatggatcagttgttacagttgaccaggtcactctttctctctttcttcttccagctccatttgcatgcatgcatgcatgtatgaaggaactatggatcta

SEQ ID NO: 207402 - DNA, 442 bp, Gossypium hirsutum
gtgcttcttcggctattgcagctgttgccatctcatcccccagttcccagaagggtggatcagtagtggggacaagaaaggcttctttcctttcagggaagaaacttacatctgtgagaaagtacacaaaaccagctgccggaccaacatttccagtgtgcgccgccgccgaccccgacagacccctttggttcccaggcagcactcctcctccatggctggatggcagtctccctggtgactttggtttcgatcctctcggtcttggttctgaccctgagacattgagatggaacgtacaagcagagctggtgcactgcagatgggcaatgttgggagctgctggtattttcatcccagagttcttaaccaagattgggattttaaacactccatcgtggtactcagctggaacagaggaatacttcactgacaccacaac

SEQ ID NO: 207403 - DNA, 340 bp, Gossypium hirsutum
gcaacgtgtgcatcatacctgtttcggcacatgggacaaatcctgcaagtgctgctatgtgtggaatgaaaattgtttctgttggaaccgattccaagggtaacatcaatattgaagagttaaggaaagctgctgaagctaacaaggacaagttgtccgctcttatggttacttatccttcaacacatggagtgtatgaagaaggcatcgatgagatatgtaagattattcatgacaatggaggtcaagtttacatggatggggctaacatgaatgcccaggtcggtttgacaagtccgggttttattggagccgatgtttgccatctgaatctccacaa

SEQ ID NO: 207404 - DNA, 283 bp, Gossypium hirsutum
cccacgcgtccgcccacgcgtccgcccacgcgtgcgcccacgcgtccggatttcccttttagcttttaacaaactccgtgcttgctctagatctctccgccttccatgtctggttttgtttttatctcacagtaatataatcaatatctcatatggctcttcttgatgcttctcttatttgcgtgagaatgaatgctcatcaacgtcttgctcctgatggctgaggactcatgtgtaccgtgctcagtggaatactgctttgtgggttgatgatcaactctac

SEQ ID NO: 207405 - DNA, 283 bp, Gossypium hirsutum
  unsure (1)..(283): unsure at all n locations
cccacgcgtccgcccacgcgtccgcccacgcgtncgcagagtttgaaataatgtctgggttgttctttacattgctgctggggttcatcatttttaattgttactcagagggtagccatggatatcagcaacagcaatctgctgttgttgttggaactgtgtactgtgatacatgtttccagtctgacctctcaaggccaacccatttcatttcaggttttaaattgaatcccaaactccatcttctcttttctcacgtgatgcaagttttcctttttttttc

SEQ ID NO: 207406 - DNA, 446 bp, Gossypium hirsutum
ggcgatttcgacggcgttatccagtgcggctgagaacacgatagttgttgaagatgttggggataaatttgagaaacggaagactaaagagtttattgaggctttgaagagatggggattagacccaaagcagaaatctatgtttttgatgatggaagtgccggaaactgtgaataaatcgagtcggaatattgggactttgaggatgttaacgccgaggacccttaatttgtttgatattttgaattgtgataatttggtgttgactccggatattgtggattatcttaatggaagatatggtgaagattatgaaggtgatactgaggatgataatgaagaatatgaagaagaagacgaacaaagcggtcaagatgagaatgttgatgcagctcaatgacctggcttttcccccttcattagcatataagccatacatatatgct

SEQ ID NO: 207407 - DNA, 426 bp, Gossypium hirsutum
aaatttcagaaccctaaatccatcccctttcattcctttttcaatcccagttcacaaatttccctttgaattttgattttgtggagccttttaggacgatgtggaatcaggcgtaccggaaaatcgacgatgcggaggcaggagcaaggcccctgtaccccatgatgttagagccgccggagatgagatgggcttttatccggaaaatttactcaatcgtcgccattcaattgttagccacaatcgcggtggccgccacggtggttactgtccatccgattgctcttttcttcgtcagcactggaactggatttgcactttacatagtcctaatcatcacgcctttcatcactctttggcctttgtattactatcaccagaggcatcctggtaattatcttcttcttgggggttttacgggttctt

SEQ ID NO: 207408 - DNA, 414 bp, Gossypium hirsutum
atacctgtagcatatagtaatagtaagcagtaatagcaatggcctcctccatgatctcatcggcaaccattgccaccgtgaaccgctcctccccggcacaggccaacatggtggcccccttcaccggcctcaaatctgcctctgctttcccagtcaccaggaaggccaacaacgacatcacttctcttgcaagcaacggtgggagagtgcaatgcatgcaggtgtggccgcctcttgggaagaagaagttcgagactctctcatacctgcccgatcttactcccgtacagttggctaaggaaagagattaccttcttcgctctaaaaggattccttgctttggattcgaattagaagaaggattcgtgcaccgtaagtactcgagcttacccacgtactacgatggacgctact

SEQ ID NO: 207409 - DNA, 445 bp, Gossypium hirsutum
actactttgagaaagctaattgagctccatttccctagtaaacaagagttctttttttcacagcaatggcagccatgaactccagtgttttggcatgcaactatgctatctcaggcactggatcatctgagcttaatgccaaacttgcttcagcgccatcagttgcttccccagttatgtgcggtggtcgcaagttgcctgtgatcagagcccagcaggctaaattttctgattccaaaggatcaggtgccagtgaaggaagaagagctgctgtgctctacttggcagctggccttttcaccacagctgttgcttcttctgcaaatgctggggtcattgacgagtaccttgaaaagagcaaagctaacaaggaattgaatgacaagaagaggttgtcaacaagtggagcaaactttttcagagcatacactgttcaatttggcac

SEQ ID NO: 207410 - DNA, 424 bp, Gossypium hirsutum
cccacgcgtccgcccacgcgttcgcccacgcgtccgcccacgcgtccggttgtcaggtcatgtgtggagatcagtctgcaaggcacgtggacttgaagatgatcaagggactaaactgtacattgccactgatggaagggcaaggttgcgccccccactcccacctggttactttgggaatgtgatcttcactgctaccccaatagcagtggcaggggatctactgtcaaagccaacatggtacgctgcgagccgtattcatgatgcattggttcggatggatgatgaatatctaaggtcagcccttgattacctggaatttcagccagatttgtctgcacttgtacgtggtgctcatacttttaggtgtccgaaccttgggattactaacttggttaggctaccaatccatgatgcagatttc

SEQ ID NO: 207411 - DNA, 430 bp, Gossypium hirsutum
gtttttatgttaggtattgtgatggactcgggagatggtgtcagccacacagtgcctatttacgagggttatgccctcccacatgccattcttcgtcttgacttggctggtcgagacctcactgattacttgatgaaaattctgactgagcgtggatattccttcaccaccacagccgaacgggaaattgtgagagacgttaaggaaaagttgtcttacattgcccttgactatgaacaggagctagagacctcaaaaacaagctcatcagtagagaagagctatgagttacctgatggtcaggttattaccattggtgctgaacgtttcagatgccccgaagtgcttttccaaccatccttgattggtatggaagctgcaggcattcatgagactacatacaattcaataatgaagtgcgatgtggata

SEQ ID NO: 207412 - DNA, 301 bp, Gossypium hirsutum
tttaggcatagcatacactactaggacccactactagcaatggctctctcaatgacctcatcggataccattgccactgccaatgccactcaggctaacatggacgctaacatgaacggtcttaagaccggccttgattttgcagttgctaggaaagccaacaacgacattactaacctcgcaagcaatggcgcgagacttcaatgcatacaggtgtggcctcctacttggcagaatacaggtgagactaacttatacattctcgatctcacacccgaacagacatctaaggaattagatt

SEQ ID NO: 207413 - DNA, 444 bp, Gossypium hirsutum
gaaaaaaacaataaagagaaaaaatggatgaagaggagcatgaggtgtacggaggggaaatccccgacgaaggagagatggagggcgaattggaccctcagaacgccgacgtcgacatgtccgccgccgatgaagacgctgtcaaggaattggacgagatgaagaaacggttgaaggaaatggaagatgaagcggcggcactccgtgaaatgcaggccaaagtcgagaaggaaatgggtgctgttcaagatcccgctggtgcaacagctaatcaggcgagcaaagaggaagcagattcacgatcagtttttgttggcaatgttgattatgcatgcacacctgaagaagtgcagcagcattttcaatcttgtggcacttgtaacagagtaactattctgacggacaagtatggtcaaccgaaaggatttgcttatgtagagtttc

SEQ ID NO: 207414 - DNA, 419 bp, Gossypium hirsutum
gccacgcgtacgcccacgcgtccgggttattatctattgaaatggctgcggtgagagaagctttgctaaagcgcctgagggtgaacgcaacatccctgtcgctgctccgtaaccctaaacctagccttaacggtctctttgctctcaccttcaacgccgtccatcgtcgtttttccgacgacgtcatgggctcatttctcgacaaatctgacgtcaccgatcgcgtcgcctccgtcgtcaaaaacttccagaaagtagatccttccaaggttaccccaaatgcccattttcaaaatgatctcgggttagataatttggacactgtggaggtagtcatggcccttgaagaagaatctgggtttgagatacctgataatgaggcagacaagatcggcactattaatcatgctgctgagttc

SEQ ID NO: 207415 - DNA, 364 bp, Gossypium hirsutum
gttggggctggtatcaagccaacatcgatagtgagttacaaccatctgggaaataatgatggcatgaatctgtcagcaccccaaaccttccgttccaaggagatctcaaagagcaatgttgttgatgacatggtttcaagcaatggaatcctctatgagcctggtgaacatcctgatcatgttgtggtcatcaagtatgtgccgtatgtgggagacagcaagagagccatggatgagtacacatcagagatattcatgggaggcaagaacaccattgtgttgcacaacacatgtgaggattccctgttggctgctcccattatcctagatttggttcttcttgctgaacttagcaccaggatcc

SEQ ID NO: 207416 - DNA, 431 bp, Gossypium hirsutum
cccacgcgtccgcaacgggcgttatgctatgttgggtgcagtaggtgcgattgcccctgaaatacttgggaaggccggtcttatcccagcagaaacagccctcccttggtttagaaccggtgtgatcccaccagcaggaacatacagctattgggcagacccttacactttgtttgtgttcgagatggcactcatgggatttgcagagcacagaaggttccaagactgggccaaaccaggttcgatggggaaacaatatttcttggggttcgagaagtaccttggagggtctggtgagccggcataccctggaggaccactgtttaacccacttggttttgggaaagatgagaagtcattgatcgatttgaagctgatagacgtgaacaatgggagaatggcaatgttggcaatcttgggttacttcatac

SEQ ID NO: 207417 - DNA, 467 bp, Gossypium hirsutum
cccacgcgtccggtgatacctatgcatacacaccctggggcttctgaagtccttgttgttattcaaggcacaatttgtgctggtttcatatcctcagctaacaaagtttacttcaaatctctgaaaaggagacattatggtattcccacaaggtttattacatttccaaatcaatgcaggcagaactcaatccttggcatttgtatccttcagcagtccagaccctggtctccaaatcctcgactttgccttgtttgcaaatgacttgccgactgacattattgaagaaaccacttttctggatgctgctcagattaagaagctgaagggtgttcttggaagaactggttaatattatctgaacttgttgagaagcccttttttttttttttttggatgctttcacgtttgcttggggcttcttgtcagtggtaatttggttgaaattactagccaaagaatgagtc

SEQ ID NO: 207418 - DNA, 433 bp, Gossypium hirsutum
agaatacatggagaagcatgaatttgtttttgatgcagtgctgaacgaggaggtctcaaatgatgaggtctatcgtgagacagtggagcccatagttcctataatttttcaacgcactaaagccacttgttttgcatacggtcaaacagggagtggaaaaacctatactatgaagcctcttccgcttaaagcttctagggatattttgaggttgatgcaccatacctacaggaaccaagggtttcatttgcttgtaagcttctttgagatatatggaggaaaactgtatgatctcctcagtgataggaagaaactttgcatgcgagaggacggtaagcagcaagtttgcattgttggcctgaaagagttcagagtattggatgtagagactattaaggagcttattgagaaaggaaatgccacaagaagtact

SEQ ID NO: 207419 - DNA, 431 bp, Gossypium hirsutum
gctgaagcaatggcagtttgctcagcatacaccacccagtccctcaattcaacttgttcaatctccacaccagcgaaaacccatttaggttttcaccaaaaggaagtagttttctataggagaagcagcaagagaggtggcagcggcagcggcagcagcagcggcccatgcgtgataacatgctcggccggtgattcacaaactgttgtgattggtttggccgcagactcaggatgtgggaagagtaccttcatgaggaggctaacaagtgtgtttggtggtgcagccgagccaccgaagggaggcaatcctgattcaaacacactcattagcgatatgaccactgtgatatgcttagatgattaccattcactcgacagaactggaaggaaagagaaaggggtgacagcacttgacccaagagctaacga

SEQ ID NO: 207420 - DNA, 406 bp, Gossypium hirsutum
atttgatttacagagaccaaagggggggaaatggcgatcacactgaacaatggatttaagatgccagtggttggtttaggtgtttggcgtatggatggaaaagacgttagagacctcatcatcaactccatcaagcttggttatcgtcattttgattgtgctgctgactacaagaatgaagcagaagttggtgaggcattgtctgaagcattcaaaactgggcttgttaagagagaggacctctttattacaaccaagctttggaattctgatcacgggcatgttcttgaggcctgtaaagacagtcttaagaagcttcaattggattatctggatttgtatctagttcactttcccgttgctgtaaagcacactggagtcggtcaaacggacagtcctttggaca

SEQ ID NO: 207421 - DNA, 441 bp, Gossypium hirsutum
gaaaacacttcaaataaaaaaaaaaaaaccctcgaaatttctcgttctttctcggtcgatcctgaatagggatccaatcatgttgacagtgagtgtgaaatggcaaaaggaactcttgaaggctgtggaaattgataccagtcagcctccatatgttttcaaatgccacttgtacgatctgactggagtacctcctgaaaggcagaaaattatggttaaaggtggcttgttgaaggatgatgcagattggtcaacagttggtctgaagcagggtcaaaagttgatgatgatgggaactgctgatgaggttgttaaagccccagaaaagggccctgtttttatggaagatctttcggaagaagaacaagtggtatctttgggtcatagtgctggtctatttaatctgggaaatacctgctacatgaattctacagtacaatg

SEQ ID NO: 207422 - DNA, 395 bp, Gossypium hirsutum
gatttgttgaatatttccgccttgctacaccagagttggagtatggtagaatgaatattggaagccgaccatcaaagcggaagccaagtgggggtatcgaatctcttcgtgcaatcccatggatctttgcgtggacacagacaagattccatctccctgtttggctcggatttggagctgcatttaaacatgtcattcagaaggacattaagaatctccttatgctgcaggagatgtacaatgaatggcctttcttcagagtgacaattgatttggtttaaatggtctttgcaaaaggagatcccgggattgcagccttatacgataagcttcttgtttctgaggaactctggtctttcggagagcggttgagaaccaactttgaagaaactaaa

SEQ ID NO: 207423 - DNA, 405 bp, Gossypium hirsutum
gatatgctgaatatttccgccttgctacaccagagttggagtatggtagaatgaatattggaagcgcgccatcagagcggaagccaagtgggggtatcgaatctcttcgtgcaatcccatggatctttgcgtggacacagacaagattccatctccctgtttggctcggatttggagctgcatttaaacatgtcattcagaaggacattaagaatctccttatgctgcaggagatgtacaatgaatggcctttcttcagagtgacaattgatttggtttaaatggtctttgcaaaaggagatcccgggattgcagccttatacgataagcttcttgtttctgaggaactttgggctttcggagagcggttgagaaccaactttgaagaaactaaaagcctttttc

SEQ ID NO: 207424 - DNA, 413 bp, Gossypium hirsutum
gaaaaccctaagccctacataaaatacaaggtattgaaagagaagttggacaaagaaagagaaatgagtctgctttcgaatgcagattggggaccaatcgttgttgcagtggtcttgtttatcctcttgtcgccagggatgatgttccaattgccaacgaggacaagggtgatagagtttggcaacatgtgcacaagtgggatagccatcttggttcacgccataatttatttcagcttattcaccatcttgatcatggcaattggtattcacatacatgtttactagttgatccaaaatctcaacaaaaagggtaggctcttctttggctcctttctgtaatttggcttcactggtatttcattgttgtttgtaagagaaaatttggataggagtatgatgaatctatttct

SEQ ID NO: 207425 - DNA, 385 bp, Gossypium hirsutum
gcctctttttttttttctaatgatacgatgatgacaaagcagaggccttgattactacaatcctatcgtcttccactctcagatcctcacaaattccatctccaaatcccagcccaaagctaaaaactatgtttcttgtcgattggttctacggcattcttgcttccctcggcctctggcagaaagaggctaagatcctctttctcggcctcgataatgccggtaaaaccaccttgcttcacatgttgaaggacgagagattggttcagcatcagccaactcaataccccacatcggaagaacttagtattgggaaaattaagttcaaagctttcgacttgggaagtcatcagattgctcgcaaggtctggaaagattactatgc

SEQ ID NO: 207426 - DNA, 394 bp, Gossypium hirsutum
cccacgcgtccgggaaaaagggggaaaaaagtgaggatcaagcatagatggaggacatgggagtgtctaggcaaggtggtggattaccttctattgttatcattcttcagcatcacattaacagctcagttggacatccccgagtccatcctcccccacgcctacaatcccttctatcaagtttataccacgttaacccaagattatttggtgcttgagcagcctgcttttttcaaggcacttatgacgttggaacttgtttaccaactccctctcgctttgcttaacatctatgggttgttatactctaagccctggttcaacaccacctgcctcctctttggtgcctctatcgttgcctctacgacagctatggtgggagacattctcaatt

SEQ ID NO: 207427 - DNA, 421 bp, Gossypium hirsutum
  unsure (1)..(421): unsure at all n locations
gtcgcagcttaaacgatgggaacggaaggaatgcaaaccgaacagccttccagttttgcataaaatgcacgttaaggttggagataccatcaaagtaatatcgggtcgtgataagggcaagattggagagataagcaagatcttcaagcataacagcaccattgtagtgaaagatataaacctgaagacgaagcatatgaagagcagaggagaggatcaaccgggacagataattaagattgaagcaccaattcacagctcacatgtgatgctgtattctaaagagaaagaagtgacgagccgggtgggtcataaagtgttagantacgggaaaaaggtccggtacctcataaagccgggagaaatccttgacagtgaggagaattggaagaaactgaaggaagcttcaaaagagaaaact

SEQ ID NO: 207428 - DNA, 442 bp, Gossypium hirsutum
gccacgcgtccggtgctagtacccactactagcaatggctatctcaatgatctcatcggctacgcattgccactgcctgtccggcacaggctaacatgggcacccctttcaccggcctcaagtctgcctgtgctttcccagtcaccaggaaggccaacaacgacattacttgtctcgcaagcaatggcggcagagtgcaatgcatgcaggtgtggcctcctactggaaagaagaagttcgagactctctcataccttcccgatcttacacccgtgcagttggctaaggaagtggattaccttcttcgctcaaaatgggtaccttgcttggagttcgaatcggaggagggattcgtgcaccgtaagtactcgagcttacccacgtactacgatggacgctactggaccatgtggaagctgcccatgttcgggtgcaccgactc

SEQ ID NO: 207429 - DNA, 423 bp, Gossypium hirsutum
ctccattgaatatggctttatccatggcttccacttcattttcaagcttctcaataatcaggaggcatcccaaaaaattattttcgagaaaagttacgacattgttacgaggggaaactcgtacgaaagcaacgaaaggtggagtctcgagtgtttgtgaaccactgcctcctgatagacctttgtggttccctggtagcacacctcctgaatggcttgatggcagccttcctggagattttggtttcgatccacttggattaggttccgatccagaaaccctaaaatggttcgcacaagccgaactaatgcacgcaaggtgggcaatgctggccgtggccggaatcctcatacccgaactactcgaatccttgggcttcatcgacaacttctcatggtatgacgccggctctaaacaatact

SEQ ID NO: 207430 - DNA, 376 bp, Gossypium hirsutum
gggaaagtctggtgcttctttcaaggactcatctctctttggagtgtcactttctgatcacatcaaagctgacttcacctcttctgctttaagatgcaaggttgggattctgtgttctttaaattggacaactatggtgtttatgctgtttttgtgcctttaattgagcctttttcctttgtagagggaattcaaccatagaactggggctgttagagcccaaacaacagccactgcaacaccagcaatcaccagatctacagtggatggaaagaaaacactaagaaagggtagtgtgatcatcactggtgcctcctctggattgagtttagccactgcaaaggccttggctgaaactgggaaatggcatgttata

SEQ ID NO: 207431 - DNA, 399 bp, Gossypium hirsutum
aatttctccaaagttgaccgctgccgccggttctccgtagctgccaccgccactactactccacagagcgaggattctgacgtttccactaaaattcctcctgatactcgcattcccgccaccataatcaccggctttttgggctctggcaagacaacattactcaatcacatcttgactgcagatcacgggaagcgtatagcagtgatagagaatgagtatggtgaagtagacatcgatggctctcttgttgctgctaaagctgctggggctgaggacatagtcatgcttaacaatggctgtctctgctgtactgtaaggggtgatcttgtgaggatgattgcagagctagtcagtaggaagaaagggaaatttgaccacattgtaattgagactaca

SEQ ID NO: 207432 - DNA, 379 bp, Gossypium hirsutum
accactcgtgcgcttcacagcaggaccagatgaggttaaatgctggcaaattagactgctatgcaaggctgctcaagctgcaggagccattcatactgattttgatagaggatttatatgtgctgacgtcatgaaattggaagatctgaaggagcttggcagtgagtcagctgtcaaggctgctggaaaatataagcatgaagggaaaacttatgtggtccaagacggacacataatattctttaagttcaatgattctggaagccggaagaactgaaatgagactcttgagtggggatatggtgctgggttcggacttacatacctggattatcaaatccgtacgcatattgctgccatctgagactttgcttagata

SEQ ID NO: 207433 - DNA, 342 bp, Gossypium hirsutum
ggccactcttacttcaacttggtcctcctcacgaacgtcgtaggtgccgcggatgcccatgctgagtcaatcaagggctctaagacaggatggctgtcaacgtcgagaaactggggtcaaaactggcagagcaactcctaccttaatggtcaaagcctgactcttcaagtgacgacaagtgatggcaggactgtgagcacctacaacgtggcacctgcagattgtcagttcggacaaacctttcaaggtggtcaggtttagagtttcagggcaaatgcctgtaattccaaaatgaggctgtaatgtcatgagatagccattgcttgagacacacagagaaac

SEQ ID NO: 207434 - DNA, 380 bp, Gossypium hirsutum
ttcaatctccacaagttcatgctggtggcaaagagcaattacataaggaagttgataatggaaacaaatgaagcggatttgacaagaatcaacctgtctgaaatccccggaggccctgagatcttcgagaaagcagccaagttctgctacggcgttaatttcgagattacagtgcataacgtggcggctctccgatgtgctgccgagtatcttcaaatgacggataaatactgcgacaacaacctggcagggcgcaccgaagatttcctctcacaggttgccctgtctagcctttatggcgccgacgtcgttcttaaatcatgcgaggatctgctttccatggctgaagagctcaagattgttcaaagatgcattgatgt

SEQ ID NO: 207435 - DNA, 401 bp, Gossypium hirsutum
ctcaagatatcattgtccaatctgcaagaccctatggtcagagggctgtcttgaaatttgctcagtacactggttgtcatgccattgctggaaggcacactcctggtacattcactaaccaactccagacatctttcagtgagccacgccttcttatcctcacagatcctaggaccgaccaccagcctatcaaggaagcagctcttggaaatattcctaccattgctttttgtgacacagactcaccaatgcgatatgttgacattggtattcctgctaataacaagggaaagcacagcattggctggcttttctggcttgtagctaggatggttcttcagatgcgtggtacaattgctcctggacagaagtgggatgtgatggtggatctatttttctac

SEQ ID NO: 207436 - DNA, 354 bp, Gossypium hirsutum
caaagtacaatcactcccaatactttcataacatttcacgaacttcactctggagtcttcaatggcggctgtcgggttcaccatcggtgctgtcaaccgagcaccgttgagtttgaatggatcaggtgccggagcttctgctccaagctcaactttcatggggaacagcttgaacaaagtgagcgctaggttcaacaacaacggctaggcttcagtgggaagtttcatgattgtagctgccaaagaaatcgacgaagacacacagaccgaccaggaccgatggaagggtcttgcttatgatatctccgatgaccatcaagacattaccagagggaaaagtatggtcgactcatt

SEQ ID NO: 207437 - DNA, 465 bp, Gossypium hirsutum
gtcggttactgtttctgtagccaaaccaacccttcaggcaaatgcaaagggttttgcggaattctcaggtctgcgcaactcagctagccttacctttgccaggaaaacctcggatgactttcaatcagtcattgcttttcagacttctgctttgggaatcaataatggtggataccggaaaggcgtggtagaggcaaagctaaaggtcgctattaatgggtttggtaggattggcaggaactttttaaggtgctggcacggccgtaaggactccccacttgatgtcattgcaatcaatgacactggtggtgttaagcaggcttctcaccttctcaagtatgactctacccttgggatatttgaagccgatgttaagcctgttggtgataacgccatatcttgtgatggcaaggtcatcaaagtcgtttctgaccgcaaccccgtgaaccttccatggaaagactt

SEQ ID NO: 207438 - DNA, 459 bp, Gossypium hirsutum
taattttgtttaattttttcaattaatacaaattccatagcaatggcttgcagtggacagcttcatgtggaggttgagctcaagtctcttgcagaaaaggtctgggaaaccattagggactctaccaaaatatttcctcaagctttgtcccatgattacaagagcattgaagtgctcgagggcgatggcaaggcccccggatccatccgcctcatcaattatgctgaaggatctccaatcgttaaggtttcaaaggagagaattgaatcagtggatgaagctgagaagatatatgtttacagcatctttgatggggatctcatgaaatactacaagactttcattgctaagatcaatgtgattcccaaaggagagtcgagcttggttaaatggtcttgtgaatttgagaaggcaagtgaagagatccctgacccaagcgtcattaaggacattgcggtg

SEQ ID NO: 207439 - DNA, 421 bp, Gossypium hirsutum
tgagcgatagaggaaaatcacgaattcctgaaaataaatacaatgcatagatcgcgatctccagggctattagctttatcatttctgttcacatccttccccatctctaacgctctttacgtgccgtcgtcgccggtggttcagctcactccatctaatttcaagtccaaggttttaaattctaacggagttgttttggttgagttcttcgcgccttggtgtggccattgccaagctttaacacctacatgggagaaagccgccaatgtcttgaaaggtgtcgctacagtggcagccctcgatgctgatgctcataagtctcttgcccaagaatacgggattagaggatttcctacaataaaagtgttcgcccctggaaagccacctgtagattatcagggagctagagatgtcaaaccta

SEQ ID NO: 207440 - DNA, 389 bp, Gossypium hirsutum
gcttcttatcatgaaattgcctttccagaggcttgttcgtgaaattgcccaggacttcaagactgatttgcgtttccagagccatgctgttgtagctcttcaggaagctgcacaggcataccttgcgggtctttttgaagacaccaacctttgtgcgatccacgccaagcgtgtcacaattatgcccaaggacattcatttggctcgtaggatcagaggagagcgtgcttaatttacatgcgtgtggatcagtcgctttgaaagactatactattgcttatttctaggcaaatgtattgatcgttgggggtttgtaataatctttcatgccatgatggccatggtaggttcaatgtgatgtgatgatcacttggggcgtctgatatgct

SEQ ID NO: 207441 - DNA, 300 bp, Gossypium hirsutum
accacctgcaatcgctgcaataccaatgccttaatttgtatgaaaaatgctccaaagatacctgcaaagaatttccatgcactgactaggttggatgaaaatagagcgaaatgccagcttgccctaaaagcaggtgtcttctacgatcaagtgtcaaacatgaccatctggggaaatcactcaacaactcaggttccagacttcctaaatgctagaatcaagggcttacctgtcaaagaggtcatcaaggatcacaaatggttagaagaggagtttactgaaaaggtccaaaagagaggc

SEQ ID NO: 207442 - DNA, 258 bp, Gossypium hirsutum
  unsure (1)..(258): unsure at all n locations
gccatgtctcaggaagatatcttagctcttacgaaagctggagaggtgactattgctacacactgtttgaagctgactgaaattaagcttgtgcgggaatttaaacatcctgatggcatgacagataaagagatggatgcagctggagatggtgatgttttggtggggtttggatatccgtnctgatgagtcattgnttgatgctggtgttgcacgtgaggtggttatagaattcaaaaatcacgaaagaaagctggc

SEQ ID NO: 207443 - DNA, 404 bp, Gossypium hirsutum
cccacgcgttcggcgaggcactccataggtcatgtggatgttgtggaagctgcgtagaagatgaggttcaacgtgaacaatgtgaattaacctgtgacttagcaacccatgtcttgtgccatccttgtgccgtttgtcaggaaggtcgcgagattcgtcgaaggttgcaccatccacggttcaatgctcaacctgtcttcaccatggtcccttctggcgagcaaaccatggcccgttgagcctaatttcatgttctgcccattccctaccttataactaaacgtaatctagtagctagctcaacaacattttgttgcgtgatgtctatgctgtgaaaaatatattgcgtgtaatgagttgtggaaattaagtttagaagcagctttatgttacattttctagta

SEQ ID NO: 207444 - DNA, 426 bp, Gossypium hirsutum
gttatgtttcggcggtctaaatcacagaaagctttgaagaagaagcttttggaggtgcaaaacatggggcccaagaaaggtggaaaggtggctgtgcccgacaagaagaaacaagagaacgttgtcaatccgttatttgagaagcgtccaaagcagttcggcattggacgggctttacctcctaagaaggatttgcatcgattcgtgaagtggcctaaggttgttcgtattcaaaggaagaagaggatcctcaagcagaggttgaaggttccaccagcattgaaccagttcaccaagactcttgacaagaacctcgcaacaagtctgttcaagttgctccttaagtacaggccaaaggacaaagcgggcaagaaggaacgtctctttgaaaaggcccaagccgaggcttaaggaaaaggccccgag

SEQ ID NO: 207445 - DNA, 453 bp, Gossypium hirsutum
gccacgcgtccgcccacgcgttcggaacaacattggtgaaatcaccagcggaggatttagcccctgcctgaagaagaacatagcaatgggatatgtgaaatctggactacacaaggcaggcaccaaagctaagattttggtaagaggaaaggcctatgatggagttgtcacaaaaatgccttttgtacccacaaaatattacaagccatcctaagatggaatttgcgctttcagctcctcagttttactgcgatgtttcatctgcaatcaaatgccaatgccctgtttctcttttaactgacatgacattacatgaacatgcatgtgattattgcttgtattctgttcaattccaatttctcgaataatgacaatgaatgttatatatcactaataaagggaaagattgaaacctggcaaagcttcattaaaaataaattatttctgatttca

SEQ ID NO: 207446 - DNA, 392 bp, Gossypium hirsutum
cgtgaggccaaataccaaaatataaatacatggcatcataaacagcgctaagaggatctaattcgagttcaactgggtgtaatctaaatgggtttcaaaggagaccaacccctttatcttcttcaactcgttttctgagtcttcgtactcgagcttcttcttcttcaatttcctcttctttatcccacttcatggggagtgtcacaattggctcaagacttcctatttcacttcaacacaaggggaagagaaggaacttctctctctttgctatggccgctgatgagtcaaagcgttctgtacctttgaaagattatcccaatattggaattatggctcacatttatgcctgaaagacaacgactacctaacgtattttatactacacagga

SEQ ID NO: 207447 - DNA, 435 bp, Gossypium hirsutum
gcgactggtcgtctagtcacggtgaagaacgggaacgattcgctcgaaatatgtcgagtccttaacggcatgtggcagaccagtggaggttggggcagaatcgaccgagacgccgtcgttgaagccatgcttcgctacgctgacgccggtctctccaccttcgacatggccgaccactacgggcctgcagaagatctttatggcatctttatcaatagagtgcgtcgggagcgtccaccagagtacttggaaaaagtcagaggtctcactaaatgggtacctccaccagtaaagatgacaagtggctatgtcagggagaacattgatgtctcacgcaagaggatggatgtgccttcattggatatgcttcagtttcactggtgggattattcgaatcctggctaccttgatgctctaaaaaaccttactgatctg

SEQ ID NO: 207448 - DNA, 409 bp, Gossypium hirsutum
ctctcactcgcttacgcgccacttcgaattccagcgcttccattcaccatatgccttgccagcggatcttccgtcctttccaccggctctcctttcctttatccaccgtcaacgctggctccagttctcgcaggtcatccgcttttgttgtcgccgctagcggcactctcaccgccaattccgtttcgccgagaggtggagtatatacagttggggatttcatgacgggaaaagaggatttgcatgttgtaaagccaacaacaactgttgatgaagcactggaagctcttgttgaacacagaatcaccggttttcctgttatcgatgatgattggaaattggttggacttgcttctgattatgacttgctagcattggactccatatctgggcggcggactgagaatga

SEQ ID NO: 207449 - DNA, 425 bp, Gossypium hirsutum
cccacgcgtccggtattccaaagggagcaaccactgcatcactcttgaaagaagccatccatgggtcagctgcggttatgaagatggaacagattggggaaaagaagttgggtggatatatggctcagttactgaggatatattaacaggcttcaagatgcactgtcatggttggcggtcagtgtactgcattccaaaaaggcctgcatttaaaggttcagctccaatcaacctctcagatcgtctgcaccaagttctacgttgggctctgggatctgttgaaattttcttgagcaggcattgcccaatatggtacggttatggttgtggattgaaatccttggagcgcttttcttatattgcttcagttgtgtaccctttgacatcagttccactgctcgtttattgtacgctgccagctatat

SEQ ID NO: 207450 - DNA, 425 bp, Gossypium hirsutum
cccacgcgtccgaaaggatactattacaggtgaaactcttagcgaccctgaccatcctattgtacttgaacgaatggacttccccgatcccgtgattaaggttgctattgaacctaagactaaagctgatgtcgataaaatggctaatggtttgatcaagcttgctcaagaagacccttctttccacttctcacgggatgaagagatcaaccagaccgtaattgaaggaatgggagaattacatctcgagattatcgttgatcgtttgaagagagagttcaaggtcgaagccaatgtcggtgcaccacaagttaattaccgggaaagtatttccaaagtttcagaagtgaaatacgtacacaagatacaatcaggtggacaagggcagcttgctgatattactgttcgtttcgagcctatggaag

SEQ ID NO: 207451 - DNA, 429 bp, Gossypium hirsutum
gcgactcgttcgtccacgcgtccgcaatgatcggagaccgtgtgttcgatcctttcgggtttgctaaaccgggtggatacttacagtacgatgtggactcgttggaccagaacttggccaagaatgtggccggtgatattataggggtgattagcgagactgcggagctgaaaccgacgccgtttcagccgtacacggaggtttttgggattcaaaggtgtatagagtgtgagttgattcatgggagatgggcaatgttgggtacgcttggtgctattgccgttgaggcactcacctgcgttgcatggcaagactcatggaatgtatatttagtggaatgagcatcatacttagggctaccactttcattctcattgaccacattaatattgattgaggttttggtgattgggtacattgagttccaac

SEQ ID NO: 207452 - DNA, 434 bp, Gossypium hirsutum
gcatacactactagtacccactactagcaatggcttcctcaatgatctcatcggctaccattgccactgcctctccggcacaggctaacatggtcacccctttcaccggcctcaagtctgcctctgctttcccagtcaccaggaaggccaacaacgacattacttctctcgcaagcaatggcggcagagtgcaatgcatgcaggtgtggcctcctactggaaagaagaagttcgagactctctcatacctgcccgatcttacacccgtgcagttggctaaggaagtagattaccttcttcgctcaaaatgggttccctgcttggagttcgaattggaggagggattcgtgcaccgtaagtactcgagcttacccacgtactacgatggacgctactggaccatgtggaagctgcccatgttcgggtgcaccgac

SEQ ID NO: 207453 - DNA, 445 bp, Gossypium hirsutum
gacagatacagatcaaatgtatacactgatttctgcagttcatgcgctatgcaatgaaacaatacttgccaatgatatgtatgttggcgaatgccaagactcgagtaacttcaatgaggaacttatccaaggaaacctgttaatctgtagctattcaatccgatttgtgcttggactctctacaatcaagcaggccttagaaactgcgaaaaacctcagtgcagctggagttgtgttctacatggatccttacgtaattggttttcagcttaatcccacaccattggaaatacctggcatcataattccatccccagatgattcaaagattttactccaatattacaattcatctttggaaagagatgggctttcaaggaaaattgttagatttggggcacttgcaagcattttacgtggactgaaggcaaactacagcattact

SEQ ID NO: 207454 - DNA, 425 bp, Gossypium hirsutum
acgcggacgcgtgggggcgctctcttgacattgagcgacccacttacaccaatctgaaccgtcttggctcccaggtgggctcctctttgactgcttcacttaggttcgatggtgccttgaacgtggatgtaacagaattccagaccaacttggtcccttacccaagaatacacttcatgctttcttcatacgctccagtcatctctgctgagaaggcttaccatgagcagctatcagttgctgaaatcaccaatagtgcctttgagccctcatctatgatggccaagtgtgatcctcgccatggcaagtatatggcttgctgcttgatgtaccgaggtgatgttgtgcccaaggatgtcaatgctgctcgtgccaccatttagaccctgagaactattcagttcgttgactggtgcccaactgga

SEQ ID NO: 207455 - DNA, 389 bp, Gossypium hirsutum
gataaagctgatgactcgggtcttgcttcgtatgttgccggacaaatcgatcgttcccttagctggaaggatgtgaaatggcttcaaacaatcactacattgccaattcttgtgaagggtgtactcactgctgaagatgcaaggatagcggtagaggctggagcatccggaatcatcgtctccaaccacggagctcgccaactcgattatgttcctgccactatcatggccctggaagaggttgtcaaagctgctcaaggtcgggttcctgtcttcttggacggtggtgttcggcgaggaaccgatgtttttaaagctttggcattgggagcctctggtatatttattgggcgaccagtggtgttctcattggctgctgaaagagaagc

SEQ ID NO: 207456 - DNA, 407 bp, Gossypium hirsutum
gaccaatacgccttccggaacctcccagccccaccataggagtgccggagatcttcgaaggcggcgcctacagcgttatcagacgcgccgtcatcatcggcaacggctaccctggatccgagaatcagagtatcgggttggtccgagctctcggcttatacgacaagcatgttatttatcgagttacgaggccaagaggagggataaacgagtggcttctttggcttccagttagtcttcaccaaaaattggattatctcatccagttcattcaaatttactcccgagggaggaattatgtgcctttacctctagaacatggtggtggaagtgttggcttggcttctgctttagaagctgatgttaagcagatcgtaaccatggcttgccagacttttgaaaaggat

SEQ ID NO: 207457 - DNA, 426 bp, Gossypium hirsutum
atcttcccaccatctttgaagttgttactggaaggaagcaggtcaaagacaaacccacagtagagagcggaagcaaatcacgaaatagcactaagaggtcactcgatgggcagccgagaaacaatcctaagatagctgataatagttacaaggaggatgaagaagagcagggtgataccttttgtgggatctgtgggggaggatacaattccgatgagttttggattggttgtgacaactgtgaacggtggtaccatggaaagtgtgtgaagataacaccagcgaaggcagaaatgattaagttttacaactgtcctttgtgccaaaagaaggtaaggcaatagtcatcaatggagggattaaccccgattggttttattcaccgatggtgtttgtaagcaactatgggcaaatgagtgcgtaatt

SEQ ID NO: 207458 - DNA, 443 bp, Gossypium hirsutum
  unsure (1)..(443): unsure at all n locations
tcgcccacgcgtccgcccacgcgtccgctttcttccctaatggaaggaaccgtgacttctccagaccctcttgcctctagcacatgggaggaggttcctcctgagaataccctgattacaccagtacaatgtaagtcactatggagacagttcaaatcagagactgaatatacagttactcaagctatttcagcacaggaggcatacaagcgaagtaacaactggttacctcctccatgggcaattgtggcaatggttgtccttggatttaatgaatttatgcttcttctaaggaatcctctctatctcatgtttctatttgttgcatttttactctcanaagctatgtgggtacagatggatgttccagggcagtttcaacatgggactttggctgggctaaactctatttcatcaaggtttctttctactgtcatgaatct

SEQ ID NO: 207459 - DNA, 436 bp, Gossypium hirsutum
cccacgcgtccgaaaatatctgcagaatcataatggagaattatctctttctgttctcgcttgttcttctctttggtcttttacccttttcctctcaaaccccaaaccctaaaaaccccaatcccaaacctccgctcacccaggcacacaccgagcttataaactatggttttccgatcggtcttcttccggcctcggtgacgaagtacactcttaaccaaacatccggtaacttcgccattgatctcggtggcacgtgcaagatcacgctcccgcctgacaactacctggctacttactcgaagcgggtaacggggaagattgaaaacggaaagatagcggaactcgatgggatcagggtacgggctttgttcaaatggtggtccataaccgggattcgatccagcggggataatttggtctttgaagttgggat

SEQ ID NO: 207460 - DNA, 459 bp, Gossypium hirsutum
ggcaaacctgatagctttggaggagacttccttgtaccatcctaccgtggctcatctttcttggacccaaagggaaggggtggctcaaccggttacgataatgcagtggccttgcctgctggaggaagaggggatgaggaagagctagccaaggagaacaacaagagtgctgcatcttcatcagggaaaatcaccttgagcgtcacaaagagcaagccggagaccggtgaagttatcggtgtgttcgagagccttcagccatctgacactgacttgggtgccaagactccaaaggatgtcaagatcactggtgtctggtatgctcagcttgattcataaacaagtcttgtatgaatttgcttattctcggctgagattttgtaatttttaaacaagtgttgctaaactttgcagtaatccactgggaaacccttatcttccttgtatggtactatgctg

SEQ ID NO: 207461 - DNA, 401 bp, Gossypium hirsutum
aaacggcagacgaaaccaaagaacacaaaacgaaaaacgcaatctttacaaacatggagatgagtttaacccaaatagccaagccaccaccatgtcttgttaacaaaaattctctttttacaaacaaaaaaagagtaaaaaccactgtagaagctctaaggaattcatatccaaaaagagcaacactatccagtaattggaatgtctctaatttatcccctctttcttcatcttcaacaactccaacttggtttcccagatttgaagagcttgacactaccaacatgcttcttcgtcaaaggattatatttttgggttctcaggtggatgacatgacagcagacttgattataagtcaactgttacttctcgatgctgaagactctgagaaagacataaaa

SEQ ID NO: 207462 - DNA, 448 bp, Gossypium hirsutum
aaacaatagttaaaaagaaaaatgagcttctcttcactaacaagtgcttgcagttccttgggtgttaaatcatcaagcttgatagtgcagttgggttttcagactactgaaaataacaagttccctggagcttttgtttcatcccccaaaagaacaaaaattaagaagttttctatagcttgctcttctactgatccattgttggttaaggctgcgagaggagatcctgtaagtcgacctcctgcatggatgatgcggcaggcaggaaggtatatggctgtttacagaaagcttgccgagaaacacccatccttcagagagaggtccgagacaactgatctcattgtggaaatttctctgcagccttgggaagctttccgtcctgatggagtgataattttctccgatatacttacttcactgcctgcatttggggtcccatttgaca

SEQ ID NO: 207463 - DNA, 408 bp, Gossypium hirsutum
cccacgcgtccgcccacgcgtccgctagtattaggcttcggacagcttgtgagaagctaaagagagtacttagtgccaatcctgaggcccctttgaatattgagtgcttgatggatgagaaggatgttaggggtttcatcaagagagaggagttcgaacagatcagtgctccaattttgcgacgtgtgaagaggccacttgagaaggctcttgccgatactggacttgcagttgaaaatgttcatatggttgaagttgttggctcaacctcccgggttcctgctatgttgaaaatcctcacagagttctttggtaaagagcctaggcgtacaatgaatgctagtgaatgtgttgcaaggggttgtgctttaaaatgtgcaattcttaagtccacattcaaagttcgag

SEQ ID NO: 207464 - DNA, 439 bp, Gossypium hirsutum
caatttaatagggtcgattgggtgattgttggtttttgagtgctgtcgctgttttgacggagggtttgcaaatatctgaagtgatgattactccagagtacaatgaggagggaatctacaccgttcgcttctgtattcagggtgagtgggtccctgttgttgttgatgattggattccatgtgaatctcccggcaagccagcatttgctaccagcaggaagggtaatgaactatgggtttctatattggagaaggcatatgcaaaactgcatggttcttatgaggcactagaaggtggtctcgttcaggatgcacttgttgatcttactggaggtgctggggaggagattgacatgagaagtccccaggcccagatagaccttgccagtggtagactatggtctcaattggtgcgggttaaacaagaaggatttcttct

SEQ ID NO: 207465 - DNA, 299 bp, Gossypium hirsutum
tcgcccaaaccttcaccatgccctccaccttcttgccctaaggacacattgaagctcggtgtctgtgctgacgtgcttggacttgtcaacgtgattgttggaacccctgctttcagcaaatgctgtgctttgcttcaaggattggctgatttggaagctggcctttgcctttgcactgccattaaagccaatgtacttggaatcaacctcaacatgccaatttctcttagtctaatccttagtgcatgtcaaaaagaggttcctccaggcttcaaatgtgaatcaaaaagatatattat

SEQ ID NO: 207466 - DNA, 408 bp, Gossypium hirsutum
aaaaaatccaattttcatttcaaagattctctcaaaacagtgagggagtagtagttcgagttatcgacgacgttttttttcaacacgaaaaaaaatggataacttttacgcaccagggaagaaccatctcttcgttccgggtccggttaacataccggaacccgttattcgagccatgaaccggaacaacgaggattaccgttccccggctattccggcgatgacaaaaacccttctcgaagatgtcaagaagatattcaagactacgaccgggactccttttatgatcccaacaacaggaaccggtgcatgggagagtgcacttactaatacgttatcccccggtgaccgaatcgtatcgttcctcattggacaattcagtcttctttggatcgatcaacaacaacg

SEQ ID NO: 207467 - DNA, 372 bp, Gossypium hirsutum
cccacgcgtccgtttagctatagcatacactactagtacccactactagcaatggcttcctcagtgatctcatcggctaccattgccactggctctccggcacaggctaacatggtcgctcctttcaccggtctcaagtctgcctctgctttcccagtcaccaggaaggccaacaacgacattacttctctcgcaagcaatggcggtagagtgcaatgcatgcacgtgtggcctcctactgggaagaagaagtttgagactctctcatacctccccgatcttacacccgtgcagttggctaacgaagtagattaccttcttcgctcaaaatgggttccttgcttggaactcgaaatggatgaagggattcgt

SEQ ID NO: 207468 - DNA, 398 bp, Gossypium hirsutum
cggacgcgtggggtttgatttaagttagtgagtttcttagtttccctagaagttaagcatggctcaaattaagaggatggagtgccaactcgagatcaagtcctcagctgataagttctttgatgcctacaagaccaaagcccagcttatgccaaaaatggccaatcaagtcgttagagatgtaaaacttgttgagggtagtggttgggattccgagggttcggttagacaatggtattttgttgccggaggtaagcttgagacttgtaaggaaatgatggaaaaggtgaatgataaagacaggactattgtttacaaattggtggaaggtgaaatcatgaaagcttttaaaagctggaactccatcctcaacgtgacgccaattgtggagagaaatt

SEQ ID NO: 207469 - DNA, 462 bp, Gossypium hirsutum
ctttggaaacaaaaaacaaaaaatagaaaaaataaagagcaagagatatggcaagcacattctcttataattcttttggattccttctcattcttgtcgcctttagttccttgataaatataagttcagctggtaggcaaattgcccctaaaactagcattgagtttatcagaacatcttgtagttcaacgacttaccctaaactttgttacgaatctctcttaacacaggctagcatgatccaaacaagcccccaactcatcgcccatgcagccctaaacgtgaccctttcaaccgccaagtcaacctcggccatgatggtgaagcttgccaaaagccaaggattgaagcctacagaggtgggcgccatgcaagattgcgtggaggaattggaggacacgatagatgagctgagaaagtcaatcagcgaaatgggtcagattaaaggcttcaattttggac

SEQ ID NO: 207470 - DNA, 462 bp, Gossypium hirsutum
gctcaaggtcgggttcctgtcttcttggacggtggtgttcggcgtggaaccgatgtttttaaagctttggcattgggagcctctggtatatttattgggcgaccagtggtgttctcattggctgctgaaggagaagctggcgtgaggaaagtgctttcgatgctgcgcgaggagttcgagctaaccatggcgttgagcggttgtcgttcgcttaaagaaatcactcgtgaccacatcgtgacagaatgggacagtcctcatcctcgtccggccccgagactgtagagtcctatatattatgggcgtgcaactttagcctagcaaatcgcaagatgaacttagttggagctcaagagatatatatagcatttgcattgcatttatggcataaaattactgtctttttttttctttgggaacaagtttctggttcattgagttaaaaagttattgtatgataat

SEQ ID NO: 207471 - DNA, 342 bp, Gossypium hirsutum
gctcaaggtcgggttcctgtctcctaggactgtggtgttccgcgtgtaaccggggtttctaaagcttcgtcagtgggagcctctggtatacttattgtgcgaccagtggtgttctcattgtctgttgaaggagaatcttgcttcaggaaagtgctttccatgctgcgctatgagttcatgctaaccatggcattgcgcctgtgtcgttcgcttcatgaaatgactcgttaccacattcctacagtttgggtcagtcctcatcctcgtcctgcccctatactgtgtatgcctttatcttatgggcctgctactttagcctatccatattctataataacttat

SEQ ID NO: 207472 - DNA, 441 bp, Gossypium hirsutum
tgtggtgagattttaacatacaaaaaaaaaaaaaaaaacacaaaggctctaatttccaaactcctttacagattagatataatagatagagcagtttttgataagaaaagagagggaaaaaggaaattaaagatgtcaacagcttcttcattttgttcatcaactcaagttaatggctttggagggggacttaggcttctaagaacccatctttctcaacccaagtccttttcttttactaggaggagaactgctacagtagtgaaggcaactgctcgagtcgataaattttcgaaaagcgatatcattgtttccccatctatactctctgctaatttcgctaagttgggggagcaggtgaaagccgtagaagtggcatgctgtgattggatccatgttgatgtaatggatggccgatttgttccaaacattacgattgga

SEQ ID NO: 207473 - DNA, 291 bp, Gossypium hirsutum
caaatttctttttcctttctactctcaaaatttgcccccaaatttcttttttccttttcatttcactgcactaaattcacccaccatagctactccttttcttcttctttttctttcttagtattatttcttttctctttttattttttttggcctactgtgtaatgtatttaccggtaactttttataggcggatgtagagacggaggttgcggcggccggtgtgcccaagaagagaacattcaagaagtttagcttccgaggtgtcgatttggatgctctccttgatat

SEQ ID NO: 207474 - DNA, 399 bp, Gossypium hirsutum
  unsure (1)..(399): unsure at all n locations
ccttatcccattcactgagtctcaacaccgagtcatcatcactcatggctatcgaggcttggtttatggatgaaagcaaagaagaccaaaggcttcctcatcgacgcaaccccaacgaacctgtttcgttggagcacttggcagagctgggagtgttgtattggcatttgaaccccaaggattacgagaacgatgaagagttgaagaagattagagaagccagaggttataattacatggatttgcttgatttatgccctgagaaagttgacaactatgaggagaaactgaggaacttttacaccgagcacatncatgctgacgaagagatacgctactgcctggaaggcagtgggtattttgatgttagggacaaggatgaccgatggattcggattt

SEQ ID NO: 207475 - DNA, 266 bp, Gossypium hirsutum
gtgtgcctctgctacgcaccacttcttaagcagcttcctctacgatcataatggtgtcggttactgtttctgtagccaaaccaacccttcaggcaaatgcaaagggttttgcggaattctcaggtctgcgcaactcagctagccttacctttgccaggaaaacctcggatgactttcaatcagtcattgcttttcagacttctgctttgggaatcaataatggtggataccggaaaggcgtggtaaaaggcaaacctaaaggtcgc

SEQ ID NO: 207476 - DNA, 428 bp, Gossypium hirsutum
agatgatcaaaatgggttttattgttttggccttgatggtggtttccgccgcgacggtggttacggcggctgacgagagtgggttagcgaatgagtgcagcaaagatttccagagcgtgatgacttgcttaagctttgctcaaggaaaagcagcgtcgccgtcgaaggagtgctgtaattcagtggcggggattaaagagaataaacccaaatgtttgtgttatattttgcaacaaacacaaacctctggtgctcaaaatctcaaaagcttaggtgttcaagaagataagctgtttcagttaccatcggcttgtcaattgaagaacgctagcgtcagtgattgcccaaagcttcttgggttatctccgagctcaccagacgccgtcatcttcaccaacttcttctctaaagcaacgacacccagtact

SEQ ID NO: 207477 - DNA, 352 bp, Gossypium hirsutum
accacattcaggagaactggaggattctggacttgattgcgcaccatgccgaaagcttgcacatcggcaccttacctagagtgatgacatcggaggtccacaggattataggcacatgcatggctctggcgttcatacctacacactaatcaacaaggctgcgaagtcacactatgtgaaattacattggaaacccacttgaggtgtaaaatctttgttggaggatgaagccctacgagtacgtggtgctaatgacagtcatgccacacgcgatcgttatgactaggatgcagtcggacactaccctgaatggaaactgttgattcacattatggatcctcattatgaagat

SEQ ID NO: 207478 - DNA, 403 bp, Gossypium hirsutum
gtacggtgctcggtgattacggtggcggcgacaacactttctcttccctttgggaagctcttccttccgttgccgtcgtcggtggtcagagttcagggaagtcttcggtgcttgaaagcatagtcggacgtgattttcttcctagaggatcaggaattgtgacgagacggcctttggtgttgcaacttcataagacagacgaaggttcacaagagtatgctgagtttcttcaccttcctaagagaagattcactgattttggggcggtccggaatgaaattcaggaggaaaccgatagaattactgggaagactaaacaaatttctcctgttcctattcatctcagtatctactctccaaatgttgtcaacttaaccctgatcgatttgccgggcttgacaaa

SEQ ID NO: 207479 - DNA, 374 bp, Gossypium hirsutum
acgccaattgccattgggttgccaacaatggcgattaaagtgaaacgtgatgtgtcctatgatggaggaggaggaaaagaatagctctagcgttggcatgagtgctgcatcgatgacagctgcaaccgtcatgtcaagctcaccggctatggctctggtggatgacagaatgtccaccgaaggaactggacttccctttgggttgagcaacaaccttcttgggtggatcttgcatggcgtattcggcgtgatatgggctctctactttgtttacacttcatccctcgaagaagatgaggagtctggattgtccctctaaacccataaaagtgtaacttcactcaagctcaccaccccaattgccattgggttgc

SEQ ID NO: 207480 - DNA, 358 bp, Gossypium hirsutum
tcgactagttctagatcgcgagcgactctctgttactcataaaactgactcttccaagcggacgctggtagttttctatgggcctggtgtagttaaagtcagtgggattcggctcattgctggtctaattactagcaaagaaactttgacggggttgatattaatcgtgcaaaaccacataacaaaccaagctttgaaagctttagaccttttctcttttaaggtggagatattccagattactgacctacttgttaatatcacaaagcatgtgctgaagccccaagaccgggttactaacagaacatgagaaacaaaggctcttgcataaatacagcatataagaaaaacaggttcc

SEQ ID NO: 207481 - DNA, 252 bp, Gossypium hirsutum
tcggaaaactctgagagaaatggcttcttcaatgatatctttgcaaaccagcaatttgaggtctgcgtttttgggagagaaaactgggatctgtgcttctagcattcccataactcgcgtaagtttattgaggaaggctatcgagtgtaaggagtcaagaatcgggaagcagccgataacggttccggtcaatgcgacgattactatggagggtcaggacataaaccttaaaggtcctttgggagaaatggc

SEQ ID NO: 207482 - DNA, 430 bp, Gossypium hirsutum
attagaaagtcaaaatctagaagcagacttggtgttatggacggttgggtccaaaccacttcgtcctgcacttgaaccctgtgacaaaccccatgaacttccactgaatgcaagaggacaagcagaaacagatgaaactcttcgtgttaagggccatccccgcatttttgcacttggtgactcggcttctctaagggactcaactggaaagcttctgccagccacagctcaggttgcttttcagcaagcggactttgctggctggaatctatgggcagccattaatcaccgtccattgttgccatttagattccagaatcttggagagatgatgaccctgcgtagaaacgatgcagctatttcaccaagtttcgctgatggtctcaccttagagggtcctattggtcatgctgcaaggaaattagcatac

SEQ ID NO: 207483 - DNA, 397 bp, Gossypium hirsutum
aaaagagtctgtcatttcccttacttcctcaaaccagaagccatggccagcatgataatggcttcctcaaagcctgtaatctccattgctgcttcatcatccttcttttccaaacccaaactcaaacaaatcccacaactttccctcccaaaactccccactccaaagttcttgaaaacccaacaaattccctcactctcgtccaccactctcaaatctatctccctcttcacagtcaccactttatcctttgccccaccttctgttgctgcagaaatagaaaaggccgctcttttcgatttcaacttaaccctccccatcatgatggtccagttcttgttcctcatgtttgctcttgacaaggtctactttaccccactcgggaaattcatggatg

SEQ ID NO: 207484 - DNA, 456 bp, Gossypium hirsutum
cccacgcgtccgggaagagaaccctcgtgttccgatcattgtcaccggtaacgatttctcgacgctgtacgcgccgctcatccgtgacggtcgtatggagaagttttactgggcacccaccagggaagataggatcggtgtttgcacaggtattttcaggaccgacaatgttcccgttgatgacattgttaagcttgttgacaccttcccgggccaatccattgactttttcggtgctctgagggccagagtttacgatgacgaagtgaggaaatggatcggagaggtaggagtcaatagtgtcgggaaaaagctcgtgaactcgagggaagggccaccatctttcgagcaacctacgatgaccattgagaagctgttggagtatggaaacatgcttgttgcagaacaagagaacgtgaagagggttcaattggctgacaaaatattgagtgaagc

SEQ ID NO: 207485 - DNA, 393 bp, Gossypium hirsutum
aaaaccctgaaaaagttccatggctggattgctagttccgctttcacggttgcattgaagggggctccacatgggaagaaggtcatggaagcgatagctgggactggagatgttaatgctgacatggagaaattttgttcgactttccccccatttcttgaggagaatcacaaatatctggccaagtttggcttggatgatatgaatgcctgatggaataagtttaatgagtagaggagagactacctacctatatttactcccgtgttcgaacttccaatatcttgcttccggcttaaaccttcgtatttacttgaaaaaattaatgagttatgactttaaacacatactcttgaatgcttaatttttagaaattttttgggtaaatgtctt

SEQ ID NO: 207486 - DNA, 355 bp, Gossypium hirsutum
tttatgttaggtattgtgatggactcgatagatggtttcagccacacagtgcctattgaggaaatggatgccctcccacagggcgcattcttcatcttgacttggctggacgagacctcactgattacttgatgaaaattctgactgaacgtggatattccttcaccaccacagccaaacgggaaattgtgagagacgttaatgaaaagttgtcttacattgcccttgactatgaacaggagctacagaccttaaaaacatgctcatcagtagagaaaaactatgagttacctgatgtcaggttattaccattggagctgaacgtttcagatgccccgaagtgctttttcaacca

SEQ ID NO: 207487 - DNA, 295 bp, Gossypium hirsutum
  unsure (1)..(295): unsure at all n locations
tccggcaaaaccagttttcattgaaatgtggaacccaaatgggaaatacagagttattatcaccggacctattcctggaactggggggatcaacctcttaatttancaagattgccgtgtcgaaatatgtactgtgaagaaaacgattttgtccgctgaggatatcatttctttgattggcaataagtgcgatggggtgattggacagttgactgaagactggggggagactttatttgcagcttttagcagagcaggaggcaaaacatttagtaacattggtgttggttacaac

SEQ ID NO: 207488 - DNA, 354 bp, Gossypium hirsutum
gtggaggcaaaggtcaaggaaaatctttccaatgtgagcttgtctttgccaagatgggaatcaaccccattatgatgagtgccggagaattggaaagtgggaacgccggagaaccagccaagttgatcaggcaaaggtaccgtgaggccgccgacattatcaagaaagggaaaatgtgttgcctctttatcaacgatctcgacgctggagccggtcgtatgggaggaaccacacaatacacagtgaacaaccaaatggtgaacgccacactcatgaacatcgctgataaccccaccaacgttcagctccccggtatgtacaacaaggaagagaaccctcgtgttccgatcattg

SEQ ID NO: 207489 - DNA, 441 bp, Gossypium hirsutum
cccacatcagatataacatttactactcacttcttattcctacattatacaaaaagaaaagagaagacatggctgctgatactggtgcatgctcttttccttctaccaagtacacctctctccctgctagaacctatattgtctctcctgataggatcaccttcaagaaggtgcctgtttactacagagatgtcagccgtgggcggagagtggcatctgacacggcccaggttacaactgaagctcctgccaaaggtgacaaggaattcaagaaaaatgattacagtcttgcggttaacaagtgcaggcctatcaacccttacattggtagatgccttctaaacactaagatcactggcgaagatgctcctgcagagacttggcacatggtcttcagcaccgtacgtatgcatgcaagctataatagagagagccgctaca

SEQ ID NO: 207490 - DNA, 418 bp, Gossypium hirsutum
gtaaaaaagtctacctcagcaaaaataagattgaggggcttattgaatcaacctgataatcgcgcttgtgctgattgtggtgctccagatccaaagtgggcatcagcaaatattggagtctttttatgcttgaaatgttgtggtgtgcacagaagcctcggtacacacatatccaaggttttatctgtggcattggatgaatggtctgatgaagaaattgatgctatgattgaagttggaggaaattcctctgctaattcaatctatgaggcttatatacctgaaggttatacaaagcctggcccaaatgctagtaatgatgagcggaggaaattcattaagtccaagtatgaacttcaagaatttttgaggccagcttgcggatcacatcaaggaaagattcctcttcttcttctac

SEQ ID NO: 207491 - DNA, 453 bp, Gossypium hirsutum
ctcagcttaattcagctgaaaatggcaccttcatctctgccacaaacaccgccgtccgccgtggttattgtcctcttcttactcttctccacggcattgctttgtgaatcaaggttaagcttagattactactccaaaacctgtcccagtttcaccaaaatcatgcaagacaccataaccaacaagcaaatcaccagccccacaaccgccgccggtgcactccgtctattttttcacgactgtctttccaacggttgcgatggttccatcctcatatcttccaccgcattcaacaaagctgaacgtgatgccgacatcaacttatctctccctggagatccatttgacctcattgttcgagctaaaacagcccttgaactcgcctgtcccaacaccgtctcttgctccgacatcctcgccgtcgctactcgtgacttagtcaccatgcttggt

SEQ ID NO: 207492 - DNA, 237 bp, Gossypium hirsutum
ggcataaccagtttccattgaagtgcggcacccaaatgggaaatacagagttattagcaccggacctatgcgtggaactcgggggatcaacctgttaatcgagcaacattgccgtgtccaaatatgtactgagaataaaacgattttgtgcggtgaggatatcattcctttgactgccaatctcaccaacgggtaaaaagaacgggtatctggatgaccatattgcgactttatttg

SEQ ID NO: 207493 - DNA, 402 bp, Gossypium hirsutum
ctttccttgacctgcttcaaagtagaaaatcaacattgccaacatagcaattctagcatgtgtaatctccgctggctgaagggtctccagtttggcataatcggggatgtagacaccatttcggatggtacccgcaaggcctaatgggtcgaagaacttgcctcccgggtaaccctgctggccggtggcgttggcgaagttctcggctgttttcgaccatggagttgcccattctacggattgagattttgggttgaaaaagtctacccatcgcttgctctccacccaacccatgaggaggagttgggtgccaaggagtgagccgaaggagaatggggctattgcaccggggtcggctccggcctcgaaccatggtacaccactccaggcttggcctatgaa

SEQ ID NO: 207494 - DNA, 445 bp, Gossypium hirsutum
ggcaaaaccagtttccattgaagtgtggaacccaaatgggaaatacagagttattagcaccaaacctatgcctggaactcgatggatcaacctcttaatcgagcaagattgccgtgtcgaaatatgtactgagaagaaaacgattttgtccgttgaggatatcatttctttgattggcaataagtgcgatggggtgattggacagttgactgaagactggggggagactttatttgcagctttaagcagagcaggaggcaaagcatttagtaacatggctgttggttacaacaatgttgatgttaatgctgccaacaagtatggtgttgctgttggtaacactcctggtgtactcacagaaacaacggcagagctagcggcttctctttctttggcagctgctaaaagaattgttgaagcagatgagttcatgagggctggctta

SEQ ID NO: 207495 - DNA, 369 bp, Gossypium hirsutum
gcgggaaacgacgaaaaatggcaagataccacagaacgattaccgtgttctcaccggacggccgtttattccaaggggaatacgcgcctccaagccgctcctaaaggtaacgccgccgatagcgtacactgcaccgacatcaaccaattaggcgtcgagataaaatccgaacgcaaactccaggactcactatcggtttacaagatggcgaatttggaacatcatagtgcattggcatgtgctggactcaaagacgattctcttgttctcataaacagggctcaaatcgaatgtcttagccattcgctgactgctgaagattcctcttcgggcgactgtattactaagtacagttccggtcttcaatac

SEQ ID NO: 207496 - DNA, 406 bp, Gossypium hirsutum
cggacgcgtgggcggacgcgtgggtagcaatggcttcctcaatgatctcatcggctaccagggccactgcctctccggcacaggctaacatggtcgctcctttcaccggtctcaagtctgcctctgctttcccagtcaccaggaaggccaacaacgacattacttctctcgcaagcaatggcggtagagtgcaatgcatgcacgtgtggcctcctactgggaagaagaagtttgagactctctcatacctccccgatcttacacccgtgcagttggctaaggaagtagattaccttcttcgctcaaaatgggttccttgcttggaattcgaattggaggagggattcgtgcaccgtaagtactcgagcttacccacgtactacgatggacgctactggaccatgtg

SEQ ID NO: 207497 - DNA, 326 bp, Gossypium hirsutum
accacgcgtgcgcttagctatagcctacacttctagtacccactactagcaatggggtactcggtgatctcatcggcgaccattggcactgcctatccggcacatgctaacatggtcgatcctatcaccggcctcaagtctgcctctgctttcccagtcaccaggaaggccaacaacgacattacttctctcgcaagcaatggccgtagattgcaatgcttgctggtgtggtcttctactggatagaataagttctagactctctcataccttcccgatcttacacccgtgcatttgtctaaagaagtggattacctttttcgctc

SEQ ID NO: 207498 - DNA, 415 bp, Gossypium hirsutum
  unsure (1)..(415): unsure at all n locations
cccacgcgtccgaaaaccccaattttctattctcccttttgttttctatatcgatgccaattctgttgttcaacaatttaatcgctgaatcaaccttctgccctgaaacaatggcgacaaccactactttgggcggagtccacccttcccaaggctcccaaaacagcgtcgagctcgaaaacctagcacgctttgccgtcgacgagcacaacaagaaagaaaatgcaatggtggagtttgtgagggttgtgaaagcaagcgagcaagttgtggccgggacgctttaaccatttgacggtggaagctgacgacgccggcaaaaagatgctttatgaagcccaagttttgggttaaacctttggatgaatttttaaagactngcatgagtttaaacatgcttggtgatgctgatagt

SEQ ID NO: 207499 - DNA, 365 bp, Gossypium hirsutum
ctgaagctcactcaaagtgctggcttaaaaccttagtttttgagctctcttacagtggtccggaggccatgtcaaggaggaaggggagggagcccaaggaggagaatactaaccttggacctgctgttcgagagggtgagcatgtttttggcgtggctcacattattgcttcattcaatgattcatttattcacgtgactgatttgactggaatggaaacaatggttcgaatcactgtctgtttgaacgtgaaagctgatagggatgagtctttccctcatgcatccatgcttgcagcacaagatgcttctcaacgctgcaatgacatgggtattactgcccttcatataaagctaccatctact

SEQ ID NO: 207500 - DNA, 339 bp, Gossypium hirsutum
caatggcgactcagctgaagagcagctttacgtcgtctgttacaagaggactggtagtccccaggggcatttcgggatccccgttcaaagtatcttccggaaagaccaggaccccttgcttcactgtcaaagctgttcaatccgacaagtcaacatttcaagtaatccaacccatcaacggcgaccccttcattggaagcctggagactccaatcacctcaagccccttaattgcatggtacctttccaacctcccagcctataggacggcagtgaacccacttctgaggggaatcgaagtgggtctggctcacggcttcctcctggtgggtccattcg

SEQ ID NO: 207501 - DNA, 345 bp, Gossypium hirsutum
attaatatgtgttattttgggaattttacagttattttttgggatctaaataatggggtagctcttttaatcagattatggcacttggattggtatttaacactctacaggaattgattcagcttcattttattgcattgttcaagaagggtgatgtatctaaggatttaacatctggaactgttggaggagcaattcaatttattgttgggcatccatgtgatactattaaggttaagcttcataagtaaccttgttcgcttactggtcaaccacctaaatatgctggtgctatggatgctgttaagcacactttaactgctgaaggaccaatgcggttgtata

SEQ ID NO: 207502 - DNA, 455 bp, Gossypium hirsutum
gcaaaggatttttcttcctgcaacatcaacgttgatgagaggttgctcctttgctacatatgaggttattccaaaaggacaaggaagagaagcacactgtgaccacgttgtgaaggatcaatgtaataaccaagtcgcgaatctctatcccaagccaaatgttggaggtcaacagaagctccaaattgggcagaatgtctcaagaaaggacaaaattaagtttcttgtcaccacacttcttgatcttaaagacagtaaagaagctgtctacagtgctcttgatgcgtgggttgcttgggagcagaattttcctattggacctcttaaaaatgtaatccttgctcttgagaaggagcatcagtggcatagagttgttcaggtttgtaaatggatgctaagcaaggggcagggaaacacaatgggaacatatggacaactattacgagctttagata

SEQ ID NO: 207503 - DNA, 408 bp, Gossypium hirsutum
cccacgcgtccgctcaaaaccattgcatatcttatctgttgagagtattggtaaggagaaaaagccagtaattcaatgcaacgcttatgaagctgacaagtcagagcctattgaggcagcagagcaagttaaatcagaagctgcaaaaagggtgaaaattgggatttattttgcaacttggtggggtttgaacgtggttttcaatatttataacaagaaggttttgaatgcttacccttacccttggttgacttcaacattgtcccttgcttgtggttctttaatgatgttaatttcatgggctacaaggattgctgagaccccaaaaacagattttgagttttggaagactttgttcccggttgctgtggcacatacaattggacatgttgcatcaactgtgagtat

SEQ ID NO: 207504 - DNA, 435 bp, Gossypium hirsutum
tcgacttgagtcgaacaaatatttcacatcaggattttaatgcgaataaagatcgcggctgtcggggttctaaacggggacgggggggcttttgactcactcgggtattctttgccgacgaccattgctatataacttagactgaatatatggcaactcgatggtatcgttcacataaactgcgcggctcattttacttcaactacacccctgcggtcgatatttggagtactagatacatatacgcttacactatcactggaaaaccattgtttccagtgaagaatgtggaggagcaattggaacatgggaaccatatagttggttactcctttggtggaaccattgcgcgggattataatgaaaaaccttaaaattattttgataacttgagaaaaaagaaaccaattccttttctcaaaaaattcccaaata

SEQ ID NO: 207505 - DNA, 434 bp, Gossypium hirsutum
aaaccaagtcaacctaaagccttaggcaccatggcaacctctgctatccaacaatctgctttcgttggccagaccgctttgaagcagtccaatgagctcttacgcaaagtcggagctttcgatggtggtcgtgttaccatgcgcagaactgtgaaaagtgcccctaccagcatctggtacggccctgaccgcccaaagtacttgggtccattctcagaccaaatcccatcatacctgacaggtgaattccctggtgactatgggtgggacactgctgggttatcagctgacccagagacatttgctaagaaccgtgagcttgaagtgatccactgcagatgggcaatgcttggtgcccttgggtgtgtcttccctgaaattctttcaaagaatggagttaaggtcggagaggcagtttggttcaaagctggatc

SEQ ID NO: 207506 - DNA, 356 bp, Gossypium hirsutum
cccacgcgtccggacggcttctatcaacggttggtgccttacctcctcttcttgcaccactacgacctcctctttttccgctcgtggacgacctacattgcggccttcagtcgtcgctagccttaactcttctccttctcctccgactcttatccaagaccgcccggtttttgctgcccctattcctttgctcaccccgagagaagagatgggaaacaagtcctacgacgaagccattgaagctctcaagaaacttctcagtgagaaaggagaactgaaagctgaagcagctgcaagggtagatcaaataacagcagagttaaacacagcatcagctgatggcaaaccatctgact

SEQ ID NO: 207507 - DNA, 377 bp, Gossypium hirsutum
cattcacacagcacatctcttccatacacatttaaagccaaaaaatatacttgctaatgcggattgcaaactgaaactgtgggattttgaactcgctcagctgtcatttacagacgttccttctcctattctttgaactgattatatgtcaactgcatggtttcttgctcctgaactgagctgttcattttactccaactacacatcataggcctatcatctcgtggtaggatgcatatttgctgagttgatcactggaaaaccatcgtattaaaagaacaatgttgtggaccaattgtatcttgtgaccgatttactatgcactacctctgctgaaacaattgccagtattaaaaattaaaaagctcctaattatt

SEQ ID NO: 207508 - DNA, 431 bp, Gossypium hirsutum
cattcacacagcacatgttttccatagagatttaaagccaaaaaatatacttgctaatgcggattgcaaactgaaactgtgggattttggactcgctcgggtgtcatttacggacgttccttctgctattttttggactgattatgtggcaactcgatggtatcgtgctcctgaactgtgcggttcattttactccaactacacccctgcggtcgatatttggagtgtaggatgcatatttgctgagttgatcactggaaaaccattgtttccagggaagaatgtggtggaccaattggatcttgtgaccgatttgcttggcactccctctgctgaaacaattgcaaggattaagaatgaaaaagctagaaattatttgaatagcttgagaaaaaagaaaccaattcctttctcaaaaaaaatcccaaata

SEQ ID NO: 207509 - DNA, 463 bp, Gossypium hirsutum
tggcaaccatgctctcactctctccaaatcctcccatcacaactttaccctctcttcgttcgagtttcaagggaaatctgaggaatttaaaaccaaacccttttcacattattcgtatcaggaccaagcagcaaggggtagaggcacgaaaggggacacggtctttagtggttgtgaaccaagcagcaacaacccaagtgtcggttacagcttctaatatgaggtttcggttggacaacctgggacctcagcctgggtcaagaaagaaagggaagagaaaggggagaggaatatcggctggacaaggtgggagctgtgggtttggaatgaggggtcaaaaatcacgttctggcccaggtgttagaaagggatttgagggtggccaaatgccactctataggcgtatccccaaattgagaggaattgccggaggtatgcatgcgggattaccaaaatacatacc

SEQ ID NO: 207510 - DNA, 432 bp, Gossypium hirsutum
cccacgcgtccgcccacgcgtccgaccacgcgtacgcccacgcgttcgcccacgcgtacgcccacgcgtccgattttttttcttttctgttttttcatttctgggaataggaatagagaaaagacaacaacaaagacaatgttgaatgtgaatagcatggcttctctatcaaactcaaagctttcatttcaatatttccattattataataagcattccagcacgtgttgtaaggtattaacacccaggaaatcagagctgcgactgcgaattataagggcttcttcttcagctgctgctcctgatgttgatctcaacaccctcgaatgtgccatttccaagaaagacagtgaagcagtgaaagaagcacttaatcagctgagtgaaagtgggtgggcaaagaaatggagttcacagccgtatgtgtcacgt

SEQ ID NO: 207511 - DNA, 437 bp, Gossypium hirsutum
gaagaacccagattccaaatgaacaaattcaaacttgaaaaggatctttctgattctcgaagaatgaggggcaaagggattgagcgagaaagatctcttgttcttattataagatcgtgtgattggatccgcagatgtttggtaaaaaaaatcttctcttttgagaataatcaaaaatggaaagtgttcaattggaacatgaaaacgtgactgaatttgtcctagttactcttcgggacagagtggaagaagggaggagattctcgaacgaggaaaaggacccaatgacttcgaaagaattgaacgaggagccgtatgaggtgaaaatctcatgtacggttctgtagagtggcagtaagggtgacttatctgtcaacttttccactatcacccccaaaaaaccaaactctgccttacgtaaagttgccagagtacga

SEQ ID NO: 207512 - DNA, 338 bp, Gossypium hirsutum
atctttacacaaaggaaactgctgtccttgttaggaatcttcaatttccaaacggggtatccgtgagcaaggatgggtgttttctcatatcttgcgaaagatgtccgtgcagattactcaagtactggttgaaaggtgagaaagcagggagtactgacgtatttgccatcttaccaggattttcggacaatgtccgaacaaataaagaaggtgaattttgggtagcaattcactgtcgcaggttcacgtatgctcatataatgggattatatccaaaacttatgaaattcattctcaagcttcctatatttgcaaaaattcaatacctgcttcagatt

SEQ ID NO: 207513 - DNA, 381 bp, Gossypium hirsutum
tccacgcgttcgcccacgcgtccgtaagcgtttgtctcagatttttgaagatggcccgtaccaagcagacagcccgtaagtcgactggtgggaaggctccaaggaagcaacttgctaccaaggctgcccgtaaatctgccccaaccaccggtggtgtgaagaagcctcatcgctaccgtcctggaactgttgctcttcgtgaaattcgaaagtaccaaaagtgtactgagcttcttatcaggaaattgcctttccagaggcttgttcgtgaaattgcccatgacttcaagactgatttgcgtttccagagccatgctgttctagctcttcaggaagctgcagaggcataccttgtgggtctttttgaagacaccaaccttt

SEQ ID NO: 207514 - DNA, 423 bp, Gossypium hirsutum
tccacgcgtccggctggtttagctgttgctcaacaagtttcacaagcaggactttgagtgtggtcaattgatccatcaccaaaattgatttggcctaataattatggtgtttgggttgatgaatttgaagctatggatttgcttgattgtcttgatacaacctggtctggtgctgttgtgtatattgatgatggaaaaaagaaagatcttgatagaccttatggaagggttaataggaaacagcttaagtcgaaaatgttgctaaagtgtatatctaatggtgtgaaattccatcaagcaaaggttattaaggttattcatgaggaatcaaagtctttattggtttgtaatgatggtgttactgttcaagctactgttgttcttgatgctactggatttttgaggtgtcttgctcaatatgat

SEQ ID NO: 207515 - DNA, 359 bp, Gossypium hirsutum
  unsure (1)..(359): unsure at all n locations
tcggccacgcgttcgcccaaacntccggtggtacaaattggtaacagcggatccgaacctggtgggaccttcgaggaccatacgggtcaccgtctggcctaccaatcttgaagctccagcgtggagcagcatctcgtgacttactgtgtaaccaagaggttcttttctccttgaagactatcatttagtggagaatctggccattatcacctgactgcgcataccttaactactctttcatacaaaatgagacaaggcgagagggttttttacggtgactcatgatatatctcaactcacaagttctgcgatgagtcgtgccactggaaaacataccccgctcattgttagattttcca

SEQ ID NO: 207516 - DNA, 434 bp, Gossypium hirsutum
gctcttcttctatcacaggcctttatatcaggagtgcatggaacaggctgtaccatcgaagacagaagccatgacgtcttatgggctgtggttgtatacaacgctggtgttttcacacacatcaccacacgcttgactctgcgaagaggtgaatccatctccattatcgcaccgtcatcatggggaggacgattttggggaaggacccattgctcccaagagtccgccggtaaattctcatgttagaccgtcgattgttgttccaggaagctagaatgtacagggaacagcgctgcttcgcctgccactttggctgaatttaccttggacggagccgggggtcttgattttttcgatgagagtttggttgacggatacaacgatcctattttggtggtttcccacggcgggacagggcaaaactgtacctacac

SEQ ID NO: 207517 - DNA, 405 bp, Gossypium hirsutum
ctattttatctcttcagatcttctcaagatgctcttcaatatggatgtctcctcttgttcgcattgacgatgaatgaaatctgctcccttcagggcattgtttgaaaacatggttgctatctttttccacatttcgacaccgaggacaggaaatatcagaagccactctttttaatctgagattttttaaagtaggaataaagttccaggaaatatgccaaaaagtgatggtaatctttgataggagatgtaaattccatagttttctatagaaattttttgtttcgaactgtattaaataagcactaggatccatattagcatcttgtaatagtttatagacacttctgactgaaaatttgccagaatgttcttctcgccagacttgaaaatcatcatggtttt

SEQ ID NO: 207518 - DNA, 457 bp, Gossypium hirsutum
acaaaatcagttgcttcacaatggcctctacaaccatggctctttcttccccatcattcgccggtaaggcagtgaagttctccccttccacccctgaaatccggggaactggccgtgtttccatgaggaaaaccaccaagcctgttccttctggtagcccatggtacggtcctgaccgagttttgtacttgggtccactttccggtgagccaccatcttacttgaccggtgagttccctggtgactatggttgggacactgctggactctcagctgatcccgagacctttgctaggaaccgtgagctcgaagtcattcactgcagatgggccatgttgggagctcttgggtgtgttttccctgagctgttggctaggaacggtgtcaagttcggtgaagctgtattgttcaaggccgggtctcatatcttcagtgagggtggacttgactacttggg

SEQ ID NO: 207519 - DNA, 290 bp, Gossypium hirsutum
tcgtccacgcgtccgcccacgcgtccgttccaggatagacttgtcacatggtttttagtaccgaatgggaagttaccatacagagatggacaattccattggtgtcatcccatatggtattgacaagaacggaaaacctcacaaacttagattgtactctattgctagcagtgctttgggagattttggcaattcttaaactgttttcttgtgtgtgaaatggcttgtctacaccaactaacattgatagatagtgaaaggagtttgctctaattttctgtgttacttga

SEQ ID NO: 207520 - DNA, 259 bp, Gossypium hirsutum
accacgcgttctgcttgaaaagccctgtacaaccatagatttttctacctgagtacacgactcaaaggcagtgaagttcttcccttgcacccctttaatccggggaactggtcgtgtttccatgaggaaaaccaccaagcctgttccttctggtagcccatggtacggtcctgaccgacttttagacttgcgaccacttttcggtgagccaccatcttacttgaccggcagcggatcgtgaaaaatgcacttgtgctca

SEQ ID NO: 207521 - DNA, 414 bp, Gossypium hirsutum
ctaaactacatcgggcaaatgtgaattttctttctgaacctatcaaggatggaacaactggaacagtgatagttctcacaactccggatgctcagcgcacaatgcttgcttatcagggtacatcatcgactattaattatgattcttgcctggctggcatagtatccaagactaatatatttgttgttgagggttatttatttgaacttcctgatacgatcaaaactattatacgagcatgtgaagaagcgcgcatgagtggtgccctgatagctgtcaccgcatcagatgtctcctgcattgagagacactatgatgattactgtgaaattgtagggaattatgcggatatctcgtttgcaaacagtgacgaaacgagagctctatgccatttttcttcaaaggaaagcccaa

SEQ ID NO: 207522 - DNA, 411 bp, Gossypium hirsutum
tcggtcaaccccagcaaggaagaggctgatgagagacttcaagagactacagcaagatccacctgctggtattagtggggctcctcaagataataatatcatgttttggaacgctgtcatttttgggcctgatgatactccttgggatggcggtacgttcaagctgactttgcagttcatggaggattatccaaataagcctccaaccgttcggtttgtctcacggatgtttcattcaaatatctatgcagatgggagtatttgtctcgatattttacaaaatcagtggagtcctatatatgatgttgccgctatactcacttcgaatcagtctcttctttgtgatccgaacccgaactctacagctaactcgtaagcaactcgtatgtttagtgagaataaacgggaata

SEQ ID NO: 207523 - DNA, 231 bp, Gossypium hirsutum
tcgcccacgcgttcgcagtgatgcacttggttcatagccaacattgccctacttgagtccagaactcaagggagataggctacttgtttgggcccactctttccaaaactggcattggaatcctcaatgacacccgagtcccatttataaacctgatctataaggtcaagcaattaaaattctttcaacaataccagaccaaggtggctgttcttttttggtttcaaggaa

SEQ ID NO: 207524 - DNA, 425 bp, Gossypium hirsutum
cccacgcgtccgcagtgatgcacttggttcagagccaacattgccctacttgagtccagaactcaagggagataggctacttgttggggccaactttgcgtcagctggcattggaatcctcaatgacaccggagtccaatttataaacatcatcagaatgtacaagcaattaaaatactttcaacaataccagaccaggttggctgatcttgtcggattcgaggaagcacagcggattgtaaacgatgcacttgtgctcatcactgtcggcggcaacgatttcgtgaacaactactatttggttccattctctcctagatctcgccagtttagtctaccagattatgttcgatatctcatctctgagtacaggaaacttctaatgaggctatatgatctaggagctcggaaggttctggtgactg

SEQ ID NO: 207525 - DNA, 460 bp, Gossypium hirsutum
ctcaccattgttccaagtttgttgtaaaccaagttagaaccagcagccaacatggcctcaggagcagcctccaccgctgccggctcccttggcgtctctgaaatgcttggtaaccctctgaatttcagtggtggagctaggtcatcggctccaacaccatccaactcatccactttcaagaccgttgctcttttctccaagaagaaggccgctcctccaaagcccaaggctgctgctgtcgccccggccgatgaagagctggctaagtggtacggtccggacagaaggattttcttgcctgaaggtctgttagacagatcggagatcccagagtacttgaacggagaagttcccggagactatggataccatccgtttggtctgagcaagaagccagaagactttgcaaatatcaagcatatgagttgatatacgcaaggtgggcaatgcttggtgctgc

SEQ ID NO: 207526 - DNA, 201 bp, Gossypium hirsutum
caatgtaggcaagggaagtcggcaaaatggatccgtaacctctggaaatggattggctctgagggctgggcacgggggtcccagtcccaaccccgtcggctgccggcccactgttcaacctgttccctcgtcataagcggttcgcccgttcccgtccggggaccgacctggaaccggttcctttggggcccttccctggcc

SEQ ID NO: 207527 - DNA, 347 bp, Gossypium hirsutum
ggctaccactgcttctccaatggcgactcagctgaagagcagctttaggtcgtctgttacaagaggactggtagtccccaggggcatttcgggatccccgtttaaagtatcttccggaaagaccaggaccccttgcttcactgtcaaagctgttcaatccgacaagtcaacatttcaagtaatccaacccatcaacggcgaccccttcattggaagcctggagactccaatcacctcaagccccttaattgcatggtacctttccaaccttccagcctataagacggcagtgaacccacttctgaggggaatcgaagtgggtctggctcacggctttctcctggttg

SEQ ID NO: 207528 - DNA, 224 bp, Gossypium hirsutum
ggccaggctaaagataccaccagcagatacccgctacaaaacagaggctacaacggcttcggaaggaaatgaatctgtggagtattttctgaaacgtgaacttctcttgggaaccctttagaatggatttgaaagaccatgtcctattcatgaagagagtattcccattgctttgtccagaacggatcttcttgccacagccaaaaatggaactggaaaaaccc

SEQ ID NO: 207529 - DNA, 409 bp, Gossypium hirsutum
  unsure (1)..(409): unsure at all n locations
ggccaggctaaagataccaccagcagatacccgctacaaaacagaggatgtgacagctactaaaggaaatgaatttgaggactattttctgaaacgtgaacttcttatgggaatatatgagaagggttttgaaagaccatctcctattcaggaagagagtattcccattgctttgaccggaagtgatattcttgccagagccaaaaatggaactggaaagacagcagcattttgcattcccgccttggaaaagattgaccaagataacaatgttattcaagttgttatacttgttccaactcgagaactggctttgcagacatcacaagtgtgcaaggagcttgngaaccatttacaaattcaagtcatggtcaccacgggaggcaccagtctcaaggatgatattatg

SEQ ID NO: 207530 - DNA, 450 bp, Gossypium hirsutum
ggaaataggaacattaatcaaaatattattgaaaataaaaaaagggactcccttatagcaccaaacgaaaaacaaattattggattagagaatcgaaatcaagaagaaaaagaacccataggtgaagggggtcttgtatcagatgcacaaaaacaaggaaattttaaatccgttctctcaaaccaagaaaaagatgttgaagaagattatgataaatcagacaaaaaaaaacgttgaaagaaaaagcaatacaagagcaacacggaagcagagcttgatttcttcctaaaaaggtatttgcgttttcaattgagatgggatgattctttaaatcaaagaataatcaataatatcaaagtatattgcctcctgcttagactgataaatccaaacgaaattgttatattctctattcaacggggagagatgaatcttgatattttgatgatt

SEQ ID NO: 207531 - DNA, 413 bp, Gossypium hirsutum
ctgagatagtgaggtagctaaacaatggcagtttgcccagtatacaccacccaatctctcaactcaacatgttcaatctccacaccatcaaaaacccacttcagttctcaccacaaccacctagttttctacagaactagcaagagaactagcatgagaggtggcagcagctcatgtgtgataacctgctcagctggtgactcacaaacagttgtgattggtttagctgctgactcaggatgtgggaagagtaccttcatgaggaggctaacacgtgtgttcggtggtgcagctgagccaccaaagggaggcaaccctgattccaacacactgatcagcgatatgaccactgtgatatgtttagatgattatcattcacttgacagaactggaaggaaagagaagggagtgac

SEQ ID NO: 207532 - DNA, 324 bp, Gossypium hirsutum
ctcaagcacacggggcaaatgtgaattttctttctgaacctatcagggacggaacatctggggcagtgataggtctcacaactcgggatgctcatcgcacaatgctcgcttatcagggtacatcatcggctattcattatgattcttgcctgactggcatagtgtccaagactgatatatgtggcgttgacggttattaatttgaacttcctgataccatcaaaactattatacgagcatgtgaacaagcgcgcatgagtgcagccctgatagctgccaccgcataagatgtctactgcatcgttagacactatgaggattact

SEQ ID NO: 207533 - DNA, 328 bp, Gossypium hirsutum
  unsure (1)..(328): unsure at all n locations
cgccacgcgtgctaagaataaaacccactttgccaaacatggtgactagtgtcacgtgctacgctcgtgggattcggaacgcagtggcctccataaagcaactctcattcttaatctaccctccatccacatattcttcgctcatctttatcagccttaacacaaatgcactattcagcgaatcatataaggaagttccaaggaactgatggtctcatgcaaaaggggaatacactacttcactagtgacaaaatgtgaaattggagagtctttggaagagtttctcacaaaggcaacaacagataangcattgattagattaatgat

SEQ ID NO: 207534 - DNA, 402 bp, Gossypium hirsutum
gccacgcgtccgcccacgcgtccgagaacacacaacaatggccgtcaacacactaatgagctgcggcataggcaccacatttccttcacttcattcctcatcaaagtccaaattgagtggcgccgccgtatcgttacctacagctgtgggtaccaatgtgggccaccgcgctagcatgtaagctgactggatgcctggtcaacctacaccaccttaccttgatgcgtcaccaccagctgactttgggactgacccactaagactaggtgaaggccctgagaaccttgagacgttcaaagaatccgagttgattcactgcatatgggctatgcttgctggttcagggatattggtaccagaggccctagggttaggaaactgggtcaaagctcatgaatgggc

SEQ ID NO: 207535 - DNA, 456 bp, Gossypium hirsutum
  unsure (1)..(456): unsure at all n locations
cccacgcgtccgaagaagaaaacccactttgccaaacatggagactagtgtcacgtgctacgctcgtgggattgttcttcctggtgtctcttctaagcactcctcggcattagtctcccctccatccacatctccttccttcagctctaagagccttaaaacaagttcactatttggagaatcattaagggttgttccaaggtcatcattgaaggtttcaaaggcaaagcacactacttcactagtgacaaaatgtgaaattggagagtctttggaagagtttctcacaaaggcaacaacagataaggcattgattagattaatgatgtgtatgggtgaagcattaagaacaattgcttttaaagttagaacagcttcatgtggtggtactgctttgtgtaattcctttggtgatgaacaactngcttgtgatctacttgccaacaagcttctttt

SEQ ID NO: 207536 - DNA, 410 bp, Gossypium hirsutum
cccacgcgtccgaacaaaatcagttgcttcacaatggcctctacaaccatggctctttcttgcccatcattcgccggtaaggcagtgaagttctccccttccacccctgaaatccggggaactggccgtgtttccatgaggaaaaccaccaagcctgttccttctggtagcccatggtacggtcctgaccgagttttgtacttgggtccactttccggtgagccaccatcttacttgaccggtgagttccctggtgactatggttgggacactgctggactctcaactgatcccgagacctttgctaggaaccgtgagctcgaagtcattcactgcagatgggccatgttgggagctcttgggtgtgttttccctgagctgttggctaagaacggtgtcaagttcggtga

SEQ ID NO: 207537 - DNA, 419 bp, Gossypium hirsutum
aaatttatatccctgtgataaattggtttttgatgatcatgtgtgtagttgttgtttccatcttccgcagtaccactgatatcgccaatgcatatggcatagccgaagttggtgttatgttggtcacgaccacattggtgacacttgtaatgcttttaatatggcagaccaatttgtttatggctttgtgctttccgctcgtatttggatcaatagagcttatctacttctctgctgttctttccaaagtcttagagggaggttggcttccactcgtttttgctagtttctttctctctgtgatgtacatttggaactatggcagtgtgttgaagtaccagagtgaggtcagagagaaaatatccatggactttatgcttgaactcggctctacacttgggactgtgagaacttcgggg

SEQ ID NO: 207538 - DNA, 312 bp, Gossypium hirsutum
cagtaacatatgcacagctcaagcattactagcaaacatggctgctatgtatgctggttatcatggacctgaaggcttaaaggccattgcacaacgtgttcatggtcttgctggggtatttgctttgggactgaagaaacttggcaccgtgggagtccagggccttgcctctttgatactgtaaaggttacatgtgctgatgcccattcaattgctgatgctggttacaggagtgagataaatcttcgggttcttgatgccaaaacaattactgtttcgtttgatgaaacaactactttggaagatgtggac

SEQ ID NO: 207539 - DNA, 388 bp, Gossypium hirsutum
tcagtttcattgaactgggttcgaccttcctttacaaagaaggcaaattatgtgacacactccactgagctagccccaccttctgctttttcttcgcaaaactcactcacgtacaccaaagaaaccatttccaatgaagaaaacaattgcaagagaagactgttgctgttgggtgttggagctattacagctaatttactccctgcaaattcccttcttgcagaagagataccacaaaactatcgagctttcgttgacattccagatgggtattcttattactacccatcagattggagggaatttgattttaggggacatgattcagcattcaaagacaggtttcttcaactgcaaaatgtaagggtgagattcataccaactgata

SEQ ID NO: 207540 - DNA, 357 bp, Gossypium hirsutum
  unsure (1)..(357): unsure at all n locations
ccctgttatcgtacgctgcacccctctgaacctacgcaccccattccagaaaccattctacattaggtcccaagccgccccagtgctttcccaagatgatcttaaaaagcttgcagctgacaaagcagttgagtcagtcaaatcaggcatgatcctaggcctaggaacaggatcaacagcagcttttgtggtcgacaaaataggccaactcctttgcacgggccaactttctaacatcgtaggtatcccaacttcgaaaagaacacangaacaagctgcatcacttaacattcccttatctacccttgacttgcatcctcgtattgaccttgctattgatggtgctgatgaaggtga

SEQ ID NO: 207541 - DNA, 377 bp, Gossypium hirsutum
cgccaccaccggcgccgccatgggtcgcctgcacagccgcggcaagggtatttctgcctcagctctaccttataagagaactccaccaagctggctcaagatctcttctcaagatgtcgaggagaacatttgcaaatttgcaaaaaagggcttgaccccatctcagatcggtgtcattcttcgtgactctcatggcattgctcaggttaacagcgttactggaagcaaaatcttgcgtatcctcaaggctcacggtcttgcccctgaaattcccgaggatttgtaccaccttattaagaaggctgttgcgatccgcaagcatttggagagaaacaggaaggataaggattccaagtttcggttgattcttgttgaga

SEQ ID NO: 207542 - DNA, 377 bp, Gossypium hirsutum
cacatcaaaccaagagagaatccatgtctcattgtagtgaagcttaaacgatgggaacggaaggaatgcataccgaacagccttccagttttgcataaaatgcacgttaaggttggagataccatcaaagtaatatcgggtcgtgataagggcaagattggagagataagcaagatcttcaagcataacagcaccattgtagtgaaagatataaacctgaagacgaagcatatgaagagcagaggagaggatcaaccgggacagataattaagattgaagcaccaattcacagctcaaatgtgatgctgtattctaaagagaaagaagtgacgagccgtgtgggtcatatagtgttagataacgggaaaaaggtccg

SEQ ID NO: 207543 - DNA, 353 bp, Gossypium hirsutum
gcaatgtcgacggcttccatcaacggttggtgccttacctgctcttcttcctccaccaccagcttctctttttccgctcgtggacgacctacattgcggccttcggtcgtcgctagccttaactcttctccttctcctccgactcttatccaagaccgcccggttttcgctgcccctgttcctttgctcaccccgagagaagagatgggaaacaagtcctacgacgaagccattgaagctctcaagaaacttctcagtgagaaaggagaactgaaagctgaagcagctgcaagggtagatcaaataacagcagagttaaacacaacatcagctgacggcgaaccatctgactc

SEQ ID NO: 207544 - DNA, 373 bp, Gossypium hirsutum
tcacagctcctgtcttgagtactataatgggttaggagaatggtcacatgaacattgtggccattggccatgtcaactctgggaagtctacaaccactggtcatgtcatctacaagcttggcaggattgacaagcgtgtgattgacagggttgagaaggcagctgctgagatgaacgtcaggtcattcaagtatgcatgggagcttgacgagccttatgccgcacgtgcacgtggtattaccattgatattgccctctgtaaggttgatactaccaaatactactgtactggcattgatgcccctggacatcgcgactttcatcataacatgaatgcatgtacgtgacaggctgactgcgctggtctcattat

SEQ ID NO: 207545 - DNA, 309 bp, Gossypium hirsutum
tgctacatcctgcttcatggggacacgcttccccgacgtctacacaagttcagggagattcgtcgccaggtttggttttggcggccaaaaaagcagctcccaagaaagcctcgaaacaaaccttcgaccgccctctatggtacccaggagcggtggctcctgattggctcgatggaagcttggtgggtgattacgggttcgacccgttcgggttaaggaaaccagcggagtacttgcaatatgatttggattctttggaccagaacctggctaagaatatggctggtgagatcattggaactaggaccg

SEQ ID NO: 207546 - DNA, 378 bp, Gossypium hirsutum
gcctaaaagagctgaagcaatggcagtttgctcagcatacaccacccagtccctccattcaacgtgttcaatctccacaccagcgaaaacccatttaggttttcaccaaaagcaagtagttttctataggagaagcagcacgagaggtggcagcggcagcagcagcggcccatgcgtgataacatgctcggccggtgattcacaaacagttgtgattggcttggccgcagactcaggatgtgggaagagtacctttatgaggaggctaacaagtgtgcttggtggtgcagtcgagccaccgaagggaggcaaccctgattcaaacacgctcattagcgatatgaccactgtgatatgcttagatgattaccattcact

SEQ ID NO: 207547 - DNA, 373 bp, Gossypium hirsutum
gacatcgtttcggctttcgaagggaactccaatctgttctgggcggaacggtttggaaaacagtttttggggatgaacgatttgtgggttaaacactgtggaatcagccacactggcagtttcaaggatctgggtatgactgttttggtcagtcaagttaatcgactccgaaaactgaaacgacccgtcgttggagtcggctgcgcttccactggtgacacatcagctgccttatccgcttattgcgctgccgcgggtattccttccattgtctttttacctgcgaataagatctccattgcacaattagttcaaccaattgcgaacggcgcgttcgttttgagcattgacaccgatttcgacggttgcatga

SEQ ID NO: 207548 - DNA, 380 bp, Gossypium hirsutum
tggttcccttggatttcttccaaggaagcgagcttctcgtcacagaggaaaagtgaaggcattcccaaaggatgatccaagcaaaccatgcaagcttactgcctttttagggtacaaggctggtatgacacacattgtcagggaggtcgaaaaacccggatctaagcttcacaagaaggagacgtgtgaagctgttacaatcattgaaacccctcctatggttattgttggagttgttgggtatgtgaagacaccacgtggtctccgctcattgaacaccgtctgggctcagcatttgagcgaggaggttaaacgtaggttctataagcattggtgcaagtccaagaagaaggctttcaccaagtactcaaagcagtacg

SEQ ID NO: 207549 - DNA, 367 bp, Gossypium hirsutum
atccaacaatctgctttcgctggccaaacagctttgaagcagtccaatgagctcgtctgcaagatcggtgccgtcggtggtggtcgcgtttccatgcgtagaaccgtcaaaagtgctccaaccagcatctggtatggccctgaccgcccaaagtacttgggtccattctctgaccaaatcccatcatacctgaccggtgaattccctggggactacgggtgggatactgctggattatcagctgacccagagacatttgccaagaaccgtgagcttgaggtgatccactgtaggtgggctatgcttggtgcccttggctgtgttttccctgaaattctttcaaagaatggtgtcaagttcggagagg

SEQ ID NO: 207550 - DNA, 226 bp, Gossypium hirsutum
cacgcgtaccgagagagggatagaactgccggctggggactggctgccatctcgggccagggatgtgctttccagacgctggacaagaaatggactcatcccattgcccacttatgtgacggctacaagattggtgactatgtggacgtccaggtcaatggcgccgatcacaagggcatgccccacaaattgtaccatggacggactggacgtgcctggaacatca

SEQ ID NO: 207551 - DNA, 311 bp, Gossypium hirsutum
ccacgcgtacgggcaagaaccagattgcattgaagtgtggaacccaaatgggaaatacaaacttattggcaccgaacctatgcctgggactggatggatcaacctcttaatcgagcaacagtgccgcgtagacatatgtactgagaagaaaacgattttgtccgctgaggatatgatatatttgattggcaataagtgcgatggggtgattggacagtcgactgatgactggggggagactttatttgcaactttaagcagagcgggacgcaaagcatttactaacatggctgctggttacaacaatgttg

SEQ ID NO: 207552 - DNA, 372 bp, Gossypium hirsutum
gacctcggccccctcctctcctcctccgccaatgcaacagccctcgcctccttcctttgtgcccgtttctccaccatctccagccaactctctgacgccactcacgccattgacaacacttacctcctcttctccgcttacctagtcttcgccatgcaactcggctttgccatgctttgtgctggctctgtcagagctaagaacaccatgaacatcatgttgactaacgtccttgacgctgcagccggtgctctttcttattacctctttggttttgcctttgcctttggtgccccttctaatggtttcattggacgtcacttatttggtcttaaagcatacccttcacccgacggtgattatagttttttt

SEQ ID NO: 207553 - DNA, 362 bp, Gossypium hirsutum
  unsure (1)..(362): unsure at all n locations
tcaagtaccaaattgggccaaacaaattttaggtatcaaaaaaaaaatgttaggtttaggtacccaatgttatattaagtcaaataataataatggttgatatttattatgtatgatttagcaggtaactaagttcaaatgcggtggtgtttgtttgggacttgggtttcaacatactttaggagatggcacatcggctattcatttcatcaatagttgggctgacaccgtccgaggcgtctcgcctgccattgcaccattcatcgatcgaactcttcttcgtgctcgagtccgaccaatgcctaaattccaccatattgaatatgagccttctgctncattgaaggctgttgaatctgatc

SEQ ID NO: 207554 - DNA, 360 bp, Gossypium hirsutum
gaagcaaagccgattgacgtcaagcccctcccacacaccaaatcctgcaactagttctgaaaaaagaaagtttggttaaaaatgagtcagtgtgttcccagttgggatctggacgataatcatgtcactgcacgccattccttacgctctaactccaactccaccgcccctgatgttcacatgtcggactacgaagtggcagaattaacatgggaaaatggccaactagccatgcatggtttaggtccggcacgtgtgccggctaaacccttagtttccaaccctccctctaagtacacttgggataaaccaagggctaatggcactttggagtccatagtgaaccaggccactcgcgtt

SEQ ID NO: 207555 - DNA, 241 bp, Gossypium hirsutum
aatcatgggcttcgacaacgtgcgtcaagtgcagtgcattagtttcattgcctacaagcctccaggcttctaagctttttattaactttgtctctccatttgtttgaatttgtactcagaaaaaaatcatgttctttactttgcttttccttttctttgagttattggcctttgtttctcgatttccgggttttaatcctgagaactaatgaataaaaagttggttttcttcccaaataaa

SEQ ID NO: 207556 - DNA, 240 bp, Gossypium hirsutum
acggtcgtggcaccatcatgggccagggcgctatgcacgttcttccaaagcgtggttaatgccttccgcttgtatcctgatgcttctaggctcagctgcccttagcatactgacttcaaggactcgacttagacctgtgccgatgcatcctaactccctgcttacgctcatgcgacatctgctcttgacgagtcgcgtgcatgcgcctgaggagccgcaaagcggctgacctactacgaa

SEQ ID NO: 207557 - DNA, 376 bp, Gossypium hirsutum
aaagggcatctgtatatgccaaaagagctgtacaagctgctgtgtcgcagcagaagagagcaacttctagcgtagaagctgatataacaggtgcttcttcactccatgttttgccaaagcaggaagtatctaccgctatatctaaaaactatacatttaagaaaggtgatagggttaagttcgtaggtaccacatcaccttctacactttcctctctacaacctgctttaagggaaccgacaattggtgtacggggaaaagtagtccttgctttcgaagaaaatggttcctcaaaaatcggggtcagatttgacaggtctattcctgaaggcaatgaccttggtggtctttgtgaagaagatcatggtttcttctg

SEQ ID NO: 207558 - DNA, 330 bp, Gossypium hirsutum
cccacgcgtccgcttcaacagctttttcaacaatccaaggtcgttgatgaagaaacaatgaatgttgggattgatttccctagagatttcgccaattcaaggttgaaagaaaccatgattctcacccataggttctccaaaaacatattcagaaccaaggagttgtttgcttgtaggacaatccaaatgctgatttcagggcttgttttaggctctatctttcacaatgccaaagatgatctcagcggagcagaagaaaaagtgggtctatttgcatttatattaacattcttgctttcatgcaccacagaagcattaccaatcttttta

SEQ ID NO: 207559 - DNA, 379 bp, Gossypium hirsutum
gggttgcgtgccggtgataatagccgatggtatccaattgccatttccctccgccgtgaagtggtcggagatttccttcacggtggcggaaagggacgtagggaagctagggaggatcctggaacacgtggcgaagaccaatttgtcaaccatccagaaaaacctgtgggaccctgctgtcagcaaggccctactgttcaatgatcacatgcaagaaggagatgccacgtggcaggttctcgagtcactctacaagaaactggaccggtcgtacaagagatcgagggtttcaagccaatagggagcgaacacgtggaactgtgttgtgtggcgccagctaaggtttgtttccttcccaacgtggaagacagctaggaat

SEQ ID NO: 207560 - DNA, 222 bp, Gossypium hirsutum
cgactcggctcgtccattgacaagcctgtgcgtcctttcttcaatgccccttccctctattacatgtcgtctttgccaaatgaagctgtgtacgagaaggagaaacctgtcgtcacttggccaaagcaactgaatgctccacttgaaaccgttgatcctgaaatcgctgacatcatcgagcttgaataagcgcactaatggaaggtacttgaacttatctta

SEQ ID NO: 207561 - DNA, 371 bp, Gossypium hirsutum
  unsure (1)..(371): unsure at all n locations
agttcaagagaacatttccttggagcataaaaaaaagtttagaacatgggtgtccaagctgaaattgagttcccagtcattgagttccgttcagcagatttggagcggggaaccgatgggtggcaccgtttgtgcaagagggttcgagaggcttgtgagactttcggctgtttcgaggtggcgtataaaaaaatatcgacggaagttcgagaggagacatttgggttgatgaaagaattaattgaggtcccagtggaaaggaaacaaaagaacgctagtcccatgccttatcatggctgggttggaccatgcaatcaggtttctttgttgtatgaaggctttggacttggagatgcctncaactatgactc

SEQ ID NO: 207562 - DNA, 323 bp, Gossypium hirsutum
gcgaccttgggttgagcgtagacatgaggaaaatcatgggtgccaaagttctcttcttctgtgctttgctttccttttgagctgtgtccgcatttgcacaggatgaggaagaccaaggtcttgttatgaacttctacaaggattcttgtcctcaggctgaagacattatcaaagagcaagttaagctactgtacaagcgacacaaaaacactgctttttcttggctgagaaacattttccatgactgtgctgtacaatcatgtgatgcttcactgctgcttgactccacaagaaggagcttgtctgagaaggagacagacagg

SEQ ID NO: 207563 - DNA, 370 bp, Gossypium hirsutum
gtcccgagagcactagcattatcactagcactagttgcaaccatggcctccgccgcatgtttcttgcgccaccacgcactgacaacgaatggcagatcatcatcattatcgccgtcgctgcgccaggtttcaaacatgaagcctacccaccatgtggtgtgcaaggctcaaaagcaggaagatgatggaagccttgtgtcccgtatgttagctctcactgtactcattggtgctgacgctgttggctctaaagggtctcctgctgatgctgcctattgtgaagctggaaatgtatttggaaagccaaaaaccaacacaaacttcatgccatacagtggggattgattcaagctctcggtaccatcgaaat

SEQ ID NO: 207564 - DNA, 254 bp, Gossypium hirsutum
gcaaccaacatggcctgattagcagcctccaccgatgccggcttccttggcgtgtctgaagtgcttggtaacactctgaatggcagtggtggaactaggtcattggctccaacaccatccaactcatccactttcaagaccgctgctcttttctgcaagaagaaggccgctcctccaaagcccaatgctggtgctgtcgccccagccgatgaagagctggctaagtggtacggtccggacagaaggattttctt

SEQ ID NO: 207565 - DNA, 372 bp, Gossypium hirsutum
  unsure (1)..(372): unsure at all n locations
cttggtggaagtgctgaccttgcttctgccaacatgaccttgctcaaaatgtacggtgatttccagaaggaccccctgaggagcgcaatgttaggtttggtgttagggaacatggaatgggatccatctgcaatggcattgcccttcacagcccaggcttcattccgtactgtgctacattctttgtctttactgactacatgagagctgccattaggatttctgccttgtgtgaagcangagttatctatgttatgacccatgattccattggtcttggggaagatggaccaaccnaccagcccaattgaacacttggcaagcttncgtgcaatgcctaaatgtntgatgcttcgtncagctgatggaaat

SEQ ID NO: 207566 - DNA, 359 bp, Gossypium hirsutum
gtgtgttggatcaagagcagatagtaagcgcctttattatggacgctttattctgtctccacttatgaaaggccaagccgacacaataggcattgcgatgcgaagagctttgcttggagaactagaaggaacatgcattacacgtgcaaaatttgagaaaataccccacgaatattctaccatagtaggtattcaagaatcagtccatgaaattttaatgaatttgaaagaaattgtattgagagggaatttgtatggaactcgtaacgcctttatttgtgccaagggtcccggatatgtaactgctcaagacatcatcttaccaccttctgtggaaatcgttgataatacacagcatg

SEQ ID NO: 207567 - DNA, 368 bp, Gossypium hirsutum
  unsure (1)..(368): unsure at all n locations
gaggcagaccgaatccccgagcattcccgtccacgcaggttatccgggagggtagccttagttggggatgcagctggatatgtgacgaaatgctcaggtgaaggtatctactttgcagctaagagcgggagaatgtgtgcagaggcgattgttgaggggtcagagaatgggaagaagatggtggatgaaggggacttgaggaagtacttggagaagtgggacaagaaatactggccaacctacaaggtattagatgtgttgcagaaggtcttctacagatcgaaccctgcaagggaagctttcgtggagatgtgcgcggatgagtatgtgcagaagatgacatttgacagttacttgtacanaacagt

SEQ ID NO: 207568 - DNA, 354 bp, Gossypium hirsutum
tgtccagtgccatggagaggaccgaccagtgggttttctcccaagagattcctactgatgatattgacgaagttggtgtaaccaatggcaatcttcacaagttcatgctagtggcaaagagcaattacataacgaagttgataatggaaacaaatgaatcggatctgacgagaatcaacctgtctgaaatcccctgtggccctgaaatcttcgagaaagcacccaagttctgctacggcgttaatttcgagattacagtgcataatgtggcggctctccgatgtgctgccgagtatcttccaatgacggatgaatactgcgactacaacctggcatggcgcaccgaagatttgc

SEQ ID NO: 207569 - DNA, 372 bp, Gossypium hirsutum
gctaatgatgatgtgaagcagtgtgaagtaatccagcatttgcttgatgtaacggaagttgcagcttctattcccgataagagttcatccccaaaagtgtctaagaaagtggagcgtaattactcagatgtggataatgaaaaaggtcattcgtacaatgataactctcctaagaaacctgattctcgcttgacttcaagaaacacttcttcagtttcatcgggacatgatctactctctgatagaggatcacatcggtatgaagaatggaatgctgatttgcttggttgtttctcagaaccatctctgtgtataaagacattcttttatccttgtggtacattttcaaagattgctaccgttgcgacaaac

SEQ ID NO: 207570 - DNA, 380 bp, Gossypium hirsutum
tcttacgtggcctgcacaaaattctccatgttgggttggagtggagggaaaagagacttgagaatgaaaagggttctttcggtttcggctcagcagcaagctgaagttggtgaaacacaagaagctaaagtgcatgaagagcaagaaaaggttaagcatcatcaacctacacaaccaaggccagtggaaaaacaactgaatgtaaagagcaaaaacatgggcaaagattatggaggacagtggcttagcagtgttacgaggcacgtcaggatctatgctgcctacattgatcctgaaacctctgagttcgatcaaactcagatggataaactcacccttatacttgaccctactgatgagtttgtttggactcctgaaac

SEQ ID NO: 207571 - DNA, 260 bp, Gossypium hirsutum
ggatccatgtagagaagcaaacaacgtcgtgacgatgtaccatgcttacacaccaggcgtcaaacccattattaccaacaagacatttactgcagtcgagatctttaaccaccctgaacttgatgctgcagagcctagggatggtaatgagcatgattacactcttattcaaaaggatactatgtggcctgacagatggcctgatggaagattacttggaacacatggtgcagactactcgagtgcaggtgctgacaagt

SEQ ID NO: 207572 - DNA, 401 bp, Gossypium hirsutum
  unsure (1)..(401): unsure at all n locations
atttgggttgcaatggcacaagcaatggcatcgatgactggtttacgtggctcttcacaagctgtgttggaaggtagtgtccgactcancggccaaacccggttgaacgttgctagcaccaacagggtggctgtggctagacctggttttaccgttagagctcaacaggtccctgccgagcctgaaactggacgcagagctgtgctgggtcttgttgctgctggtttggctactggctcctttgttcaagctgtgcttgctgatgcacgaagcatcaaggttggcccgcctgcaccaccctccggtggattgcccggaactttgaattccgatgagccaagagaccttgatctggcgtacaaagatcggtttttcctccaaccattgactccggcacaagc

SEQ ID NO: 207573 - DNA, 384 bp, Gossypium hirsutum
  unsure (1)..(384): unsure at all n locations
cttccctctgcaccgccgtagccaccacctctttcctccgcggccatccggcgccgaaaaccctaaactcccttcctttcaaccaatctcttttcgggctaaaaccccaacgaaatggccgtctcaccatggcagcatacaaggtgacactgttaacacccgaaggaccccaagaattcgtgtgccccgacgacgtatacatcgttgaccaagctgaggaagaaggcattgatcttccgttctcgtgtagggctgggtcttgttcttcgtgtgccggagtgattaagcaaggctccgtcgatcaatccgacggtaatttccttgatgatgnaccagatgctgcaggttntgtcctcacttgtgttgcttaccctcagagtgatg

SEQ ID NO: 207574 - DNA, 378 bp, Gossypium hirsutum
ttttagtagagatccgcgagaggttggaattgcaaacgattggaaatgggagtgccagcgttctacaggtggttagcggagaagtatccgctgattgtggtggacgttatcgaggaagaaccggtggtgatcgaaggtgtctccattccggtggatactagtaaacccaatccaaataaacttgagtacgataatctttatctcgacatgaacgggattattcatccttgtttccaccccgaagacaggccttcaccaacaacttttgatgaagtttttcaatgcatatttgattacattgatagattgtttgttatggtccgtcctcgaaagcttttgtatatggctattgatggcgttgcccctcgggctaaaatg

SEQ ID NO: 207575 - DNA, 367 bp, Gossypium hirsutum
ccgactgtgaactggtgcagcgaaggctgtggcccttgtactccctactctcaaaggcaaactaaatggcattgccttgcgtgtaccaacaccaaatgtctcggtcgttgacttagttgtccaggtctcaaagaagaccttcgctgaagaggtgaatgctgctttcagagaaagtgcagagaaggagcttaagggtatcctttctgtatgcgatgaaccccttgtctcagttgatttcaggtgctcagatgtgtcctccaccgttgatgcatcactcaccatggtcatgggagacgacatggttaaggtgattgcttggtacgacaatgagtggggttactctcaaagagttgtagacttggctgac

SEQ ID NO: 207576 - DNA, 178 bp, Gossypium hirsutum
gcggttgcagctgaggcagtgggcctggtacttcctactctcaaaggcacactaaatggcattgccttgcgcgtaccaacaccaaatgtctcggtcgttgacttagttgaccaggtctcacagaagaccttctctgaataggtgaatgctgcttacaaagaatgtgcatacaaggagc

SEQ ID NO: 207577 - DNA, 362 bp, Gossypium hirsutum
ctgtgtcaaagatccgtggtaggtggggaggatttgagacattagaaaaatgggtgactggagcatttgctggtcatactgcggtttgcttgaaggatgacatgggtaatctatgggttgctgaatcagggcatgaaaatgaaaagggtgaagaaattatagtggttattccatgggatgaatggtgggagctgtcactgaaggacaattctaatccacagatagccttgctttctttacatccagatatacgtgcaaagttgaactccaccgcagcatgggagtatgctcggagcatgtcaggcaagccatatgtttatcacaacatgatatttagttggatagacactgtagctgacaac

SEQ ID NO: 207578 - DNA, 376 bp, Gossypium hirsutum
cggacgcgtgggcggacgcgtgggcttcctctttccattttcaatctcttctttcacatctgattgaaagatatggacacctggctattcacttccgaatctgtcaatgagggccaccccgacaagatttgcgaccaggtttcagatgctattcttgatgcatgcctagaacaagatccagaaagcaaagtagcttgtgaaacttgtaccaagacaaacatggttatggtctttggcgagatcacaaccaacgctaaagttgactatgagaaaatcgttcgtgatacttgcagaggtatatgggtttacatcagctgatgttggccttgatgctgacaactgcaaaggtctagttaacattgagcaacagagccct

SEQ ID NO: 207579 - DNA, 340 bp, Gossypium hirsutum
tcactcgtggggaaaatatgcggtttataacgtgaattatatacttaatatatgatatacctaatgtcatattcccatattctcgggaagtggcgacatacgagcccttgattcgatttatctctttatctccccgtgaattgtatgtttgtaacaatattgacagaatttcttcaattccaatcgactgggcgtattgcgtcgatttttttgagtaatatacctcggaaatacccgttgattccttattaacgccgcttcgaacacaactggtacattccaaaataatcgtccctcggacttctttactcttggccatgaaccttctttgagtttttaa

SEQ ID NO: 207580 - DNA, 341 bp, Gossypium hirsutum
caaaaaagttgctttggttgttgttactggtgatcgtggtctctgtggaggtttcaacaatgctatcctcaagaaagctgaagctagaattgcagaattgaagcagcttggacttgattatacaataatcagtgtggggaaaaagggtaattcatatttcatccgcaggccttacatcccagtggacagattcctagatggtagctcactccctacagctaaagaagctcaggcaattgctgatgatgttttttcactctttgttagtgaagaagtcgataaagtggagcttttgtacaccaaattcgtatccttggttaagtctgatcctgtgattcata

SEQ ID NO: 207581 - DNA, 365 bp, Gossypium hirsutum
ccttctagttcctttgattccccgttctggactaccaattctggtgctccagtttggaacaataactcatcacttactgtgggagcaagaggtccaattctccttgaagactatcatttggtggagaagctagctaatttcgacagagaacgcatacctgaacgtgttgttcatgctagaggagccagtgcgaaagggttctttgaggtcactcatgatatatctcagctcacatgtgctgatttccttcgtgcccctggagtgcagaccccgctcattgttagattctccacggctattcatgaacgtggtagtcctgaaactatgagagacccccgacgtttcgctgagaaattttacactcg

SEQ ID NO: 207582 - DNA, 381 bp, Gossypium hirsutum
aaattggaacgtgactcttaaggaaggataatgctatccttgcgcttcgctattcctaccgcaaatacattaactccacccaagactaaaccgaaaccgggtttagtagtacaaaccgcttggaaccaaacggacctttttccttctcttcccaaacgatatgattataagctacaagcagctaccacggacttatctgtggagggagatataccggcggaggacgtggtggagctgccggcggagctgcgcagagagttgatgccgaagcacgtagcggtgataatggacgggaacgggcggtgggctcggcagcggcgattggcgacatcagcaggacacgaagccggtgtaaaggcgttgagggagctgatcgaacta

SEQ ID NO: 207583 - DNA, 390 bp, Gossypium hirsutum
gtaagcagtagtagcaatggcctgctccatgatctcatcggcaaccattgccaccgtgaactgctcctccccggcacaggccaacatggtggcccccttcaccggcctcaagtctgcctctgctttcccagtcactaggaaggccaacaacgacatcacttctcttgcaagcaatggtgggagagtgcaatgcatgcaggtgtggcctcctcttgggaagaagaagttcgagacactctcatacctccccgatcttacacccgtacagttggctaaggaagtagattaccttcttcgctctaaatggattccttgcttggaattcgaattagaggagggattcgtgcaccgtaagtactcgagcttacccacgtactacgatggacgcta

SEQ ID NO: 207584 - DNA, 325 bp, Gossypium hirsutum
ttcttgcccatcattcgccggtaaggcagtgaagttctccccttgcacccctgaaatccagggaactggccgtgtttccatgaggaaaaccaccaagcctgttccttctggtagcccatggtacggtcctgaccgagttttgtacttgggtccactttccggtgagccaccatcttactcgaccggtgagttccatggtgactatggttgagacactgctggactctcagctgatcccgagatccttgctaggaaccgttagctcgaagtcattcactgcagatgggccatgttgggagctcttgggtgtgttttcctgaactgt

SEQ ID NO: 207585 - DNA, 367 bp, Gossypium hirsutum
ttttgaaaactgaactcaactgttgatatcttccagaaatcttgagtttttcaccaatggctaccgatacctcattcagattgtccccgctgctgttgtcgctcctatgtatttctctggaaaaattgagtttggtgtcattaatcagtctgtatcagcttttagtcatatccttggggacgtctccttggtcgtatatcaatttcaagcaattagtgccttttcagcgatcattgacagacttggtgaatttgatgatattctggatagcagcagatccaagtctctctctgatcccatggagtatattaatcttacgtattctcatgtcagagggtcccaagttttggattctaatggatccaca

SEQ ID NO: 207586 - DNA, 379 bp, Gossypium hirsutum
acgactctccgcttccattgacaagcctgtccgtcctttcttcaatgccccttccctctattacatgtcgtctttgccaaatgaagctgtgtacgagaaggagaaacctggcgtcacttggccaaagcaactgaatgctccacttgaaaccgttgatcctgaaattgctgacatcatcgaacttgaaaaagcgcgccaatggaagggacttgaactcattccatcggagaacttcacgtcggtgtcagtgatgcaagcagttgggtctatcatgaccaacaagtacagtgaagggtatcccggtgctagatactatggagggaatgagtacatcgacatggcagagatattgtgtcagaagcgtgctctggaagcattc

SEQ ID NO: 207587 - DNA, 328 bp, Gossypium hirsutum
atccgtccacgcgttcgggaagtgaaaaaaaccagagtaggcaaccatggcgacgttggctactgtgggaagtagttcagttcttcggttcaacaaaacagagcctctgtagacgaacccatcttcaccatttcttggtttcgttacttcccaactcatcggcatcaaaatctcttgcaacctccctgtcgtggtggcgcctttaaaacccatatctgtccctttcactcctgctctccagcctgttgctcgtaggatatgccctttcaccggcaagaaagcgaacaaagccaacgaagtttcggtcttcaatcacaagacgaagaaa

SEQ ID NO: 207588 - DNA, 372 bp, Gossypium hirsutum
tctcaagttgttggtgtaactgaagttgtgttggctattaattaccaacctgaggtgatgttgaacttcttgaaggagttcgaaactaaactcgggatcacgatcacgtgttctcaagagactgagccgctcggcactgctggtcctcttgctttggctagggacaaacttgttgacgagtccggcgaaccgttttttgtccttaacagtgacgttatcagtgagtatccattcaaagaaatgattgaattccacaaagctcatggtggagaagcttccataatggtaaccaaggtggatgaaccatcgaaatatggtgtggtggtgatggaagaatcaacaggacaagtggacaaattcgtggaaaaacct

SEQ ID NO: 207589 - DNA, 291 bp, Gossypium hirsutum
  unsure (1)..(291): unsure at all n locations
ggatcaactttcgacgactncaaccccatncagatggtatccgatggcctcaccggcttcgaatcctccgttcttcgtgtcatcggtcacactcgccatgctctctccttcgcccgttttgcatacaagcatgggaagaggtatgaaaacgtggaggagatgaagctacggtttcagattttcgaagacaacttggatttaatcagatccactaacaagaagggactgccttatactcttgctggcaatcagtttactgattggagctgggaagagttccagatacacaga

SEQ ID NO: 207590 - DNA, 357 bp, Gossypium hirsutum
gtatttgaccctcttgatggatcatccaacattgatgctgctgtttcaacaggttcaatttttgggatatacagtcccaacgatgaatgcctagcacaaatagatgatgattccactcttggttcagcagaacaaagatgtgttgtgaatgtgtgccaaccagggagtaatctattagctgctggatactgcatgtactcgagctctataatctttgtgctcacgttagggaatggagtgtacgcgttcaccttggatccaatgtatggtgaattcgtgttaactcaagagaaaattcagataccaaatgccgctaaaatatatgcattcaatgaagggaattaccaattgtgggat

SEQ ID NO: 207591 - DNA, 285 bp, Gossypium hirsutum
  unsure (1)..(285): unsure at all n locations
gctcaacttcctggtgatatggtatatataaaggcaactagtgaaaagagtgcagaaatggtgactgaccaaggggccatatatgttacatcaaacaggggctataactggagagctgctgttcaagagaccgtctcagctactctgaatagaacagtttctagggggattaatgggggcaggtattacaccgggaccttttaacactgtgaaccgctctncggatggacgatatgtggctgtctcaagccgtggtaactnttatcttacatgggagcctggaca

SEQ ID NO: 207592 - DNA, 371 bp, Gossypium hirsutum
caaagttgaaggattttgtagcaaccttacagtcggatacatactttcaaaccgaaatcgctaagctccgacaagaagtggaggagtacgcaaaacagtttccgactattggttttgagaaagaagcaatgaaatacaaggactaaagcggatatctttacacacaatgcaaggtttgtcagctctaaagaacttcctaaactggttgctgtcttatttgttgaacgtaatcttctagaggcaactatcttagaatttattgaaatgccaaaatatgcacgttagtttttagtattaaggatgttatctggggttgagccgaactgtattcaaactgtatgaaactatgagcttttcattcaaagtttgag

SEQ ID NO: 207593 - DNA, 260 bp, Gossypium hirsutum
actattggatgattgagatcattctgacatgaatggtcaccgcctaagaagttcatggggctcttcgtgcactatgacctgcctccgcgttgaccatatgtacattatcaccgcctaattgaggtgatcagagcacataccctgactactatacccagattacaactagcgagcacacttacgagatgatcgataagatgctgcgcatgtatgataaagcgatgatcaatacgcgatccatgcacgtgacagaatatatt

SEQ ID NO: 207594 - DNA, 362 bp, Gossypium hirsutum
  unsure (1)..(362): unsure at all n locations
ctgtaatgcagcagtatctctgccatcttccaagtcatctaccctgtcatttaaaaactcagtcactgtccctgaaagaatcaacttcaacaagagtgttttgtacccaaaaaatgtcagccttggtggaaatgtggtttccattagagctcangtcactacagaagctcctgcaaaagcaccaaaaatttccaagaaagatgatgagggtattggtgtgaacaagttcaaaccaaaggaaccctacattggaaagtgcctnctcaacaccaaaattaccggagatgatgctccaggagagacttggcacatggtttttagtaccgaaggggaagtaccatacagagaaggacaatccattg

SEQ ID NO: 207595 - DNA, 312 bp, Gossypium hirsutum
cccacgcgtccggggactttcaatgacctagacaaattgtcaatggcgaatattgaagagaggagtccaaggttgtgggcatgtctgatagctgtatactgggtctctcttgtcacctatgtcctttcgtggaaggcttataaacatgtttctgcactaagagctaatgctttaatgtctcctgaagtgaaacctgagcaatttgctgttcttgttagagacttgcctgatgtcactccaggtcaaactagtaaggagcaggttgattcgtattttaaatctatctatcctgatacattctacagatcactg

SEQ ID NO: 207596 - DNA, 282 bp, Gossypium hirsutum
ctcagttaacaacaaaatccgtaaatggctaccactgcttctccaatggcgactcagctgaagagcagctttacgtcgtctgttacaagaggactggtagtccccaggggcatttcgggatccccgttcaaagtatcttccggaaagaccaggaccccttgcttcactgtcaaagctgttcaatccgacaagtcaacatttcaagtaatccaacccatcaacggcgaccccttcattggaagcctggagactccaatcacctcaagccccttaattgcatgg

SEQ ID NO: 207597 - DNA, 285 bp, Gossypium hirsutum
ctaaagaacatatcttgttggctaaacaggtcggtgtccctaacgtggttgtgtttttgggcaaactagaccaggtcgatgatgaagagctttttcaatgagtgtaattggaggtgcgtgaaatggtttatagttacgaatttcccgctgatgatctacctattatatttagcttctcacttttagctgtagaagctttgatggctatgcccagaatgcctagaggttaaaaccaatgggtggattagatttatgagacttttggatgctgttgatagatacatc

SEQ ID NO: 207598 - DNA, 258 bp, Gossypium hirsutum
aagacatgggtgttgtaatcattgacggatcgacggtgagagccttcgtgactgacgaccagcagttcacgaagagcgtggatgagcgtttcgcacctcttgacctcaacaacgacggtgtgctctccaggtccgagcttcgcaaggccttcgagtctctgcgtctcctggagtcccacttcggtgtcgacgtcgccactccccccgacgagctcactcagctttacaactccattttcgagaggtttgattgcgatg

SEQ ID NO: 207599 - DNA, 364 bp, Gossypium hirsutum
atagaatacgaccctaatcgaaatgcatacatttgtctcatacactatggggatggtgagaagagatatattttacatcccagaggggctataattggagataccattgtttctggtacagaagttcctataaaaatgggaaatgccctacctttgaccgatatgcccttaggcacggccatacataacatagaaatcacacttggaaggggtggacaattagctagagcagcgggtgctgttgcgaaactgattgcaaaggaggggaaatcggccacattaaaattcccttctggggaggtccgtttgaaatccaaaaactgttcagcaacagacggacaggtggggaatgttggggtgaacc

SEQ ID NO: 207600 - DNA, 407 bp, Gossypium hirsutum
aaatcatacatgacatagctttttacatttcatcttcaacatcttcactgcaatggcaaccatgctctgactctctccaaatccttccatcacaactttaccctctcttcggtccagtttcaagggaaatctgaggaatttaaaaccaaacccttttcacattattcgtatcacgaccaagcagcatggggtagaggcacgaaaggggacacggtctttagtggttgttaaccaagcatcatcaacccaagcgtctgttacagcctctaatatgacgtttcggttggacaacctgggaccttagcctgtggcaagaaagaaaggtaagagaaacgggacaggaatatcgtctggacaaggagggagctgtgcgtttggaatgacgggtcaaaaatcacgttctggcc

SEQ ID NO: 207601 - DNA, 260 bp, Gossypium hirsutum
gatttgcagcccatcaacagagaattcaacagacaaattatccaataacaatggcactcagaatgtgggcttttttcactggcaatgcactcaaaatctcttgttcctccaaacctaatgttttccttgctttatcactctctagatgcttctccactgatgtggatgggctgaagtatgctcattcacatgaatgggagaagcatgaaagtcctgtggctaccattggcactactgaccatgctaaggaccatcttgga

SEQ ID NO: 207602 - DNA, 282 bp, Gossypium hirsutum
  unsure (1)..(282): unsure at all n locations
cgatacttacctcatttttgaaagacatttgggttgcaatggcacaagcaatggcatcgatgactggtttacgtggctcttcacaagctgtgttggaaggtagtctccaactcagcggccaaacccggttgaacgttgctagcaccaacagggtggctgtggctagacctggttttaccgttagagctcaacaggtccctgccgagcctgaaactggacgcanagctgtgctgggtcttgttgctgctggtttggctactggctcctttgttcaagctgtgc

SEQ ID NO: 207603 - DNA, 324 bp, Gossypium hirsutum
gttcgtaacaatgtcggtctcacttcaagctgcagctaccctgatgcaaccaagcaaagttgctgcaccatcaaggaccaatgtgctgctcacgtcctcccacagcgtttctaaggcctttggtttggagcctgttggtgctaggctcacctgctctttgcaaactgacctcaaggacttggctcacacgtgtgttgatgctaccaagctcgctggtttcgctcttgctacatttgctcttgttgcctcgggagcaagcgctgaatgatttacaaagcggctaacctacgatgaaattcaaagcaagacatacattgaagtcaa

SEQ ID NO: 207604 - DNA, 390 bp, Gossypium hirsutum
gccattctagccttcgaattgaaaccctaaaaattccactaagaaatggccttcacagcttacctctgcaccgccgtagccaccacctctttccttcgcggccatccggcgccgaaaaccctaaactcccttcctttcaaccaatctcttttcgggctaaaaccccaacgaaatggccgtctcaccatggcagcatacaaggtgacactgttaacacccgaaggaccccaagaattcgtgtgccccgacgacgtatacatcgttgaccaagctgaggaagaaggcattgatctttcgttctcgtgtagggctgggtctggttcttcgtgtgcccgaattgattaagcaaggcttcggcgatcaatccgacggtaaattccttgatgatga

SEQ ID NO: 207605 - DNA, 320 bp, Gossypium hirsutum
gcgcccacgcgtccgctcgtcgttgaagcgaaagcttatctcttttcgtctctgaatctgatcaagcaacacctgaaaaggaaaacttacaaacaactactactagtctactacccagcactagaagcagctcgtagccagccatggatgaagagtacgatgtcatagttctaggaactggtctcaaggaatgcatcctcagcggtcttctttctgttgacggactcaaggttctgcatatggataggaatgattactatggaggagagtctacatcactcaacctcattcagctctggaagaagtttagaggaaatgat

SEQ ID NO: 207606 - DNA, 383 bp, Gossypium hirsutum
cccacgcgtccggtcacgtgtcaagcatgaaggtatgagaagggaatacctctgtagcacctttcagacaaagaggaaggacaaaaacttcaattctactagcaaaagggaatgtagcatatgttactttgatttgcacctctcagcagtgcactgttcatgttcttctgatagatatttgtgtttaaatcatgcaaagcggctctgttcttgcacatggacagaaaagattttcctctacaagtacgaaatcaacgaattaaatatgcttcgtgaagcagtggaaggaacattgagtgcggtgcatgcatgggctagagaggacctgaatttgggtcttcgtcactacactccaaagaaaaatcattcagagaagatgaagg

SEQ ID NO: 207607 - DNA, 351 bp, Gossypium hirsutum
gcggaagaccaacaccaatgtgaattacataacaggcttgaattcttttggtgggttgaaagctcataacaaagtggtctcactaggccaacgtgtatgcaccgagcaatcatttgcaaacgttgttagctcactcaaagctccgacaaagggcaagacaggtaaaagcagcggcggtgcactgtcttcaacctgtaatgctgttggtgagatattcaggattgcagcaatcatgaatggccttgttcttgttggtgttgctgacggatttgtgctgcttcgaatcgaagcttctgtggaagaggctgagtaagagaattttaagacataacttgttttcatttccccaaa

SEQ ID NO: 207608 - DNA, 299 bp, Gossypium hirsutum
gccacgcatacggaattttagaactactcttctgctcatcaaaaatgcatgtttcaagcatggggacaaagatgcattgagagcttgtgtaaaggctatcaaatactgttccactgagcgtggaggatatcttcaagattttgctcatgacaaactaaatgagcttggggatgagcttcttgataagcttaaatctgctactaaagaagtgatcgatggagaagatgacgattctcttcttgggaatttcaaaagattgtacgaacttccattgtcaaggcctatatcacttgatgaac

SEQ ID NO: 207609 - DNA, 272 bp, Gossypium hirsutum
cttatactaagtctgttaaacaggtaccgtataatatttctatactggagatcagtgcgccggttattgctcccggtgttttatgagctcctgcaccgtcggcttccggtgttaacattaccggcttacttgagaaagctggttgtaagacgtttgctaatttgcttaccagtagtggtgtgttgaagacttatgaagcggcgcttgataaacggttgactatttttgccccgtccgatgaagcttttaaagccgacggtgtacctgatctg

SEQ ID NO: 207610 - DNA, 270 bp, Gossypium hirsutum
  unsure (1)..(270): unsure at all n locations
ctccaatggcggctgccgtctccaccatcggtgctgtcaaccgatcaccgttgggtttgaatggatcaggtgccggggcttctgctccaagctcanctttcatggggaacagcttgaagaaagtgagcgctaggttcaacaacaacggcaaggctccagtgggaagtttcatgattgtggctgccaaagaaatcgacgaagacacacagaccgaccaggaccgatggaaggggcttgcttatgatatcttcgatgaccaacaagacattt

SEQ ID NO: 207611 - DNA, 347 bp, Gossypium hirsutum
  unsure (1)..(347): unsure at all n locations
tgattgcatacataaggatcatatacgatccgtgatctgaacaaatatagcacaatgactgggttgctttgaaaggagctagctgctccangagtttcaaagcggataacctacgctgaaatccaaaacaagacatacatggacgtcaaaggaacaggaactgataaccagtgcccaaccatcgatggtggtgtcgactatattgccttcaagcctgacaaatactacgccatgaagatctgcttggagcccacttacttcactgtcaagggtgagggggttaccaagaatgccccttctgagttccaaaacaccaacctcatgacccggttaacctacacctttga

SEQ ID NO: 207612 - DNA, 248 bp, Gossypium hirsutum
cccccgtcgggccacgcgtgacctaatcctaccttctttaaacacttacctcataatatttctatactgtacatcaatacccccgttatttctccccatgttggatgagctactgcaccctcaacttcccttgttaacattacccgcttacttcacaaaactacttgtaagacatttcctaatatacttaccagaagtggtgtgttaaagacttatgaagcaacgcttcttaaaagattgactatttt

SEQ ID NO: 207613 - DNA, 424 bp, Gossypium hirsutum
gcggtcaacctaaagccttaggcaccatggcaacctctgctatccaacaatctgctttcgttggggagaccgctttgaagcaggccaatgagctcttacgcaaagtcggagctttcgatggtggtcgtgttaccatgcgcagaactgtgaaaagtgcccctaccagcatctggtacggccctgaccgcccaaagtacttgggtccattctcagaccaaatcccatcatacctgacaggtgaattccctggtgactatgggtgggacactgctgggttatcagctgacccagagacatttgctaagaaccgggagcttgaagtgatccactgcagatgggcaatgcttggggccctgggttgggtcttccctgaaattctttcaaagaatggagttaagtccggaaaggcagtttggttcaaagt

SEQ ID NO: 207614 - DNA, 396 bp, Gossypium hirsutum
gtagaggaacccagaatcggcctcgccctcgtccgcagctctacttattcttttttctctggggttagtacaaccatggcgagtcgcaaacggttccctaatttcgtctctcttattctcctctctctcgtcgccattgcctctgctgaagttttcttcgaagaacgcttcgaagatgggtgggaaagtcattgggtaaaatctgactggaagaaagatgagaacatggctggggaatggaattacacttctggaaaatggaatggacatcctaatgacaaaggtattcaaactagtgaaaactacaggttttatgctatttcagctgagttcccaaaagttaacaccaagggcaagactctagtcttccaattttttgtgaagcacaaccaaaac

SEQ ID NO: 207615 - DNA, 324 bp, Gossypium hirsutum
gcggaagaactaaattccccagaatttgcttcagtaatggctgcctcacttatggcttcttcaggtgccctcaggccttcattcaatgttgagaaatctgctgtaagaggggttccttcccttgctaggtccccttcttctttcaaggttgaagccagtggtggcaagaagatcaagaccgacaagccttatggaatcaatggtggtatgaacttgagggatggtcttgatgcctctggaaggaagggtaagggaaagggtgtttaccaatatgttgacaaatatggtgctaacgtcgatgggtacagtcctatctacaacacc

SEQ ID NO: 207616 - DNA, 265 bp, Gossypium hirsutum
  unsure (1)..(265): unsure at all n locations
acgtttaactatagcatacactactagtacccactactagcaatggcttcctcaaggatctcatgggctaccattgccgctgcctctccngcacaagctaacatggtcgctcctttcaccggcctctgcttttccaatcaccaagaacgccaacaacgacattacttctctcgcaagcaatgacggcagaatgcaatgcatgcacgtgtggcctgctactggaaacaataaattggagactctctcatacctccccgatctacac

SEQ ID NO: 207617 - DNA, 259 bp, Gossypium hirsutum
ccaacaaccccaaattactcaaactcaaatgttcgattaaattgttaaggaagtctctgcgtatctttcgaaacttgggtgcgaccctcaaaacatcccatttaccccaatctctggttttgagggttacaacattatcgacagatctacaaacctcgattggtacaatggtcctactctccttgaggctctttaccacatcaccgatcccaaaatgccctctgataaaccactccttcttccacttcaagatttctac

SEQ ID NO: 207618 - DNA, 288 bp, Gossypium hirsutum
ttctgacaagatctacaatcacttgcctctaatactacttcactttaggtcattcacttgttcgctggcgtaggctactgtatgttgagcatcgctgtatgcctaccttatcggactgctattgattcaaacctactcgtagatttgatatactgctcctcaatgtcatgtacttgctcatgcaactagcactgtcttccatgcacttattgctattcttaaacccacactattaaatctactgagcctttcttcaacacatctgatatccaacatatactttgacaa

SEQ ID NO: 207619 - DNA, 282 bp, Gossypium hirsutum
ggatgcaacaaccccaaagtactcaaaggcaaggtttgatgaaattgtcaaggaagtctcttgttatcttaagaaagttggttcgaccctgagaagatcccatttgtcccaatctctggttttgagggtgacaacatgatcgagagatctacaaacctcgattggtacaagggtcctactctccttgaggctcttgaccagatcaccgagcccaagaggccctcggataagccactccgtcttccacttcaggatgtctacaagattggtggtattggaact

SEQ ID NO: 207620 - DNA, 298 bp, Gossypium hirsutum
cccacgcgtccgagctaattgagctccatttccctagtaaacaagagttctttttttcacagcaatggcagccatgaactccagtggtttggcatgcaactatgctatctcaggcactggatcatctgagcttaatgccaaacttgcttcagcgccatcagttgcttccccagttatgtgcggtggtcgcaagttgcctgtgatcagagcccaacaggctaaaatttctgattccaaaggatcaggtgccaatgaaggaagaagagctgctgggctctacttggcaactggccttttt

SEQ ID NO: 207621 - DNA, 323 bp, Gossypium hirsutum
gaaagaagcatcttggggacttgctcgctatgccggcatttctcaagacagtggactggtcccgagtgtggagccggaaatcttgcttgatggtgaccatggaattgataggactttcgaagtagcgcagaaggcttgggctgaggttttcttctaccatgctgggcttatcattattatgtcatatataaagcgtctatgttatctttacccgtaatgtgtataactttataagatggaataatcttgctcttataaaccatgcttgtaactaatatgaataaaaccattcgattcttattgatggttggtcattgtcttgt

SEQ ID NO: 207622 - DNA, 378 bp, Gossypium hirsutum
gggcaactgtggaatgcggagcctctttttactgtaaatcgcttcacacatctgattttctggaccgccggataatccttctcgactttccgacatacttcgttgggcttttgtggcgagagacggactttcaaagttttctttccctgtttttgtttttccatggcttcagaggatgtgaagactagcgaatcggctgtgtccacgatcgtgaatctggccgaggaagcaaagctcgcgagagagggtgttaaggcccctagctatgctattcttagcatctgcaagtctctcgctgctggcggcgtcgccggtggagtgtcacgaactgctgttgctcctttggaacgtttaaaaatcttacttcaggttcaaaat

SEQ ID NO: 207623 - DNA, 349 bp, Gossypium hirsutum
tgccggaaccgccgcggacaatccaggccgacccacgcgtacgacattttagcctttgaattggaaccctcaaaattgcactaaaaaatggcctccggagcttccctctacaccgccggggccaccacctctttcctccgcgggcatccggcgccgaaaaccctaaactcccttcctttcaaccaatctcttttcgggctaaaaccccaacgaaatggccgtctcaccatggcagcatacaaggtgacactgttaacacccgaaggaccccaagaattcgtgtgccccgacgacgtatacatcgttgaccaagctgaggaagaaggcattgatcttccgttctcgtgta

SEQ ID NO: 207624 - DNA, 390 bp, Gossypium hirsutum
tccacgcgtccgggcaacttctagtgttgaggaggttgcttcgacaggacccggcattcggtttttgcaactctatgtatacaaggacaggaatgtagttgcacagctcgttagaagagccgaaagggctggtttcaaggcaattgcccttacggttgatactccgagactcggtcgcagagaagctgatatcaagaacaggttcactttaccaccatttttgacattgaagaactttgaaggtttggaccttggcaagatggataaagctgatgactcgggtcttgcttcgtatgttgctggacaaatcgatcgttccctttactggaaagatgtgaaatggcttcaaacaattaccaaattgccaattcttgtgaaaggtgtactcac

SEQ ID NO: 207625 - DNA, 414 bp, Gossypium hirsutum
tcaaaaatgagctccattgctttcaagcccttccacggcctccgccatagctccgacgtccacaggggcacttccactaccaccacgctttccaaacctgctgtcaaattccatgtgtcagccgccaaaacttctccaaaactaagcaaccgcaacctcagggtagccatcatagggggtggtccggcaggaggctcagccggcgaaactctcgcgaaggctggcatagaaacgttcctaatcgaacgaaaactggacaactgcaaaccttgcggcggagccatcccgccttgcatggtgcgtgaatttgacttgcctttggatatcatcgaccggcgagtcaccaagatgaagatgatttcgcccttcaacattgtcgtcgacatctggcaaacgttgaaaccacatgaatac

SEQ ID NO: 207626 - DNA, 429 bp, Gossypium hirsutum
gactttttggtttttgaaggagaaatggcaagtggggatcttgaaagaggaggaggaagtagtgtgaagaacagggggaatagctataaccaatcatcttcttcttcgtactatgtggaaaataatgaaaaacaatggacttcatggcttgttccgatgtttgtagtggctaatattgctgtttttgttgtggtgatgtatgttaataactgtcctaagaacaatcagggatttgaaggtggttgtgtggctaggttccttggcaggctttcttttgaacctttgaaagaaaatcctctctttggtccttcttctaatccattggaaaaatggggagccttaaactgggaaaaggtagtgcttggcaatcaaccgtggaggctaataactggaattggcttgaacgctggggtaattaatttacttgca

SEQ ID NO: 207627 - DNA, 282 bp, Gossypium hirsutum
gcggggaaaactattagctgctctgttttactaactttaatatcttgcttttccttgcagttttgtgctgctttagacaccataacgccatcaaaacccatcaaagaccctgaatctataatctcccatagtggagttttccgattgggattcttcacctttgctaattccagcaatcgttatgtagggatattgtaccatcaaatccccctacaaacagtcgtatgggtagcgaacagaaacaagcctctgaaggactcttctgggattctcaacatatca

SEQ ID NO: 207628 - DNA, 431 bp, Gossypium hirsutum
cttattaaaagccaacctctcattgtttttccatttgagttactctcattgcgactctggatgatattcagcaagccttgcacaatggccaccatcacctctgccgctgtcgctatcccatctttcaccggccttaaagccggtgcaaccgcagctaaagttagcgccacagccaaggttgcagcctctccagtcccaaggggcagcatcaaggcctccctcaaagacgttggtgttgctgttggggcaactgctgcaagcgtaatccttgccagcaatgccatggccattgaagtcttgctcggcagtgccgatgggggtctggctttcattcccaaagaattcagcgtaagcccaggggagaaaatggtgttcaagaacaatgccggattcccacacaatgttgtgttcgatgaggacaaaatcccaag

SEQ ID NO: 207629 - DNA, 287 bp, Gossypium hirsutum
attcacagcctatacgaaccccaagagctcctcatctctttgtttttaccttggatttgaaggcaagttcgtcgtgggtttctactctttagccatcaaagatgaccaccatggaaagcttaatcggtttagttaacaggatccaacgagcatgtacggtgctcggtgattacggtggcggcgacaacactttctcttccctttgggaagctcttacttccgttgccgtcgtcggtggtcagagttcaaggaagtcttctgtgcttgaaagcatagtcggacgtgat

SEQ ID NO: 207630 - DNA, 264 bp, Gossypium hirsutum
attacacttacggacaaaaaatatgggcaccgtcacgacgcaagcctctgccgctgttttccggccatgtgcatcgaaaacacggttccttactggttcttccggtaagttaaaccgagacgtttcatttaaaccagtggcttctacatcgactagctcattcaaagttgaagcaaagaaaggggagtggttacctggtctttcttcaccagcttacctcaatggcagtctttccagggataatggctttgatcctcttggatt

SEQ ID NO: 207631 - DNA, 395 bp, Gossypium hirsutum
gaagtactgaatctctgaaacacaaatctcgctttcggaaaagcctcaaatggcagaccaaccgcagatttatgaactcaacaatggaaccgtggttgttaagattaccaactatggctgcactatcacctcattgtctgttcctgacaaaaacggtaaattagccgatgtcgtcctgggattcgacactgtcgaaccgtacgtgaaaggtgcttcaccttattttggatgcattgtgggaagggttgcaaacaggataaaaaatggcaagtttactcttaatggaacggggtactttttgccaatcaacaagcctccaaacagtctccacgggggattcaagggttttgacaaaaaaatatgggaggtggcagattttaagaaaggcgacaaac

SEQ ID NO: 207632 - DNA, 303 bp, Gossypium hirsutum
cccacgcgtacgttctttgttttccaatagttcgtaacaatggcggtctcacttgaagctgcggctaccctgatgcaaccaatcaaggttgctgcaccatcaaggaccaatgtgccgctcaggtcctcccagagcgtttctaaggccttcggtttggagcctgttggtgctaggcttacctgctctttgcaaactgacctcaaggacttggctctgaagtgtgttgatgctaccaagctcgctggtttcgctcttgctacatctgctcttgttgtctcgggagcaagcgctgaaaggagttca

SEQ ID NO: 207633 - DNA, 341 bp, Gossypium hirsutum
tttagctatagcatacactactagtacccactactagcaatggcttcctcaatgatctcatcggctaccattgccactgcctctgcggcacaggctaacatggtcgctcctttcaccggcctcaagtctgcctctgctttcccagtcaccaggaaggccaacaacgacattacttctctcgcaagcaatggcggcagagtgcaatgcatgcaggtgtggcctcctactggaaagaagaagttcgagactctctcatacctccccgatcttacacccgtgcacgtggctaaggaagtggattaccttcttcgctcaaaatgggttccttgctttggaattcg

SEQ ID NO: 207634 - DNA, 236 bp, Gossypium hirsutum
atcagtgagactctttcgtatacctgtagcatatagtaatagtgagcagtcatagcaatggccttctccatgatctcatcggcaaccattgccaccgtgaaccgctcctccccggcacaggccaacatggtggccccctttaccgggctcaaatctgcctctgctttcccagtcaccacgaacgccaacaacgacatcacttctcttgcaagccacggcgggagagtgcaatgcat

SEQ ID NO: 207635 - DNA, 373 bp, Gossypium hirsutum
gctttacaccattgaaatcaatggcgacagtacagcagcaacaacaagaacaagaacaacagatcaaatcaacggagaagagaaaaccagtgtttgtgaaagtggaccatttaaagccaggtaccaaaggccataccttaatcgctaaggtcttatcttcaaacatggtccttcaaaaaggtcgagctgcttctcaacatctccgtcaaacccgaatcgcagaatgccttatcggtgatgaaaccggcactgtcctcttcactgctcgtaatgatcaagttgagttgatgaagccaggtaataccgtaattcttcgtaatgcaaagatagatatgtttaaaggttcaatgaggctagctgttgacaaatgggg

SEQ ID NO: 207636 - DNA, 416 bp, Gossypium hirsutum
caaactcccatcacccgagatcatctttccccttcagaatggcggctgcaaccatggctctctcttccccatctttcgccggaaaggccgtcaagctctctccttccgcccctaaaatccaaggcaatggccgtgtttccatgaggaaaaccgctaccaaggctgctccctctggaagtccatggtacggtcctgaccgagtcttgtacttgggtccactatctggtgagcctccatcttacttgaccggagaattccctggtgactacgggtgggacactgctggactctcggcggacccagagacatttgccaggaaccgtgagctcgaagtcattcactgtaggtgggctatgttgggtgctcttggggggggttttccctaaccttttgcctaggaatggagccaaattcgg

SEQ ID NO: 207637 - DNA, 283 bp, Gossypium hirsutum
ggagggaaaaaaagacgccgctccttctcattcccactacaaagaagaagacgggggcgacgacgagtaccccgacctggacgacgaggacttcgggaactatcacgatttcgatgactccgattcggatccgtacaaggaacccgaagtcgacgacaaggacgtcgtcgttttgaaggaagggaacttcagtgatttcattgagaaaaacaagttcgtgatggttgagttctacgcgccgtggtgtggccattgccaggcgttggctacggagtacgctgcg

SEQ ID NO: 207638 - DNA, 272 bp, Gossypium hirsutum
gaccgcccgacggcccacgccacccactcttaccattgatataaatacctactgtactgctgtccttacgatgacataaacaacgcgtccatctcacttttctggcgcgaaaccagacaactccactcccataatgagtggtctctcatggactttctacaaaacttcatgttccaaagtagaatccattattagaaaacaactgcagaaggttttcaagaaagacataagccaagctgttggcttgctccgtcttcattttcatgactgct

SEQ ID NO: 207639 - DNA, 256 bp, Gossypium hirsutum
  unsure (1)..(256): unsure at all n locations
ctcggcaactttcttttgtggagatgttagtgaggaagctaggaaccttgtgaaggtaacgaaagaaagcctagataaagctatatcaatttgtgcacaaggagtggagttcaagaaaattggcaaaacaattcatgatcatgcagataatttcggttatggtgttgtccggcaatttgttggccatggggttggacgggtttttcatgctgatcctgtcgctctacacttcangaacaacgatggtggacgtatg

SEQ ID NO: 207640 - DNA, 302 bp, Gossypium hirsutum
aaaccttccatcacccaagaaaagttctcacttcacaatcacaatggccgcggcaacaatggccctctcttccccatcctttgccggaaaggctgtcaagttctctccttccactcctaaaatccagggcaatgggcgtgtttccatgaggaaaactgccaccaagcctgctgcctctggaagcccatggtacggccctgacagagttttgtacttgggtccactctccggtgagcctccatcctacttgaccggagagttccctggtgactacggttgggacactgctggactttcagctg

SEQ ID NO: 207641 - DNA, 295 bp, Gossypium hirsutum
gtttaatccttgcaaaaccaaacttaataattgtgtttttccttctatgcaatgatctccgagaagagagcagcgaatgccatgggaggcaagactgctagagcctgcgatggctgtctacgaaagcgtgctcgttggtattgttcagctgatgatgccttcctttgccaaggttgcgatacatcagtccactccgctaaccagttagccagtagacatacaagggttaggcttgaaactgcatcttccaggttcaatgcttctgttaataacaacagtgctactgatcaagatg

SEQ ID NO: 207642 - DNA, 327 bp, Gossypium hirsutum
cccacgcgtccggtggcaatgtcgacggcttctatcaacggttggtgccttacctgctcttgggccaccactaccacctgctcggtttccgctcgtcgacgacctacattgcggccttcagtcgtcgctagccttaactcttctccttctcctccgactcttatccaagaccgcccggtttttgctgcccctattcctttgctcaccccgagagaagagatgggaaacaagtcctacgacgaagccattgaagctctcaagaaacttctcagtgagaaaggagaactgaaagctgaagcactgcagggtagatcaaatacagcagag

SEQ ID NO: 207643 - DNA, 327 bp, Gossypium hirsutum
  unsure (1)..(327): unsure at all n locations
aggaaattgaagaaaaaaagggaaaattcattgtagtatgcgagtttggtgatggattcaggcgacggagcaactacttgtcaacaatgggatcgttgaccgaagatcttcgtgagagacatcaacaagaattagaaaacttgacattaacaacacagcccttcaaaacattaaggctatttcttctggctatctttcaatattataagcgattagcattatatcttttggcaaagggtagttggcttgcgctttcaagcactctaatagcagcttttggaatttttgcttgtaacaatcganggtcctcatgaaaagcatgttgat

SEQ ID NO: 207644 - DNA, 287 bp, Gossypium hirsutum
caacaatttaaataatgaaggaagaatacgaacagttcttgatgttggttgcggtgtcgcaagttttggagcatatcttctttcttctgatattatagcaatgtcattagcacccaatgatgtgcatcaaaaccaaatccaatttgccctggaaagaggaattcctgcatatcttggtgttctagggaccaaaaggctcccttacccgagcagatcatttgaacttgctcactgttctcgctgtaggattgattggcttcaaagggatgggattcttcttcttgagc

SEQ ID NO: 207645 - DNA, 300 bp, Gossypium hirsutum
cggacgcgtgggcaaggtcctcaacattggcctcctgtgtactagtccactcccaatcaaccgaccatcagtgagaagggtggttaaaatgttgcaagaagctggcgctgatagcctgccaaaaactgctgctaaaagggatgggaaattgactccttactactacgaagatggctcagatcaaggaagtgtagcttgagaaaaaaaaagaaaaagaaaaggttttccttgtagatttgtcccataaacaaagagcaatagaaggattgtgcgagtgtgttacgcctctagttttttttt

SEQ ID NO: 207646 - DNA, 136 bp, Gossypium hirsutum
tcgcggagcttcaagacatgggaggacctgctgaaggtggattcagtgttgctttcgatccgctgcgaggttccagcattgtcgatgcaaatttcaccggaagtaccatctttggtgtttggcctggtgataagtt

SEQ ID NO: 207647 - DNA, 400 bp, Gossypium hirsutum
aagaaagaggctgcaaatggaaaggaggggtctaaaccaccagcaagtgaagaggcaccatcgaaagtcaccaaacagcgggtagaagctgcaaagcaatatattgaaaaccattacaagaagcagatgaaaagcctccaggaaagaaaggagcgacgtgatattctagaaaagaagttggctgatgctgaagtctctgaagaagaacaaaacaacttactaaagtgttttgagaagaaggaaacagaatacatgcgactccagcggcataaaatgggtgctgatgattttgagccattgaccatgataggcaaggggtgcatttggtgaggttagaatctgcaaggagaaagcaactggtcatgtttatgccatgaagaaggctaagaagtcagaaatg

SEQ ID NO: 207648 - DNA, 420 bp, Gossypium hirsutum
gcagaaaccacaaaggatggaatcaaagttagggttatagccggtgaagccttgggaacaaagtcaccaatctacacaagaaccccaacaatgtatttggatttcactctggatcccggaactcacctccaacaaccgatacctaaaccgtggaacgcctttatttacatattagaaggagagggtatctttgggcagtcgaaatcatcggcgactgctcaccatttgcttcttctaggacatggggatgggttagaggcatggaacaagtccactaaattgttaaggttcatattagtaggaggtgagccattggatgaaccattggtgcaatttggaccatttgtgatgaacactcaagaagagattgatcaaacaatataggattttgagaactacatccatggatttgagaaagca

SEQ ID NO: 207649 - DNA, 349 bp, Gossypium hirsutum
gctaattgagctccatttccctagtaaacagagttctttttttcacagcaatggcagccatgaactccagtgttttggcatgcaactatgctatctcaggcactggatcatctgagcttaatgccaagcttgcttcagcaccatcagttgcttccccagttatgtgcggtggtcacaagttgcctgtgatcagagcccagcaggctaaattttctgattccaaaggatcaggtgccagtgaaagaagaagagctgctatgctctacttggcagctggccttttcaccacagctgttgcttcttctgcaaatgctggggtcattgacgagtaccttgaaaagagcaaagc

SEQ ID NO: 207650 - DNA, 326 bp, Gossypium hirsutum
  unsure (1)..(326): unsure at all n locations
attatggcttcggctactgtttctgtagccaaacccaaccttcagattcaagcaaaaggaaagggtgttggttttgcagatttgtgaggcctacacaactcctctactagccttccctttgccaggaaaacctctgatgacttccattcactcgttgcttttcagacatctgctctaggaagcaataatggcgggtacaggaaagggatggcagaggcaaagctaaaggtggctataaatgggtttggtaggattggcaggaacttcataaggtgcnntgcatgccgtaaagactacccacttgatgtcattgccatcaatgacac

SEQ ID NO: 207651 - DNA, 305 bp, Gossypium hirsutum
ctcttttctcagccctttcatggaggactacaccctttccatacctctcctagctgcccccggcggtgctcttaccaccaccggggccgctaccagctgcgcaaccaaaaaagatgatgaaaatggggttttctcatccggttccagtattatttaccgtcttcttttggtaattctcatcggaacaatctccatatgggcaaaccacgaagcatcaaaaggattcaaggtaaccataattaacgccgccgccaaagaatctccggcagggcgacggtttgatctcttttacgtatcaaacgatg

SEQ ID NO: 207652 - DNA, 262 bp, Gossypium hirsutum
tcgcccacgcgttcgcggacgcgtgggattttgcccatttcactgctctcccctagatcgtctccgagagagagatcttcttacagctaccgtacacattcacacacacattcactgaatgggtcgagtcatccgagctcaacgtaagggtgctggttccgtctttaaggcccacacccaccaccgcaagggtcctgctcgtttccgcagcctcgacttcggtgaacgaaatggctacctcaagggtgttgtcaccgatgtc

SEQ ID NO: 207653 - DNA, 372 bp, Gossypium hirsutum
gttggatctttattatgccaatgggcaaatgcacttggtgccactgtcatcggaactgtctcgaccaaagagaaggcggctcaagcaaaggaagacggatgtcaccatgttataatttataaggaagaggattttgtttcccgtgtcaatgagataacatccggcaagggggtggaagttgtatacgattctgtaaggaaagatacctttgagggctcgttggcatgtttaaagccccgtggctatatggtgtgctttgggcagtcatccggtacaccacatccggttcccgtgtcttgcacttgcacccaaatcattgttcttgactaggccttccatgatgcaatacacgtcaaactcggatgagcttct

SEQ ID NO: 207654 - DNA, 367 bp, Gossypium hirsutum
cacactctcaaattcagttaacaatttcacagttgttttcttcagtctctctctcagccatggctgcaggcatctccaccgtcgctgccgctgccgccgccaaccgagctctgggagtgtcagtcccaacctcagctttcatggggaagaaagtgagctcaagattcaacagcaccaggcaggttccttcgggaagttttaaggtgatggcggcggagaaagagatagacgaagagacacagaccgaaaaggaccgatggaaagggatggcttacgatatttcggacgaccaacaagacattactcgagggaaaaggatgggtggattccttgttccaagctcccatgaatgatggaactcactatg

SEQ ID NO: 207655 - DNA, 379 bp, Gossypium hirsutum
  unsure (1)..(379): unsure at all n locations
cctgagattattggcttgcaaagacccaatttactatggaacaagaagtatggtaagggatagagcaaggttggtttgggcagaaaacaggcaagcaaggagtgcttgcattgatagccctgatagctatgattatggagcttataaatggaccgttcagctcgttaccaacgatagtcgtctcgagaaaatactttttcctatcttttggggtcttatgactctcagcacatttgggaacttggagagcacaacagaatggctggaggttgttttcaacatcattgttcttactaggggacttcttctagtcacaatgttgattggtaacatcaaaggggtttttgcatgcaacaacgtnccagaaaacaagcaatgc

SEQ ID NO: 207656 - DNA, 306 bp, Gossypium hirsutum
  unsure (1)..(306): unsure at all n locations
cccacgcgtncggctgtttttgttgcctctacacttatggaaaatggtggtgtccctcagtctgctaccgccgaaacacttcttaaggaagcaattcatgttatcagctgtggatacgaggacaaaacagactggggaagtgagattgggtggatctatggttctgttacagaagatattcttactggattcaaaatgcatgcccgtggttggcggtcaatttactgcatgccaaaacgcccagcctttaaaggttctgctcctatcaatctttcagatcgtctgaaccaagtgcttcgatgggct

SEQ ID NO: 207657 - DNA, 296 bp, Gossypium hirsutum
gtgagactcttttgtataactgtagcatatagtactagtaagcagtaataacaatggcctcgtccattatctcatcggcgaccgttgccaccgtgaactgctcctccccggcacaggccaacatggtggcccccttcaccggcctcaagtctgcctctgctttcccagtcactaagaaggccaacaacgacatcacttctcttgcaagcaatggtgggagagtgcaatgcatgcaagtgtggccttctcttgggaagaagaagttcgagacactctcatacctccccgatcttaca

SEQ ID NO: 207658 - DNA, 316 bp, Gossypium hirsutum
  unsure (1)..(316): unsure at all n locations
cggacgcgtgggataaaatctgtgcctgcccttttctctgcacacctcgggatatcactttcgactccactcatcccacgggttgagtaccgagtccatatatcgttaagttcaaggaaggaacttgggcatcatgggtcttaaggcattagactatgagacaatgaatgaaaacgtgaagaaagttcaatatgcagttagaggtgagttgtatcttctagcttctgagcttcagaaggaagggaagaagattattttcacaaatgttggcaatcctcaagctcttggacagaagccactgactntccctcgtcag

SEQ ID NO: 207659 - DNA, 321 bp, Gossypium hirsutum
ctttagcatacactactagtacccactactagcaatggcttcctcaatgatctcgtgcggctagcattgccactgcctgtgcggcacaggctaacatggtcacccctttcaccggcctcaagtctgcctctgctttcccagtcaccaggaaggccaacaacgacattacttctctcgcaagcaatggcggcagagtgcaatgcatgcaggtgtggcctcctactggaaagaagaagttcgagactctctcatacctccccgatcttacacccgtgcagttggctaaggaagtagattaccttcttcgctcaaaatgggttc

SEQ ID NO: 207660 - DNA, 309 bp, Gossypium hirsutum
  unsure (1)..(309): unsure at all n locations
ccctattctcaatggcaatggcaacccaagcctccctcttcactccatcaaccctctncaccggaaaatgcggcgaccgggtcggcggcgtgttacngaaacaaccaccggtcctaaccgtccctagcttcaagtccccaaaaagcatcatcgccccacgcaccatcaaagcccaagcaaccgaagagaaagccgagacaaccgccacaaaggaagcaccagtcggtttcaccccaccagagctggacccaaacaccccatcaccgatcttctgcgggagcaccggcgggcttttacgcaaagcacaat

SEQ ID NO: 207661 - DNA, 219 bp, Gossypium hirsutum
ttcgctcttccactcgatattgaaatggcggaatcaaagtcattgatgaaacctggtcatcgcacgtcgaccaactgcgacgtggcactatttgtcacactcttactgacaaggatgtcaatgcaaagatggtattgcaaaagggtcgggctgatcgtcctcatgtgcaacaaatgcgacttgctgaatgcttggtatgagatgaaactggaatgatta

SEQ ID NO: 207662 - DNA, 361 bp, Gossypium hirsutum
  unsure (1)..(361): unsure at all n locations
aacaacactcctctttctctctgttctatccctctctatacacatggcaaaggtgaagatcggtatcaacggattcggtaggagcggtangttggtggctcgagttgctttaaaaagagacgatgttgaactcgtcgctgttaacgatccttttatcactactgattacatgacatatatgttcaagtacgacagtgttcacgggcaatggaagcatcatgaactcaaagtcaaggattcgaagacccttctgtttggcgagaagccagtcactgttttcggtattaggaacccagaggagattccatggggcgagaccggagctgaatacattgttgaatcaactggagtgttcactgac

SEQ ID NO: 207663 - DNA, 366 bp, Gossypium hirsutum
  unsure (1)..(366): unsure at all n locations
ctgaaaaaccccaaagccatagccacagccacagccaaaggcgatggccatttcttgtctgagactatccttggctggatggctggtgaaaactccaaggccaagacctcctttgaaagtaaaaccttttcgaatcatttgcactgctcagtcctctgtagtagatgaaaaggctcttccatctggacagcgtgaggaggatcatctccgggtttgtggagaacgagaagagcatggctgttttcaatggcggcgattttagggaggtaagttcctccgcgatgcaaagagttgctaagactgtagacgcatacctggcggagatagcaactgtagttgaactctncatctncaagttcaacggca

SEQ ID NO: 207664 - DNA, 341 bp, Gossypium hirsutum
gtggctcgcaagcaatggcggcagagtgcaatgcatgcacgcgtggcctcctactggaaagaagaagttcgagactctatcatacctccccgatcttacacccgtgcagctggctaaggaagctgattaccttcttcgctcaaaatgggttacttgcttggaattcgaattagaggagggattcgtgcaccgtaaatactcgagcctacccacgtactacgatggacgctactggaccatgtcgaagctgactatgttcgggtgcaccgactcggctcacgtattgaaggagcttgaggaatgcacgaaggaataccccaatgcattcattagaatcattg

SEQ ID NO: 207665 - DNA, 231 bp, Gossypium hirsutum
gaagaggggaaaggttccatgtgaacggcacttgcacatgggttagtcgatcctaaaagacgggggaagcccgtccgacagcgcgtccagcgcgagcttctaaagggaatcgggttaaaattcctgaaccgggacgcggcggctgacggcaacgttagggagtccggagacgtcggcgggggcctcgggaagagttatcttttctgtttaacggcctgcccaccctggaaa

SEQ ID NO: 207666 - DNA, 254 bp, Gossypium hirsutum
cacacttggtggcaagcaagtggccaggcatgcctgcaggaggaagcagtgaccccttggaggatttctgcaagacaaacccagctgatgaagaatgcaaagtttacgaggcttaaatgattgcaattttcattttttttaaaaaaaattgttttccatgctggtggtatagttagtggtcaagattttccagtgttcatgttatcaataagctcattttgtaataacaccagagtggatgaagagaatttatc

SEQ ID NO: 207667 - DNA, 292 bp, Gossypium hirsutum
cccacgcgtccgcccacgcgtccggttgcaatggcacaagcaatggcatcgatgactggtttgcgtggcgcttcacaagctgtggtggaaggtagtctccaactcagcggccaaacccggttgaacgttgctagcaccaacagggtggctgtggctagacctggttttaccgttagagctcaacaggtccctgccgagcctgaaactggacgcagagctgtgctgggtcttgttgctgctggtttggctactggctcctttgttcaagctgtgcttgctgatgcacgaagca

SEQ ID NO: 207668 - DNA, 323 bp, Gossypium hirsutum
caagacaaagcttcatattatcttttttagttccgacaaaagaaaacgaaaaaaaagaagaagagatacggtcgttttctttttggagtcgggttttagtttttggggtgaaaaaaatgttgggagtatttagcagtgcgatagtgtctccgccggacgagctggtggcggccggttgccgaactccatcacctaagataacggcggacgctctggtgaaacggttccttgagacgaactcctccggcgtgtccatgcacatcggagaccatgtccaattcgcttattctcaccataaagagtctcctttacagcccacatca

SEQ ID NO: 207669 - DNA, 272 bp, Gossypium hirsutum
aaaccttataacaaggtttaagtcaacatgaaaatgtgtcgtttatttcttcaactattcctgggtttggttctcctaccggggcgtgctgaaccagaccctgacccacttcaagattactgcattgcagacactaaatcccctttgtacctcaatggtgcaccctgtctcaacccaactctagctctttcctcccacttcaccacctcggctctagccaaacccggtgacaccaaggctaaccaattcggcttcagtgtcaccctaaccac

SEQ ID NO: 207670 - DNA, 345 bp, Gossypium hirsutum
cccacgcgtccgatgatattgtgtttggaggatgggacattagtgacatgaacctagctgatgcaatggctagggccaaggttttcgacattgatctgcaaaagcaactgagaccctacatggaatccatggtcccactccctggaatctacgatcctgatttcattgctgctaaccaaggtgaacgtgccaacaatgttatcaaggggaccaagaaagaacaagttcagcaggtcatcaaagacatcaaggagttcaaagagaaaaacaaggtggacaaggttgttgtactctggactgcaaacactgagaggtacagcaatgtcatcgtggggctaaatgaca

SEQ ID NO: 207671 - DNA, 381 bp, Gossypium hirsutum
cccacgcgtccgctcaaattcagttaacaatttcacagttgttttcttcagtctctctctcagccatgggtgcagccatctccaccgtcgctgccgctgccgccgccaaccgagctctgggagtgtcagtcccaacctcagctttcatggggaagaaagtgagctcaagattcaacagcaccaggcaggttccttcgggaagttttaaggtgatggcggcggagaaagagatagacgaagagacacagaccgaaaaggaccgatggaaagggttggcttacgatatttcggacgaccaacaggacattactcgagggaaagggatggtggattccttgttccaagctcccatgaatgatggaactcactatgctgtcatga

SEQ ID NO: 207672 - DNA, 379 bp, Gossypium hirsutum
  unsure (1)..(379): unsure at all n locations
gctttcatcatcttcaaatggctaaatcacttgtcattgttatgttatcttttctgttantagttgttttacttggggaaatccaggcatcaagcccttctcaaaaacaaagacaaggcaaccatggaaatggaatgtatggtgccacccaagggagccttcgtcctcaagagtgtggtccaagatgcacacagagatgctcagctacagcatacaaaaccatgcatgttcttctgccaaaagtgttgtgccaagtgcttgtgtgtgcctccaggcacttacggcaacaaacaatcttgcccttgctacaataattggaagaccaagagaggaggccccaaatgcccttagatccctaactatatctatggtggtctct

SEQ ID NO: 207673 - DNA, 346 bp, Gossypium hirsutum
cccacgcgtccggttagctttagcatacactactagtacccactactagcaatggcttcctcaatgatctcatcggctgccattgccactgcctctccggcacaggctaacatggtcacccctttcaccggcctcaagtctgcctctgctttcccagtcaccaggaaggccaacaacgacattacttctctcgcaagcaatggcggcagagtgcaatgcatgcaggtgtggcctcctactggaaagaagaagttcgagactctctcatacctccccgatcttacacccgtgcagttggctaaggaagtagattaccttcttcgctcaaaatgggttccttgcttgg

SEQ ID NO: 207674 - DNA, 352 bp, Gossypium hirsutum
ggctctccaagcagcttcattgctcccacccaccatctccattcacaaagaggccaaatccaatgcttgtcttaaagagacaactctgtttggtgttccattttcaacccatttcagctttcctcttcatttaactcaggaactcaggaaaaagggagtagctgccggaattgttcgagcacaaacagctgctacaacaccggcagtcgatcgggctgctccacaagggaagaagaccttgagaaagggtactgtgataataaccggtgcgtcgtccggtttaggcctagcgacagccaagggctcttgccgagacaggggaatggcatgtaatcatggcgtgtagaaattt

SEQ ID NO: 207675 - DNA, 338 bp, Gossypium hirsutum
cggacgcgtgggttaaccttgtacactactattacactgccggaaaaaaatcatggccaccggcacgacgcaagcctctgccggtgttttccggccatgtgcatcgaaaacacggttccttactggttcttccggtaagttaaaccgagacgtttcatttaaaccagtggctgctacatcgactagctcattcaaagttgaagcaaagaaaggggagtggttacctggtcttccttcaccagcttacctgaatggcagtcttccaggtgataatggctttgatcctcttggattggctgaggaccctgagaacttaaaaaggtatgtacaagctgagc

SEQ ID NO: 207676 - DNA, 342 bp, Gossypium hirsutum
  unsure (1)..(342): unsure at all n locations
cggactcatgggctgacgcgtggggtggcgcctccgtatcgttgcctattcctgggggtaccgatgttggccaccggggtagcgtgtcancttattggattccttgtcaacctanaccaccttaccttgatggctcagcaccaggtgacttttggtttgacccactaagactttgtgaggtcccttagaaccttgagaggtacaaagaatctgagttgattcactgcaaatgggctatgcttgctgttccacgtatattggtaccagaagcctttaggtttggaaactggggtaaaacttaaaaaatgggcagcaatttcagggtggcaaaccacttactta

SEQ ID NO: 207677 - DNA, 323 bp, Gossypium hirsutum
  unsure (1)..(323): unsure at all n locations
ggttcctcaatctctctaatcctcgctttcttccccatcaaacacaccttccattttcccaaggttgtanaagatggcagaaggtgaggatattcagccacttgtttgtgacaatggaactggaatggttaaggctggatttgctggggatgatgctccccgagccgtattccctagcatcgttggtcggccacgtcacaccggtgtgatggttggcatgggccagaaagatgcatatgttggtgatgaagctcaatcaaagagaggtattttgactttgaaataccctattgagcatggtatttgtgagcaactggatgata

SEQ ID NO: 207678 - DNA, 366 bp, Gossypium hirsutum
gaaggctaggcctgttaaaggccgtgatgatatcaaagctgtggcttcgatttctgctggaaatgatgaccttattggaacaatggtagctgatgctattgacaaagtcggccccgatggtgttttgtcaatcgagtcatcttcttcatttgagactaccgttgatgttgaggaaggaatggagattgacagaggttacatctcaccacaattcgtaacaaatcccgagaaattaatttgtgaattcgagaatgcgagggtgctagtaactgatcaaaagattacagctattaaggacataattcccctcttggagaagactactcagttaagagctccattgcttatatttgggaggatgtactg

SEQ ID NO: 207679 - DNA, 348 bp, Gossypium hirsutum
  unsure (1)..(348): unsure at all n locations
cggacgcgtgggcggacacgtgggcggacgcttgggcggacgcgtgggcggactcttntgcggacgcgtgggcgacattacttgtgtcgcgagcaatggcngtagaatgcaatgcatgcaggtgtggcctcctactgggaagaagaagtttgagactctctcatacctccccgatcttacacccgtgcagttggctaaggaagtagattaccttcttcgctcaaaatgggttccttgcttggaattcgaattggaggagggattcgtgcaccgtaagtactctagcttacccacgtactacgatggacgctactggaccatgtggaaggctgcccatgttcgggtgca

SEQ ID NO: 207680 - DNA, 278 bp, Gossypium hirsutum
atttagctatagcatacactactagtacccactactagcaatggcttcctcaatgatctcatcggctaccattgccgctgcctgtccggcacaagctaacatggtcgctcctttcaccggtctcaagtctgcctctgctttcccagtcaccaggaaggccaacaacgacattacttctctcgcaagcaatggcggtagagtgcaatgcatgcaggtgtggcctcctactgggaagaagaagtttgagactctctcatacctccccgatcttacacccg

SEQ ID NO: 207681 - DNA, 441 bp, Gossypium hirsutum
  unsure (1)..(441): unsure at all n locations
gccaatcccctcaataccccatttttctggttcctttttcaagccattttacaggcacttcccagttgggagaaggggaaaatggcacagcttttagcaccctcaactcaatggcaaatgacactaccaaagacctcaacctatggaagtcccattgcaacaaaaatgtggagttctctggtactgaaacagaacaagaaaggagctgctaaaagctctggcaaggttaaagtggttgccttgtctgaaaacagcacttgtcaacaagctagagaacttactaaacaatgacgtcactccatacaccgacaagatcatcgctgaatacgtttggataggaggcagtggactcgatatgcgtagcacgtccaggacaaatatcaaagccagntaaacatcctctgagcttnccaangtgaactattatggatcaagtactga

SEQ ID NO: 207682 - DNA, 369 bp, Gossypium hirsutum
cccacgcgtccggaaggttcagagattttagagagaacaaacaacaatggctgctgcatctggggctgtactaaatggattaggctcttcatttctttgtgggggaaagaggagccaagcccttttgggtgccagcattggggccaaaggctcgccctcccctactgctggaactagaaagttgatcgttgtggcagccgccgcacctaaaaagtcttggatccctgctgttagaggtggtggcaacttcattgaccctgaatggctcgatggatcgctccctggagactacggatttgacccactaggtcttggaaaagacccagcattcctcaaatggtaccgagaagctgagctgatccatggacg

SEQ ID NO: 207683 - DNA, 344 bp, Gossypium hirsutum
  unsure (1)..(344): unsure at all n locations
gctntaacaaaagagaagaaaaagcaaatggaacacaagcagttcaaagggcacgtgatacttgtgccatgcccaagccaaggccacatcgaccctcttctccaatttgctaaacgtttagcctctaaaggtgtcaaggcaacactagccaccacccactacacattcaattccatatgtgcagctcacattggggtcgaacctatatctgatggattcgatgaaggtggcttttctcaagctggaaatgtagacttttaccttaagtcattcaaggaagaagggtcccgatcgctgtcgcaaactaatccaaaatttaaaagactctagcacctctgttacct

SEQ ID NO: 207684 - DNA, 300 bp, Gossypium hirsutum
gatcagtgagactcttttgtatacctgtagcatatagtaatagtaagcagtaatagcaatgggctcctccatgatctcatcggcgaccattgccaccgtgaaccgctcctccccggcacaggccaacatggtggcccccttcaccggcctcaaatctgcctctgctttcccagtcaccaggaaggccaacaacgacatcacttctcttgcaagcaacggtgggagagtgcaatgcatgcaggtgtggccgcctcttgggaagaagaagttcgagactctctcatacctgcccgatcttac

SEQ ID NO: 207685 - DNA, 179 bp, Gossypium hirsutum
  unsure (1)..(179): unsure at all n locations
ggttcctcaatctctctaatcctcactttcttccccatcaaacacaccttcgattttcccaaggttgtagaagatggcagaaggtgaggatattcanccacttgtttgtgacaatggaactggaatggttaaagctggatttgctggggatgatgctccccgagccgtattccctagca

SEQ ID NO: 207686 - DNA, 339 bp, Gossypium hirsutum
  unsure (1)..(339): unsure at all n locations
tttccctcttcaaagaaaatgcgtgagatccttcatattcaaggtggccaatgcngcaaccagatctgagccaagttctgggaaggtgtttgtgcttaccatggcatanatgcaactgggcgttaccaaggagacttggatcttcaacttgagcgaatcaatgtctactacaatgaagccagttgtggtagattcgttcctcgtgctggtctcatggatcttgaacctggaaccatggacagcatcagatctggccccgtcggtcagatttttagaccagataacttcttttttggtcagtctggtgctggtaacaactgggctaagggccattacact

SEQ ID NO: 207687 - DNA, 389 bp, Gossypium hirsutum
  unsure (1)..(389): unsure at all n locations
cccacgcgtccgctttcccagtcaccaggaaggccaacaacgacatcacttctcttgcaagcggcnntnggagagtgcaatgcaggcgcgtgtggccccctcttgggaagaagaagttcgagactctctcatacctgcccgatcttactcccgtacagttggctaaggaagtagattaccttcttcgctctaaatggattccttgcttggaattcgaattagaggagggattcgtgcaccgtaagtactcgagcttacccacgtactacgatggacgctactggaccatgtggaaactgcccatgttcgggtgcaccgactcggctcaagtgttgaaggagcttgaggaatgcaagaaggaataccccaatgcattcattaaaatcatt

SEQ ID NO: 207688 - DNA, 346 bp, Gossypium hirsutum
  unsure (1)..(346): unsure at all n locations
tgaaggaaaaaaaagtgataatcaacttgtcggaaggaagaagatatgggaagcgagtcatgggaggaagccattgcagctttggcgaancttctcagtgacaaagctgatctcgggagtgtcgccgccgcaaaaatcaagcagataacagccgagttagaggcagctgccgattccactcagttcgacccggtcaagcggctcgagaccggtttccttcacttcaagaaagaaaaatttgacaaaaaatcctgatctgtacggtgcacttgccaaagggcaaagacctaagttcttggtatttgcatgctccgactctcgggtgtgcccctcccacatcctgaat

SEQ ID NO: 207689 - DNA, 320 bp, Gossypium hirsutum
  unsure (1)..(320): unsure at all n locations
gtgagagagaagaaaatcttaagaggccgaagatgccagctggtcacggtctacggtctcgagcaagggatttgttcggcagacgctttanaaagaagggttacattcccttgtctacttacctcaggacctacaagatcggcgactacgtcgacgtcaaggtaaacggtgccgttcacaagggtatgccccacaagttctaccatggtcgtactggtcgagtttggaatgtcacaaaacgtgccatcggtgtcgaagtcaacaagcaggtgggaaacaggattatcangaagaggattcatgtacgtgttgagcatgta

SEQ ID NO: 207690 - DNA, 334 bp, Gossypium hirsutum
  unsure (1)..(334): unsure at all n locations
cccacgcgtccgcccacgcgtccgagcagaaccagatttccgttgcggcgttgcttttagccgttttaaggaaatccatggtgggctgtcntgttgatggagaagatgaagcgatgcattccgccgttaataacatggaaatcgggtggccaaccaacgtacgacacgtaagccatgttacctttgatcgcttcaatgggttcttgggtcttccccttgaattccaagttgaggtaccgggtcgggttccatctgctagtgcgagtgtgtttggcgtctcagcggaatcaatgcaatgctcattggatccaaaaggaacagcgtcccactatac

SEQ ID NO: 207691 - DNA, 319 bp, Gossypium hirsutum
  unsure (1)..(319): unsure at all n locations
ntcgccacgcgtntcgccacgcgtntcgccacgcgtnctgccacgcgtnctgccacgcgtnctgcgacgcgtggcgccacgcgtgcgcacgatgagctctgccgctgtcgctatcccatctttcaccggccttaaagccggtgcaaccgcagctaaagttagcgccacagccaaggttgcagcctctccagtcccaagggtcagcatcaaggcctccctcaaagacgtcggtgttgctgttgcggcaactgctgcaagcgcaatcctttgccacaatgccatggccattgaagtcttgctccggcagtgacgatggggg

SEQ ID NO: 207692 - DNA, 330 bp, Gossypium hirsutum
gatttgtagcgttcaagagggcgcttatctatctcagaaatagcagtaattaatttttgaggaaaaaatggcggcaggagcaggatcagcttccatgtcggccaccgccgtcttgattccacgtgttcctgcagccgttagaacaacccactgttccgccttgccgcctgtccctcctcgcgtttccaccgcttccttttcctcgtccgttaagctaactccagaatcccggaggtttccttttctccaaacaaaagcaacagaagacacctctgtcgataccggggagctttttgatgacttgaaagaaaaatgggaataaagtgagaa

SEQ ID NO: 207693 - DNA, 362 bp, Gossypium hirsutum
gagagactgaaagaaggcttcgtttacttcaagaaagaaaaatatgaaaagaatcctgctctgtatggtgagcttgccaagggtcaaagccctaagtatatgattgttgcctgctcggactctagggtctgcccatctcatgtgctggacatgcaacctggtgaagcttttgtggtccgtaatgttgctaacatggtgccaccatatgaccagattaaatatgctggcattggatctgctattgaatatgcagttttgcatctcaaggtacaagaaattgtggtgattggacacagtgcctgtggtggaatcaaggggcttatgtctttcccatttgatggaaacaactcaactgatttcat

SEQ ID NO: 207694 - DNA, 362 bp, Gossypium hirsutum
  unsure (1)..(362): unsure at all n locations
cgatcctcaacggtgttttgtgattaaaaaaacgaccaagattgtggcaaaacaagatggctggcctgcatgaaccatggctagtggagaacgggttgaaaggatctagcaaggagattcgccatggcaggactgcacacaacatgtcgtcttcgtcattgcggaaaaaatcggacctgacgctagtttccaaggttcggtatgcaatgcttaggcagttcctcgccaatcttcaagaggtcatattagggaccaagctctccgntctcttccctgctattccattggccattgttgctgagtgttatggatttggaagaccctgggtgtttgcattaagtttacttggacttacaccattg

SEQ ID NO: 207695 - DNA, 404 bp, Gossypium hirsutum
cccacgcgtccgctacaaccccattttcagtctttcactccattcaccaaaaaccaatggctggcttatcggtcaacctgtgctggctgcagcacacctccatcaaccctcttatcctacgctgcacccctctgaacctacgcaccccatcccagaaaccattctccattaggtcccaagccgccccagtgctttcccaagatgatcttaaaaagcttgcagctgacaaagcagttgagtcagtcaaatcaggcatgatcctaggcctaggaacaggatcaacagcagcttttgtggtcgacaaaataggccaactcctttccacgggccaactttctaacatcgtaggtatcccaacttcgaaaagaacacaagaacaagctgcatcacttaacattccctta

SEQ ID NO: 207696 - DNA, 377 bp, Gossypium hirsutum
  unsure (1)..(377): unsure at all n locations
caaagttgggggagcaggtgaaagcagtanaagttgcaggctgtgattggatccatgtttatgtaatggatggccgatttgttgcaaacattacaattgggcctcttgtggttgatgctttacgacctgtgacggatcttccgctggatgtgcatttgatgattgtggaacctgagcaacgagttccagatttcatcaaggctggagcagatatagtcagtgttcactgtgaaacaatcttcaaccatccatttgcatcggacgcttaatcaaattaaaaggtctgggtgctaaagcttgagtagtcctaaatncgggcaaccccacttactacaatagaatatgtactagatgtgggtgatctagtcttgattatg

SEQ ID NO: 207697 - DNA, 334 bp, Gossypium hirsutum
  unsure (1)..(334): unsure at all n locations
tcgcccacgcgtncgcccaggcgtgcgcccacgcgtccggtgagactcttttgtataactgtagcgtatagtactagtgaggagtaagagcaatggcctcctccatgatctcatcggcaaccattgccaccgtgaactggttctccccggcacaagccaacatggtggcccccttcaccggcctcaagtctgcctctgctttcccagtcactaagaaggccaacaacgacatcacttctcttgcaagcaatggtgggagagtgcaatgcatgcaggtgtggccttctcttgggaagagaagttcgagacactctcatacctccccgatcttaca

SEQ ID NO: 207698 - DNA, 293 bp, Gossypium hirsutum
cccacgcgttcggctctgtgctgatcacggtccctgtgtctctggtgcgcacaacactatagtgactgcaagagctgggaaggaccttgtatccagtcttgtgtcaggtttgcttacaattggtcctcgctttggtggtgcaattgatgatgctgcacgatactttaaagatgcttacgataggggtcttacaccttatgaatttgttgaaggcatgaaaaagaaaggcatccgtgtacctggaattggtcacaggatcaagagaggggacaacagagataaagagtagagct

SEQ ID NO: 207699 - DNA, 225 bp, Gossypium hirsutum
actgtacactgcagacattccggattaccgacgcgtccacgcatgcgtacaatcaagcgttctagagaggcctcaagagcatggctctctcttccccattatttgccggtaaggcagagaagttctccccttacacccctgaaatccagggaactggccgtgtttccatgaggaaaaccaccaagcctgttccttctggtagcccatggtacggtcctgaccgag

SEQ ID NO: 207700 - DNA, 333 bp, Gossypium hirsutum
ctctcctctcatacttcactctaacattccctttgaggttttaggaaaacagcagagaaattgaggaatggagaccttcctatttacctcggagtctgtgaacgagggacatcccgacaagctatgtgatcagatctctgatgcagtcctagatgcctgtttggcacaggatcctgagagcaaggtggcttgcgagacctgcagcaagacaaacatggtgatggtgtttggtgagatcactaccaaagccaacgtagactacgagaagatcgtgcgtgacacctgccgtggcatcggtttcacatctgacgatgtgggtctggatgctgacaa

SEQ ID NO: 207701 - DNA, 259 bp, Gossypium hirsutum
cattgcttaggagaaaagagaaaaaaacaatgtcaggtcctcagtgctgttcgaatccaccaacattggattctgcaagtggagctggtcacgttgagaatcttgctggtctcaacacttatgtttctgggtctcttcaatctaagcttgctgtttttcttatctctgatattttcggatatgaggctccaaactttagaaaactcgcggacaaggttgcagcctctgggttctatgtggtggctcctgacttctttta

SEQ ID NO: 207702 - DNA, 247 bp, Gossypium hirsutum
cccacgcgtccgcccacgcgttcgggggaatcgaagtgggtctggctcacggcttcctcctggttggtgcattcgtaaaggccggccctctaaggaacactgcggtggcgggtcaagctgggtccttagccgctgccggtttggttgtgatcctcagcatttgcttgacgatgtatggtgttgcgtcgttcaaagaaggtgagccatcgatagcaccgagcctaaccctgactgggaggaagaaaga

SEQ ID NO: 207703 - DNA, 311 bp, Gossypium hirsutum
cttacgcgtgggctaatacccactactagcaatggcttcctcaatgatctcatcggctaccggtgccactgccggtggggcacaggctaacattgtctctcctttcaccggcctcaaatctgcctctgctttcccagtcaccaggaaagccaacaactacattacttctctctcaagcaattgcttcatagtgcaattcatgcatgtgtggccttctacttgaaataataagtttgatacttctttatacctccctcatcttacacccgttcatttggctaaagaaagtgattaccctttttttcttaaaa

SEQ ID NO: 207704 - DNA, 332 bp, Gossypium hirsutum
gctaattgagctccatttccctagtaaacagagttctttttttcacagcaatggcagccatgaactccagtgttttggcatgcaactatgctatctcaggcactggatcatctgagcttaatgccaagcttgcttcagcaccatcagttgcttccccagttatgtgcggtggtcacaagttgcctgtgatcagagcccagcaggctaaattttctgattccaaaggatcaggtgccagtgaaggaagaagagctgctatgctctacttggcagctgggcttttcaccacagcttgtgcttcttctgcaaattgctgggtcattgacgagtac

SEQ ID NO: 207705 - DNA, 437 bp, Gossypium hirsutum
cccacgcgtccgcccacgcgtccgtgttgtttggctttggtttctctgtaggagctgaggaaaaaaatgtcgggggatggaactgacaactcaacttctaagaagcctccaagtccttctcctttgagattttccaagttttttcagtccaacatgagaattcttgttactggtggagctggattcattggctcccatttagtggataaattgatggagaatgaaaagaatgaggttattgtcgtcgataactactttaccggcacaaaggacaatctcaagacatggatcggacatacgagatttgagctcattcgtcatgatgtcactgagccgttgctcattgaggttgatcagatctaccatcttgcttgcccggcttcgccaatcttttacaaatacaatcctgttaagacaataaagacgaatgcgatcgg

SEQ ID NO: 207706 - DNA, 436 bp, Gossypium hirsutum
gaactaatcatctactaaactttaaccctttttccatttgcaacagagagtgaatacatggctacctccagcatggcatcagctgcttcagggttcttgctcacacccaatgtcgcagcgaattcaagctccacttctaagaccaccaccgtgtttttcccttcaaagaacaacaacaattccaggcttgtggtgacgagggcagctgacgaggctgctgcaccagcaccagctaccaccactgcaccatcagaaggcggtgaagcccctaaacctaagccaccaccaattggaccaaaaagaggaaccagggttaagattcttagaagagagtcctactggtacaacagctttgggtcagttgttacagtcgaccaggaccctaagactcgctatccagtggtggttcgattcaacaaagttaattacgccaatg

SEQ ID NO: 207707 - DNA, 436 bp, Gossypium hirsutum
aaaagatgggagaagtaggaacttcgcatttgtgacaatggcttctggtgaagcagctgaggctgctatcgataaactcgattctcatgaagtgtcggggagaattattagggtagagttttcaaggagactgaagaaaccttcgccgccttctttggagccaatggttccttcccgtgagacacgccataagctttatgtctctaaccttgcttggaaagctaggtctactcacctcagagaatttttctctgcctttaatccggcttcagttaggcgtgttttttctaacccgtcgggacagtctgctcggtatggctttgtttcctttgccacactggaggaagctgaagctgctgcatctactctagatgggaaggaattgatggaccgaccaatacttttaaaatcactgaaaagaaagatgatgaatctg

SEQ ID NO: 207708 - DNA, 423 bp, Gossypium hirsutum
gtttttcttcaccttcagggaagggtccttctcaacctgcccctaggtttattgggaatgtgatagcttttgtgcttaacttggtaaggactcttccgtatatacaatgcctttgttatggaaagggcaactatgcaaattattcttatagtcttcattttcttaagattggaccaaagggtccggaatttgctcgatattcacttgactaccatactataaggaactatttatatgtgaatcgcacctggggaaaacaaaggtaaattctactgaccaactaatttataatacactcaggagcagagttgtttttaattatgaaaacatcaaatgtgtgcagagttgatagacatattccttcatacgcaaagaaactcgtggatgcttacaaccagaatggtgttattgatcaaatgctta

SEQ ID NO: 207709 - DNA, 443 bp, Gossypium hirsutum
cttacaactcagcgtctccactctctttctctcttcgcctccaaatggcttctgccaccacttccaccactttttccctcctcaaaaccaccgcctccaccacctcttcctccgcctcccgctcttctgcatccctcatccgccttccctccactcgccgccacctcaaatcctcttctctcatccacagcctaggcttctcctccgctgcttctggggactctctgctttccctccatgcctcctccaaagttcgatctttcaagggaaaagggtcaagaggggttgtttcaatggccaagaagagtgttggggacttgactgccgctgatttgaaagggaagaaagtgtttgtgagggctgacttgaatgttccattggatgatagccagaacatcactgatgacaccaggattcgtgctgctattcccaccatcaagcat

SEQ ID NO: 207710 - DNA, 419 bp, Gossypium hirsutum
cgattcccggattcgcgccacggccccacgcgtgacggccacacgtacgaacttgccatctgcgacactggcttatggtgaagcagctggggctgctatcgataaactcgattctcatgaagtgtcggggagaattattagggtagagtttttacggagactgaagaaaccttcgccgccttctttggagccaatggttgcttcccgtgagacacgctataagctttatgtctctaaccttgcttggaaagctaggtctactcacctcagaaaatttttctctgcctttaatccaggttcaggtagggttgttgattctaaccggtccgaacagtctgctgggtatggctctgatttctttgccacaatggatgaagctgaacctgctgtttctactctagatgggaaggaattgatgg

SEQ ID NO: 207711 - DNA, 423 bp, Gossypium hirsutum
gcgcccacgcgttcgaccacgcgttcggcaaaatccaaaaaggaaaaaaaaagaagaaaaaggtcctccaaaaatggcgacttcagctactacactcagttcactttccttcttctcttcttcccttttcctctcctatccgggctctaaactctgaacttccctttccttctctttgaaacctttttcaaatccgtctctttccatttcttcccaactttccactctacccattttgtccttcaccggcgaaaaaatcggcgaaacttatctcgacctcaaatcagcccctcccgaaaccgctagagccggcgttcaccgagcaatcatcactgacttacaaaacaagcgtcgtggcacagcttctacactcactcgtggtgaaagtccgcgtggaagaaaaaaaccttaccctcaaaagaa

SEQ ID NO: 207712 - DNA, 403 bp, Gossypium hirsutum
aaccaagagacggtttgacaactacgggaagtacgggctgctgtgtgggtctgatggggtgcctgatttgatagtaagcggtgagcagaggcactggggtgagttcatcacgcctggtctcttgttcttgtacatcgctggatggatcgggtgggttggaaggagctacctcattgctattagcgatgataagaagcctgccatgaaggagatcatcattgatgtgcctttggctaccggtcttatatttagaggctttatttggccagtcgctgcttacagagagcttatcaatggtgaccttgctgtcaaggacgtttaatctcctcagggatcgaatggaaggacttgaactccaacgaatatctagggaagaagatgggagtgcttttagactgaatat

SEQ ID NO: 207713 - DNA, 433 bp, Gossypium hirsutum
cccacgcgtccgctgaacgaagaccaagacctagaatttgaatctgaagaacgtgataggaatgatgaggaagatgaagaagattattatggtggttatgggagtgagaacggggaagagggaagtcctaaaaatttggattcggaggttgtcgccgaaaataccgaggttaaaaatgtgaagttacccaatctaacggttaaggaaaagaaagagctggcttcttacgctcatggtttatggaagaaattgaagtgtcaactggtgggcaaatctggtgttactgataatgtcattttctcttttcttgagactcttgaagccaatgagcttctgaagatcaaaattcaccggacctgtcctggacagctacaggatgtggtgagccaactagagcaagcaacccgttcagtcgtcgttggacaaattggtc

SEQ ID NO: 207714 - DNA, 438 bp, Gossypium hirsutum
  unsure (1)..(438): unsure at all n locations
cccacgcgtccggaaacccaatcttctctttcttttcttctgggagtgaagctgaaacgtcttgttggtgcggaggaggggtgagagatctgagtgatgggaggaggcaatggccagaaatcaaggatggctcgtgagaaacacgtggagaagaacaaggccgctaaaggtagtcagctggaatcaaataagaaagccatgacgatccaatgcaaggtttgcatgcagacattcatatgcaccacatcagaggtgaagtgcagagaacatgctgaatcaaagcacccaaaatctgacatctatgcttgtttccctcaccttaagaaatgaatgaaattatccattaaggaaaaaataacaataatagaagtagcaggttggacttgaggttccatntcttgtattntatgtcattacgtcccgcaatcgtattggatc

SEQ ID NO: 207715 - DNA, 439 bp, Gossypium hirsutum
gagaaatcggacggttcgatgcagaacagttcgctccaaggtttcctggtaatggtgtttccctgacactcggtcttccgcactgggaaaacctttccttatctggatcccatcagaatttgatcccaaaccaaacaatgcaaatggggagaaggctagacattgatgaaccaaatgagtttggtgccataaaccttcccacacctcactcttcggctgcgtatgagagcatcaaccttcataacagaaaaaggtttgtagcccaattattaccggacttcgtcgcctgaagaacgtgattcgaaccagacaaacatatatatctttcactattttcatttctatccattagggaacaagggaaatgcatggtatagtgtaaagaagaaatttctcctagtataggctttatactttgcatagcgcaatttgagtcctt

SEQ ID NO: 207716 - DNA, 393 bp, Gossypium hirsutum
  unsure (1)..(393): unsure at all n locations
accatgttcttgatgaatcaactcagtatagcagtgatctccggccaacagcaaagcagctctggaaatcgtcaattggtgttttagaactcggaattttgaatgccgacgggctccagccaatgaaaactagggacggaaaaggtgcatctgatacatattgtgttgctaagtatggccataaatgggttcgaactcgaaccatagtaaatagcttgaatccgaaatataatgagcagtacacctgggaagtttatgatacagccacggttctcactgtgggtgtctttgataactctcagattggaggttccgataataccagagataacaaaatcgganaggtacggattcgcatatctacactgganactggtcgtgtntacacacact

SEQ ID NO: 207717 - DNA, 442 bp, Gossypium hirsutum
ggaaagactcttttctctgagtactacaaaaaccctgaactgacaagagaatctttcggggatggatggtttcatacaggagacataggccaaatgcttcctaatggaattgttaaggttattgataggaagaaaaatcttattaagctctcccagggagagtatgtcgcactagagtacttggaaaatgtttacggagtcactccaatcatcgatgatgtatgggtctatggaaacagcttcaaatcaatgctagttgcagtggttgtgctacatgaagaaaaagctaaaaaatgggctgagttgaatggttacactgtttcactctttgagctctgttctctgagtaagcttcagaattatgtcctctcagagctcaaatccacagctgataaaaacaagatgagaggttttgagtatatcaaaggagtgattttggaag

SEQ ID NO: 207718 - DNA, 418 bp, Gossypium hirsutum
tgtccgtctcacttcaagctgcagctaccctgatgcaaccaatcaacgttgcggcaccggcaatgaccaatgtgctgctgaagtccttccagagcgtttctaacgccttcggtttggagcctgttggtgctaggctcacctgctctttgcaaactgacctcaaggacttggctcatacgtgtgttgatgctaccaagctcgctggtttcgctcttgctacatctgctcttgttgtctcgggagcaagcgctgaaggagttccaaagcggctaacctacgatgaaatccaaagcaagacatacatggaagtcaaaggaacaggaactgctaaccagtgcccaaccatcgatggtggtgtcgactcttttgccttcaagcctggcaaatactacgccaagaagttctgcttggagcccac

SEQ ID NO: 207719 - DNA, 427 bp, Gossypium hirsutum
cccacgcgtccgatctggagcacggaatatatgaaatggatcacaaagtatttgaactgtgattgatacttaatattcaaacctcgcggccggactcaaaaaaaaaaaattcaaagaaagagttatattatttataaatcgaaagattttttattctttcaaactctcatttagtttatgcttattttgatcaaaggacaaacctttcttttctttgcatttttatttattatatctattctattgattgaataagtgatgatccaatggttcttactcaaagaatctttggacttagtttgaaggttttattgaatcatcgcggttctggtatgaatctgaagtttcaattgattcatagggtcttaacaagagaattcctattcaaacgaaagaaaacaagaatgaagccacatttcatacaaag

SEQ ID NO: 207720 - DNA, 437 bp, Gossypium hirsutum
  unsure (1)..(437): unsure at all n locations
ttctcagtctctctgcagcaatttctgttcgacacaagttgaatcgttcaagggccgtgtctgcaaatacaccgggcaaaatttgtcatacttttcctggaaatggaagatgtcaaaggttaagtttcaagaccaaagctgcgggttcaattgaaggacatgtacttgacaaagaatcagctagtatcagtgacaagatagattatggagttgttggtattcaccatgttggaattctatgtgaaaaccttgaaagatcgcttgatttttatcagaatattttaggtcttgaaataaatgaggctaggccacatgataagcttccatacagaggtgcttggttgtgggtgggttctgagatgatacatttgatggaacttccaaatccagaccccttaattggaagacctgaacatggangccgagaccgtcatgct

SEQ ID NO: 207721 - DNA, 435 bp, Gossypium hirsutum
cccacgcgtccgttcccatttcctagtcttccacgatgactcccctccacttgttcctggtcctcctcgtcctgctcctttcgtcagctgctttaatctccgccgccgccgccaccaccgcatatccttccatcccgggcaccgattccacaactgattgtggcctatccggaggagacgagaatccagttcccatccgtcgcgaagtctacggtaacggcaagatattcgacatcagccataggtacaccgtcgacatgccgtcttgggaatccaaggacggcgtaggacagttcctatggttgcctaaaagcatgaagaacggttccctcgctaataattcggagatgaaactcccaactcacaccggcacccaccttgacgctcccggacacgtcatcgatcggtacttcgatgccggcttcgatgtcgata

SEQ ID NO: 207722 - DNA, 401 bp, Gossypium hirsutum
cccacgcgtccgcccacgcgtccgcccacgcgtccggtgagactcttttgtataactggagcatatagtactagtaagcgggaatagcaatggcctcctccatgatctcatcggcaaccattgccaccgtgaactgctcctccccggcacaggccaacatggtggcccccttcaccggcctcaagtctgcctctgctttcccagtcactaggaaggccaacaacgacatcacttctcttgcaagcaatggtgggagagtgcaatgcatgcaagtgtggcctcctcttgggaagaagaagttcgagacactctcataccttcccgatcttacacccgtacagttggctaaggaagtagattaccttcttcgctctaaatggattccttgcttggaattcgaa

SEQ ID NO: 207723 - DNA, 375 bp, Gossypium hirsutum
cccacgcgtccgcccacgcgtccgcccacgcgtccgcccacgcgttcgtcatttttctggggaaacaaaaaacaaaaaagagaaaaaataaagagcaagagatatggcaagcacattctcttataattcttttggattccttctcattcttgtcgcctttagttccttgataaatataagttcagctggtaggcaaattgcccctaaaactagcattgagtttatcagaacatcttgtagttcaacgacttaccctaaactttgttacgaatctctcttaacacaggctagcatgatccaaacaagcccccaactcatcgcccatgcagccctaaacgtgaccctttcaaccgccaagtcaacctcggccatgat

SEQ ID NO: 207724 - DNA, 430 bp, Gossypium hirsutum
  unsure (1)..(430): unsure at all n locations
cccacgcgtccgcccacgcgtncgcacaactcctggagctcttcagcacctcagtggtggtattgtctttgaggaaaccctttatgaaaaaaccgcttcgggcaagcccttcgttgatgttttgaaggaaggtggtgtcctccctggcatcaaggttgacaagggtacggttgagcttaatggaacccatggcgaaactttcacccagggtctagatggccttgcacagcgatgccagaagtactatgaagctggtgcccgctttgctaaatggcgtgctgtccttaagattagtgctaatgaaccaaccgagcttgcaatccaagaaaatgccaacgggctagctatgtatgctgccatctgccagcaatgtggccttgtccccattgttgagcctgaaattcttggtgacggatcacatgacattaaa

SEQ ID NO: 207725 - DNA, 428 bp, Gossypium hirsutum
  unsure (1)..(428): unsure at all n locations
gtctctttctagctaaatgccttgactgtttcccaaaactcccatctccttcgcaaatgaagctacatgcaatggaggcttctagtanaaaccattttcagccaaaatttgtccttattataatctttgtcaccttagttgttctcacaataatccctgtactttaccctttgatagggtatcctttatacgtctcaaaagcctcatcttccaggcccttgcccaccaccgcatacgagtctcaacaacccgaacccctgccttcgataaagatatccgaaggagaggactgtgacatattcttgggggaatgggtgccgaaccacgccgcgccgtactacaccaacacgacgtgctgggccatacacgagcaccagaactgcatgaaatatggaaggcctgacactgagttcatgaaatggaaatgg

SEQ ID NO: 207726 - DNA, 435 bp, Gossypium hirsutum
ctcttcctcctcctttcctccgtcgttgcttcggccgtcgtctccgacgttaatagcgacggcgatcctctcatccgtcaagttgtttccgatggtggtgtcgaggaggactccgatgaccatctccttaacgcggagcaccacttcacgctgttcaaatccaagtatgggaaaacctacgcatcccaggaggagcacgattaccgactgggagtcttcaaggctaacctgcgtcgggccaagcgtcatcagctcctggaccccagtgccgtccatggcgtcacaaagttttccgatttaactccatcggagttccgccgccagtatctatgcttgaaaccgctcaagctcccagccgatgctcaaaaggctcctatccttccgactgacaactttaccgatgactttgactggcgtgaccacggcgccgtcact

SEQ ID NO: 207727 - DNA, 434 bp, Gossypium hirsutum
aattcttatacatgtgaatacgaatccattttcctttttctccgtaatcaatgttctcgtttaccatcaacatcggctggggtctttcttgaacgaatttttttctatggaaaaataaagtatcttggcgaagtcttttataatgattttcagaacaacctatgggtggtcaaagaccctttcatacattttattaggtatcaaggaaagtcaattctggcctcaaaggatacgtctcttctgatcaataagtggaaatattactttgtcgatttatggcaatattatttttacctgtggtctcaatcaggaagagtccgtataaatcaattatctaaatattctctcgactttctgggctatctttcaagtgtgcgattaaatccttcagtggtacggagtcaaatgctagaaaattcatttctaatagataa

SEQ ID NO: 207728 - DNA, 425 bp, Gossypium hirsutum
gcgaaaccctagccactctctgctcaactcgccaatgggggcttataagtacgtgtcggggctatggaggaagaagcaggcggatttgatgaggtttttacagagggtgaggtgctgggaataccgccagcatccatcaattgttagggtcaaccatcctactcgccctgacaaggcacgccgcttgggttataaggccaaacaaggttatgtggtttaccgtgtccgtgttaggaggggtggtcgcaagaggcctgttcccaagggtatcgtgtatggtaagcccacaaaccagggtgtcacccaattgaagttccagcgcagcaaacggtctgttgctgaagagcgtgctggccgaaagttgggaggtctcagagttgttaactcgtactggatcaatgaggattctacttacaagtactttg

SEQ ID NO: 207729 - DNA, 404 bp, Gossypium hirsutum
acagtgttcacggtcaatggaagcaccacgagcttaaagtgaaggactcaaagactctgctctttggtgaaaagcctgtcactgtttttggcatcaaaaaccctgaggaaattccatggggtgaggctggtgctgaatatgttgttgagtctaccggtgtcttcactgacaaggacaaagctgctgctcacttgaagggtggtgcaaagaaagtgattatttctgctcccagtaaggacgcccccatgtttgttgttggtgtaaatgagaaggaatacaagcctgatcttgacattgtctccaatgctagctgcacaaccaactgccttgctccgttggctaaggtcatccacgacaaattcggtattgttgagggtcttatgaccactgtccattcaattact

SEQ ID NO: 207730 - DNA, 374 bp, Gossypium hirsutum
cttcgtgcccttcaacatcacgaagccggattgccttggatgcctgtttcaaccacatggagaaatcttaggaaaatctgcaatttgcatattttcgctactccgaaacttgacgccaatcaatacttgaggcgcagcaaagtagaacaactccttgctggtgttcgtgaaagttccctcataggagaagcgattgagatacgtcaagctgctttcaaaactacgcttagtctcatatcaaatactattttctccattgatttagccgactctactcatacttctgaggagttccgagaaattgtgcagggtatcatggaagagttgggaaaacccaactttggtgattatttccctattgctaatcttgactt

SEQ ID NO: 207731 - DNA, 352 bp, Gossypium hirsutum
cccacgcgtccgagatcgcgagcgccgcccttttttttttttttttttttttttttttggtttcgctttttgggcaagaaactaggtttttattcattagttctcagccggtccattggaaatccaaaacaaaacaaagagaaagacccccagccaaataccttaattaaaaaagaaaaagaaaaagggggggggggtttgaggggcttaatttaagtacaactttgaaacaaatggaattcctaggagggaagtaaacaacttaatagcctttaggcttgtaggcaatgaaactaatgcactgcacttgacgaacgttgtcgaacccaatgattttaatgaatgcattggg

SEQ ID NO: 207732 - DNA, 379 bp, Gossypium hirsutum
aggaaatattagagggcttggttactataatgcaacaatgggttcactttatgacacattgcatggaaggaagggagtttaaggggcacaaccgagagcggttcttgactggatacagagggcaagaattgctgttgatgccgcaaggagcttggaatattttgacgataaagttcaacctctgattatgcacagagataatacatatagcaatggacttctttatggagacatgaaagcgaacagttctaatggttacctataaaaaccagctcacgacatggatagctcgtcttcattctactcgagtggagggaaccttcggctatcatgcacctgagtatgcaatgaccgggcgagagacacagaagagtgatgc

SEQ ID NO: 207733 - DNA, 394 bp, Gossypium hirsutum
cccaaccatcgtttatcatggcttcctcaactctctcccctgcagctccttggcagctatgctccagcaagagtggcatgttctgcccatcacgagcgtttcttgtgaaaccagcgaggacccatatggtcaaaaacgaaaagggaatgaggatcacatgccaggccactagcatccctgctgatagagtgccagacatgggcaagaggcagctcatgaatctgcttctgttgggggctatttcactcccctcaggtttcatgttggttccttatgcagccttctttgtgccatctgggggacggcgtaccggtggtggcaccgttgccaaggacgcaatcgggaatgatgtaattgctgaagaatggctcaagactcatggccctggggaccg

SEQ ID NO: 207734 - DNA, 385 bp, Gossypium hirsutum
aggaaatatccgtgtgcttgcttactagtatgcaacactgggttcactttatgacatggggcatggaagggagggagttgaaggggcacaaccgagtccggttcttgactggatgcatagggtaagaattgcggttgatgcagcaaggggcttgcaatatttgcacgacaaggttcacaccttcgattatccacagagatatcagatctagcacatgtacttctttttaaagacttcaaagcgaacattgcaaattttaacctctcaaaccaagctcccgacatggatgctcgtcttcattctactcgagttttgggaaccttcggctatcatgcacctgagtatgcacatgaccgggcagttgacacagaacattgatgtttac

SEQ ID NO: 207735 - DNA, 440 bp, Gossypium hirsutum
  unsure (1)..(440): unsure at all n locations
atgagatctaagatgatgggttgtagagaggaacatcagagtactcatggttcggtggggggtgggaagcctaacgcattgtgttatttatccaccaaagtctagcattgttgctgaggaattggaaagaagaaacaatgactggtttgttaggaccaaagttgcaagtgatttaatggtgcaggttggagattttagcttttacttacacaagcttgctatggtttcgaaaagtggatatttgaatagacttgtatttgcaaaaagaagtgagggacatggacaaaatggaggcaacctcaagattgttttggatgaccttcctggtggaaccaacacctttgaatcaattgtcaacttctgctatggatttaacgtggatgtaacaactaccaccattgctccactctattgtgctgcanatttcttggaaatgagtg

SEQ ID NO: 207736 - DNA, 390 bp, Gossypium hirsutum
cccacgcgtccgatttctcaaaaatgagctccattgctttcaagcccttccacggcctgcgccatagctccgccgtccacagccccacttccactaccaccaccctttccaaacctgctgtcaaattccatgtgtcagccgccaaaacttctccaaaactaagcaaccgcaacctcagggtagccatcatagggggtggtccggcaggaggctcagccgccgaaactctcgcgaaggctggcatagaaacgttcctaatcgaacgaaaactggacaactgcaaaccttgcggcggagccatcccgctttgcatggtgggtgaatttgacttgcctttggatatcatcgaccggcgagtcaccaagatgaagatgatttcgccctccaaca

SEQ ID NO: 207737 - DNA, 371 bp, Gossypium hirsutum
  unsure (1)..(371): unsure at all n locations
cccacgcgtncggtaggcatcggacctttaatcccatcttctttcttgaactcaaatgggtccttggataattccttgagaaccgatctttttcaatccgattcaaaagattacatccaatggttagactccaaaccaaaatcggccgtcgtttacgtttccttcgggagcattgcggtgttaaccaagcaacaagtggaggaaatcgctcgagctttaatatccagccggcgaccgtttttatgggtggtgaggaactggaaagatggagtcgaagaagagaaagaagaagataaactgacttgcagggaagaattggaacagtttgggatggtggttccatggtgttcgcaagtggaagtattgtttca

SEQ ID NO: 207738 - DNA, 430 bp, Gossypium hirsutum
  unsure (1)..(430): unsure at all n locations
cccacgcgtncggttagctttagcatacactactagtacccactactagcaatggctggctcggggatctcatcggctaccattggcactgcctctccggcacaggctaacatggtcacccctttcaccggcctcaagtctgcctctgctttcccagtcaccaggaaggccaacaacgacattacttctctcgcaagcaatggcggcagagtgcaatgcatgcaggtgtggcctcctactggaaagaagaagttcgagactctctcatacctccccgatcttacacccgtgcagttggctaaggaagtagattaccttcttcgctcaaaatgggttccttgcttggagttcgaatnggaggagggattcgtgcaccgtaagtactcgagcttacccacgtactacgatggacgctactggaccatgtgga

SEQ ID NO: 207739 - DNA, 438 bp, Gossypium hirsutum
  unsure (1)..(438): unsure at all n locations
ctcaaattcagataacaatttcacagttgttttcttcactctctctctcagccatgggtgcaggcatctccaccgtcggcgccgctgccgccaaccgagctctgggagtgtcagtcccaacctcagctttcatggggaagaaagtgagctcgagattcaataacaccaggcaggttccttcgggaagttttaaggtgatggcggccgaaaaagagatagacgaagagacacagaccgaaaaggaccgatggaaagggttggcttacgatatttcggacgaccaacaagacattactcgagggaaagggatggtggattccttgttccaagctcccatgaatgatggaactcactatgctgncatgagttcctatgaatacatcagccaaggtcttaaaacgtacaatttggacaacaacatggatggtttctacatcg

SEQ ID NO: 207740 - DNA, 314 bp, Gossypium hirsutum
cccacgcgtacgaccatttgttgaaagaaaagaaataactttacttacaaaagggccgggggccaaacatttggcatttgaattaattataccaatgaagttaccgtttttttatgggggtaacggataataaatgggcgaccccttgaactggcccgagtccgcttaatcaaagaaaggtagccatttggatgaagtgaaacgtatggatgatgagtacaagaagccagtggttcttcttggtggagacacgttaacgatagctgaagtgacggccatttgcaacagcgacgttacctttaaagttgaactct

SEQ ID NO: 207741 - DNA, 434 bp, Gossypium hirsutum
cccacgcgtccgcccacgcgtccggtctctaccactgaaagcaaagaaaaaatggcaacggagatggcccttgtaaagcctatctccaaattcagtacaagcagtccaatttttagcaactcccgatatgggaagttcacgaccgtcagaatgtcatctacttcccaatcaacagcaaaggccgccgcgaagggtggcaagaaagctgccaaaaccgccatcaaagagacccttttgacaccaaggttttacaccaccgactttgatgaaatggaggcgcttttcaacactgagattaacaagaaccttaaccagtccgagtttgaggcactgctgcaagagttcaagactgattacaatcagactcactttgtaaggaacaaggagtttaaagaagctgctgataagattgatggtcctttgagacaaatctt

SEQ ID NO: 207742 - DNA, 419 bp, Gossypium hirsutum
cccacgcgtccgtccttttcaagaaagaaaagaaaaatctttagttccaaaagggcccagacgccaaacattaggcatttgaatcaatggaaccaatggagttacagttttgtaatggcggaaacggttcgtcactgggcgaccccttgaactgggccgcgtcagctcagtcaatgaaaggtagccatctggatgaagtgaagcgcatggttgaggagtacaagaagccggtggttcgtcttggtggtgagacgttaacgatagctcaagtcacggccattgcgaaccgcgacgttcccgttcacgttgagctctccgaggcggctcggccggtcgttaaggccagcagtgattgggttatggaaggaatgaatcgaggtacggacagttatggtgtcaccactggctttggtgcaaca

SEQ ID NO: 207743 - DNA, 384 bp, Gossypium hirsutum
cccgaagtcccacattcaggaaaactggaggattctggacttcttttcgcaccatcccgaaagcttgcacatgttcaccgtcctgtttgatgacatcggtgttccacaggattataggcacatggatggctctggtgttcatacctacacactaatcaacaaggctgggaagtcacactatgtgaaattccattggaaacccacttgtggtgtaaaatctttgttggaggatgaagccataagagtaggtggtgcgaatcacagtcatgccacacaagatctttatgactcgattgcagccggaaactaccctgaatggaaactgttcattcaaataatggatcctcttcatgaggataggtttgattttgacccacttgatgt

SEQ ID NO: 207744 - DNA, 433 bp, Gossypium hirsutum
gtgatatttttgaacaagcaaataaaagctctcactacctaaccttcaaaacgccctcgcacctcctttgtgggggagaaaactaaagatcaaaagataggcaactaggaaacaaaaaagataagtgaaagatgtcaactgcttcttcattgtgttcatcaactcagattaatggctttggagggggacttggggttctaagaacccatgtttctcaacccaagacactttcttttacaagaaggagaatttctacggtagtgaaggcaacatctcgagttgataaattctcaaaaagcgatatcattggttctccatctattctctctgctaatttcgcaaagttgggggagcaggtgaaagcagtagaagttgctggctgtgattggatccatgttgatgtaatggatggccgatttcgtccaaacattac

SEQ ID NO: 207745 - DNA, 392 bp, Gossypium hirsutum
ctattctcaatggcaatggcaacccaagcctccctcttcactccatcaaccctccgcgcgcccaaaatccggcgaccgcgtcgccgccgtgttacggaaacaaccaccattcctaacactccctagcttcaagtccccaaaaatcatcatcgccccacgcaccatcaaagccgaagcaaccgaagagaaagccgagacaaccgccacaaaggaagcaccagtcggtttcaccccaccagagctggacccaaacaccccatcaccgatcttcggcggcagcaccggcgggcttttacgcaaagcacaagtggaagagttttacgtcatcacatgggagtcacccaaggaacaaatcttcgagatgccaacaggtggtgcagccatcatgagac

SEQ ID NO: 207746 - DNA, 438 bp, Gossypium hirsutum
  unsure (1)..(438): unsure at all n locations
cagcattggggccaaaggctcgccctcccctactgctggaactagaaagttgatcgttggggcagccgccgcacctaaaaagtcttggatccctgctgttagaggtggtggcaacttcattgaccctgaatggctcgatggatcgctccctggagactacggatttgacccactaggtcttggaaaagacccagcattcctcaaatggtaccgagaagctgagctgatccatggacgttgggccatggctgctgtcgtcggcatcttcgtcggccaagcttggagtggcattccatggttcgaggcaggagctgacccangtgcgatagctccattctctttcggctcactccttggtactcagctcatccttatgggttgggttgaaagcaagcggtgggttgatttcttcaacccccaatcacaatcaggggaatg

SEQ ID NO: 207747 - DNA, 345 bp, Gossypium hirsutum
aaatcaactgcttcacaatggcctcttttaccattgctctttcttccccatcattcaccggtacggcaataaaattatccgcttcgaccccttaaatccatggaactggccgtgttttcatgaggaaaaccaccaagcctgttccttctcgtagcccattgtacggtcctgaccgacttttgtacttgggtccactttcccgtgagccaccatcttacttgaccggtgagttcccttgtgactattgttgggacactgctggactctcagctgatcccgagacctttgctaggaaccgtgagctcgaagtcattcactgcaaattggccatgttgggagctcttg

SEQ ID NO: 207748 - DNA, 384 bp, Gossypium hirsutum
cccacgcgtccggccgccgttgtcgtccctgcagcagaacagcaaaagaagcaaagcagtggcaaggatcaaggttcatgagttgcgacagaaatcaaaaaccgatcttttggctcagttgaaagatctcaaagctgaacttgctcttcttcgcgttgctaaagttaccggtggtgcacctaacaagctttctaagataaaggtggtgaggctgtccattgctcaagttctgactgtaatctcacagaagcagaagtctgcattgagggaggcatacaagaagaagaaattcttgcctctcgatctccgtcccaagaagacccgagctatccgcagaaggcttaccaagcaccaggcatctttgaagaccgaaagggagaagaa

SEQ ID NO: 207749 - DNA, 389 bp, Gossypium hirsutum
ggaaggccaggattgaagagataagattatagtgaaaaactaaacataataaagcccggtcgacgtgcttcattgatttgccctgtcaaagcccaagaaaaatggcttctgcttccgctactctcctcaagtcttcacctattatcgacaagtccgagtggattaagggccaaaacctccgccacccttcggtttgttttgtacggtcacaccctacatcggccgcctttgccgtccgtgctagttcatatgccgatgagcttgttaagaccgcgaaaactgttgcatctccaggtcgtggtattttggccatggatgaatcaaatgctacatgtgggaaacggcttgcctcgattggtctcgagaataccgaggcaaaccggcaagct

SEQ ID NO: 207750 - DNA, 428 bp, Gossypium hirsutum
cccacgcgtccgccgattgtagacatcatctcgccaagcatccaagccacaccagtatgctccccaggctcacgagaaccattagcccttaaaaacaaggctcctagatggcatgaacagttacagtgctggtgccttaacttcaaggggcgtgtgacggtggcctctgttaagaatttccagctggtcgcagctgttgagccatcacataatgtatcacctgaagagcaagagaaggtagtcttacagtttggtaaaatcggcaaagacatcttcacaatggattatcgataccctctatctgcttttcaagcctttgcaatcagcctaagctgctttgacaccaaacctgcttgtgaatgatcaccacaggttggggatctgcatcattgatgttgccatagattatcaagtacccctctttcaat

SEQ ID NO: 207751 - DNA, 424 bp, Gossypium hirsutum
  unsure (1)..(424): unsure at all n locations
gcgcccacgcgtncgcgcacttnagacaatggctactttccattttcttcaatcttccgctcgcttcgtttctaaacccacttgtctcgctctccccaatccatccctttcccttcatttcccccttaaacgcctgggttccttccccaaacgcccggaactcaaacgcttacatgaggcagcagtggccactggctcagctcaaccagcagttgacctccaaaacgtccccgtacaggatacccagaagcaagaacaatctggcaaacttgttctttcaactaacgactcatccgatgagctccttagaattagacacacgtgtgcacatgtaatggcaatggcagttcaaaaactatacccagacgcgaaagtgacgattggaccctggatagacaatgggttttactatgattttgatatg

SEQ ID NO: 207752 - DNA, 395 bp, Gossypium hirsutum
cccacgcgtccgggtcttggtgtgaattggggtaccatggcatcacataaacgtcccgcgaaaacagtggttgagatgggaaaagacaatggaataaagaaagttaacctttttgacgcagattcaactactatgaatgctcttgccggaagtgatatcgaagtcatggttgctattcctaatgatcaacttcttgccatgaacagctataaacgtgctaaaactgggttaggaggaatgtcacaagatataatttcgatggaggtgttaacattaagtatgtagctgttggcaacgagccgtttctcacaacttacaacggctcgttcattaacatcacgttccctgcgcttgaaaatattcaaaatgcacttaacgaagctggggttggggac

SEQ ID NO: 207753 - DNA, 413 bp, Gossypium hirsutum
  unsure (1)..(413): unsure at all n locations
gttttccaatagttcgtaacaatggctgtctcacttcaagctacacctaccgtgatggggccaatcaaggttggggcaccatcaangaccaatgtgcccctcatgtcctcccagaacgtttttaaagccttccccttggagcctcttggtgctaagcttacctgctctttgcaaactgacctcaaagacttggctctgaaatgtgttgatgctaccaagctcgctcgtttcgctcttgctacatctgctcttgttgtctcgggagcaagcgctgaaggactttcaaagcggctaacctacgctgaaatccaaagcaagacatacatggaagtcaaaggaacaggaactgctaaccagtgcccaaccattcatggtggtgtccactcttttgccttcaagcctggcaaatacta

SEQ ID NO: 207754 - DNA, 363 bp, Gossypium hirsutum
ggtcctcaatctctctaatcctcactttcttcctcatcaaacacaccttcgattttcccaaggttgtagaagatggcagaaggtgaggatattcagccacttgtttgtgacaatggaactggaatggttaaggctggatttgctggggatgatgctccccgagccgtattccctagcatcgttggtcggccacgtcacaccggtgtgatggttggcatgggccaaaaagatgcatatgttggtgatgaagctcaatcaaagagaggtattttgactttgaaataccctattgagcatggtattgtgagcaactgggatgatatggaaaagatttggcatcataccttttataatgagcttcgt

SEQ ID NO: 207755 - DNA, 395 bp, Gossypium hirsutum
aacgctcttttcttctgcttctggtcaagccaatatcaaaagacttcccttttagctcacagcgcctctcttgagtactataatgggtaaggagaaggttcacatcaacattgtggtcattggccatgtcgactccgggaagtctacaaccactggtcatttgatctacaagcttggtggtattgacaagcgtgtgattgagaggtttgagaaggaggctgctgagatgaacaaaaggtcatttaagtatgcatgggtgcttgacaagcttaaggccgaacgtgaacgtggtattactatcgatattgccctctggaagtttgagactaccaaatactactgcactgtcattgatgcccctggacaccgtgacttcatcaagaacatgattactg

SEQ ID NO: 207756 - DNA, 362 bp, Gossypium hirsutum
tcgcccacgcgttcgatccaacttattctcttaaagattcaagattgcatggtagcgaggatgacacccgtaggacattggagaaccattctgagtgcagaaaccaaattccagatgcaccttccaagggttatcgattaggacacaggaggggaaagtcggaaactctgcgtgcacagtacataaacaccaaggatgtgagggtgacaataagcacttggaatgttgctggaagacttccatctgatgatcttgagattgatgattggctttgtacgaaagaaccagctgatgtttacattattggcttccaagaagtagtccctttgaatgctggaaatgtatttggagctgaggatagc

SEQ ID NO: 207757 - DNA, 422 bp, Gossypium hirsutum
  unsure (1)..(422): unsure at all n locations
cccgactcgaccgtgattcagcccgagttaacacgctcaccaccgaggtactactcggtgtcaatggggttcgcgaaactganctgaancctgttgttaccgagttagaaccagaggcgctttccacccctgttatttccggtacgagccaagggagtggggagtattttacccgggtcggagtcggtaacccggctaaacaattctacatggttcttgataccgggagtgatgttaattggatccaatgtgaaccatgtacggattgttaccaacaatccgacccgatttttgacccgtcggcgtcgtcgacttacagtccggttacttgcgagtcaaggcaatgttctcttctacgacaatcggcttgtcgtggcgggaaatgtctntaccaggtgtcctacggtgatggatcttacaca

SEQ ID NO: 207758 - DNA, 390 bp, Gossypium hirsutum
atggcagccatgaaaggttataaaatggttctaaccatgccttcttacacaagcatagagagaagggtcaccatgagagcatttggagctgatttaattctcacggatcccacgaaagggatgggtggaacagtgaaaaaggcttatgacctcttggagtccacaccgaatgctttcatgttgcaacaattttcaaatcctgccaacactcaggtgcattttgaaacaacaggtcctgagatatgggaggatactcttggtaaagttgacatcttcgtaatgggaataaggagtgggggtactgtttctggtgttggacagtacctcaaatcccaaaatcctaatgttcagatatacggagtggagcctgctgaaagtaatgtattaaat

SEQ ID NO: 207759 - DNA, 386 bp, Gossypium hirsutum
  unsure (1)..(386): unsure at all n locations
gaaccggttcctcaatctctctaatcctcgctttcttccccatcaaacacaccttcgattttccgaaggttgtagaagatggcagaaggtgaggatattcagccacttgtttgtgacaatggaactggaatggttaaggctggatttgctggggatgatgctccccgagccgtattccctagcatcgttggtcggccacgtcacaccggtgtgatggttggcatgggccanaaagatgcatatgttggtgatgaagctcaatcaaagagaggtattttgactttgaaataccctattgagcatggtattgtgagcaactgggatgatatggaaaagatttggcatcataccttttataatgagcttcgtgttgccccggaagagca

SEQ ID NO: 207760 - DNA, 353 bp, Gossypium hirsutum
cccacgcgtccgatttcgattgatggtgacactgaaattgcgtttactgagaatgttgatacacgttttgaggggctagggtggcatgttatctgggtcaagaatggaaacactggctatgatgaaattcgcgctgcaatcaaggaagcaaaggctgtcaaagacaagcccactctgatcaaggtgacaaccaccattggttatgggtctcctaacaaggcaaactcatatagtgtacatgggagtgcactgggtgccaaggaagttgatgctactaggaaaaaccttggatggccatatgagcctttccatgtaccggaagatgttaaagctcactggagtcgccatacccc

SEQ ID NO: 207761 - DNA, 386 bp, Gossypium hirsutum
cggacgcgtccgcccacgcgttcgcccacgcgtccgaaagcactgaaaacgcagaaccggggcctctgcttctctcctcaagacttcaccagttttagacaagtctgagtgggttaagggtcacacccttcgccaaccttccacttctgcggtgaggtgccaccctgttgcaccctctggactaactgtgcgtgcaagctcatatgccgatgagcttgtcaagactgctaaagctattgcttctcctggccggggaattttggccatggatgagtccaacgctacctgtgggaaacgtttggcctcaatcgggctagaaaacacagaggctaaccgccaagcctacaggacgttgcttgtttcagctcctggccttggtcagtaca

SEQ ID NO: 207762 - DNA, 291 bp, Gossypium hirsutum
cccacgcgtccgatatttagctatagcatacactactaggacccactactagcaatggcttccgcaatgatctcatcggctgccagtgccactggctctccggcacaggctaacatgggcgctcctttcaccggtctcaagtctgcctctgctttcccagtcaccaagaaagccaacaacgacattacttctctcgcaagcaatggcggtagagtgcaatgcatgcaagtgtggcctcctactgggaagaagaagtttgagactctctcatacctgcccgatcttacaccc

SEQ ID NO: 207763 - DNA, 391 bp, Gossypium hirsutum
  unsure (1)..(391): unsure at all n locations
cccacgcgtccgatcaattgttttattttgaataatttgtgctaaaatgggaaagagaaagagggcgagggtttcacgcgatgaagatgaggaggatgaantagttcaagaagaagagggcaatcattcttcttcaaacgaaaagagcttatatgagattcttggagtcgaaaaagcagcatctcagcaagagattaagaaagcatattataagttggcactgagacttcatcctgataagaaccctggtgatgaggaagccaaagagaaatttcagcagttgcaaaaggtcatatcgattctcagtgacgaagagaaacgggctgtctatgaccaaacacgttgcgttgatgacactgatcttgctggggatgttgttgagaatttgaaa

SEQ ID NO: 207764 - DNA, 338 bp, Gossypium hirsutum
ggtgtcgactcttttgccttcaagcctggcaaatactacgccaagaacttctgcttggagcccacttgcttcactgtcaaggctgagggggttaacaagaatgcccctcctgagttccaaaacaccaagctcatgacccgtttaacctacacccttgacgaaatcgagggccctttcgaggtatccaccgatggcaccgtcaaattcgaggagaaagatgggattgattatgctgccgtcacagatcaactttctggtggtgagcgtgtgccttttctgttcaccatcaagcaattggttgcatcaggcaaacctgatagctttggaggagactttct

SEQ ID NO: 207765 - DNA, 313 bp, Gossypium hirsutum
  unsure (1)..(313): unsure at all n locations
gccacgcgtncgcccacgcgtgcggccacgcgtccgctctcatttcaatgatggcttcggtcggaatcctaccccatctaagaaagctgtccttaccaatctgatacaggagattgaaccactggatgttagccttattcaaaaagatgtcccccccacaactgtggatgccatgaaaaggactatctcgggaatgttgggtttacttccatctgataggtttcaagtctttatcgaggcactatgggaacctctctccaaattgttggtttcttctatgatgactggttatacattgagaaatgctgaatat

SEQ ID NO: 207766 - DNA, 229 bp, Gossypium hirsutum
tttagctatagcatacactactagtacccactactagcaatggcttcctcaatgatctcatcggctaccattgccactgccggtgcggcacaggctaacatggtcgctcctttacccggtctcaagtctgcctttgctttcccagccaccaggaaggccaccaccacctttctttttttggcaggcattggcggtagagtgcaatgcatgcaggtgtggcctcctactg

SEQ ID NO: 207767 - DNA, 359 bp, Gossypium hirsutum
cagaggctagcacactgtgcaattgggttcggcaagaatgccattggtggcagaaatgggaggggttatgttggcactgactcgagtgacaatgatgccgtgaaccccacaccgggaactttacgacatgccgtgattcaagatgaaccgctgtggatcatttttgcccgggacatgaccattcgggtgaaagaggaactaatcatgaactcgctcaagaccatcaatgggcgtggagccagtgttcacattgcaaggggtgcttgtataaccatgcactatgtgaccaacattatcattcatggactcaacattcatgactgccagcgaggagggaatgctatggtgagggacttccc

SEQ ID NO: 207768 - DNA, 153 bp, Gossypium hirsutum
cttcctttccagcacaaactaacattgtcgctcctttcaccagtctcaaatctgcctcttctttcccactcaccatgaaagccaacaacgacattacttctctcgcaagcaattgccgtaaagtgcaattcatgcaagtcctcttcttctact

SEQ ID NO: 207769 - DNA, 410 bp, Gossypium hirsutum
  unsure (1)..(410): unsure at all n locations
cccacgcgtncgnccacgcgtgcgctagtacccactactagcaatggcttcctcaatgatctgagcggctaccattggcactggggctgcggcacaggctaacatgggcgctcctttcaccggcctcaaatctgcctctgctttcccagtcaccaggaagggcaacaacgacattacttctctcgcaagcaatggcggcagagtgcaatgcatgcaggtgtggcctcctactggaaagaagaagttcgagactctctcatacctccccgatcttacacccgtgcagttggctaaggaagtggattaccttcttcgctcaaaatgggttccttgcttggaattcgaattagaggacggattcgtgcaccgtaaatactcgagcctacccacgtactacgatggacgctact

SEQ ID NO: 207770 - DNA, 371 bp, Gossypium hirsutum
gcgaacgacattacttctctcgcaagcaatggcggcagagtgcaatgcatgcaggtgtggcctcctgctggaaagaagaagttcgagactctctcatacctccccgatcttacacccgtgcagttggctaaggaagtagattaccttcttcgctcaaaatgggttccttgcttggaattcgaattagaggagggattcgtgcaccgtaaatactcgagcctacccacgtactacgatggacgctactggaccatgtggaagctgcctatgttcgggtgcaccgactcggctcacgtattgaaggagcttgaggaatgcaagaaggaataccccaatgcattcattagaatcattggcttcgacaacgtgcg

SEQ ID NO: 207771 - DNA, 256 bp, Gossypium hirsutum
ttccgtttccccgatttctccgacgtctaggtgccgctccaaattccgggcaggtcgctccgccgctacttacacttcgcaacaacagaaaggatcgacgaacggttacctaagccgtcaaggaatggcgacgtgcacgtcgttgtacgaagttctagggattcccgtccgtgcttcgaacgaggaaatcaaatcggcgtaccgccgattggctagagtttgccatccagacgtggcggcaatcgatcggaaagat

SEQ ID NO: 207772 - DNA, 408 bp, Gossypium hirsutum
  unsure (1)..(408): unsure at all n locations
ccggccgaattccggtcaccagcgcgtccggacctgggcgacctggcggacctgggcttttcttcatgggcgcaccaacgcgggatgagctgtggcatcgccgccgctttcccttcagtgctttcctcttcaaaggccaagttcgccaccgctacgccgttgcctagctttggcgccaatgttggccaccgtgttagcatgtcggctgactggatgcctggtcagcctaggcctccttatcttgatggttcancacctggtgactttggatttgatccacttagacttggtgaggtgccggagaaccttgagaggtacaaggaatctgagttgattcactgcaaatgggctatgcttgctgttcctggtatattggtgccagaggcattggggtatggaaaactgggt

SEQ ID NO: 207773 - DNA, 380 bp, Gossypium hirsutum
ggaagtgcagtgatgtatgcagctgaggcatcctaacagaccggtattgaagagataagatgggggtgtaaatttagacataataaagcccctcataacatccttcgacttgcttcattgattagccctctgaaagcccaagaaaaatggcttctgcttccgctactctcctcaagtcttcacctattatcgacaagtccgagtggattaagggccaaaacctccgccacccttcggtttgttttgtacggtcacaccctacatcggccgcctttaccgtccgtgctagttcatatgccgatgagcttggtaagaccgcgaaaactgttgcatctccaggtcgtggtattttggccatggatgaatcaaatgctacatgt

SEQ ID NO: 207774 - DNA, 344 bp, Gossypium hirsutum
ttccctttctttccttttcctgtaaaaatggagggttcctcctctgagaagctgatcattgtggcccgtgaacctgatgggatcggtactgttaccatcaatcgacccaaatctctcaactccttgacccggcccatgatggtggacttggccaaggctttcaaggctcttgcgaaagacaactcggtgcgggtcatcatcttgtctggagctggacgggctttctgttcaagcgtggatttgacggctgcacaagatgttttcaagggtgacgttaaggacccggagacggatcccggtgttcagatggagcaatgccccaaaccaatcatcggagctatcaa

SEQ ID NO: 207775 - DNA, 483 bp, Gossypium hirsutum
  unsure (1)..(483): unsure at all n locations
cccacgcgttcgcgacaattcacccatttacaggctctatggtgtggtggttcacttggatgtgatgaatgctgcattttcaggtcactatgtctgttacgttaaaaatgcccaaaacaagtggttcaagattgatgatagcaaggtaacatcctctgaacttggtaatgttctaacaaaaggcgcgtacatgcttttttacgcaaggtgctcacctagagccccaagatcgataaggagcagaagtaagtccattctatcaaaaataaattcaaagaattatgcaaagtcaagttcaactcatcctgatagttcanggagtatcgaatccttctattcgaaaatacaatcggttacaaaagattgtaggaagaggattcatcaagtgatacttcttctctgtttggcagcaattctgataatacttcttcctgtactgatagcacacaagatgactcactggattctgtatttggcgattcc

SEQ ID NO: 207776 - DNA, 391 bp, Gossypium hirsutum
  unsure (1)..(391): unsure at all n locations
aaaacgtctgtaacaagatgtgttactattttgttttatgtgtacgttttgaaatattcgatgcctctactttttaatgccgacgtctctctacttcttctgtattagcaagtatctctaactaaaagattgcgagcctttcatgtcgnaggaaaaaaaaaaaaaaaaaaaaaaaaaaaaaaaaaaaaaaaaaaaaaaaaaaaaaaaaaaaaaaagggaaaaaaattaaaaaagaaataaaaacaaaaggaaaaaggatacataaaaaaaaataatataaaaataagtggtaaaaaaattaaaaataannnggggggggggccttttaaaggaacaaattttattgggggttggagcggaagtaaatttttttttatggggcaaacaaaaa

SEQ ID NO: 207777 - DNA, 368 bp, Gossypium hirsutum
  unsure (1)..(368): unsure at all n locations
cccacgcgtccggaacgaacaagaacaagagataacaacttattaggcaaattcaaactctcgggcatgccaccagctccacgaggtgtaccgcaaatcaccgcgtgcttcgatattgacgccaacggcatcttaaacgtttcagccgaagacaaaacaaccggtcaaaagaacaaaatcaccatcacgaacgataaaggaagactttcgaaagaagagatcgaaaagatggttcaagaagctgagaaatacaaatctgaagacgaagaacacaagaagaaagtggaagcaaagaacgcattggagaattacgcttacaacatgagaaacacagtgaangatgaaaacgattggttcaaagctctcac

SEQ ID NO: 207778 - DNA, 359 bp, Gossypium hirsutum
gttggtggtgagatttttgaacaagcaaataaaagctctcactacctaaccttcaaaccccccggcggctcctttgtggattagggaactagagatcaaaagataggcaactaggaaaaaaaaaaaaagataagtgaaagatgtcaactgcttcttcattgtgttcatcaactcacattaatggctttggagggggacttggggttctaagaacccatgtttctcaacccaagacactttctttcacaagaaggagaatttctacggtagtgaaagcaacatctcgagttgataaattctcaaaaagcgatatcattggtgctccatctattctctctgctaatttcgcaaagttgggg

SEQ ID NO: 207779 - DNA, 420 bp, Gossypium hirsutum
cggacgcgtgggcggacgcgtgggtttagctataacatacactactagtacccactactagcggtggcgtcctcaatgatctcatcggctaccattgccactgcctatccggcacaggctaacatgggcgctcctttcaccagcctcaagtatgcctctgctttcccagtcaccaggaaggccaacaacgaccttacttctctcgcaagcaatggcggcagagtgcaatgcatgcaagtgtggcctcctactggaaagaagaagttcgagactctctcatacctccccgatcttacacccgcgcagttggctaacgaagtggattaccttcttcgctcaaaatgggttccttgcttggaattcgaattagacgagggattcgtgcaccgtaaatactccaacctacccacgtactacgat

SEQ ID NO: 207780 - DNA, 415 bp, Gossypium hirsutum
  unsure (1)..(415): unsure at all n locations
cccacgcgtncgnccacgcgtccgacctgagggtcgtcttcccaatgctactganggagctgggcacttgaggcaagtgtttagtcatcaaatgggtcttagcgaccaggacattgttgctctttctggtggccacaccctgggaaggtgccacaaggagaggtctggatttgagggaccatggactaccaaccctcttatctttgacaactcttacttcaaggagctcttgactggagagaaggacggcctgttacagctgccaactgacaaagttctcctttccgaccctgttttccgtccattggtcgacaaatatgcggctgatgaggatgctttctttgctgattacacttgaagctcacctgaagctctcggagctatgatttgctgatgcataagctgatgattgcat

SEQ ID NO: 207781 - DNA, 290 bp, Gossypium hirsutum
tcggaaaccttgtataccgaaagttggctctcactgtactcattggtgctgccggtatttggtatggggtttctcccgctgatgctggctatggttaacctgcaaatgtatttggaaagccaaaaccagacacagtattcatgccatacaatggggatggattcaagctgtggataccatcgaaatggaacccaagcaaagaggcggagttcccacgtcaaaagctcgcgtatgaagacaacttcgacaccaccaacaatttgagcgtcatgatcactcccaccgacaag

SEQ ID NO: 207782 - DNA, 370 bp, Gossypium hirsutum
attgagcatctctcttgatcacaatgactatcctcattgatcaacccgagcttggtgttgagggaggggttaacaagctcggtgatgcagacaatgaactagtgttggatgggggatttgtggtgccacagacaaactcttttggccacacttttagagattatcatgttgaaagtgagaggcaacagggtgtggagaacttctaccggaccaatcatattaatcagacttatgactttgtcaagagaatgagaacagagtatggtaaactgaacaagatggagatgggcatatgggaatgctgtgaacttcttaacgacgtaatcgatgagagtgaccctgacttggatgaacctcagattgaacactt

SEQ ID NO: 207783 - DNA, 220 bp, Gossypium hirsutum
gcgaaaccctagccactctctgctcaactcgccaatgggggcttataagtacgtgtcggggcgatggaggaagaagcaggcgggtgtgatgaggtttttacagagggtgaggtgctgggaataccgccagcatccatcaattgttagggtcaaccatcctactcgccctgacaaggcacgccgcttgggttataaggccaaacaaggttatgtggtttac

SEQ ID NO: 207784 - DNA, 381 bp, Gossypium hirsutum
gaagccttgtgtcccgtacgttggctctcactgtactcattggtgctgccgctgttggctctggggtttctcctgctgatgctgcctatggtgaagctgcaaatgtatttggaaagccaaaaacagacacagaattcatgccatacaatggggatggattcaagctgtcgataccatcgaaatggaacccaagcaaagaggtggagttcccaggtcaagtgctgaggtatgaggacaacttcgacaccaccagcaatttgagcgtcatgatcactcccaccgacaagaagtccatcaccgactacggttcccctgaggagttcctctcttcggtggattatcttcttggaaaacaagcttactttggtaaaaccgattctg

SEQ ID NO: 207785 - DNA, 415 bp, Gossypium hirsutum
  unsure (1)..(415): unsure at all n locations
gttttccaatagttcgtaacaatgtcggtctcacttcaagctgcagctaccctgatgcggccggtcaacgttgctgcaccatcaaggaccaatgtgctgctcangtcctcccagagcgtttctaaggccttcggtttggagcctgttggtgctaggctcacctgctctttgcaaactgacctcaaggacttggctcagacgtgtgttgatgctaccaagctcgctggtttcgctcttgctacatctgctcttgttgtctcgggagcaagcgctgaaggagttccaaagcggctaacctacgatgaaatccaaagcaagacatacatggaagtcaaaggaacaggaactgctaaccagtgcccaaccatcgatggtggtgtcgactcttttgccttcaagcctggcaaatactacg

SEQ ID NO: 207786 - DNA, 385 bp, Gossypium hirsutum
cccacgcgtccggctgctattcccaccatcaagcatttgattcagaatggagctaaaggcgattctctctagccacttggggcggccaaagggtgttactccaaaattcagcttggctcctcttgtacccaggctttctgaattacttggcattcaggttgtcaaggctgatgattgcattggtccagaagtagaaaagttagttgctgcacttcctgaaggtggtgttcttcttcttgaaaatgttagattttacaaggaagaggaaaagaatgaacctgaatttgcaaagaagcttgcttccttagctgatctctttgtcaatgatgcatttgggactgcacatcgagcacatgcttcaacagagggtgtcacaaaattcttg

SEQ ID NO: 207787 - DNA, 389 bp, Gossypium hirsutum
caataactctccccggtgaaggggaaataatggatatgatggaagttgctgatcctgatgctggttatgctgttcgaaccttcattagaaaggagcttgcctcacaactaaaatctgagtttttaagcacagttgagaacaatagaagctcagaggagtatgtatttgaccatactaatatggcccgacgtgccctcaagaatactgctcttgcatatcttggttcccttgaagattcagagatgacggagcttgcactgcatgagtacaagactgcaacaaatatgacagaccaatttgctgctttgtctgccatttcccagaaaccaggtaaaactcatgatgacgttttggccgacttctataccaaattggcaccataactacct

SEQ ID NO: 207788 - DNA, 467 bp, Gossypium hirsutum
cccacgcgtccgtataaactgtaattccacaaagccaacttctttttatacatagaaaaagggggatatgaaggcgtcatatattgcattgtgtgcagtgatggtgatcctcttggcagaagcagtagaggtgtcaacggcggtgacatgcagcccaacgcagctgagctcctgcgtgagcgccataacatcttcatctccaccatctcaactgtgctgtagcaagatcaaggagcagaagccatgcctttgccaatatcttaagaaccctaaccttaagaaatttattaacactggcaatgccaggaaggttgcttccacctgtgggactcctttccctaagtgctaagctagactctttgctgaaggctttctttctctctattttcactgcagaatggatagagagaaaggactataattattaatattatgtgagtggggggtgtggatataaatatatatat

SEQ ID NO: 207789 - DNA, 368 bp, Gossypium hirsutum
  unsure (1)..(368): unsure at all n locations
atcgctttggctcccaccacttatccctcctatctctgctctaacacttgctacccttcacagaggcactcaacctctcctttcttgaaccaggcatgtaggagttagattcaacagcaagtgttcagcgtctttctgcagtggcaaggagcagctaaagccatggattttggtagcgaaagcatcggaaggtgagtcccaaaccacagagcangaagagcagcagtacgaggagtatgacgtagagattgagcagccttatgggctcaaattcagaaaacgcagagatggtgggacttacattgatgctattcagcctggtggagctgctgacaaggctggggttttcacccgtggggacaaagtac

SEQ ID NO: 207790 - DNA, 398 bp, Gossypium hirsutum
gcgtgaagcgtgatgagttgactctggagggtgttaaacaattctttgtggcggtggaaagagaggagtggaaggtcgatacactatgtgatctttatgatacattgaccatcacccaagctgtgattttctgcaatacaaaacgaaaggttgattggctaactgagaagatgcgtagcaataacttcacaggatcatcaatgcatggagatatgcctcagaaggaaagagatgcgattatggctgagtttcgtgatggtgcaacccgtgttcttatcacaacaaatgtttgggccaaggggctcgatgttcaacacgtgtccctggtgataaattatgaccttgcaaataatcgagagctttacatccacaggattggtcgttcacgtcgctttgga

SEQ ID NO: 207791 - DNA, 363 bp, Gossypium hirsutum
ccagtttccattgaagtgtggaacccaaatgggaaatacagagttattagcaccaaacgtatgcgtggaactcgatggatcaacctcttaatcgagcaagattgccgtgtcgaaatatgtactgagaagaaaacgattttgtccgttgaggatatcatttctttgattggcaataagtgcgatggggtgattggacagttgactgaagactggggggagactttatttgcagctttaagcagagcaggaggcaaagcatttagtaacatggctgttggttacaacaatgttgatgttaatgctgccaacaagtatggtgttgctgttggtaacactcctggtgtactcacagaaacaacggca

SEQ ID NO: 207792 - DNA, 465 bp, Gossypium hirsutum
cccacgcgtccgcccacgcgtccgcccacgcgtccgcacttctgtttgttttttgaatgggaggtcatgtccaaggcttaggttgtctacgttcaggattttaagttcatcagaaattggagtgtcgagaagacaagtattggaacaagttgataaggagctgagcaagggagatgagagggctgctctctctcttgtcaaggacttgcaaggaaagcctggtggccttcgatgttttgctgctgctcgccaggttccccaaagactctacaccttggacgaattgagattgaatggaatagaaactgcatctcttctatcaccagttgattcaactctgggttcaatagaaaggaacctgcaacttgctgctatcttaagaggggttgcaacttggaatgcttttacttttaacccacaacaaatcctgtttatttccttgggattcttggttctttggacact

SEQ ID NO: 207793 - DNA, 451 bp, Gossypium hirsutum
cccacgcgtccgagacgagagcccatctctctgcttcaaagctcctgtccaggtagaatgctgttcttcccttgcgttgtgttctttcctgttcaatcgccatggcttcaaagcggattttgaaagaactcaaggatttgcagaaagatccacccacttcttgcagtgctggtccagtagctgaagacatgtttcattggcaagcaacaatcatgggaccctcagatagcccttatgctggaggtgtgtttttagttactatccatttccctccagattatcctttcaagcctcctaaggttgcatttaggaccaaggtcttccatcccaacatcaacagcaatggaagcatttgtcttgatatcctcaaagaacaatggagccctgcactaaccatttgcaaagttctgctctcaatctgctcactgctgaccgatccaaaccctgatga

SEQ ID NO: 207794 - DNA, 433 bp, Gossypium hirsutum
cccacgcgtccgcccacgcgtccgcccacgcgtccggcatacactactagtacccactgcgggcaatggcttcctcaatgatctcatcggctaccattgccactgcctctccggcacaggctaacatggtcgctcctttcaccggtctcaagtctgcctctgctttcccagtcaccaggaaggccaacaacgacattacttctctcgcaagcaatggcggtagagtgcaatgcatgcaggtgtggcctcctactgggaagaagaagtttgagactctctcatacctccccgatcttacacccgtgcagttggctaaggaagtagattaaccttcttcgctcaaaatgggttccttgcttggaactcgaattggaggagggattcgtgcaccgtaagtactcgagcttacccacgtactacgatggacgctact

SEQ ID NO: 207795 - DNA, 397 bp, Gossypium hirsutum
atttagctatagcatacactactagtacccactactagcaatggcttcctcaatgatctggtgggctaccattgccactgcctctccggcacaggctaacatggtcgctcctttcaccggcctcaagtctgcctctgctttcccagtcaccaggaaggccaacaacgacattacttctctcgcaagcaatggcggcagagtgcaatgcatgcaggtgtggcctcctactggaaagaagaagttcgagactctctcatacctccccgatcttacacccgtgcagttggctaaggaagtggattaccttcttcgctcaaaatgggttccttgcttggaattcgaattagaagaaggattcgtgcaccgtaaatactcgagcctacccacgtactacgat

SEQ ID NO: 207796 - DNA, 450 bp, Gossypium hirsutum
gtttgagttcttatccaaaggaggtgctggacatacccaaatcttcagacataaaatttcaaggtggttcaaagaagttggggaatcaaaatgatttaattgacattgactcaataaacacttccttaaagttttctgctggctgtgagctttttgaagcacttggaccagcctttttgaggaatggtttctatgctgatagccaggtagataatgcagaagctggagctaatattgaaatgcaagaggggatgagctgcagccagttgacttttgaatctggctcagaaaatctccttgaagctgtagtggcaaatgtttgccataatggcagtgatatgagaagttattcaattaataagtcctctctcgtggaagatagcaaacagcactgtctgaattcatcggagttatgcggatcaatgtcttcaaaagcctattcttcaacat

SEQ ID NO: 207797 - DNA, 322 bp, Gossypium hirsutum
cccacgcgttcggttgtttacgaccttatcatcgtccccaatatcaacaacggagtctattgggccggctatgccggaaggtgaggctgacgtcagtaaacagagattcgattggtgctcacagtggtatccggtgatgcctgtatgtgatttggataagaaggtgccacatggtaagaaagtattacgacttgatctagtggggtggtgggataagaacgagaatgaatggaacaggtgcgatgatacttgtcctcatagattaactcctctatctgaaggaagaattgatcaatgggggaggttacaatgtgtgtaccat

SEQ ID NO: 207798 - DNA, 326 bp, Gossypium hirsutum
cccacgcgtccgtacaacaccaacgactggtctcccagtggtgatgtttatgttggcggtgctgccggattggcaatctgggcggttaccctagctggaattcttgccggtggtgcacttcttgtttacaatacaagtgctttggcacagtagatgtctctaaagtgatccttgcacttggttgcattataggctgtccgatgtaattgttgtaatcaaagaaccatccaacaactactttgcatatctttatgtagaatattttgccttggactgaattgagacctttgtattataacttaataatgtgctttgttttggtcttt

SEQ ID NO: 207799 - DNA, 419 bp, Gossypium hirsutum
ggattttcaaaaaacctccattaatggctgcactaaggagcttccttaagaaaagatgtgtgacatgcaacgagctgatgatgacaaggaggctgatctgcaccgaacccataattgattcctcttcttttgctcaaagactcagagatcttcccaaggatctccctggtactaaaattaagagggaggtttcgcagctaattggaagaacaccccttgtctttcttaataaagtaaccgaaggctgcggagcgtatatcgctgtgaaacaggagatgatgcaacccacttctagcattaaagacagaccagcatttgccatgatcaatgatgcagaaaagaaaaacttaatctctcctggaaagacaactctcatagagccgacatccggtaacatggggataagtatggcattcatg

SEQ ID NO: 207800 - DNA, 393 bp, Gossypium hirsutum
atttagctatagcatacactactagtacccactactagcaatggcttcctcaatgatcgcatgggctaccattgccactggctctccggcacaagctaacatggtcgctcctttcaccggcctcaagtctgcctctgctttcccagtcaccaggaaggccaacaacgacattacttctctcgcaagcaatggcggcagagtgcaatgcatgcaggtgtggcctcctactggaaagaagaagttcgagactctctcatacctccccgatcttacacccgtgcagttggctaaggaagtggattaccttcttcgctcaaaatgggttccttgcttggaattcgaattagaagaaggattcgtgcaccgtaaatactcgagcctacccacgtacta

SEQ ID NO: 207801 - DNA, 402 bp, Gossypium hirsutum
gtcgacggcttctatcaacgggtggtgccttacctcctcttcttccaccactaccacctggtggttttccgctcgtcgacgacctacattgcggccttcagtcgtcgctagccttaactcttctccttctcctccgactcttatccaagaccgcccgggttttgctgcccctattcctttgctcaccccgagagaagagatgggaaacaagtcctacgacgaagccattgaagctctcaagaaacttctcagtgagaaaggagaactgaaagctgaagcagctgcaagggtagatcaaataacaagcagagtgaacacagcatcagctgatggcaaaccatctgactcttcttgtgagagactgaaagaaggctcgtttacttcaagaaaaaaaatatgaaa

SEQ ID NO: 207802 - DNA, 230 bp, Gossypium hirsutum
cccacgcgttcggacaattacctaactgttctttatagggaaccaacactttccacctctgtcgtgcattctcaaagatgacggcgttccatctcaaacatctcatgaccttttacaaccgcatgttgaatcacttgaagacaaccaaacaatagaccaggacttttggtagagttccctttctaatttcgagataagctttgatcgacttcttttggcttaattattaa

SEQ ID NO: 207803 - DNA, 405 bp, Gossypium hirsutum
  unsure (1)..(405): unsure at all n locations
gcgcccacgcgtccgaggtcattcacacctctgacaagatacatggccagatttatatccctgaagtggagtgggtgctcatgatcctgtgcgattgctgtgactattggctttagagacacaaaacacatggggaatgcatcangattggcagtgatgactgtgatgttggtgacgacatgtctcacatccctgggtattatcctctggtggcacaaaccccctattggggctcttttctttcttcttttctttgggtctattgagttgctttacttctcagcttcactcaccaagttcactgaaggggcttggctccctattctcttggcccttttccttatgacaatcatgtttgtttggcattatgcaaccatcaagaaatatgaattcgatctccacaat

SEQ ID NO: 207804 - DNA, 400 bp, Gossypium hirsutum
aaataagcgtgtgtctcagatttttgaagatggcccgtaccaagcagacagcccgtaagtcgggtggtgggaaggctccaaggaagcaacttgctaccaaggctgcccgtaaatctgccccaaccaccggtggtgtgaagaagcctcatcgctaccgtcctggaactgttgctcttcgtgaaattcgaaagtaccaaaagagtactgagcttcttatcacgaaattgcctttccagaggcttgttcgtgaaattgcccaggacttcaagactgatttgcgtttccagagccatgctgttctagctctccaggaagctgcagaggcataccttgtggggtctttttgaagacaccaacctttgtgcgatccacgccaagcgtgtcacaattatgcccaaag

SEQ ID NO: 207805 - DNA, 389 bp, Gossypium hirsutum
  unsure (1)..(389): unsure at all n locations
gtgggttgagaaatgatccgccaaccggaaatgttgtgatggaacctgaggacacacttgtatgaggggagcatatccaggggccaagttncanacgttgcagtggagtcattggttcatcctgaatcatgtttcaaagcgtggagattgtttctcgtactgatgctcccaaacgttcttacaaggatctttttggttccataaaactaacatgacgttgtttccttcaattttgtgagaacatactttttgccaaaccagacaatatcttgtgacttctcacaattgctattgaagtaatcacgagttaaattgtgagaaccaaagtttaaaaaaaaaaaaaaaaaatgaattaaatttgattacttgtttgtcttttttttttcttt

SEQ ID NO: 207806 - DNA, 415 bp, Gossypium hirsutum
gcagcagccgctaccgtgtcgttggcctcgtacttagccaaatttaaggatggattcacgggtgaagtttgccgtggtggtgaaaattatgggaaggacgggatcgagaggtcaagtgactcaagtgagagtcaagtttttggatgatcagaaccgttttattatgaggaacgtgaagggaccggtcagggagggagatattctcaccttgctcgagtctgagagggaagctaggaggcttcgttgatcacttcctcttatctccggtttgttactttattaatgtttatgttgcgcaagtagctagctgtttattatttctgaaacggattgcaaatttcaaatctaaacttggattttgggagactgatttacatggatgagttgtttttaagcatattcatgatgtttaatg

SEQ ID NO: 207807 - DNA, 282 bp, Gossypium hirsutum
cccacgcgtccgcccacgcgtccgcttattctcacttcacctctctttttttttaattgggtggatcatcggaaagaaattgaagaaccaatcatgaagcttgacaccagcggactagaatcggctgcgcctgtctcgggtgctcccagtgaacttgttgatgggttttcggctgctccgtcgttcgatctcccaaacactactgattttgatgggtttcaaaaagaagctatccagatggtaaaacctgctaagggtaccaccacgcttgctttcatcttt

SEQ ID NO: 207808 - DNA, 350 bp, Gossypium hirsutum
gcgcatttttgttctcttcaactttattgcataccaaaaaaacttacaacaatggcaactgcccgagggcctacactccacccatgggggctgctgccaccactaaccccaagaagaagaccaacaccaatgtgaattacataacaggcttgaattcttttggtgggttgaaagctcataacaaagtggtctcactaggccaacgtgtatgcaccgagctatcatttgcaaacattggtagctcactcaaagctccgacaaagggcaagacaggtagaagcggcggcggtgcactgtcttcaacctgcaatgctattggtgagatattcaggattgcagcaatcatgaat

SEQ ID NO: 207809 - DNA, 379 bp, Gossypium hirsutum
tttggctattcaaaggaactgtctgattggaggagatgacttcaagagtgggcagaccaagatgaaatctgtcctcgtggatttccttgttggggctgggatcaagccaacatcgatagtggtacaaccatctgggaaataatgatggcatgaatctatcggcaccccaaaccttccgttccaaggagatctcaaagagcaatgttgttgatgacatggtttcaagcaatggaatcctgtatgagcctggtgaacatcctgatcatgttgtggtcatcaagtatgtgccatatgtgggagacagcaagagagccatggatgagtatacatcagagatattcatgggaagcaagaacaccattgtgttgcacaacacatg

SEQ ID NO: 207810 - DNA, 421 bp, Gossypium hirsutum
  unsure (1)..(421): unsure at all n locations
cccacgcgtccgggagcggccacatatcagaaactgcgaaaattcatttaaaaatggcgacgggtgcatcctcttcatcctccatggtggccaccgccgttttgattcctcgttttccggcagcctccgttggaactacccgctgcagtgccttgccgcctctccctcctcgcgtttcgaccgcttccttgtccttttcctcttccgttaagctaatcccagaatccaagaggttttctctactgcagacaaaagcctcagaagagacctctgttgatgctggtgaccttttcgctgacttgaangaaaagtgggataaagttgaggacaagaccacaggtgttctttacggtggtggggcattagttgctgtttggctatcatccattcttattggtgccattaactcggtccctttgct

SEQ ID NO: 207811 - DNA, 350 bp, Gossypium hirsutum
gcgtgaagagataagattatagtgaaaaactaaacataataaagtccctcataacattcttcgactggcggtcattgattagcccaaggagacataaccaaaaagaaaaatggcttctgcttccgctactctcctcaagtcttcacctattatcgacaagtccgagtggattaagggtcaaaacctccgccacccttcggtttgttttgtacagtgcaaccctacatcgggcggctttaccgtccgtgctagttcatatgccgatgagcttgttaagaccgcgaaaactgttgcatctccaagtcgtgggattttggccatggatgaatcaaatgctacatgtgggaaac

SEQ ID NO: 207812 - DNA, 356 bp, Gossypium hirsutum
ggaacggtgtcaagttcggtgaagctgtatggttcaaggccgggtctcaaatcttcagtgagggtggacttgactacttgggtaacccaagcttgatccatgctcaaagcattttggccatctgggcttgccaagttatcttgatgggagccgtcgagggctaccgtattgccggtggaccactcggtgaagtgactgacccattgtacccaggtggcagctttgacccattgggtcttgctgatgacccagaggcattcgctgagctcaaggtgaaagagatcaagaacggtaggttggctatgttctcaatgttcgggttcttcgttcaagccatcgtgaccggaaagggacca

SEQ ID NO: 207813 - DNA, 431 bp, Gossypium hirsutum
ttttgggaaaaaaagaaaaaaaattcccagcgtgggagtgagtgtttatgttttttttttttatgaattttgtactgtggggggttttgaatgagaactgaaatacttttgggaaattgaaaatcttcaatcggcggactagatggccaccacggagttgcagatgagtcctcagttggagcacatccatggcgaaatccgcgatcttttccgtgctctttcaaatggcttccagagactggataagatgaaagattccaataggcaaagcaaacagctggaagagcttactggcaagatgaaggaatgtaaaagattaatcaaggagtttgatcgtgaaattaaagatgaggaaagcaaaaatcctgccgaagtgaacaagcaactcaatgatgagaagcagtctatgatcaaagaactgaattcgtatg

SEQ ID NO: 207814 - DNA, 368 bp, Gossypium hirsutum
cggacgcgtgggtttagctatagcatacactactagtacccactactagcaatggcttggtcaatgatctcatcggctagcgattgccactgcctctccggcacaggctaacatggtcgctcctttcaccggcctcaagtctgcctctgctttcccagtcaccaggaaggccaacaacgacattacttctctcgcaagcaatggcggcagagtgcaatgcatgcaagtgtggcctcctactggaaagaagaagttcgagactctctcatacctccccgatcttacacccgtgccagtggctaaagaaagggattaccttcttcgctcaaaatgggttccttgcttggaattcgaattaaaagaaggat

SEQ ID NO: 207815 - DNA, 277 bp, Gossypium hirsutum
atttagctatagcatacactactagtacccactactagcaatggcttcctcaatgatcggatcggctaccattgccactggctctccggcacaagctaacatggtcgctcctttcaccggtctcaagtctgcctctgctttcccagtcaccaagaaagccaacaacgacattacttctctcgcaagcaatggcggtagagtgcaatgcatgcaggtgtggcctcctactgggaagaagaagtttgagactctctcatacctccccgatcttacaccc

SEQ ID NO: 207816 - DNA, 127 bp, Gossypium hirsutum
gacagactctattgaataactgtaccatatactactagtaagcagcaatagcaattgccggctgcatgatctcataggccggcattggcacccttaactgctccttcgcggtacatgccaacatggt

SEQ ID NO: 207817 - DNA, 403 bp, Gossypium hirsutum
gttagctatagcatacactactagtacccactactagcaatggcttcctcaatgatctcatcggctaccattgccactggctctgcggcacaggctaacatggtcgctcctttcaccggcctcaagtctgcctctgctttcccagtcatcaggaaggccaacaacgacattacttctctcgcaagcaatggcggcagagtgcaatgcatgcaggtgtggcctcctactggaaagaagaagttcgagactctctcatacctccccgatcttacacccgtgcagttggctaaggaagtagattaccttcttcgctcaaaatgggttccttgcttggaattcgaattagaagagggattcgtgcaccgtaaatactcgagcctacccacgtactacgatggacgct

SEQ ID NO: 207818 - DNA, 371 bp, Gossypium hirsutum
  unsure (1)..(371): unsure at all n locations
cccacgcgtncggtaataaatggctttggtgacaactgctgaagtctgtgatgcaaatccacagctgattgtgagcggtgaactgggggcccttcaaccaatattccaaatatatggtcgtcgcccagtattctccggacctatagtcacacttaaagtgtttgaggacaatgtattgatccgtgagttccttgaggagaaaagtgatggcagagttctggttgtagatgggggtggtagtttaaggtgtgccatacttggaagcaaccctgtagttcaagctcaaaacaatgggtgggctggaatagtggttaatggctgcgtaaaggatgttgatgagataaacggttgtgacattggggtgagagcgc

SEQ ID NO: 207819 - DNA, 296 bp, Gossypium hirsutum
  unsure (1)..(296): unsure at all n locations
gagactctnttgataactgtagcatatagtactagtaagcagtaatagcaatggcctccgccatgatctcatcggcgaccatgggcaccgtgaactgctcctccccggcacaagccaacatggtgggccccttcaccggcctcaagtctgcctctgctttcccaggcactaggaaggccaacaacgacatcacttctcttgcaagcaatggtgggagagtgcaatgcatgcaggtgtggcctcctcttgggaagaagaagttcgagacactctcatacctgcccgatcttacaccc

SEQ ID NO: 207820 - DNA, 413 bp, Gossypium hirsutum
  unsure (1)..(413): unsure at all n locations
caaaagaaaaaggcgtctttggctcaacagttcacaggtctaagatgtccaccactctcctgatctcggttntctgtgaaaccgaagcaaacccanaaagtgggcgcttttgcttctcctatagtttcagccgtcgctgtctcaaatgcacagaccaaagataggcttgaactcaagaagatgttcgaggatgcttacgaacgctgtcgaactgctcctatggaaggcgtttcttttactgttgaggattttcaaaatgctcttgagaaatatgactttgattctgagcttggaaccaaggttaaaaggaacagttttctgcacagatggcaatggggcattgggtgatattactgccaaatcttgtggatatctaccggtccaagaggccagcattcacaaaattaaacatg

SEQ ID NO: 207821 - DNA, 293 bp, Gossypium hirsutum
  unsure (1)..(293): unsure at all n locations
ctctgggtcacttagtttctttgttttttgctcttggagtgaggaaatccatangaaacaagggcgtgtcgtctctttttaattgcgagatggctgggactggagtgttttcagacatattggatggagatgtttacaagtactatgctgatggtgaatggaagaagtcttcttctggaaaaactgttgcaattatcaaccccaccaccagaaaaactcagtataaggttcaagcttgtacacaagaagaggtgaacaaggttatggaatcagcaaaaactgcacaaaaatca

SEQ ID NO: 207822 - DNA, 438 bp, Gossypium hirsutum
cccacgcgtccgcttttcttcactaaacccattaatggcttcttctctcagtctttcaagccacacagtggcttcattattcccttctcacacttcaaagccccaattgtcactttctaaatccatcccaattctcaccaagtcatcacagtctcaatttcacggccttaaattctctcactcttcttctctttcaatccctcgtttttccacttttaaaacctcgatttctgctaaggtgaataaaggtgcagttcctccagcatttactttgaaagatcaagatgggaaaactgtaagcctttcaaagtttatagggaagcctgttgtggtttatttttaccctgctgatgaaacccctggttgcaccaaacaggcgtgtgcttttagagattcttatgagaagtttaagaaagctggagctgaagttattgggat

SEQ ID NO: 207823 - DNA, 434 bp, Gossypium hirsutum
gcaacttcatggttttcagtgttgcttttggtttcaattgtttttagttgtttcttggctgcatcaggtggtgatttttaccaagagtttgatctgacatggggtgacaaacgtgctgagatactcaatagtgggaggcttcttacacttagtctcgataaggcctctggttcaggtttcaggtctaaaagagagtacgtgtttggaagaatcgacatgcacatcaagcttgtctctggcaactctgccggcactgttactgctttctatctgtcttcagaagggccaaaccacgatgagatagactttgtgttcttaggtaacttaagtggagatccatacattgtgcacactaatgtctactgccaaagtcaaagggacaggggacaacaattctacctatgggtcgacccaactaagaattttcacaccta

SEQ ID NO: 207824 - DNA, 437 bp, Gossypium hirsutum
gagcttctttctatctatatccttatcagctttcaaagatggcaggaatcgcctttggtcggtgtcgatgattccttcagtttggggtctgtcaaggcctaccttgctgagtttatctcaactttggtgtttgttttcgccggcgttggctctgccattgcttacaacaagttgacaactgatgcagccctagatcccgatgggctagtcgccattgctgtttgccacggatttgctctctttgttgcagtggctatcggtgccaacatctcaggtggccatgtcaaccctgcagtaacttttgggttagctcttggtggccaaatcaccatactcactggcatcttttactggattgcccaacttcttggatccattggtgcttgcttcttgctcaaggctgtcactggtggtttgacagttcctattcacggtct

SEQ ID NO: 207825 - DNA, 447 bp, Gossypium hirsutum
gtattcatatacatacacacacatatgttatctttgtcggactttgcataagcagaagcgaaatccaaacaatgacgtgtttcatggaccaccgtgacttatccagagccactgcaactgggtatttgtttctcctattactcttctcttccttcatcaacatttggtcttcttgctctaatggaagttgccaggtagtggattcatgttcccactctacagattgtggtccaggtcttttttgtgggaactgccctgctttgggcaagactcaacctttttgtataagaggccaagccaccatacccacttctgttattggtggattacctttcaacaagtattcatggttggtgactcacaattcctttagcatagtgggtgctccagctttaccaggagttcaaagattcacattttacaatcaagaagacactgttactaatc

SEQ ID NO: 207826 - DNA, 397 bp, Gossypium hirsutum
gccacgcgtcctgaacttttgcatatggctgccacagctgatggcatagatgaccgggctagctgattacgatacccaagaggaaatgagatccgacctcagataccacctgtgaaaataggggttccactggacgttggcctaagcaggggactgatagaagggctaagagtgtctctattaggctatggaagctcatttcaaagctgcttagcatctgcctctttattgtaatcgcatggcttaacgcttaccgtagcatatgcaccgttttatcagccattacatcacgcactgatacagaaactctgtagtctacacgcagtactgatcacagccgtagaaggatcaatcgctgactttggatatcatgtggcacatgatctagcacttgatg

SEQ ID NO: 207827 - DNA, 270 bp, Gossypium hirsutum
  unsure (1)..(270): unsure at all n locations
cccacgcgtncggttgatctcaaaccgaatcttcctgctgaagcagagaggattcgaaaatgggaagggggtgtatttgctcttcatgaagaacctgaaggtacccgaatttggctaccaaacaatgattcacctggccttgccatggcttgggctttcggagatttttgcctaaaggattttggcctgatcttggtgcccgaaataacttatcgggacttaacagaaaatgacgaatttgttggcttggctacagatgggatatgggat

SEQ ID NO: 207828 - DNA, 352 bp, Gossypium hirsutum
gcgccaaggtgaagattcttaggagggagtcctactggtacaacagctatggatcagttgttacaggtgagcaggatcccaagactcggtacgcagttgtggttcgattcaacaaagttaattacgccaatgtatctaccaacaactacgcattggatgagattgaagaagttaaatgagtcactgtttcattttgtaataattttgggtttcaatgatcctatggctaatatatatatcgtcttcccccctctatctggctttgagcttgtttctaccaaaaacgacgtgtacaatactatcatctttctctagaggtgtctcatttattaatgccttaaaaaaaaataat

SEQ ID NO: 207829 - DNA, 442 bp, Gossypium hirsutum
  unsure (1)..(442): unsure at all n locations
cccacgcgtccggttgctggatatgttggtgaagatcaattgaagcaagctttggagggatgggatgttgtcatcattcctgctggggtgccaagaaagcctggtatgactcgcgacgatcttttcaacatcaatgctggaatcgtcaagggtctatgtgctgctattgccaagtattgccctaatgcacttgttaatatgatcagcaaccctgtcaattcaactgttccaattgctgctgaggttttcaagaaggcagggacatatgatgagaaaaagttgtttggtgtaactacccttgatgcgggtagggctaagactttctacgctgggaaggcaaaagcgaatgttgcagatgttaatgttccagttgttggtggccatgctggaataaccattctnccactattttcccaagccacaccaaaagccaatttgcctg

SEQ ID NO: 207830 - DNA, 457 bp, Gossypium hirsutum
cccacgcgtccgatttagctatagcatacactactagtacccactactagcaatggcttcctgaatgatctcatcggctaccattgccactgcctctccggcacaggctaacatggtcgctcctttcaccggcctcaagtctgcctctgctttcccagtcaccaggaaggccaacaacgacattacttctctcgcaagcaatggcggcagagtgcaatgcatgcaggtgtggcctcctactggaaagaagaagttcgagactctctcatacctccccgatcttacacccgtgcaggtggctaaggaagtggattaccttcttcgctcaaaatgggttccttgcttggaattcgaattagaggagggattcgtgcaccgtaaatactcgagcctacccacgtactacgatggacgctactggaccatgtggaagctggctaaggtcgggtgcaccgac

SEQ ID NO: 207831 - DNA, 459 bp, Gossypium hirsutum
cccacgcgtccgaaaaaaaaagaagtaaaagaaaaatggctttggcaagcttggtgaggagaagggcataccttttgtctagaaacctgtcgaattcgcccgcagatgcgttgaaatactctttttcactcagcaatttctcgaggggtttcgcttcaggatctgaagagaacgacgtcgtcgtcatcggcggcggacccggcggctacgtggcagctatcaaggctgcacagctaggtctcaaaacaacctgtatcgagaagcgtggtaccctcggaggtacttgccttaacgttggttgcatcccatctagggcgcttcttcattcatcccacatgtaccatgaagctacgcattcatttgctggccatggtgtgaaattctcctctgttgagattgatttgcctgccatgatggcccaaaaggacaaagctgtttctaatcgtacccgtggtatcg

SEQ ID NO: 207832 - DNA, 445 bp, Gossypium hirsutum
cccacgcgtccgcccacgcgtccggaaaaataatcccatcatcatcaacaacaacaatgcttgacattgtcctccttttctcccggatcttcacttccaccaatgtcctcgcccaggacttttgtgttgcgaacacggcttcgggaattggtaccccatcagggtacccttgcataatggaagcaaatgtaacctccgacgacttcgctttttcgggtcttggtgtcccaggtaatacgtcgaacatcataagtgcagctgtgacaccagcattcgttgggcaatatccagccgtcaacggactaggcctgtccggcgcaaggctggacttggctccgggtggtgtaatcccaatgcacactcaccctggtgccaacgagctcctttacgtggtccatggtcacatcacttgtggggtcatttcatcggctaataaaggttactt

SEQ ID NO: 207833 - DNA, 283 bp, Gossypium hirsutum
gttagctttagcatacactactagtacccactactagcaatggcttcctcaatgatctcatgggctacgcattgccactgcctgtgcggcacaggctaacatggtcacccctttcaccggcctcaagtctgcctctgctttcccagtcaccaggaaggccaacaacgacattacttctctcgcaagcaatggcggcagagtgcaatgcatgcaggtgtggcctcctactgggaaagaagaaattcgagactctctcatacctgccccgatcttacaccccgtg

SEQ ID NO: 207834 - DNA, 467 bp, Gossypium hirsutum
caaaaaaatggcaaaaccaagaagataaaagggtatcagcttcgccccccgagggatgctccgggcgagtggtatacaacagttggtctcaagaaaatgcaagaacatggtgctatttatctgactcccttttcacatcgtcttgctgaagaaattgacaatcccgagtatcaacggttgaggtgtagaggtaactatcacgctttgaggttcaagccaaatattatgcagttaagtgagtcaatagttgataaactccgggcacagggtcatttcatgtcgatccatcttcgttttgagatggatatgctggcagtggctgggtatggtctttttgttatcattttatatctatggtaattcattcacagttgccataggttgtctaggctatgcattcattttgcttggggctttgtgcctgaatagccttagctgtaacattaagaaatataaaatctttcatc

SEQ ID NO: 207835 - DNA, 462 bp, Gossypium hirsutum
ctcaccccgagagaagagatgggaaacaagtcctacgacgaagccattgaagctctgagaagcttctcagtgagaaaggggaactgaaagctgaagcagctgcaagggtagatcaaataacagcagagttaaacacagcatcagctgatggcaaaccatctgactcttctgttgagagactgaaagaaggcttcgtttacttcaagaaagaaaaatatgaaaagaatcctgctctgtatggtgagcttgccaagggtcaaagccctaagtatatgattgttgcctgctcggactctagggtctgcccatcggatgtgctggacatgcaacctggtgaagcttttgtggtccgtaatgttgctaacatggtgccaccatatgaccagattaaatatgctggcattggatctgctattgaatatgcagttttgcatctcaaggtacaagaaattgtggtgattg

SEQ ID NO: 207836 - DNA, 432 bp, Gossypium hirsutum
gcatacactactagtacccactactagcaatggcttcctcaatgatctcatcggctaccattggcactgcctctccggcacaggctaacatggtcgctcctttcaccggcctcaagtctgcctctgctttcccagtcaccaggaaggccaacaacgacattacttctctcgcaagcaatggcggcagagtgcaatgcatgcaggtgtggcctcctactggaaagaagaagttcgagactctctcatacctccccgatcttacacccgtgcagttggctaaggaagtggattaccttcttcgctcaaaatgggttccttgcttggaattcgaattagaggagggattcgtgcaccgtaaatactcgagcctacccacgtactacgatggacgctactggaccatgtggaagctggctatgttcgggtgcaccg

SEQ ID NO: 207837 - DNA, 394 bp, Gossypium hirsutum
attgagctaaaaaatactgtttgtgctggctatgatagcaacttcgatgatatcaatgaaaagggtattgatcccccttccttgcatctacttcaacaagcagggatcggtgccctcagaagagcagagagaataaatatggaaaggcttgttttggcttgcggaggagaagctgtaaattctgttgatgatttaaccccagcttgtcttgtctgaaccgaacttgtctacgagcatgtccttcgggaagatacgtatacatttgtggaaaatgtgaggcatccctattcatgtacaattgttatcaaagtgcctaatgaccacacaattgcccaaattaatgatgctgatcgagatggtctgcgggctgctaagaatactattgaagatgacg

SEQ ID NO: 207838 - DNA, 419 bp, Gossypium hirsutum
cacaaactcccatcacccgagatcatctttccccttcagaatggcggctgcaaccatggctggctctgccccatctttcgccggagagggcgtcaagctctctccttccgcccctaaaatccaaggcaatggccgtgtttccatgaggaaaaccgctaccaaggctgctccctctggaagtccatggtacggtcctgaccgagtcttgtacttgggtccactatctggtgagcctccatcttacttgaccggagaattccctggtgactacggttgggacactgctggactctcggcggacccagagacatttgccaggaaccgtgagctcgaagtcatccactgtaagtgggctatgttgggtgctcttgggtgtgttttccctgagcttttggctaagaatggagtcaaattcggtg

SEQ ID NO: 207839 - DNA, 348 bp, Gossypium hirsutum
ccgcagtggtgaaacggaggatacttttattgctgatctttcagtcggtttggccacgggccgaatggagaccggagctccatgcagggctgagcgtttagccaagtacaatcagcttctgcgaattgaggaggagcttggtgcggaagctgtctatgctggagccagcttccgtgctccagttgcaccctattaagatgcttgtttagatgataatttgctgagactggatgcgtgcggcagagcttcagtggtttattgtgaccctaaaacatgtttcaataattttgatagcaattttgtacttggtcagaatgagaaaggaaaggaagaataaatacatattat

SEQ ID NO: 207840 - DNA, 459 bp, Gossypium hirsutum
cggacgcgtgggctcgctctctgtagccgccgcctgcgtctctctcttcatctctcggaaccgaaaagtctttagctttgcgctgtcgagagagaccatgttggtttaccaggatctcatctccggtgacgagcttctttctgactcattcccctacaaggaaatcgagaatgggatgctgtgggaagttgagggaaagtgggttgtgcaaggagctgtcgatgttgacattggtgccaatccttcagccgaaggtgctgatgaggatgaaggtgttgatgaccaagctgtgaaggttgttgacattgttgacactttcaggcttcaggagcaaccccctttcgacaagaagcagtttgtcgtgttcatcaagaagttcatcaagaacttgacaccaaaactggatgcggaaaagcaagagtccttcaagaaaaacattgaaggagcaaccaagttttt

SEQ ID NO: 207841 - DNA, 451 bp, Gossypium hirsutum; identical to SEQ ID NO: 193832

SEQ ID NO: 207842 - DNA, 461 bp, Gossypium hirsutum
aatggctaccactgcttctccaatggcgactcagctgaagagcagctttacgtcgtgggttgcgagaggactggtagtccccaggggcatttcgggatccccgttcaaagtatcttccggaaagaccaggaccccttgcttcactgtcaaagctgttcaatccgacaagtcaacatttcaagtaatccaacccatcaacggcgaccccttcattggaagcctggagactccaatcacctcaagccccttaattgcatggtacctttccaacctcccagcctataggacggcagtgaacccacttgtgaggggagtggaagtgggtctggctcacggcttcctcctggtgggtccattcgttaaggccggccctctaaggaacactgcggtggcgggtcaagctgggtccttagccgctgccggtctggttgtgatcctcagcatttgcttgacgatgtatg

SEQ ID NO: 207843 - DNA, 280 bp, Gossypium hirsutum
cccacgcgtacattcaacaattgtgcagaataggaagcaacgagccaatataatcgtactatcaatgggacagacacaacaagtatccgagatgcactctaactaatacggcaacaacaatctggattataaaagcaacagaaacggacaaaactatatactctaggcttaatcctatcgcgattatgcaaaccctaatattctatataggactaactcataacggacacaaatcagataggatcatacataaataactacttgaaactaatgaaaatgg

SEQ ID NO: 207844 - DNA, 432 bp, Gossypium hirsutum
atcaatttttgaggctgctcttgcatggattgtcatgcccaggttaaactggaggtgcgtacgggcagtttcggctgtgccatgggttgctttgcttattttgtatggtgttgcacccgagtctccgagatacctatgcatgaaaggtaacacaagtgatgcacttcgaattctggagaagatagcttcagtgaaccaaacaaagcttcctcctggtgtcctactttctggtagatcaaatgacaaggatgaagagtcttctccatcagaaaatactggcccattactttcctcactcagtaaaactgccacacaatcgtgatcaggcttctcatcattttttatgctgttctcttcaaaattaattagaacaacgctgctcctatgggtactattctttggagattcattttcatattatgggatcatatt

SEQ ID NO: 207845 - DNA, 456 bp, Gossypium hirsutum
cacttatcttgccgatatcatacacttacatagccatgatggggtcaaagggactgactgaggcttcaaagatagctattctgaatgcaaactacatggcaaaacggttggagaactactaccccgttcttttccgtggtgtcaatggaacagttgctcatgaattcattgtggacttaagaggatttaagaacaccgctggaatagaacctgaagatgttgctaaacgtcttatggactatggattccatggtcctacaatgtcatggcctgttccaggcacactcatgattgaacccactgaaagtgaaagcaaggcggagctcgataggttctgtgatgctctcatctccattagggaagaaattgctcagattgagaatggaaaagctgatatccacaacaatgttctgaagggagctcctcatccaccatctttgctcatgggtgatgcat

SEQ ID NO: 207846 - DNA, 473 bp, Gossypium hirsutum
caaattcagataacaatttcacagttgttttcttcactctctctctcagccatggctgcagcgatctccaccgtcgccggcggtgccgccgccaaccgagctctgggagtgtcagtcccaacctcagctttcatggggaagaaagtgagctcgagattcaacaacaccaggcaggttccttcgggaagttttaaggtgatggcggccgaaaaagagatagacgaagagacacagaccgaaaaggaccgatggaaagggttggcttacgatatttcggacgaccaacaagacattactcgagggaaagggatggtggattccttgttccaagctcccatgaatgatggaactcactatgctgtcatgagttcctatgaatacatcagccaaggtcttaaaacgtacaatttggacaacaacatggatggtttctacatcgctcctgcattcatggacaagcttgttgttcacat

SEQ ID NO: 207847 - DNA, 441 bp, Gossypium hirsutum
ctcactttcactccctcacaaactgcaaagctgcggcaatagcagcaatggctgcccatattttcacgacaaccccgtcccacctcgctctctcttttccatcctcaactaacccttcaaacccaccggttcttctctcctcatttcgtggggtctctcttaagctccctcgtcaatccctctcccttgctgctactattcccaagaagcccttttctgtgtttgctgttaccaagaaagctgtcgctgttcttaaaggtaattcggaagttgaaggcgttgtcacgttgacccaggaaaatgatggtcctacgactgtgaatgttcgaattactggtcttactcctgggcctcatggcttccacctacatgagtatggtgacacaacgaatgggtgcatgtctacaggagcacatttcaatcctaacaatatgacacatg

SEQ ID NO: 207848 - DNA, 442 bp, Gossypium hirsutum
ggggaatcgggcatgccctcgcacgagcttttgccaataacaactgcaaggtggtggcgacggttagggctttacgctccatgggcgatctgcaacgagatcccaggttttatcttcaagaactcgatgttctctcggagcaaagcgtgcagcatgtcatgtctaatgtaataaataagtttggtcgtgttgatgtcttggttaataatgctgggatccaatgcgttggccctcttgcagaagtccctttgccttccatggaaagtgccttcaataccaatgtttttggtgcgatgagactagtacaagctgttgtaccggacatggcatctaagaaaaagggtaagattgtgaatgttggaagtgttagtgctttggctcctgggccatggtccggggtctattttgcatctaaagcagcccttcatgcgctaactgatac

SEQ ID NO: 207849 - DNA, 415 bp, Gossypium hirsutum
cagagattttagagagaacaaacaacaatggctgctacatctggggctgtactaaatggattaggctgttcatttctttgtgggggaaagaggagccaagcccttttgggtgccagcattggggccaaaggctcgccctcccctactgctggaactagaaagttgatcgttgtggcagccgccgcacctaaaaagtcttggatccctgctgttagaggtggtggcaacttcattgaccctgaatggctcgatggatcgctccctggagactacggatttgacccactaggtcttggaaaagacccagcattcctcaaatggtaccgagaagctgagctgatccatggacgttgggccatggctgctgtcgtcggcatcttcgtcggccaagcttggagtggcattccatggttcg

SEQ ID NO: 207850 - DNA, 430 bp, Gossypium hirsutum
gttttcagaatttggcttccttcgccgcatcagacgcataaacatggctgaagacgctgctcgcaaatccatatatcacttcagtgtcaaggacattcgtggaaatgatgtaagtttaagtgactacagcgggaaagttgttctgatagtgaatgttgcttcaaaatgtggtttaacgcaatcaaactacaaggaactcaatgttttgtatgaaaaatacaaaaaccaagggtttgagatattagcatttccttgcaaccagttcgcagggcaagaaccaggcaccaatgaacagattcaggaagttgcatgcacaatgttcaaagctgaattcccaatttttgataaggtggaagtaaatggaaagaatgctacaccactttacaagtttctaaaatcagaaaaaggtggatactttggggatgcaatc

SEQ ID NO: 207851 - DNA, 382 bp, Gossypium hirsutum
ccaagattgacagacgatctggcaaggaactcgagaaggaacccaagttcttgaagagcggggatgcaggtatggtaaagatggttcccaccaaacccatggtggttgagactttctccgaatacccaccactcggacgttttgctgtccgtgacatgcgccagaccgttgctgtcggtgtcatcaagagtgttgagaagaaggacccaactggtgctaaggtcaccaaatctgctgccaagaagaaatgagagattattgcagagataattatatcagttttcattacagctttggacaattatcttaaatttggactttaaatttactttttgtgagacttgttgatttgctttttaaacaaattctagttttatgtttt

SEQ ID NO: 207852 - DNA, 470 bp, Gossypium hirsutum
atcttattgtgtttgatatgcttatgtaccacatatgcatatagcactggtatttcagaatgaatttggcctgcaactgacaaagaactggaaattttacgtctttgggttatagggatggactatttatgagatagtaagatatgcacctcaacacaattggagtgcttatgaagaagctttgaggacaaaccctgttttagcgaaaatggttatcagtggaattgtctattctataggggattggattgcgcaagtaagtttatgtcatcgaagaaatacttttcgatctttagttttcggtcatgagattgtgcgttacactttttcttgtctttattctttcagtgctttgaaggtaaacctctatttgagtttgatcgtattcggatgttcagatctggccttgttggctttactctacacggttccttgtctcattactattaccaattctgtgaggtaaccat

SEQ ID NO: 207853 - DNA, 438 bp, Gossypium hirsutum
cccacgcgtccgttcaagaattgtgcagaataggaagtgaggagcaaaatgaatggtactttgttagggacaaagacaagaagtatcccacagggactcgaactaatagggcaacaaaagctgggttttggaaagcaacgggaagggacaaacctatatactcgaggcttaatcttattgggatgaggaaaaccctagtgttctataaaggaagagctcctaatggacaaaaatcagattggatcatgcatgagtatcgacttgaaactaatgaaaatggtactcctcaggaagaaggatgggtggtatgtatagtgttcaagaaacgaatgacaacagtaagaaaaatgggtgaatatgaatcttcatgttggtacgatgaccaagtctccttcatacaagaacttgaatccccaaagcgaataactcaaccttatg

SEQ ID NO: 207854 - DNA, 435 bp, Gossypium hirsutum
  unsure (1)..(435): unsure at all n locations
cccacgcgtccgctgtaatccaagcttctattcagttttgtaagagctatggctaaggacagggangtgggtggtgagttccaggccaaggactaccatgatcctccacccgctccattggtcgacgctcaggagttagccaagtggtctttttacagggctgtcatagctgagttcattgccactctcctctttctctacatcactgtcttgactgtgatcggttacaagacccagaccgaccctgctaagggcggtgaagattgtggcggcgttggcattctcggcattgcttgggcttttggtggcatgatctttattcttggttactgcactgccggtatctctgggggacacatcaacccagcagtaacctttggacttttcttggctaggaatgtgtccttgggtcgagccatattttacatgggtgct

SEQ ID NO: 207855 - DNA, 428 bp, Gossypium hirsutum
gtcgacggcttccatcaacggttggtgccttacctcctcttcttcctccaccaccacctcctgtttgggcgctcgtcgacgaccgacattgcggccttcggtcgtcgctagccttaactcttctccttctcctccgactcttatccaagaccgcccggttttcgctgcccctgttcctttgctcaccccgagagaagagatgggaaacaagtcctacgacgaagccattgaagctctcaagaaacttctcagtgagaaaggagaactgaaagctgaagcagctgcaagggtagatcaaataacagcagagttaaacacaacagcagctgacggcaaaccatctgactcttctgttgagagactgaaagaaggcttcggttacttcaagaaagaaaaatatgaaaagaatcctgctctgtatggtgagc

SEQ ID NO: 207856 - DNA, 459 bp, Gossypium hirsutum
attgagctaaaaaataaggtttgtgctggcaatgatagcaactttgttgttatcaatgaaaagggtattgatcccccttgcttggatctacttcaacaagcagggattgttgccctcagaagagcaaagagaagaaatatggaaaggcttgttttggcttgcggaggagaagctgtaaattctgttgatgatttaaccccagcttgtcttggctgggcgggacttgtctacgagcatgtccttggggaagataagtatacatttgtggaaaatgtgaggcatccccattcatgtacaattttgatcaaagggcctaatgaccacacaattgcccaaattaaggatgctgttcgtgatgggctgcgggctgttaagaatactattgaagatgaggcagttatattaggtgcgggagctttcgaagttgcagctagacaacacctaattaacgaagtaaag

SEQ ID NO: 207857 - DNA, 464 bp, Gossypium hirsutum
aaaatacgaagaaaaatgacgatgtttcacttcttcaactgtgcgatcctcactttgggtccgcacgccgtctactactggggcactcccttatcggagtatgatactcttggtacttctgttaaagctgcccttgtttatcttggaactgctttggtaaaggtttctgagaatgacggcttcgatccgtaccaggaacttttgaaggcagtgattggttttatagatgttgctggcctttattttgccttaacacagttgactcataggaacatctctcaaaatcataaatttcaagctgttggacttggatgggcgtttgctgattcggttctacatagattggcacccctttgggtgggagctagaggactagaattcacttgggatttcattctacaaggcttggaagcaaatgctaatttggtgttaagtatatctcttgctgcattgggatctttaat

SEQ ID NO: 207858 - DNA, 461 bp, Gossypium hirsutum
  unsure (1)..(461): unsure at all n locations
gctcctccccggcacaggccaacatggtggcccccttcaccggcctcaagtctgcctgtggtgtcccagtcactaggaaggccaacaacgacatcacttctcttgcaagcaatggtgggagagtgcaatgcatgcaggtacttggtgatgcataaatacaacttaaattaccccaattgtttgaacacaacaaattacataaattgaatcaaatatatatcttggcttttgagtataggtgtggcctcctcttgggaagaagaagttcgagacactctcatacctgcccgatcttacacccgtacagttggctaaggaagtagattaccttcttcgctctaaatggattccttgcttggaattcgaattagaggtgttttcgagctctaaattattccattccaacactttatttttttagtgggatatttgatttgattaaatgtgttntataagtatgt

SEQ ID NO: 207859 - DNA, 310 bp, Gossypium hirsutum
cccacgcgtccgctaatattattcgaggcaacttatctaattgctctaccagtcgctcatacggatgagagcatcgaaagcatggaatctaggttaatgcacctaggaatgaaaattataagcattgaagatgactagcattgcctcattcctaagggcggacctcttaacattttaccccaaagagttgtggcaaatggcggaacagccttaatggtacacccgattacaggttacatggctgccagaacactatccggtgattcgatcaatgcggatgctatcgaccagtgcctagatgcgtgaaaga

SEQ ID NO: 207860 - DNA, 455 bp, Gossypium hirsutum
  unsure (1)..(455): unsure at all n locations
cggacgcgtgggcggacgcgtggggttttgagtgaaaaaaaaatttctctggaagcaaagcaactatgagctacgtttacctcagatctgaaacccctcgtctcagatccactaaattcaccatgtcttctactttcagcggcgatgaaacggctcccttcttcggcttcctcggcgccgccgccgctctcgtcttctcctgtatgggagctgcatatgggacggctaagagcggtgtgggtgtggcttcaatgggtgtgatgaggcctgagttggtgatgaaatccattgttccagttgttatggctggtgtgttgggtatttatgggttgattattgctgntattattagtactggcatcaatccaaaggccaaatcgtattatctttttgatggctatgctcatctttcctctggtcttgcttgtggacttgctgggcttttaagctggaat

SEQ ID NO: 207861 - DNA, 460 bp, Gossypium hirsutum
  unsure (1)..(460): unsure at all n locations
cccacgcgtccgcaccaattgccttgctcctttcgtcaaggttctggaccagaagtttggtagcatcaagggcaccatgactaccactcactcgtacaccggtgaccataggcttcttgatgctagccaccgtgacctcaggcgtgctagagccgcagctctcaacatcgtcccgacttcaactggtgcggcgaaggccgtggcccttgtactccctactctcaaaggcaaacttaatggcatcgcattgcgtgtgccaacaccaaatgtgtcggtggtggacctagtggtccaggtttcaaagaagacgtttgctgaagaggtgaacgctgctttcaaagagagtgcagagaaagagctacagggtatactttcagtgtgtgaagaaccccttggttcagtggacttcaggtgctctgatgtgtcctncaccgttgatgcatcactcaccatggtcatg

SEQ ID NO: 207862 - DNA, 434 bp, Gossypium hirsutum
ctttgggaacgttgtcccagaacacacttagcatcagcctccaatggccagttggggtgtaggagaatgtagtttaagacccttcactgccgtcaaaatccaccataaacctagaccttcattaccttcaaacaccattaatgctttcaagttcaaacctttaccatgttctgcattcaaggtcccaactttatggtctaaaggtagaaacttggggggattggggctgttgagtgtgagtgctccattgaaagtgacaataactagtgaagaagataaaggtaaagaagagagcaccactgatggtgttaataatggtgagtttgaccctggtgcagcacctccttttaagttgtctgatattaaagctgcaataccaaaacattgttgggttaaagatccatggagatctatgagttatgttgggagagatg

SEQ ID NO: 207863 - DNA, 440 bp, Gossypium hirsutum
cccacgcgtccgcccacgcgtccgaacacaccttcgattttcccaaggttgtagaagatggcggaaggtgaggatattcagccacgttgtttgtgacaatggaactggaatggttaaggctggatttgctggggatgatgctccccgagccgtattccctagcatcgtcggtcggccacgtcacaccggtgtgatggttggcatgggccagaaagatgcatatgttggtgatgaagctcaatcaaagagaggtattttgactttgaaataccctattgagcatggtattgtgagcaacttggatgatatgtaaaagatttggcatcataccttttataacgagcttcgtgttgccccggaagagcacccagttctccttactgaggctcctcttaacccaaaagctaatcgggagaaaatgacccaaattatgttcgaga

SEQ ID NO: 207864 - DNA, 465 bp, Gossypium hirsutum
  unsure (1)..(465): unsure at all n locations
caacaacaacgtctcaaattcaacgtcgacgttgtcgaaagtgagtggggacaaggtgctaagctcgacgttttggccgggaaggtcgcggccgatcgtacgcacaccattaagggtatttgtattggtcacaacgaaaccgcgactggagttaccaacaacttggccacagtgagaaaactactagatcattacgggcacccagcactgcttctcgtcgatggagtttcctcgatttgtgctctcgatttccgtatggatgaatggggagttgacgtagccttaaccggctcgcaaaaggcgctttgtgttccaacctggatcggtattgtttgcgctagcccgaaagctctcgaggcgaccaaaaccgcgaaatcagtccgggttttcttcgattggaacgattaccttaagttttacaaattaggaacattntgggcctacactccttcaattgaactcttg

SEQ ID NO: 207865 - DNA, 305 bp, Gossypium hirsutum
tcgtccacgcgttcgtccacgcgtccggagaagttcccggagactatggatacgatccgtttggtgggagcaagaagccagaagactgtgcaaaatatcaagcatatgagttgatacacgcaaggtgggcaatgcttggtgctgcagggttcatcatccctgaagcctttaacaaatttggtgccaactgtggccccgaagccgtttggttcaagaccggagctcttctctgggacggtaacaccttgaactacttcgggaagaacatccccatcaaccttgtggtggctgtcgttgccgaagtc

SEQ ID NO: 207866 - DNA, 443 bp, Gossypium hirsutum
gcgggaaccggcacagcttcctttgctacttctctatttaaagcctcctataaggtgttattgctctattttagtgcctattatccttttattatttttgctctctctttttttttgagatctgcgtgtttcttcaagcttcttgaaagcgtcattttggttgagaactggaaaccgctgctgtgatggctccaccaattgagactacagtcaagtcctctgactctcactgcgctccacatcctcctttgaatgaaaggatcctttcgtcaatgaccaggaggtccgtcgctgctcacccatggcatgatcttgaaattggacctggagctcctacggttttcaactgcgtgattgaaattgggaaagggagcatggtgaaatatgaacttgacaagaaaactggtttgatcaaggttgatcgtgtgctttattcatcagtt

SEQ ID NO: 207867 - DNA, 400 bp, Gossypium hirsutum
gcgtggtgttgcaggtcttcgttacgcacttgaagttgcgaaacatggatctgttgcgagtatcaccaaggccgagcctcatgagaggaatacgaactatgcacaaggtggtgttagtgcagtcctgtgtccatctgattctgtagagagtcacatgcaggatacaatcgtagcaggagcttatctttgcgatgaggagtctgtcaaagttgactgtactgaaggacctgatagaattcgagaattgattgcaatgggggcttcgcttgaccatggtgatgatggaaatttgcatctggcaagggaaggcggtcattctcatcaccgaatcgttcatgctgctgatatgactggacgagacattgatcgggctttactagatgcacttgtcaatgatcct

SEQ ID NO: 207868 - DNA, 469 bp, Gossypium hirsutum
tcggaaatagaaaaattaaagaaatcaaaatggctgttagtccacccttttcactagcagctattggcatcttggttctctttacaactaacccaaactactgccaagcatatagaagaattctcagctctgacacaaatacagagttcatcaaaacttcctgtgctgccaccacctaccctgacctctgtttcgccgccttttctagctacgcaaccgaaatccaagccgatcccaaaatattagctaccaagtccctcaatttgacacttaacaccacgttctcggcttccaaaaacctgacggagctctgcaaaacgcagggcataaagcctactgaggctgcgcctcttcacgattgcgtggaagaaataagtgactcggtcgatgaactaacaaagtctattcctgaaatggaagagattgaatgcaaaagccttgcttttaaaatgagggatatcccaaacat

SEQ ID NO: 207869 - DNA, 466 bp, Gossypium hirsutum
gtgagactcttttgtatacctgtagcatatagtaatagtaagcagtaatagcaatggcctccggcatgatctcatcggcaaccattgccaccgtgaaccgctcctccccggcacaggccaacatggtggcccccttcaccggcctcaaatctgcctctgctttcccagtcaccaggaaggccaacaacgacatcacttctcttgcaagcaacggtgggagagtgcaatgcatgcaggtgtggccgcctcttgggaagaagaagttcgagactctctcatacctgcccgatcttactcccgtacagttggctaaggaagtagattaccttcttcgctctaaatggattccttgcttggaattcgaattagaggagggattcgtgcaccgtaagtactcgagcttacccacgtactacgatggacgctactggaccatgttgaaacttgccatgttcgggtgcaccga

SEQ ID NO: 207870 - DNA, 446 bp, Gossypium hirsutum
actgcttctccaatggcgactcagctgaagagcagctttacgtcgtctgttacaagaggactggtagtccccaggggcatttcgggatccccgttcaaagtatcttccggaaagaccaggaccccttgcttcactgtcaaagctgttcaatccgacaagtcaacatttcaagtaatccaacccatcaacggcgaccccttcattggaagcctggagactccaatcacctcaagccccttaattgcatggtacctttccaacctcccagcctataggacggcagtgaacccacttctgaggggaatcgaagtgggtctggctcacggcttcctcctggtgggtccattcgttaaggccggccctctaaggaacactgcggtggcgggtcaagctgggtccttagccgctgtcggtctggttgtgatcctcagcttttgcttgacgat

SEQ ID NO: 207871 - DNA, 410 bp, Gossypium hirsutum
cttggtttcacccaacaagatggagaaatcagaaatatctcaatctgttgctgaattggtgtggcaattaaatgagaaatcttgtgaacttgaggttaaagctgcagacaatcgaataatccaagagcagctgaacctgaagatttgtgaatgtgaaggattgcaagaaactgttgcctccttaaagcagcagctctctgatgcactagaatcacaaaatgtcagtcctatagcccctaattctcaacaatttggaggaatgaaaggtctgcagatggacaacgaagctgcggcatcaaaagatagtgatgaagatttgcttttagcacaggtggctgagattgaagaactgaagcagaaagttgttgaactaaccgagtcaaaagaacaattagaactgcggaaccaga

SEQ ID NO: 207872 - DNA, 413 bp, Gossypium hirsutum
gcgccgtctactgttcccctgaggagttcctctcttcggtggattatcttcttggaaaacatgcggtctttggtaaaaccgattctgagggtggttttgactccggtgcggtggcgaccgcaaacatattggagagttcaagttcaacagtcggcgggaagccgtactacttcttgtcagtgttgacaagaaccgccgactgagacgaaggtgggaagcaccagctaataacagccaccgtctacaacggcaagctttacatttgcaaggcacaatctgtggacaagaggtggttcaagggagctagaaagtttgtggagagtgctgctagttccttcagtggtgcttaaacaaagcttatacatggaagagggattttattgaaacttgtggatgttgaatattaacttctg

SEQ ID NO: 207873 - DNA, 385 bp, Gossypium hirsutum
tttcaaagtaaaaacactgctatagaagcaacagatcccggctctaaacgataatgggctccagaagaaaggagccggagagatagttcgaatttggtcttgtttatccttttcgatcgacggagaaagaaatcgatgatacttttacagtcccattcacgattccttctccagactttgctgaatcgaatacagaatcttgaaaagtgtattgaactagaccatcactgggttgagtttgatgatgttcgttaccatgttcaggtgtcaatgaagaatccccatattctactgctttcattatcattacctaccccacctctggaaactgtcttcgttggtggacttccatttggagccatagaagctattaaagcatcttatg

SEQ ID NO: 207874 - DNA, 183 bp, Gossypium hirsutum
tcggttctctaatccttttttcgggtgtagcgttgtttatacgtttggttgttgttgaagaagtgctactaccatggctacaaagaagagcgttggggacttgaaggaagctgatttgaagggaaagaaagtgtttgttagagtcgatctgaacgttccattggatgataacttcaacataac

SEQ ID NO: 207875 - DNA, 383 bp, Gossypium hirsutum
cctccatccatatctccttccttcagctctaagagccttaaaacaagttcactatttggagaagcattaaaggttgttccaaaggcatcatttgaaggttcaaaaggcaaaaaccactccttaattagggccaaatggtgaaattgaaaagcctttgaaaaagttccttccaaaggcaccaccggttaaggctttgattaaaataatgatgggattgggtgaacctttaaaaccaatggcttttaaagttagaccagcttcatgtgggggtactgcttgggttaattcctttggggatgaacaacttgctgtggatctacttgccaacaagcttctttttgaggctttgacatactcgcacttttgcaaatacgcgtgctccg

SEQ ID NO: 207876 - DNA, 395 bp, Gossypium hirsutum
gttgaatatgtcggattttagagatgaggctcactcaagttcatgggatcactccgcctttatgggaacctatgctatgtatttggatcaaagacttgaattgatgcttttcgacaggaaaagcagtggaggcagtggcgctgggggaagtagtcatggaagtgctgatgatagatatggtgggcgagataatttccgatcaccaccaccgaggccgtacgaatatgattatggggatatcagaggtgataatggatatggaaattatgggatgacaaggagaacgaggtcttatggtgatatgagtgaggcagcggggagagatgggagagatgggagagaggagaagaaagcagtgacgccattgaaggaaatgacaccagagaggatttttg

SEQ ID NO: 207877 - DNA, 253 bp, Gossypium hirsutum
tcgcagttatcggtttctactttgccataagagcttctgggttctggccatgaggttaccgtcttcactgttggagaagagggctctgattaaatgaataagccccccttcaacagattctctgaaattacgagtgctggtgggaaaacagtgtggagagacccttcagatgttggcaatgttgttgcaagggcaacctttgacgtggcgttggataacaacggtattgacttggacactgtcatgccattgg

SEQ ID NO: 207878 - DNA, 359 bp, Gossypium hirsutum
catgattccataattgaatcaatgctccaaactagaggaatgttatggtaaaactggcgcttgagacgatgtaggggaagagcatcgtgcgacttgaaggacatgatcagatgcggatgtcaaaacccaccactttccgttatgtataaatgaacgtgcttcttgctcgacatcctttgttctattataatccgtctttttgttgagttgcaatgtaaatcttacaggatggatctcgaagagatacatccatttttcacgggcaaggatctatggatagataatggaaatcaataatgctgaacaacttcgtaagtatatctgagatatagaaatcgaaaggatccggttcaaactat

SEQ ID NO: 207879 - DNA, 276 bp, Gossypium hirsutum
aaaaaaaatcagaaacattttctggtaagtgaaggaaaagcagagtcagtgaagaagatggagagcaaacccacatagattgggaggtctaagatgtttggagggtacaacaaaagatacaagcatttcagtcccaccctcgggtgttccctgactttccatatctactttcgtgcttgttcttctcctttccacaagttccctatactttactggctctctggacttacttgcactgatgagaatttcataatcaagtcaggagcacaacgtgct

SEQ ID NO: 207880 - DNA, 469 bp, Gossypium hirsutum
ctcttcttcctccaccaccacctcctctttttccgctcgtcgacgacctacattgcggccttgggtcgtcgctagccttaactcttctccttctcctccgactcttatccaagaccgcccggttttcgctgcccctgttcctttgctcaccccgagagaagagatgggaaacaagtcctacgacgaagccattgaagctctcaagaaacttctcagtgagaaaggagaactgaaagctgaagcagctgcaagggtagatcaaataacagcagagttaaacacaacatcagctgacggcaaaccatctgactcttctgttgagagactgaaagaaggcttcgtttacttcaagaaagaaaaatatgaaaagaatcctgctctgtatggtgagcttgccaagggtcaaaccccctagtatatgattggtgcctgctcggactctatggtctggcatctcatgtgctggaca

SEQ ID NO: 207881 - DNA, 440 bp, Gossypium hirsutum
gctaaacaatggcagcttgcccagtatacaccacccaatctctcaactcaacatgttcaatctgcaccatcaaaaacccacttcagttctcaccacatccacctagttttctacagaactagcaagagaactagcaagagaggtggcagcagctcatgtgtgataacctgctcagctggtgactcacaaacagttgtgattggtttagctgctgactcaggatgtgggaagagtaccttcatgaggaggctaacaagtgtgttcggtggtgcagctgagccaccaaagggaggcaaccctgattccaacacactgatcagcgatatgaccactgtgatatgtttagatgattatcattcacttgacagaactggaaggaaagagaagggagtgacagcacttgacccaggagccaacgactttgacctcatgtttgaaca

SEQ ID NO: 207882 - DNA, 301 bp, Gossypium hirsutum
gcgccttcctaatatctaccttccttttctgtctttttgctatggcaggaactgtggtggtcggtgtttatgggaacggctcaatagctggtacccacaaatcccctttctccgtcaaggttggcctatcccaaatgctccgtggtggggtgattatggatgtcttcacccctgaacaagctcgcatcgctgaagaagcttgatcctgcgccgtcatggctcttgaacgagtccccgtctacatcctatcccaatgcggcttggctcggattaatgtcccacaacttatcatagaaattat

SEQ ID NO: 207883 - DNA, 497 bp, Gossypium hirsutum
tcgagcaacacataatagtcaaattagcgagcaagatgagtaagggtacgaagagagcagttctggggggatgcaactaccccaagacccaattcagcttgcatggatgcatcaatgatgtgaaagccataagaggtgtgatcctggacattgggtttaaggaaagcgatgttaatgtcctcaccgatgcgccagggtcgccggttctgcctacgggtgtaaacattaaggatgcactcaatagaatggtgaacaaggctaaagcaggagatattctatttttctacttcagtggacatggaacacgcgttccaatctttcaacctggccagcctttcaagcaagatgaagcaatcgtggcttgtgatttaaatcttgtcaccgatgtggacttcagacgtttagttaatcggctaccagaaggagcaagcttcacaatcctatcagattcgtgccacagtgggggtctcattgaaaaagagaaagaacaatttggg

SEQ ID NO: 207884 - DNA, 326 bp, Gossypium hirsutum
tcgtccacgcgtccggtgagactctctcgtataactgtagcatatagtactagtaagcagtaataggaatggcctcctccatgatctcatcggcaaccattgccaccgtgaactgctcctccccggcacaggccaacatggtggcccccttaaccggcctaaagtctgcctctgctttcccagtcactaggaaggccaacaacgacatcacttctcttgcaagcaatggtggaaaagtgcaatgcatgcaggtgtggcctcctcttgggaagaagaagttcgagacactctcatacctccccgatcttacacccgtacagttggct

SEQ ID NO: 207885 - DNA, 307 bp, Gossypium hirsutum
cggtccgaattccggtcgcccacgcgttcgccacgcgttcgccacgcgttcggagctctcgggcgaaattgaaataccactacttttaacgttatttacttattccgtgaatcggaggcggggcaacggccctctttttgggcccaaaggccgctttcggccggccatcccggccggaaacattggcaagtggggaggttggctggggcggcacatctggtaaaagataacgcaagggtcctaagatgagctcaacgagaacagaaatctcgcgtggaacaaaagggtaaaagctcgcttgattctg

SEQ ID NO: 207886 - DNA, 320 bp, Gossypium hirsutum
cggacgcgtggggagatattggagattgttgctggttgtagacaatagacaaggtctttttcgggtcctgggcattatcaggagcattgctcatggcactcatcctagctgcaagctcactggctagtgattcctgcaaagccctcagaacctggctgctgctaaagttatgagagcacaagaagctgttgtcaatggcagacctttctatgagtccctggctgaagttctttacaacatcaatgagcagctccagactgaagacatacatgctcctttcacaaacgcaaagcctgtcaaaaaagttgccttgggtgttg

SEQ ID NO: 207887 - DNA, 402 bp, Gossypium hirsutum
tcggtttcattgacggcaggactctcagactactctttcgaaccagctccaccatcacggccaaaaaacaaagcatattgtagaagatggcaacacaagcacttgtatcatcgtctcttacctactcagtggagactgcaaggcagattctaggagctaaacgacaaattgggtcttgaaggaaaggatccttaggagttaatgcagcttcaactgcacccgttaagcaaggagctgatagacctttatagattgcatctaaacaaagcctttcatacttggatggaagccttccaggcgataatggatttgaccccatgggactatcagaccctgaaggtccagtagggttcatcgagcctaaacggctagcctacggtgagatcattaacgggcgttatg

SEQ ID NO: 207888 - DNA, 203 bp, Gossypium hirsutum
tcggagagagggaggaaaagatgcagacattcgttaaaactctaaccggcatgaccataactctggatggggtgagcatcgattccattgacaacgtcaaatccaagatccaagacaaagaatcgaatcccaccggaccaacaacgtctcatctttaccggaaaacagctcgaagatggtcgtaccttggctgactacaacat

SEQ ID NO: 207889 - DNA, 394 bp, Gossypium hirsutum
accactcgtacgcgctattacatacacttcttggacccactactagcaatggcttcatcaatggccacatccgctaccattgccactgactctaccacacaggctaacatggccggtcctttgaccggcctcaagtctgcctctgctatgacagtcaccagcaacgccaccaacgacattacttatgtcgcaagcaatggcggcagactgcaatgcacgcatacggggactactactgggaagactatgtcagacactctctaacacatacccgatcttacacccgagcaagtggataacgaagtacattaccttcgtggctcataatgggaaccttgcttggaattcgaattggaggaccgattcttccaccgcatgcactcgagcttaccca

SEQ ID NO: 207890 - DNA, 490 bp, Gossypium hirsutum
gtgcttcttcggctattgcagctgttgccatctcattccccagttcccagaagactggatcagtagtggggacaacaaaggcttctttccttacagggaagaaacttagatctgtgagaaagtacacaaaaccagctgccggaccaacatttccagtgtgcgccgtcgtcgaccccgacagacccctttggttcccaggcagcactcctcctgcatggctggatggcagtctccctggtgactttggtttcgatcctctcggtcttgggtctgaccctgagacattgagatggaacgtacaagcagagctggttcactgcagatgggcaatgttgggagctgctggtattttcatcccagagttcttaaccaagattgggattttaaacactccatcgtggtactcaggtggaacagaggaatacttcactgacaccacaactctcttcatcgtttgagctaatcttatcggctgggcttgagggagaag

SEQ ID NO: 207891 - DNA, 397 bp, Gossypium hirsutum
cattgaaggcaggactctcagactactctttcgaaccagctccaccatcacccccaaaaaacagagcaaattgtagaagatggcaacacaagcacttgtatcatcgtctcttacctactcagtggagactgcaaggcagattcttggagctaaacgacaaattgggtcttcaaggaaaggatcctttgttgttaaggcagcttcgactccacccgttaagcaaggagctgatagacctttatggtttgcatctaaacaaagcctttcatacttggatggcagccttccaggtgattatggatttgaccccttgggactctcagaccctgaaggtccaggagggttcatcgagcctaaatggctagcctaccgggagatcatcaacgggcgttatgct

SEQ ID NO: 207892 - DNA, 430 bp, Gossypium hirsutum
ggcaatagctgacgcttagaccctttggttgtgtttaaaccccaagattattagctgtcatcgggataagggtatctttgtttgtagtacttgttgcaggagagcatgctttcctcctagaataagatatacgattctaaagtttcatggaaggaaaagacatgaatatcttcgtccagcacttgctatatcatcagatgtggaagatgtcggagtttctttccagcttgaagacttcactgttaccccttctagtactgaatagagccgaaagctaaagataagagtcgaggtatcatgagccaaaactcgagcaatttttaatgaagcatttgacaagatgcgtgctgatgcccatccaatccctggctttagaagagtataaggaggaaaaacaccaaatatacctagagagattttggtagaagtc

SEQ ID NO: 207893 - DNA, 415 bp, Gossypium hirsutum
tcgtccacgcgttcgctccaccatcacccccaattacatagcaaattgtagaagatggcaacacaggcgactcgtatcatcgactcttacctactcattggagactgcaaggcagattcttggagctaaacgacaaattgggccttcaaggtaaggatcctttggtgttaaagcagcttcgactccacccgttaagcaaggagctgattgacctttatggcttgcatctaaacaaagcctttcatacttggatggcagcctttcaggtgattatggatttgaccccttgggactcttagacccttgaagtccatgagggttcatcgagcctaaatggctagcctacggggagatcatcaacgggcgttatgctatgttgggtgcattaggtgccattgcccctgaaatacttggg

SEQ ID NO: 207894 - DNA, 379 bp, Gossypium hirsutum
cgctccaccatcactgctaagatacagagctgatcgtagaacatggcaacacagggacttgtctcatcatgttttacctactcagtggagactgcatggcagattcttggagctaaacgactaattgggcctatcaaggaaaggatcctttagtgataaggtagcttcgactgcacccgttaagcaaggagctgatagacctttatggcttgcatctaaacatatcctttcatacttggatggcagtcttccatgtgattatggatttgaccccttgggactctgagacccttgaggtacaggagggttcatcgagcctaaattgcttcactacagtgagaccatcaacgggcgttatgctatgatgggtgcaataagt

SEQ ID NO: 207895 - DNA, 442 bp, Gossypium hirsutum
gctttagcatacactactagtacccactactagcaatggcttcctcaatgatctcatcggctaccattgccactgcctctccggcacaggctaacatggtcacccctttcaccggcctcaagtctgcctctgctttcccagtcaccaggaaggccaacaacgacattacttctctcgcaagcaatggcggcagagtgcaatgcatgcaggtgtggcctcctactggaaagaagaagttcgagactctctcatacctccccgatcttacacccgtgcagttggctaaggaagtagattaccttcttcgctcaaaatgggttccttgcttggagttcgaattggaagagggattcgtgcaccgtaagtactcgagcttacccacgtactacgatggacgctactggaccatgtggaagcttgccatgttcgggtgcaccgactc

SEQ ID NO: 207896 - DNA, 331 bp, Gossypium hirsutum
tcgcccacgcgttcgctccaccatcacccccaaaaaacaaagcaaattgtagaagatggcaacacaagcacttgtatcatcgtctcttacctactcagtggagactgcaaggcagattcttggagctaaacgacaaattgggccttcaaggaaaggatcctttgttgttaaggcagcttcgactccacccgttaagcaaggagctgatagacctttatggcttgcatctaaacaaagcctttcatacttggatggcagccttccaggtgattatggatttgaccccttgggactctcagaccctgatggccaggaggttcatcgagcctaa

SEQ ID NO: 207897 - DNA, 450 bp, Gossypium hirsutum
  unsure (1)..(450): unsure at all n locations
tcgtccacgcgtccgccaagtttctccttcttgagttccctttgatcttcaatggctactacttctgcaatggcaagtcggctgaagagcagttttacatcatctcttacaagaaaactagttgtcccaaagggaatttccggagccccatttatattctcacccggcaagacccgaactccctgtttcactgtcaaagctgttcaatcagacaagccaacatttcaagtaattcaacccattaatggtgacccattcattggaagtctagagacaccaatcacatcaagtcctttaattgcttggtacttatccaaccttccagcttatagaacagcagtgaacccacttctaagaggcatagaagttggtttagcccatggtttcctcttagtaggtccatttgtcaaagctggtcctttaaggaacacagcttgtgcangtcaagct

SEQ ID NO: 207898 - DNA, 327 bp, Gossypium hirsutum
gaagcattaaatccaccattttttttgttgaattagcagtcacctgctcaaacagtgatattggtgaagggaaactcctgccatggctactagcagcaacaactccatagattcatcactgtccagccaaagattagtggggaaagtggcattggtcactggtggagcaaccggcattggtgagagcattgtgcgtctatttcacaagcatggtgccaaagtctgcattgttgatgtgcaagacaaccttggcctccaagtttgtcaatccctcagcaacggccctaacgtatgttttttccattgcgacgtgacaatagaagaaca

SEQ ID NO: 207899 - DNA, 284 bp, Gossypium hirsutum
gcggcactcatgggatttgcagagcacagaaggttccaagactgggccaaaccaggttcgatgggggaacagggtttcttggagttcgagaagggccttggagggtctggtgagccggcataccctggaggaccactgtttaacccacttggttttgggaaagatgagaagtcattgaatgatttgaagctgaaagaagtgaagaatgggagattggcaatgttggcaatcttgggttacttcatacaagggctcgtgacatgtgtatgaccataccagaacct

SEQ ID NO: 207900 - DNA, 343 bp, Gossypium hirsutum
gcgctcgttcgcttttatttgcttctttcaccatgaccaagcttcaggctaactggtctccttacgacaacaggggatggtcttgcgttgcgatcgctggagctgattactgtgttatcgccgtcgatactcgaatgtcaaccggttacaatatactgacccgagagtactccaaaatctgtaaacttgcagataaatgtgtcatggcatcctcaggatttcaagctgacgtgagggctttacaaaagcaactggcagctaggcacttgatttatcagcatcagcacaacaagcaaatgagctgccctgcaatggctcaattgctttccaacacactttatta

SEQ ID NO: 207901 - DNA, 380 bp, Gossypium hirsutum
ctttgttgagactttaaactgagctttgctgaattttcgtgatcgtcgagaaagaaaattatgggaaggaaattcttcgttggcggcaattggaaatgcaatggaaccactgaggaagtgaataagattgtgagtactttgaatgctggagaggtgccttctcaggatgttgttgaggttgtggttagccctccatttgtgttccttcctttggtcaaaacttcactgagacccgatttccatgtcgctgcacaaaattgttgggtcaagaaaggaggtgctttcactggtgaagttagtgcagagatgcttgtcaatttgagcattccttgggttattattggtcattctgagaggagacttattttgaaagagtcaaa

SEQ ID NO: 207902 - DNA, 363 bp, Gossypium hirsutum
gctgacgtaccggccgaattccgggtcgagcgctcgttcgcccacgcgtccgattcactttaaccttgtactctactattacactgccggaaaaaaatcatgggcaccgtgacgacgcatgcctctgccgctgttttccggccatgtgcatcgaaaacacggttccttactggttcttccggtaagttaaaccgagacgtttcatttaaaccagtggctgctacatcgactagctcattcaaagttgaagcaaagaaaggggagtggttacctggtcttccttcaccagcttacctgaatggcagtcttccaagtgataatggctttgatcctcttggattggcttgagaccctgagaactta

SEQ ID NO: 207903 - DNA, 447 bp, Gossypium hirsutum
gcgactcgtgcgctcaaattcagataacaatttcacagatgttttcttcactctctctctcagtcatggctgcgggcatcggcaccgtcgccgtcgctgccgtcgtcaaccgagctctgggagtgttagttccaaccttagctttcatggggaagaaagtgagctcgagattcaacaacaccaggcatgttccttcgggaagttttaaggtgatggcggccgaaaaagagatagacgaagagacacagaccgataaggaccgatggaaagggttggcttacgatatttcggacgaccaacaagacattactcgagggaaagggaatggggattcctttgtccaagcttccatgaatgatggaacttacttatgctggcatggagttccaatgattacatattccatgtcttaaaacggtccaatttggacaacaacattggttggtt

SEQ ID NO: 207904 - DNA, 425 bp, Gossypium hirsutum
atttagctatagcatacactactagtacccactactagcaatggcttcctcaatgatctcatcggctaccattgccactgcctctccggcacaggctaacatggtcgctcctttcaccggtctcaagtctgcctctgctttcccagtcaccaggaaggccaacaacgacattacttctctcgcaagcaatggcggtagagtgcaatgcatgcaggtgtggcctcctactgggaagaagaagtttgagactctctcataccttcccgatcttacacccgtgcagttggctaaggaagtagattaccttcttcgctcaaaatgggttccttgcttggaattcgaattggaggagggattcgtgcaccgtaagtactcgagcttacccacgtactacgatggacgctactggaccatgtggaagctgc

SEQ ID NO: 207905 - DNA, 343 bp, Gossypium hirsutum
tctgttatagcctgtcttctgtcttacccaatgtcttctgtttcttccttctaccgggcttcggcactcttctcgccggttcttcttctctttattacctctctttggcgtcacaactagacttcgatcaccgatcagaaagcagcctccatctcacgtttccattcatctccatcagtgaaactatgttctgtccattggaaccgttccctgtgggtcttgtccatcgactgctaaatacaagggttagtgcatacggaagggtctgatcaacagctgttgtatacacagctgcaattctcgaatacttgactgcagaatttctataactgtcatgttaact

SEQ ID NO: 207906 - DNA, 463 bp, Gossypium hirsutum
ccatctcccacaaaacccttcgacatccgaaccaggcggagttccgcagcgtccgtacgatttagggctttcctgagaccaacgatcacgatgtaccgtactgcagcttctcgcctccgagctctcaaaggtcgcacaagccgtatagcacctgcaaggtttgcaagttcaagcactgttgctacaacatcatcctcttcaggtggcctcttaagttggctgactgggagtcaatccaagtctgtaccatcactagatttccccctacctggtgttgccctaccaccttcattgccaggctgattcagggggccaaactcattttgctcttgcatttgaacttcctggtggttggcacaatgagaaggaagctataattttgaccggtcttcagattctaatgggaggaggtggatcattttcagctggtggccctggaaaaggaatgtattcaagattatat

SEQ ID NO: 207907 - DNA, 418 bp, Gossypium hirsutum
caagaacgaaggaaatagaattttcctctttttttgttttgtgaattcttgagaaatggttgatgtagccgataaattggcatattttcaagccatcacgggactcgaagatcccgatttgtgtacggaaatccttcaggcccatggttgggaccttgaactcgccatctcttccttcacctcttccactcaaccctccgcttcttccactgtctctgattccgaccctcccgattcacgggcccggactgattccgccttcgcctccggtcctattaccgctcccgcaccgggcttagcctggagactcgttacattaccgatttccgtgatatccggaagtttagggttgatctctggcgctgttgggctgggtctatgggccgcgggtggagttctttcgtattcccttgggatg

SEQ ID NO: 207908 - DNA, 467 bp, Gossypium hirsutum
ctttatttgccttttcttttttttttccccttcggagtttgcttttttgcagatcaaggaagaaagttatggcagaagaagaaactgaactgagcgacaagcaaaagaaagagatcgccaaatggttcctcctcaatgctcccgcaggcgaaatccagtacgttgccaaagatttaaaatccgttttgaataatgatgacgtctacgatgaggcggcatcggaagcatttcctgtttataacaaatctcacatgatttgcctcgaaatgcctggtagattcggagatgtgctggttacatcatatggggagcttcaaggtaatgagtatctaaaccccaagactgcccaagttgctatagttgaccatgtcaaacaagtttggacagaggttagacctgccactgatgaggaaacttccactccatatgttgaggaataccgatgtgctctggaagcagaaatgctg

SEQ ID NO: 207909 - DNA, 470 bp, Gossypium hirsutum
gcaaaaaagaaataaaaacagtttcatttccattctaagtttgtgtttttgatttgccttttgggggtttttttttataaaaagggtcatcaaaaatgtttattgagaattttaaggtggagagccccaatgtgaagtacacagagaatgaaattcagtctgtttacaactatgaaactacagagcttgttcatgagaacaaaaatggaacctatcaatgggttgttaaacccaaaactgtcaaatatgaattcaagactgatatccatgtccctaaattgggggtgatgcttgtgggatggggaggaaacaatggttcaaccctcaccggtggtgttatagctaacaaagagggtatctcttgggctactaaggacaaggtacaacatgctaattactttggttcattgactcaagcattaacgatccggattgggtcttacaatggagaagaggattatgctccattt

SEQ ID NO: 207910 - DNA, 456 bp, Gossypium hirsutum
gtcaagtaccagcgtttcaaccagccatgttgtgaatttgaagagagatcaccctttactccatggtcaagctcaagggttaaagcctaaaccctcctctcatttcttattcaatccacactctaacactgttgctgcttcatcatctaaagctttcaccacttttgcactcttcaaaccaaagaccaaagcagctcctaagaaggctgcacctaaaccaaagccaaacgttgaagatggaatctttggcacctatggagggattgattttaccaagcaaaatgagctctttggtggacgtgttgccatgattggctttgctgcatccttattaggtgaagcaataacagggaaaggaattctagcacagctgaacttagagacaggaattccaatttatgaagctgaaccccttcttctcttcttcattcttttcaccctactcggagcaatcgg

SEQ ID NO: 207911 - DNA, 465 bp, Gossypium hirsutum
  unsure (1)..(465): unsure at all n locations
cacaccacaactactatactcccaaaatggctcttacaatccccactaacctctccaaatcccgtttgaagccaaagataaagtccgaactcacccccaaaggttcacgatcattggtggtatgctccaccgacaagacttcatcgccaccatcatcagcttcaccactccaagccttctcagcagctcttgctctttcttccattcttctctcagccccgcagcctgccgtagctgatattgcaggcctcacaccatgcaaagagtccaagcaattcgccaaacgtgagaagcagcagatcaagaagctggaatcgtcgttgaagctatacgcccctgacagcgctccagctctcgctatcaaagcaaccatcgagaaaaccgagagacggtttgacaactatgggaagtacgggctgntgtgtgggtctgatgggttgcctcatttgatagtgagcggtgatc

SEQ ID NO: 207912 - DNA, 378 bp, Gossypium hirsutum
gctagagacgggattagcttactcaagatttggaatgtaaacaagtgttccggtgtggttggtgcttttaactgccaaggtgctggttggtgcaaggtcaccaagaaaacccgaattcatgatgcatcacctggtacacttacaggttctgtttgtgccaacgatgttgattcgatcgctcaggttgccggtgcggactggaacggggagagtgtggtttatgctcatagatcaggagagctggtacggttacctaaaggtgcttcagtgccggtaacacttaaggttctcgagtatgaactatttcacttctgtcccgtcaaggaaatttccaacaccatttcatttgcaccaatcgggcttcttgacatgttcaac

SEQ ID NO: 207913 - DNA, 330 bp, Gossypium hirsutum
  unsure (1)..(330): unsure at all n locations
gaactaattccccaaaatttgtttcagtaatggctgcctcagttatggcttcttcagttaccgtcaagccttcattcaatggtgagaaacctggtgtaagaggggttccttcccttgctaggtccccttcttctttcaagggtgaagccagtggtggcaagaagatcaagaccgacaagccttacggaatcaatggtggtatgagcttganggatggtgttgatgcctctggaaggaagggtaagggaaagggtgtttaccaatatgttgacaaatatggtgctaacgtcgatgggtacagtcctatctacaacaccaacgactggtctc

SEQ ID NO: 207914 - DNA, 314 bp, Gossypium hirsutum
tcgtccacgcgtccgtctttctcttcatatataatctttattttcaaacaccctaaatttacaaccgcatattccagagaggatttttttttaaaaaatggtgatgaagttaccttatctgggttcttgtttgtttttggttttttttagtttggtttctattgttgcttctgggtctggaaaagggctcccaattctttcattcgatgaaggatataatcagttgcttggggatgataatctagttatccatagagatggtaaagctgttcacttgtctttgaacgaaagaacatggtcggggtttgtgtcac

SEQ ID NO: 207915 - DNA, 450 bp, Gossypium hirsutum
gtcaagtaccagcgtttcaaccagccatgttgtgaatttgaagagagatcaccctttactccattgtcaagctcaagggttaaagcctaaaccctcctctcatttcttattcaatccacactctaacactgttgctgcttcatcatctaaagctttcaccacttttgcactcttcaaaccaaagaccaaagcagctcctaagaaggctgcacctaaaccaaagccaaaggttgaagatggaatctttggcacctctggagggattggttttaccaagcaaaatgagctctttgttggacgtgttgccatgattggctttgctgcatccttattaggtgaagcaataacagggaaaggaattctagcacaggtgaacttagagacaggaattccaacttatgaagctgaaccccttcttctcttcttcattcttttcaccctacttcgagc

SEQ ID NO: 207916 - DNA, 423 bp, Gossypium hirsutum
ctttaataatcaatagcacaacatacattctcttctacatataagacttaactgcaactattggggattccacaaatctggggaggtactatgatcctattcatcctgtataccattacttcaacattaaccttggacttcccatctgatcaatctatgaaatttacatgattaacaatcaccatgaatcaaatgtatatgatccactgtaacctaggtagcaaatacttgcatgatcctatatcatttaatgaatctcttgctcgctacttctgatcacacccaataggacttacaaattaaccattaatccatatattggacagatcatactaactcatccatatatcatgattcctaagtaatggaatatccatttacttaatgcaagctatgcttagaacttcaatggtccaaccatca

SEQ ID NO: 207917 - DNA, 454 bp, Gossypium hirsutum
aacccccattctcccattatctgtaagagaagagaagcttttgaataggtcttcaatggctggggctacttcggtttcagtggcgggggtttaagggaagtttacggaagagttcctttaatggaggtgaagattatgccatgttggcggctaaatcgactcccaacgtcgttcgaatcggaaagccagatcgagctcaggcgatgatgaagaacgttaatgaagggaaaggggtgttcgcgccgcttgtggtggttactcgccaaatcgtcggcaaaaagaggttcaatcagcttagaggaaaagctattgccttacattctcaggtaattaacgaattttgcaaagcacttggggcagatggtaaacaaaggcaaggattgattcctttggcaaataagaatggcgagaagctaggattccttgcctgacttatggccttacacgtggactt

SEQ ID NO: 207918 - DNA, 461 bp, Gossypium hirsutum
agccaacatggcctcattagcagcctccaccgctgccgcctcccttggcgtctctgaaatggggggtaaccctctgaatttcagtggtggagctaggtcatcggctccaacaccatccaactcatccactttcaagaccgttgctcttttctccaagaagaaggccgctcctccaaagcccaaggctgctgctgtcgccccggccgatgaagagctggctaagtggtacggtccggacagaaggattttcttgcctgaaggtctgttagacagatcggagatcccagagtacttgaacggagaagttcccggagactatggatacgatccgtttggtctgagcaagaagccagaagactttgcaaaatatcaagcatatgagttgatacacgcaaggtgggcaatgcttggtgctgcagggttcatcatccctgaagcctttaacaaatttggtgccaact

SEQ ID NO: 207919 - DNA, 403 bp, Gossypium hirsutum
aaaagccttctcactgtacgccctgaaactgagacacctgtcagtgctgcttccatccgaagggttctagggttccagctgatatgcctctctatgatattctgaatgagtttcaaaagggcagcagtcatatggcagctgttgtgaaggctaaaggaaaaaataagaaccttcctccgactgttgacggactgaagtctgaagaaaacaaagtctccagtgcagatacccagctgactactcctctgttatccaagctggatgagaagccagagagcattgtacttgacgttgataagttgtcaagacctaccaatacaagcaggctagatgctgtgacaaatggattgtctgtcacatcagaggacattgaagatggtgaagtgattgggattatcaccct

SEQ ID NO: 207920 - DNA, 312 bp, Gossypium hirsutum
tcggccttgacatttgatgtttctacttcaccattcttcaacaagtacttttattgcctggtgtggggtttaaggaacttgagttcactgggacaaaatcttgtcactagcacttatgtgggtgaaataatttttgtcatcattattgcaacccttggtctggttctcttttcgctgctcattggtaatatgcaaacataccttcaatctactactgtcatgttggaagaatgtagaattaggagaactgatacttatcaatggatgcgtcacaggcaactttcttctgagctaaatctatctgtatgaaaa

SEQ ID NO: 207921 - DNA, 283 bp, Gossypium hirsutum
atatttagctatagcatacactactagtacccactactagcaatggcttcctcaatgatctcgggggctaccattgccactgcctctccggcacaggctaacatggtcgctcctttcaccggtctcaagtctgcctctgctttcccagtcaccaggaaggccaacaactacattacttctctcgcaagcaatggcggtagagtgcaatgcatgcacgtgtggcctcctactgggaagaagaagtttgagactctctcataccttcccgatcttacacccgtgc

SEQ ID NO: 207922 - DNA, 411 bp, Gossypium hirsutum
cccacgcgtccgctcagaaaccgctgaaaaactcgaaccccacccgaagacactggccatttgggggttaatttgaagctgaagggaggtgggattttttttcttcgagcctttgattcaatggctctttatttattgtacgaatcatcttctgggtatgcgctattccaagctcaagggctcgatgaaatcggtcaaaacacagaggctgttaggaactcggttgctgatctgaaccggttcggtaaggtggttcaactcactgcttttcagccttttgaatccgccattgatggtctcaaccaatgcaactctgtttctgaagggctaatgaccgatgagttaaggagttttcttgagcttaatctccctaaagttaaggaaggcaataaatccaagtttagtcttgga

SEQ ID NO: 207923 - DNA, 424 bp, Gossypium hirsutum
gtttctttttcctccttcgacgagcgatggacacgttctattcgttctttgattctcaatcgagaatccagcgtaattacaacagtctcaagaatttccgtcacatctctccaatcgttcaaacgcatcttaaaaaggtttatatgaccctatcacgtgcgcttgatgcctctgcgattggtgcttatcttcatataatttggaacattgtgggttacctcactacatttgcatgccttggatccataatttgtatccattatacccattcttgtcaagagcaaaatagggattctcttctaatggcatcacgcgtctctgaaagagcttcaattcgtcctctaaatgacttgggcattcaaattgacccaactgttctggtaactgcattccttggaacagcatttgcctttgcatgcttttc

SEQ ID NO: 207924 - DNA, 407 bp, Gossypium hirsutum
gcgactcgttcgtctcactccggcatcttcaataatttcttccgttgatctttgttagagattagctttttaatgtttcattatgggaaagatcaagatcggaatcaatggatttggaaggatcgggcgtttggttgctagagttgctctccaaagcgatgatattgagctcgttgctgttaacgatcctttcatcaccactgaatacatgacctacatgtttaagtacgacagtgttcacggtcaatggaagcatcatgagcttaaggtgaaggactcaaagacccttctctttggtgaaaagcctgtcacagttttcggtatcagaaaccctgaggaaatcccatgggctgaggctggagcttagtatgttgttgagtctactggtggttttactgacaaggaca

SEQ ID NO: 207925 - DNA, 457 bp, Gossypium hirsutum
gtttgaagctccagaggaagcagaaggcgacgatgatggaatatcagaagaagagccagtagggggattttggagtgggtttatatggctagttggaatgactgttgtcatttctctcctctctgaatatgttgtagaaactattgaggatgcctcggatacttggggaatttctgtaagtttcatcagcattattctgctacccattgttggaaatgcagcagaacatgcaggagctatcatttttgcttttaaaaataagctggatatttctttaggtgttgcattagggtctgcaactcagatttccatgtttgtggtcccactctgcgtccttgtctcttggattatgggcattaacatggatcttaatttcaatctccttgaaactggctctctcgctctatccattattgcgtgtgccttcactttacaggatggcacttctcactacatg

SEQ ID NO: 207926 - DNA, 315 bp, Gossypium hirsutum
cccacgcgtccgatttaatgttaggctatggaggacattcacggaatggtttaactgccttggagtggcagcattaatcgatgagaagattctgtgcatgcatggaggcctttctcccgatctgaataatttggatcatattcgaagtttacaacgcccgactgatgtaccagacacaggtttgctctgtgatcttctttggtcagatcccagtaaagatgttcaaggttggggaatgaacgacagaggtgtttcatttacttttggtcctgacaaagtgtcagagtttttacagaaacatgacctacatctcat

SEQ ID NO: 207927 - DNA, 392 bp, Gossypium hirsutum
cccactcgtccgaggtaacacacctggctgttcatcatcagcttgtgtctatggcattcaatggggagactcatctttctcagttggaatctttgctaaagaaaagctcaccttgacatcaactgatgtgttcgatgactttctatttggttgtggccaaaataatcaaggtcttttcggaggggcagccggattgataggacttggccgagataaattatctctaccttcacaaaccgcctctaaatacaggaaatacttctcctactgcttgccatcatccttcagctcaacaggtttcctcagttttggctacggtggtgtatcgaaattcgtaaatttcacaacgttgaccactatctcccaaggtacatccttttacggaattgaca

SEQ ID NO: 207928 - DNA, 288 bp, Gossypium hirsutum
cccactcgtccgtctttctcttcatatataatctttattttcaaacaccctaaatttacaacgacatattccagagaggattttgttttaaaaaatggtgatgaagttaccttatctgggttcttggttgtttttggttttttttagtttggtttctattgttgcttctgggtctggaaaagggctcccaattctttcattcgatgaaggatataatcagttgtttggggatgataatctagttatccatagagatggtaaagctgttcacttgtctttgaacgaaag

SEQ ID NO: 207929 - DNA, 465 bp, Gossypium hirsutum
  unsure (1)..(465): unsure at all n locations
ttgggttgcaatggcacaagcaatggcatcgatgactggtttacgtggctcttcacaagctgggttggaaggtagtctccaactgagcggccaaactcggttgaacgttgctagcaccaacaggttggctgtggctagacccggttttaccgttagagctcaacaggtccctgccgagcctgaaactggacgcagagctgtgctgggtcttgttgctgctggtttggctactggctcctttgttcaagctgtgcttgctgatgcacgaagcatcaaggttggcccgccttcaccggcctccggtggattgcccggaactttgaattccgatgagccaagagaccttgatctgccgtacaaagatcggctnttccttcaaccattgacttcggcacaagcggctcagagggcaaaggaatcagccaaagacatccttggtggcaagaccttgatcgacaaaaagca

SEQ ID NO: 207930 - DNA, 423 bp, Gossypium hirsutum
gaagaagatgttaagctaggagcaaacaagttctcatagagacaacctattgggacatcaggggagacagacaaggactacaaggagccaccagcagcacccttctttgagcctggtgaactcaaatcatggtctttttacagagctggtattgccgagtttgtagccaccttcttgatcctttacatcaccgtcttgacatgcatgggtgtgtctcaatctaaaaccaaatgtgcaaccgatggtattcaaggcattgcttgggcttttggtggcatgatctttggccttgcttactgtactgccggcatttcaggtggtcatattaaccctgctgtgacctttggattgtttctagcaaggaaactgtcacttacaaaggcattgatctatatgatcatgcaatgcctgggtgctatctgt

SEQ ID NO: 207931 - DNA, 449 bp, Gossypium hirsutum
  unsure (1)..(449): unsure at all n locations
cccacgcgtccgctctgtatagattcttctagttccgaccaaaaaaacaattgctcatctttcgcttcanagaatatttgttttgagtgaaaaaaaaaatgttgggagtattcagcggagcgatagtgtccccgccggacgagctggtggcggccggttgcaggacgccgtcgcctaagataacggcggacgctcttgtgaaacggttcatcgaggcaaacccctccaccgtgtccttgcagatcggagatcatgtccaattcgcgtattctcaccgtaacgagtctgctttacttcccaggtcattcgcggtgaaagatgaaatattctgcatgtttgagggggcacttgataacttagggagtttaaagcagcaatatggacttggtaagtcagcaacagaggtggtgttggtgatagaagcttacaaggctcttcgtgacagagca

SEQ ID NO: 207932 - DNA, 446 bp, Gossypium hirsutum
attgctctcaattggtgttactgctactgaaagaatttgcccttgagttccaaaggaataggatcaatggccatgaatgtcagcagtgcctgtttctcagttttgagttgcaagaaacccaaccgaataagagcggatgcttccgaggattttgccactaccgctgctctcaaaacagatacagaagacaaattgaggttaggaggatcggagctcaaagtgacaaggctcggaatcggagcttggtcttggggtgacaccagttactggaacaactttcaatgggatgatcaaaaattgaatgctgctaatgctgctttcaatggaagtcttgattgcggaattacgttcttcgatacagctgaactttatggctctccgctcgccttacgtgctgaaaattctgaaactctactgagaagatttataaaggaaagagaaaatga

SEQ ID NO: 207933 - DNA, 404 bp, Gossypium hirsutum
gcgactcgttcgaatgaatcatcccaatattgtgaatcttaatgaggtcattagggaaaatgacattgtgtactgtgtgtttgaatatatggaatgcaacctataccaacttatgaaagacagggaaaagcttttttcagaacttgacattagaaattggtgcttccaagtctttcaaggtcttgcatacatgcaccatcgtggttattttcatcgtgacctaaagcctgataatttgttggttactaaagatataatcaaaatatctgattttcgtcttgctcgtgaaataatctcacgttcaccgtacacctgatatgtctcaacacgcttgtatcgtgcccctgaagtacttcttcaatcatacctattcactttaaaaattgatattgtggccattggtt

SEQ ID NO: 207934 - DNA, 430 bp, Gossypium hirsutum
gccattgctgtttgccacggatttgctctctttgcagtggctatcggtgccaacatctcaggtggccatgtcaaccctgcagtaacttttgggttagctcttggtggccaaatcaccatactcactggcatcttttactggattgcccaacttcttggatccattgttgcttgcttcttgctcaaggctgtcactggtggtttgacagttcctatccacggtcttggagctggagttggagctattcaaggagtggtgatggagatcatcatcacatttgcattggtttacacagtgtatgcaaccgcagctgacccaaagaagggatcactcgggaccattgcacccattgccatcggcttcattggtggtgccaacatcttggccgctggtccattctctggtggatccatgaacccagctcgctcct

SEQ ID NO: 207935 - DNA, 307 bp, Gossypium hirsutum
tcgcttcttcgaaactcagctgaaatgtctactttaacaatgagcttcaatttggcgggggcatgggggcgtctttctctagcatcaagctcgacgtcggcctttatgaaaggcgaagtgggctccattcacaaaacggcagtctgttcgttcccgaggtagtctcctttccctttgacgatcgaatctgcgcacaaaaaatgagccggtagttctaaatactgtcgcgattcataggttcaactactctgcttcaaaatctacggcgaccagttcgtcaatcccctgccttattatacgttatggt

SEQ ID NO: 207936 - DNA, 429 bp, Gossypium hirsutum
ttagtctcccctccatccacatctccttccttcagctctaagagccttaaaacaagttcactggttggagaatcattaagggttggtccaaggtcatcattgaaggtttcaaaggcaaagcacactacttcactagtgacaaaatgtgaaattggagagtctttggaagagtttctcacaaaggcaacaacagataaggcattgattagattaatgatgtgtatgggtgaagcattaagaacaattgcttttaaagttagaacagcttcatgtggtggtactgcttgtgttaattcctttggtgatgaacaacttgctgttgatctacttgccaacaagcttctttttgaggctttgacatactcgcacttttgcaaatacgcgtgctccgaagaaattcccgagctttaagacatgggaggacctgct

SEQ ID NO: 207937 - DNA, 231 bp, Gossypium hirsutum
cccacgcgttcggtccgtctcacttcaagctgcagctaccctgatgcaaccaatcaagacgggggcaccatcaacgaccaatgtgctgctcaggtcctcccagagcgcatataacgcctctcacttgcatcctgtactggctaggcgcacctgctgtatgcatactgacctgaaggactctactcagacgcacgtttatgctaccaagctctatggcctcgctcttgctac

SEQ ID NO: 207938 - DNA, 443 bp, Gossypium hirsutum
cccacgcgtccgctttgaattgaaaccctcaaaattccacttaaaaaatggcctccacagcttccctctccaccgccgtagccaccacctctttcctccgcggccacccggccccgaaaaccctaagctcccttcctttcaaccaatctcttttcgggctaaaaccccaacgaaatggccgtctcaccatggctgcatacaaagtgacactgttaacacccgaaggaccccaagaattcgtgtgccccgacgacgtttacatcgttgaccaagctgaggaagaaggcattgatcttccgttctcgtgtagggctgggtcttgttcttcgtgtgccggaatgattaagcaaggctccgtcgatcaatccgacggtaatttccttgatgatgaccagattgctgcaagttttgtcctcacttgtgttgcttaccctcagagtgat

SEQ ID NO: 207939 - DNA, 296 bp, Gossypium hirsutum
gtgctaagttctgttatggtatcacaatcactctcatcgcctataacatcgtatctgcacgaggtgcggctgaatacttgcgggtgaccgaagatgtggcgaaggggactttagtttacaagctccaagtcatcttcaattcctgcatcttacatggctggagggactatattgtgactcttcacaccaccaaagcctttcctttatgggctgaagaccttacgattacgagcagatgtatcgaaaccattgctttgaacgcgtgcacacactcttgcaaggtgaacttgtcacat

SEQ ID NO: 207940 - DNA, 271 bp, Gossypium hirsutum
  unsure (1)..(271): unsure at all n locations
gtgctaagttctgttatggtatcacaatcactctcatcgcctataacatcgtatctcacgagctcggctgaaacttgggaggaccgaatatgtggcnaaggggaatttagtttacaagctcgaagtcatcttaaatatctgcatcttacatggttggagggactctattgtgactcttcacaccaacaaagcctttcctttatggtctgaagaccttaggattacgagcagatctatcgaaaccattgctttgaaaacttgcaaacactct

SEQ ID NO: 207941 - DNA, 367 bp, Gossypium hirsutum
gcggtgagactctgatgtataactgtagcatatagttctagtaagctgtaatagcaatggccttcggcatgatctcatcggcaaccagtgccaccgtgaactgctcctccccggctcaggccaacatggtggcccccttcaccggcctgaaatctgcctctgctttcccagtcactaggaaggcctacaacgacatcactaatcttgcaagcgatggtgggagagtgcaatgcatgcagagtgtagcctcctctagggaagaagaaggtcgagacactctcatacctgcccgatcttacacccgtacactttgctaatgaagtagattaccttcttcgctctaaatggattccttgcttgcaattcg

SEQ ID NO: 207942 - DNA, 415 bp, Gossypium hirsutum
  unsure (1)..(415): unsure at all n locations
gtgagactcttttgtataactgtagcatatagtactagtaagcagtaatagcaatggcctnctgcatgatctcatcggcaaccattgccaccgtgaactgctcctccccggcacaggccaacatggtggcccccttcaccggcctcaagtctgcctctgctttcccagtcactaggaaggccaacaacgacatcacttctcttgcaagcaatggtgggagagtgcaatgcatgcaggtgtggcctcctcttgggaagaagaagttcgagacactctcataccttcccgatcttacacccgtacagttggctaaggaagtagattaccttcttcgctctaaatggattccttgcttggaattcgaattagaggagggattcgtgcaccgtaagtactcgagcttacccacgtacta

SEQ ID NO: 207943 - DNA, 390 bp, Gossypium hirsutum
cccacgcgtccgcccacgcgtccgcccacgcgtccgaacaaaatcagttgcttcacaatggggtctacaaccatggctctttcttccccatcattcgccggtaaggcagtgaagttctccccttccacccctgaaatccggggaactggccgtgtttccatgaggaaaaccaccaagcctgttccttctggtagcccatggtacggtcctgaccgagttttgtacttgggtccactttccggtgagccaccatcttacttgaccggtgagttccctggtgactatggttgggacactgctggactctcagctgatcccgagacctttgctatgaaccgtgagctcgaagtcattcactgcaaatgggccatgttgggagctctggggtgt

SEQ ID NO: 207944 - DNA, 472 bp, Gossypium hirsutum
agaacattagcttcactgtttgggatgttggtggtcaggacaagattcgacctttgtggaggcactatttccaaaacactcaggggctaatctttgttgttgatagcaatgaccgtgaccgtgtggttgaggccagggatgagcttcatcgtatgctaaatgaggacgagctgagggatgctgtgcttcttgtgtttgcaaacaagcaagatctgccgaatgctatgaatgctgctgagattactgataagcttggccttcactcccttcgtcagcgccactggtatatccagagtacttgtgccacctttggcgaagggctgtatgagggactggactggctttccaacaacattgctaacaagggttgagggttggttgaattccagtcatatcttcaggcagctatcctattattttctgggtccttttttaagttttacaggaaatgtatcagattgtgttatataat

SEQ ID NO: 207945 - DNA, 331 bp, Gossypium hirsutum
cccactcgtccggaggagttgtgcaagcactacaccaaagattttggaatcgagtgtcgtatgggaaggtttcacaacatttatggtccttttggaacatggaaaggtggaagggagaaggctccagctgccttttgcaggaaagctattacttccattgacaagtttgagatgtggggagacggtcttcagacccgatctttcaccttcattgatgaatgtgtcgaaggtgtacttagattgacaaagtcagatttccgcgaacctgtgaacattggaagtgatgagatggtcagcatgaatgagatggcagagattgttcttagctttg

SEQ ID NO: 207946 - DNA, 314 bp, Gossypium hirsutum
aacgacattacttctctcgcaagcaatggcggtagagtgcaatgcatgcaggtgtggcctcgtactgggaagaagaagtttgagactctctcatacctccccgatcttacacccgtgcagttggctaaggaagtagattaccttcttcgctcaaaatgggttccttgcttggaattcgaattggaggagggattcgtgcaccgtaagtactcgagcttacccacgtactacgatggacgctactggaccatgtggaagctgcccatgttcggttgcaccgactcggttaaggtgttgaaggagcttgaggaatg

SEQ ID NO: 207947 - DNA, 458 bp, Gossypium hirsutum
cccacgcgtacgggcggcagagtgcaatgcatgcaggtgtggactactactggaaagaagaagggggagactctctcatacctccgcgatcttacacccgtgcagttggctaaggaagtagattaccttcttcgctcaaaatgggttccttgcttggagttcgaattggaggacggattcgtgcaccgtaagtactcgagcttacccacgtactacgatggacgctactggaccatgtggaagctgcccatgttcgggtgcaccgactcggctcaagcgttggaggagcttgaggaatgcaagaacgcataccccaatgcattcattagaatcattggcttcgacaacgtgcgtcaagtgcagtgcattagttgcattggctacaagcctccaagcttctaagctctttattaacttagtctctacattcgattgaatttggactcaaaaaaaccatg

SEQ ID NO: 207948 - DNA, 258 bp, Gossypium hirsutum
cttacacacgtgcatctcattaacgcagcacattaccttcgaacgctaaaaagggttcctcgcttgcatgaccaatagaagcatgaattcgtgcaccctacttactatagctaccgcgctactactatagacgctactgtaccatgtgcaaactatccaagctcgagtgcgccacctatgctcatcagtagtaggagcttgagaaatccaataatgcataccccaatgcattcattagaatcatttgctttgacaacg

SEQ ID NO: 207949 - DNA, 428 bp, Gossypium hirsutum
cccacgcgtccgggcggctgagtgcagtgcatgcaggtgaggcctactactggaaagaagatgggggagactctctcatacgtgggcgatcttacacccgtgcagttggctaaggaagcatattaccttcttcggtcaaaatgggttccttgcttggagttcgaattggaggagggattcgtgcaccgtaagtactcgagcttacccacgtactacgatggacgctactggaccatgtggaagctgcccatgttcgggtgcaccgactcggctcaagtgttggaggagcttgaggaatgcaagaacgcgtaccccaatgcattcattagaatcattggctttgacaacgtgcgtcaagtgcagtgcattagtttcattggctacaagcctccaagcttctaagcttcgtattaactttgtctctccat

SEQ ID NO: 207950 - DNA, 385 bp, Gossypium hirsutum
  unsure (1)..(385): unsure at all n locations
catcattttccttctgctaccttctctcaacccaaacacatatttcccaggaaaaagaaaaaggttgagcgaacaagaaaatggccgatcagcttaccgacgatcagatctctgaattcaaggaggcctttagcctgttcgacaaggatggagatggttgcattactaccaaggagttgggaactgtgatgcgatcacttgggcagaaccccactgaggcagaactgcaagatatgattaatgaagtcgatgctgatggaaatgggaccattgattttcctgaattccttaacctgatggcaagaaaaatgaaggatacagactctgaggaggagcttaaagaggcattcanggtgtttgacaaggatcagaatgggttcatttc

SEQ ID NO: 207951 - DNA, 259 bp, Gossypium hirsutum
gcctgctttgaccgacatctttggagatgattccgtactacaattcggtggaagaactttaggggactcttggggaaatgcaccgggtgccgtaactaatcgagtagctttagaagcatgtgtacaagctcgtaatgagggacgtgaccttgtccgcgagggtaatgaaattattcgcgaggctagcaaatggagtcctgaactagctgctgcttgtgaagtatggaaagggatcaaacttgaattctacgcagtggat

SEQ ID NO: 207952 - DNA, 459 bp, Gossypium hirsutum
cttttgtataactgtagcatatagtactagtaagcagtaatagcaatggcctcctccatgatctcatcggcgaccattgccaccgtgaactgctcctccccggcacaggccaacatggtggcccccttcaccggcctcaagtctgcctctgctttcccagtcactaggaaggccaacaacgacatcacttctcttgcaagcaatggtgggagagtgcaatgcatgcaggtgtggcctcctcttgggaagaagaagttcgagacactctcatacctccccgatcttacacccgtacagttggctaaggaagtagattaccttcttcgctctaaatggattccttgcttggaattcgaattagaggagggattcgtgcaccgtaagtactcgagcttacccacgtactacgatggacgctactggaccatgtggaaactgcccatgtttgggtgcactgac

SEQ ID NO: 207953 - DNA, 266 bp, Gossypium hirsutum
ctataacatacactactagtacccactactagcactggcttcctcaccgatctcatcggctaccagtgccactgactggccggcagaggctaacatggccgctcctttcaccggacaaaactgggtctttgctttcatagtcaccaggaaggccagcaacgacattacttcgttggcatgcaatggctggcgagtgcaatgcatgcaggtgtgggcttgtactagaaacatgaacctcgagacgctattatacctcctcgatggta

SEQ ID NO: 207954 - DNA, 340 bp, Gossypium hirsutum
gaaagaagaaaaaaaaaacagcaacagcagctgcgggaaaagatggtttcggggtcagggatctgcgccaaaagggtggtggtagatgcaaggcatcacatgttgggaaggttagcgtcgacattggctaaggaattgttgaatgggcaaaaagttgtggttgtaagatgcgaagaaatttgcatgtcgggtggattggtgaggcagaaaatgaagtacatgaagttcttgaggaagcggatgaacactaaaccttctcatggtcctatccattttcgtgctcctgctaacatcctatggcgtaccattcgtggaatgattcctcataagactaagcgcg

SEQ ID NO: 207955 - DNA, 384 bp, Gossypium hirsutum
acgaaagccaatttaaggtcactcaacaagtgcgcatcgccttttctatcggtaaatatcaagacgaagtcgtgtgcgacgtagtacctattcaagcctgccatttattgctaggagaaccatggcaactggatcgaaaagtcactcacgatggtcgtaccaataggtattccttcaagcatcaaggaaagaaacttaccttagtgccgctcactccggaacaagtccatgagggccaaatcaaactgagaaattctgttaaaacaagtgaggaaaaagaaaaaaagaatgaaaaagagcaaaaagagattgagagtgaaaaggaatgtgaaacagaaaagaaatttgaaaaagaagttgaagaaagaagagaaaatgagttag

SEQ ID NO: 207956 - DNA, 402 bp, Gossypium hirsutum
caccaacaaaatcagttgcttcacaatggcctctacaaccatggctctttcttccccatcattcgccggtaaggcagtgaagttctgcccttccacccctgaaatccggggaactggccgtgtttccatgaggaaaaccaccaagcctgttccttctggtagcccatggtacggtcctgaccgagttttgtacttgggtccactttccggtgagccaccatcttacttgaccggtgagttccctggtgactatggttgggacactgctggactctcagctgatcccgagacctttgctaggaaccgtgagctcgaagtcattcactgcagatgggccatgttgggagctcttgggtgtgtttttcctgagcttgtggctaggaacggtgtcaagtttcgtga

SEQ ID NO: 207957 - DNA, 401 bp, Gossypium hirsutum
ccacgcgttcgcccacgcgttcgcccacgcgtccgctgctctggttcatcagtggctcaaccaatgcgcaaggtcctgtcaagaaaagggcattcatatatgggacggtaacgcgtccagggagtttcttgacagtatccggttgactgatagggaggagggtgacttgggacctgtgtatgggttccaatggagacattttggtgccaggtatactgacatgcatgctgactacaccggacaaggatttgatcagttgttggatgttattgacaagattaagaataatccaaatgataaaaggattatactctcaacctggaatccttttgatcttaaactgatggcgctttcaccttgccacatgtttgcttaattctatgtagcaaaatggggagtta

SEQ ID NO: 207958 - DNA, 420 bp, Gossypium hirsutum
agtagagcttctttctatctatatccttatcagctttcaaagatggcaggaatcgcctttggtcgcttcgatgattccttcagtttggggtctgtcaaggcctaccttgctgagtttatctcaactttggtgtttgttttcgccggcgttggctctgccattgcttacaacaagttgacaactgatgcagccctagatcccgatgggctagtcgccattgctgtttgccacggatttgctctctttgttgcagtggctatcggtgccaacatctcaggtggccatgtcaaccctgcagtaacttttgggttagctcttggtggccaaatcaccatactcactggcatcttttactggattgcccaacttcttggatccattgttgcttgcttcttgctcaaggctgtcactggtggtttg

SEQ ID NO: 207959 - DNA, 463 bp, Gossypium hirsutum
ctttcgtgtggaattcttttggtactatagctgcactcattcaggagatagtttcaatttatcctgttctctcacctccaaatctgactccagctcaatcaaatcgagtttgtaatgctcttgctctgcttcagtgtgtagcttctcatccagacacaaggatgttattcctgaatgctcatatacccttgtatctgtatcctttccttaatacgaccagtaagtcaaggccgtttgagtatttgaggcttactagcttacgtgtcattggtgccttggtgaaggttgatgatactgaagttatcagcttcctcctgtccactgagataatcccattatgtctgcgcacaatggagatgggcagtgaactgtcgaaaacagttgctacttttatagttcagaagattctactagatgatgttggcttggactatatttgcaccactgcagagcggttttttgc

SEQ ID NO: 207960 - DNA, 373 bp, Gossypium hirsutum
aagacattcaatgaagctttggattctacccttaccatcatctggaatggaccaacgggagtgggtgaatttgagaaagttgcagttggaactgaagctattgcaaagaaactagctgaacttagtggcaagggagtgacaacaatcattggaggtggagactctgatgctgctgtaaaaaaggttggagttgctgatgtcatgagccacatatcaactggtggtggtgccagtgtagaattgttggaagggaaggagcttacaggtatgattgtcctggatgacgctgtttcagttgctgtgtaagatcgaatcaaatttttcacatcctcactgcgtagtgatttattcacacaataaatgctttatgatg

SEQ ID NO: 207961 - DNA, 469 bp, Gossypium hirsutum
  unsure (1)..(469): unsure at all n locations
atggactaaagttcctcatggtaaagagcaaaattagaggactttgaattaatctttaagatcatacttttttgaggaattaaccatgacaaatagttttttttataggttgttattatctagttgatgctggatacataaattgtgagggatttcttgcaccttttagaggacaaagatatcatttgaatgagtggcgtcagggttactagccaagtactccggaagaatttttcaatataaaacatgcttcagcacgtaatgttattgaaagatgctttgagatattaaaacttagatggagaatacttaggagtccatcattctatcttgtgagggtgcacaatagaattattattgcatgttgtttgcttcataatttgatagatgacgatgaatcgaatatcgtaaatattcatctatcggatgcatgagctacttngaggatgaaactagccaaccaaatgtt

SEQ ID NO: 207962 - DNA, 456 bp, Gossypium hirsutum
aattcagttaacaatttcacagttgttttcttcagtctctctctcagccatggctgcagccatctccaccgtcgctgccgctgccgccgccaaccgagctctgggagtgtcagtcccaacctcagctttcatggggaagaaagtgagctcaagattcaacagcaccaggcaggttccttcgggaagttttaaggtgatggcggcggagaaagagatagacgaagagacacagaccgaaaaggaccgatggaaagggttggcttacgatatttcggacgaccaacaggacattactcgagggaaagggatggtggattccttgttccaagctcccatgaatgatggaactcactatgctgtcatgagttcctatgaatacctcagccaaggtcttaaaacgtacaatttggacaacaacatggatggtttctacattgctcctgcattcatggacaa

SEQ ID NO: 207963 - DNA, 384 bp, Gossypium hirsutum
ctcaaagcaaagcaaaaggcaattaagccatgtcaaagctggtggtgttgcagccgagaaagcagcctcccatctcccgcctctcttcctctctttcccacttcaatggcaccaagctctgccaaatccagtacaagagaaaggtatatcagccaaaaggtgcattgcatattgcagcatccagcaccaagaagattctcataatgggaggcactaagttcattggtgtgtttttatcaagactccttgtaaaagagggtcatcaagttactttgtttactagaggtaaagcaccagttactcaacaattgcctggtggatcagacagtgactacgctgagtttaaatccaagattttgcatttgaaaggagatagaatggact

SEQ ID NO: 207964 - DNA, 432 bp, Gossypium hirsutum
atgatttgttctagcaaccgaggccagttgtttgttcttcatgcaactccaaggggcacgttgaatgccagtggtgtagaggtacaggcttctttatccttggggataatatgctctgccaagttccttctaggaataccacttgcgtgatttgtgctgggaagggatcaacgtgcttctctgactgcaaaggaactggatttcgggctaagtggttgggtgaacctcctctttccaatagtatataatttctctgttattgtctgttgccaaatgttgtaagttgtaaaaccaccataaaatttatttgttttgcccgttgaatagcgtaccttctttgtctccaaattgtaatcacaccatgtattcgtacaatcttatctccttataaatgagagaagaaacaacaattgttacttattgattgaaaaa

SEQ ID NO: 207965 - DNA, 460 bp, Gossypium hirsutum
  unsure (1)..(460): unsure at all n locations
gtgagctcaagattcaacagcaccaggcaggttccttcgggaagttttaaggtgatggcggcggagaaagagatagacgaagagacacagaccgaaaaggaccgatggaaagggttggcttacgatatttcggacgaccaacaggacattactcgagggaaagggatggtggattccttgttccaagctcccatgaatgatggaactcactatgctgtcatgagttcctatgaatacctcagccaaagtcttaaaacgtacaatttggacaacaacatggatggtttctacattgctcctgcattcatggacaagcttgttgttcacatcaccaagaacttcatgtccctccctaacattaaagttcctctaatcttgggtatttggggaggcaaaggtcaaggaaaatcnttccaatgtgagcttgtgtttccaagatgggtatcaaccccatcatgat

SEQ ID NO: 207966 - DNA, 414 bp, Gossypium hirsutum
ggaggttgttgtgagccctccatttgtgttccttacccttgtcaaaagtctgttgcggtctgattttcacgtcgcctctcagaactgctgggttagcaagggtggtgcttttaccggagaagttagtgcagagatgcttgttaatctaggcattccttgggttattattggtcactccgagagaagggctctcttgaatgagtccaatgagtttgttggagataaagtagcgtatgcgctttctcaaggcttgaaagtgattgcttgcattggagagactcttgaacagcgagaatcaggctctaccatggcttgtcgtgctgcacagaccaaagcaattgctgataaagtaacaacatgggataatgttgttttggcttatgaacctgtgtgggccattggtactgggaaagt

SEQ ID NO: 207967 - DNA, 328 bp, Gossypium hirsutum
cccacgcgtccggctcttcagtacctcagtggtgttattctcttcgaggaaaccctttatcaaaaaaccgcttcgggcaagcccttcgttgatgttttgaaggaaggtggtgtcctccctggcatcaaggtcgacaagggtaccgttgagcttaacggaaccaaccgcgagactttcacccacggtctggatggccttgcacagcgatgccagaagtactatgaagctggtgctcgctttgctaaatggcgtgctgtccttaagatcagtgctaatgagccaaccgagcttgcaattcaagaaaatgccaacgggctagctatgtatg

SEQ ID NO: 207968 - DNA, 408 bp, Gossypium hirsutum
gccacgcgtccggctcttcagtacctcagtgttgttattctcttcgaggaaaccctttatcaaggaaccgcttcgggcaagcccttggttgatgttttgaaggaaggtggtgtcctccctggcatcaaggtcgacaagggtaccgttgagcttaacggaaccaaccgcgagactttcacccagggtctggatggccttgcacagcgatgccagaagtactatgaagctggtgctcgctttgctaaatggcgtgctggccttaagatcagtgctaatgagccaaccgagcttgcaatccaagaaaatgccaacgggctagctatgtatgctgccatctgccagcaatgtggccttgatccaatcgtcgaacctgaaattcttgttgacggatcacatgacattcaaaag

SEQ ID NO: 207969 - DNA, 385 bp, Gossypium hirsutum
ctcaaacctgcctctgctcttccagtcaccatgaaggccaacaacgacatcacttggcttgcaggcaacggtgggagagggcaatgcatgcacatattgccaactcttgggaagaagaagtgcgagactctcttatacctggccgatcttactcccgtacaggcggcataaagaagtatattaccttcatcgatctaaatggattacttgctaggaattcgaattagaggaggagatcgtgcaccgaaaatattcgagcttacccacgtactactgaggacgctactggaccatgtatgaactgcccatgttcgagtgcaccgactcggctcacgtgtttaaagatctcgaggaatgcaggaaggaataccgcattgcattcatt

SEQ ID NO: 207970 - DNA, 427 bp, Gossypium hirsutum
ccaacattttcataacaatggctgccatcacaaacgccgctgctacatcctccttgagggggacactcttccccgacgggtacacaagttcagggagattcgtcgccaggtttggctttggcggcaaaaaagcagctcccaagaaagtctcgaaacgaaccccagaccgccctctatggtacccaggagcagtggcgcctgattggctcgatggaagtttggtgggtgattacgggttcgacccgttcgggttaaggaaaccggcggagtacttgcaatatgatttggattctttggaccacaacctggctaagaattcggctggtgagataattggaactaggaccgaagttgccgacgtgaaggcgacgccgtttcagccttacagcgaggtttttggtctacagacgttaagggagtgtgagtt

SEQ ID NO: 207971 - DNA, 390 bp, Gossypium hirsutum
attctctcatttgggttggggtttctggtttacattgagggatcttaaacttgctacgaaccggttttcaaaggaaaatgttcttggagagggtggatatggcgttgtttatcggggtcatttgatcaacggaacgccagtggctgttaagaaaatactcaacaacttaggccaagcggagaaagaatttcgagtcgaagtggaagccattgggcatgttcgtcacaagaatttggtccgccttttaggttactgtattgaaggaacacacaagatgttggtttacgagtatgtcaacaatggaaacttagaacaatggcttcacggagctatgcgtcaacatggatatcttacctgggaagctcgcataaaggttctactttgaacagc

SEQ ID NO: 207972 - DNA, 465 bp, Gossypium hirsutum
  unsure (1)..(465): unsure at all n locations
gcaattgttatgtcgcgtggtgctccattttctgaccaggttgtagaattagattttctatatcctagtgaaggtattcatcggaggtgggatagtggctatcgcatcacttcaaccgctgcaacttgggatcaagctgcttttgtccttagtgttccaagaagaaaacctgcagatgaaactcaagaaacccttcgaacgtctgcttttccaagcacacatgtaaaggagaaatgggcaaagaatctctatattgcatcagtttgctatggtcgaactgtttcatgaactgcctaagttttgttcagattcagatgcaactcattttgttcgatcctgcactngtacaatgagggacgactttactgcttcaatttaaggaactaagctctttagtcagattgattgatcacagcattagagaggtgatgtatgcaaaattctactttatttgcaccatgatgt

SEQ ID NO: 207973 - DNA, 323 bp, Gossypium hirsutum
cccacgcgtccggtgagactcttttgtatacctgtagcatatagtaatagtaagcagtaatagcaatggcctcctccatgatctcatcggcaaccattgccaccgtgaaccgctcctccccggcacaggccaacatggtggcccccttcaccggcctcaaatctgcctctgctttcccagtcaccaggaaggccaacaacgacatcacttctcttgcaagcaacggtgggagagtgcaatgcatgcacgtgtggccgcctcttgggaagaagaagttcgagactctctcatacctgcccgatcttactcccgtacagttggct

SEQ ID NO: 207974 - DNA, 421 bp, Gossypium hirsutum
cccacgcgtacgcccgatcttacacccgtacagttggctaaggaagtagattaccttcttcgctctaaatggattccttgcttggaattcgaattagaggagggattcgtgcaccgtaagtactcgagcttacccacgtactacgatggacgctactggaccatgtggaaactgcccatgtttgggtgcactgactcggctcacgtgttggaggagcttgagaattgcaagaaggaataccccaatgcattcattagaatcattgggttcgacaacgttcgtcaagtgcagggcattagtttcattgcctacaagcctaaaagctactaagttgtttacttcccttctaggaattccatttgtttcaaagttgtacttaaattaagcccctcaaaccccccccccccttttctttttcttt

SEQ ID NO: 207975 - DNA, 320 bp, Gossypium hirsutum
aaacgtttcacgtgatccatacaagacattgtttgttgctagacttaattatgagacatccgagagtagaattaaaagggagtttgagtcttatggaccgattaagcgggttcggttggttactgataaatccacaaataaaccaagaggctatgctttcatcgagtacatgcatactcgggatatgaaagctgcttataaacaagctgatgggaggaagattgatggcagaagggttcttgtggatgttgagcgcggtaagacagtccctaattggcgccctcgtaggctaggtggtggacttggaactaccaagattg

SEQ ID NO: 207976 - DNA, 319 bp, Gossypium hirsutum
aaaatggcatccatcaccatgacaacattattttttagtaccactaacctcacaaagggttctgcaaaaaggacccagcggagacgggtggtggccaatgctgctaatggagctcaagtggagagtgtccatattagcattgagaggaaaacagagggcaacaatggaaggagggagatgatgtttgcagctgcagctgctgctatttgctcgggtgcgggggttgcaacggctgagcctaaacgtggtatcgcataggccaagaaggcgtatgctcctgtttgtgttactatgccaactgctaagatctgtcgcaact

SEQ ID NO: 207977 - DNA, 474 bp, Gossypium hirsutum
  unsure (1)..(474): unsure at all n locations
tgtcgacggcttccatcaacggttggtgccttacctcctcttcttcctccaccaccacctcctctttttccgctcgtcgacgacctacattgcggccttcggtcgtcgctagccttaactcttctccttctcctccgactcttatccaagaccgcccggttttcgctgcccctgttcctttgctcaccccgagagaagagatgggaaacaagtcctacgacgaagccattgaagctctcaagaaacttctcagtgagaaaggagaactgaaagctgaagcagctgcaagggtagatcaaataacagcagagttaaacacaacatcagctgacggcaaaccatctgactcttctgttgagagactgaaagaaggcttcgtttacttcaagaaagaaaaatatgaaaagaatcctgctctgtatggtgagctngccaagggtcaaagccctaagtatatgatcggtgcctgctcgg

SEQ ID NO: 207978 - DNA, 340 bp, Gossypium hirsutum
  unsure (1)..(340): unsure at all n locations
gaaaagcataataaaagattaaaaaaatattgcattcagacaatcatacaatatggggcagttggaattcttatcgaggccttctcttcctaaattatttatttatttcatataccatatacaaggaaattgatttcatatagaaagtatacatagattactatgtatcgactgaaccaatgactattcatgattccataattgaatcaatgctccacactagaggaatgttatcgtaaaacttcctttgaaacgatgtggtagaaagcaacgtgcgacttgaaggacatgatcagctgtggatgtcaaaacccaccactttccgntatgtagaaatgaa

SEQ ID NO: 207979 - DNA, 402 bp, Gossypium hirsutum
ataaattgtagatttcttcggtgccttgagggctcgggtttacgatgacgaagtgaggaaatggatcagtgaggtcggagtcgcaagcgtagggaagaagttagtgaactcaagggaaggacctccaacatttgagcagccaaaaatgaccattgaaaagctattggaatatggaaacatgcttgttgctgagcaagagaatgttaagagagtccaattggctgacaaatacttgagtgaagctgccctcggtgaagctaatgaagattccatcaatagaggaactttctatggcaaagcagcacaacaagttggggttccagttcccgaagggtgcactgatccaaatgctgataactttgatccaacggctagaagtgatgatggaacttgcacttacaa

SEQ ID NO: 207980 - DNA, 383 bp, Gossypium hirsutum
catcattttgcgtggcaatgtcgacggctttcatcaacggttggtgccttacctgctcttcttgctccaccaccacctcctctttttccgctcgtcgacgacctacattgcggccttcggtcgtcgctagccttaactcttctccttctcctccgactcttatccaagaccgcccggttttcgctgcccctgttcctttgctcaccccgagagaagagatgggaaacaagtcctacgacgaagccattgaagctctcaagaaacttctcagtgagaaaggagaactgaaagctgaagcagctgcaagggtagatcaaataacagcagagttaaacacaacatcagctgacggcaaaccatctgactcttctgttgagagactg

SEQ ID NO: 207981 - DNA, 330 bp, Gossypium hirsutum
  unsure (1)..(330): unsure at all n locations
tgagcgcccaagttgtgataagcgtcagcactgctctcttccttttcttgggtagatttgtgttcttcaacttccaaagagagaacgttgccaagcaagtgcctgagcaaaatgggttgacccactttgaggctggggacgcacgagccaaggagtatgttagccttctcaagtccaacgaccctgtgggattcaacatcgttgatgttcttcttggggatctattggccatattggtgcttactacatcttggccaccacaagcaatggctatgatcccaaattttttggctgaacatcagcttcgncttcttaattattctctatttt

SEQ ID NO: 207982 - DNA, 270 bp, Gossypium hirsutum
gttaaaatgcctgaaccgggacgcggtggctgacggcgacgcatagggaggaccggaaactgtctgcggcggctctcgggaagagagatgttttctgtttaacaggcactgcccaccctggaaacgtgctcaaccggagtgtacggtgcagcggctggatgagcaccgcacgtcatgtggtgttccgtgcgcctccggcggaccttgataattctgacgaccgagtgccgtacgcgctcggacgtactcataaccgcatcatgtcttcaa

SEQ ID NO: 207983 - DNA, 339 bp, Gossypium hirsutum
ccaccgcccccgtgtcagcgctggtttgcttttatccccttcaccaatatcctacggtcttgcgtcgaccctttccttcctccgcggaatcgcctccaaaacatcatactccgccgtttctcaacagcaacagcagcagcagcaacaaaagctgatgaaagagcttttgctgaaggagcttgaagaaaccgaaaccctggcgcaaaagatagggaaagccattaagcaccctggctttccttctaagtctagggtttacgccgatgtcaatgttattcgtcctaaagagtactgggattacgagtcccttattgtccaatggggggaacaagatgatta

SEQ ID NO: 207984 - DNA, 466 bp, Gossypium hirsutum
gcccacactctcaaattcagttaacaatttcacagttgttttcttcagtctctctctcagccatggctgcagccatctccaccgtcgctgccgctgccgccgccaaccgagctctgggagtgtcagtcccaacctcagctttcatggggaagaaagtgagctcaagattcaacagcaccaggcaggttccttcgggaagttttaaggtgatggcggcggagaaagagatagacgaagagacacagaccgaaaaggaccgatggaaagggttggcttacgatatttcggacgaccaacaggacattactcgagggaaagggatggtggattccttgttccaagctcccatgaatgatggaactcactatgctgtcatgagttcctatgaatacctcagccaaggtcttaaaacgtacaatttggacaacaacatggatggtttctacattgctcctgcattcatgga

SEQ ID NO: 207985 - DNA, 350 bp, Gossypium hirsutum
cattttcctctgccaacccaaactaaacctttctaattccctttccttttcgacgaggagagaaatccttcacgttcaaggaggccaatgtgggaaccaaattggatccaagttttgggaagtgatctgcggggaacacggcgttgattctactggaaggtacaatgctgatggtgaatcattcgataaccacctggagcggatcaatgtgtattataatgagtcttccggtggaaggtacgtttctcgtgcgggtctcatggatcttgaaccgggtactatgaatagtttcagatcttggccctacggtcagatctttaagccctgtaatttcgtcttttggacaattt

SEQ ID NO: 207986 - DNA, 328 bp, Gossypium hirsutum
gcttaacacacaatatgacttgctccttcagcaacgagctgcaacaaaagtaacattccctcttgtctggacacacacctggtgcagccatcctttatatcaggaatccgagctctatttgtgagaatacatcttgcggtgaggaatgctgtccaaaggaagcttttgagctagctccggattcctgctgaaaacgttcctgttgatcagctcggcccactgagccgcatgctatacaaggcaccttcttaccgtaagtggcgcgaacatgaacttgattacctactattcattgtccgagatgttaatgttcattcaaaccctgatg

SEQ ID NO: 207987 - DNA, 348 bp, Gossypium hirsutum
ggcacaagcaatggcatcgatgactggtttacgtggctcttcacaagctgcgttggaaggtagtgtccaactcaacggccaaactcggttgaacgttgctagcaccaacaggttggctgtggctagacccggttttaccgttagagctcaacagggccctgtcgagcctgaaactggacgcacagctgtgctgggtcttgttgctgctggtttggctactggctcctttgttcaagctgagcttgctgatgcacgaagcatcaagggtgggccgcctccaccgccctacggtggattggccggtactttgaattccgatgagccaagagaccttgatcttgcgtacaa

SEQ ID NO: 207988 - DNA, 334 bp, Gossypium hirsutum
cccacgcgtccggaaaccctcaaaattccactaaaaaatggcctccacagcttccctctccaccgccgtagccaccacctctttcgtccgcggccatccggcgccgaaaaccctaaactcccttcctttcaaccaatctcttttcgggctaaaaccccaacgaaatggccgtctcaccatggcagcatacaaggtgacactgttaacacccgaaggaccccaagaattcgtgtgccccgacgacgtatacatcgttgaccaagctgaggaagaaggcattgatcttccgttctcgtgtagggctgggtcttgttcttcgtgtgccggagtgatt

SEQ ID NO: 207989 - DNA, 340 bp, Gossypium hirsutum
atccatcgccaccaagaggaaaaaagtaaaatatccctactgacgatgttccggcaagcgtcacgcctcttggctcgaactaccagcccatggaggagaagtcgagcattttcgtcagatctaccagccacacccgctcaagattcgaacttcatcgaatcatggtccaaagtcatacccaacatagacccttccaagacaccatcttcttttatgacccctcgccccgccaccccttctgctatcccttctaaactcactggtaactttgttcttccttatgcatctgaactcttcgctaaaaggttgacatgggtatagtttcagcaacaactggaca

SEQ ID NO: 207990 - DNA, 333 bp, Gossypium hirsutum
cggacgcgtgggcttttattgatgaagcaccttcaccggctccagcactagttccttcaacatgggctgacccgacatccattcgggcggacccgtacccgaccgatcccggcgatacatcggactgcattttcgatgtaaccgcatatggtgcggtcggcgacggttctttatacgatacggcggcgtttagggaaacatggaaagctgtttgtactggtgaatcagccaccattttggtaccatctgataacattttcaccatcacttctactatcttttcagggccatgcaaacctggacttgtgctacaagttaatgggggtcttaatg

SEQ ID NO: 207991 - DNA, 413 bp, Gossypium hirsutum
ctcaaagcaaagcaaaaggcaaaatatgccatgtcaaagctggtggtgttgcagccaggaaagcagcctcccatctcccggctctcttcctctctttcccacttcaatggcaccaagctctgccaaatccagtacaaaagaaaggtatatcagccaaaaggtgcattgcatgttgcagcatccagcaccaagaagattctcataatgggtggcactaggttcattggtgtgtttttatcaagactccttgtaaaagagggtcatcaggttactttgtttactagaggtaaagcaccacgtactcaacaattgcctggtgaatcatacagtgactacgctgagtttaaatccaagattttgcatttgaaaggagatagaatggacttcgattttgtgaaatccagtctttctgc

SEQ ID NO: 207992 - DNA, 336 bp, Gossypium hirsutum
cccacgcgtccgcgttttcaaaggaaactcattcttcaagttcgctgtttggcaggggacggtggtcaaaaggagccaatgccaggagcaagaacgccggaacctaagcagagccctccacggatatcacccaaagtgagcacgaaattctccgatgtgtttgcctttagtgggcctgcaccggataggatcaacggcaggttggcgatggtttggtttgtggcagcgcttgcaattggaagtattcaatgggcaagatgtgttgacccaaatattcaacggggggatccctgtgttcgttgggactaagatttgggtatcgcttgcattcttttg

SEQ ID NO: 207993 - DNA, 170 bp, Gossypium hirsutum
gtttctgtttgccacaattttggtagaaaaggtacaattaaatgggaatcgtcgaggaagctcggaacttgaatggacggggttcaggcgatcgagtcatcgttttggctcatgggttcggtacggaccaatcggtttggaagcacttggtccctcacttagtcgacgat

SEQ ID NO: 207994 - DNA, 334 bp, Gossypium hirsutum
  unsure (1)..(334): unsure at all n locations
tttcatatctacatttcttcacactctccgacgaaggaaaccagagaaaaatgaccaagtgttacccaaccgttagcgaggagtaccaaaacgccgttcaaaaggctaagaggaagctaagaggtctcatcgctgagaagaactgtgctccactcatgctccgtctagcgtggcactcagctggaacttttgatgtcaagaccaagaccggaggtccattcggaaccatgaagcaacctgctgagctcgctcatgctgctaacaacggtctcgatattgcagtcaggcttctcgagccgatcaaggagcagntccctattctttcatacgctga

SEQ ID NO: 207995 - DNA, 468 bp, Gossypium hirsutum
cccacgcgttcgcactgctgaagatacaaggatagcaatacaggctggagcagccggtatcatcggcttcaaccacggagctcggcgactcgattatgttcctgccactatcatggccttggaagaggttgtcaaagctgctcaaggtcgggttcctgtcttcttggacggcggtgttcggcgtggaaccgacgtttttaaagcttaggcattgggagcctctggtatatttattgggcgaccagtggtgttctcattagctgctgaacgacaagctggcgtgaggaaagtgctttctatgctgcatgaagagtttgagctaaccatggccttcagcggctgtcgttctcttaaaaaaatcactcgtgaccacaatatgacagaatgggacagttcttatcctcgttcgggcccgagactgtatagccttatatattatgggcttggaactttagcctatcaaatcgc

SEQ ID NO: 207996 - DNA, 219 bp, Gossypium hirsutum
gttctacatcgcgagcggctgcccttcattttttttttttttatggctggagcagccggtatcatcggcgtcaaccacggagctcggcggctcgattatgttcctgccactatcatggccttggaagaggatgtcaaagctgctcaaggacgggtgcttgactactaggacgggggtgttcggcgtgaaaccgacgttttaaagctttagcatttggag

SEQ ID NO: 207997 - DNA, 302 bp, Gossypium hirsutum
gctccatagtcttggaacccaaggacagaagactcttttaacatttcaccgcaaagatggagataacaaatgtgagcgagtatcaagaaattgcgaagcaaaagttgccaaagatggtgtatgactactacgcatctggtgctgaggaccaatggacattgcaagagaatagatttgctttcactaagatactgtttcgtcctcgtattctcatcgatgtaagcaagatagacatgaccacaactgtgttgggtttcaagatatcaatgcctatcatgattgccccaactggcatgcaaaaa

SEQ ID NO: 207998 - DNA, 224 bp, Gossypium hirsutum
atgcgtaaaacggctactgcaacaggcgttcttcaatttggtgggagcatttatgggtcttgctttagcggcaagctcgacgtgggcctttatgaaatgagaagtgggttccattcacaaaacggcagtcctttcgttccctaggaagttttcgttccctttgacgatcgaatcggctcacaaaaaaggagccggtattactaaaaacggtcgctattcaaaag

SEQ ID NO: 207999 - DNA, 148 bp, Gossypium hirsutum
taagaatggagtcaaattcggtgtggctgtgttgttcaaggccggatctcacatcgttatctgaggtgggcttgaccacttgggaaacccaagcttgatccactctcaaagcattatggccatctgggctttccaagttatcttgatg

SEQ ID NO: 208000 - DNA, 216 bp, Gossypium hirsutum
gcggctctggcggttcacttgttccttactacctttaaaagactgcaaactgggggctggacgtaggcaatctgggtgaatcaattggacaggctcgcattaaaggaataactgtgagagcaatggaaattattaaccctgggaaccctactggtcagcatcttactgtagctaatttaagagaaatattgaattttcgattccaagaaaacttgg

SEQ ID NO: 208001 - DNA, 254 bp, Gossypium hirsutum
gcggtaaatggctaccactgcttcttcaatggcgactcagctttagagcagctttaggtcgtctggggcaagaggactggtagtccccaggggcattgcagcatccccgtttaaagtatcttccggaaagaccaggaccccttgcttcactgtcaaagctgttcaatccgacaagtcaacatttcaagtaatccaacccatcaacggcgaccccttcattggaagcctggagacttcaatcaccttaaggccct

SEQ ID NO: 208002 - DNA, 363 bp, Gossypium hirsutum
gaatatgggggagggtcgcacccatcgacaacctttcacttctgtggtgaggtgccaccctgttgcaccctccggactaactgtgcgtgcaagctcatatgccgatgagcttgacaagactgctaaagctattgcttctcctggccgagaaattttggccatggatgagtccaacgctacctaggggaaaccgtatggcctcaatcgggctagaaaacactgaggctaaaccccaaacctacaagacgttgcttgtttcagctcctggccttggtcaagacattttaagtgccatccctctttgaggaaaccctctaataaaccacaattgatggccaaaagatggttgatgttcttggtgaa

SEQ ID NO: 208003 - DNA, 458 bp, Gossypium hirsutum
tcttatccaagaccgcccggtttttgctgcccctattcctttgctcaccccgagagaagagatgggaaacaagtcctacgacgaagccattgaagctctcaagaaacttctcagtgagaaaggagaactgaaagctgaagcagctgcaagggtagatcaaataacagcagagttaaacacagcatcagctgatggcaaaccatctgactcttctgttgagagactgaaagaaggcttcgtttacttcaagaaagaaaaatatgaaaagaatcctgctctgtatggtgagcttgccaagggtcaaagccctaagtatatgattgttgcctgctcggactctaaggtctgcccatctcatgtgctggacatgcaacctggggaagcttttgcggtccgtaatgttgctaacatggtgccaccatatgaccagattaaatatgctggcattggatctggta

SEQ ID NO: 208004 - DNA, 289 bp, Gossypium hirsutum
tctttctcttgctctctttagagtaaatttctcttgcaatcctttgtagagatccgggatccattgtcaccatgtcttgctcaaatctgacaatgtgggtgtcctcaaaaccctctctttctgacacttcttcactctctttccgttctttcatcagcccttttcagctcccgtctcagagctcaacccccggtaacccttccaggtcctcatctgtaaccccagttcactgtggtcttcgtgagcttagagaccgtattgattcagtaaaaaacacgcagaacatcac

SEQ ID NO: 208005 - DNA, 437 bp, Gossypium hirsutum
cgaaaacccattttcctcccatggccgccaccaacacattgatgagctgtggcatcgccaccggtgtcccttcagtgctttcctcttcaaagtccaagttctccaccgctacgccgttgcctagctttggcgccaatgttggtcaccgcgttagcatgtcggctgactggatgcctggtcagcctaagcctccttatcttgatgggtcagcacctggtgactttggatttgatccacttagacttggtgaggtgccggagaaccttgagagatacaaggaatctgagttgattcactgcaaatgggctatgcttgctgttcctggtatattggagccagaggcattggggtatggaaactgggtaaaggcacaagaatgggcagtcgttcctggggggcaagccacttacttaggcaaccctgttccatggggaact

SEQ ID NO: 208006 - DNA, 463 bp, Gossypium hirsutum
gtatggtgagcagaatatccgtcgtgcagttcctttggctcttggtcttctttgtatatcaaacccaaaggttaatgttatggacacattaagcaggcttagtcatgattcggattcagaagttgcaatggctgcagttatctccttgggtttaataggtgctggaaccaataatgctcgcattgctggcatgcttcgcaatctttcaagttattactacaaggatgctagccttctcttttgtgtgcgaattgctcaaggtttagttcatttggggaagggtctattgactcttaatccatatcattctgaccgctttttgctatcaccgactgcacttgctggtttgtttacaatgttgcacgcatgcctcgatatgaaagctatggtactgggaaaataccattatgtcctctacttcattgttctggcaatgcagcccaagatgttgatgaccgtcgac

SEQ ID NO: 208007 - DNA, 475 bp, Gossypium hirsutum
cccacgcgtccgaaaaaaccactgtaattgctcacctcatgcgatgcctaaatagaaacaacgaagaacacgaaggagtaggtttcgttgttgatggatttgactgaaggtgtcggagagagctcatcgccgccgagaagctttggcagcttcaacagctacgatgtcagaaacgacgttttcaatcgcttagtcgaatctggccacgaacaagctatttctaatcctgactttcgcgactttttagattctcacttcaatcgcttgcctgctagctatggacttgatgttaatatggatagagtggaagatgttttgttacatcacaagctgcttgcattggccaaggatccggagaggcggccagtttatcatatccgcttcttggagaacctttgcaccaaagcagatgctattgatgataaacaatatataaattctttatctccccagtcttttgatgatcgagatagtg

SEQ ID NO: 208008 - DNA, 478 bp, Gossypium hirsutum
ccagcatttttcttttcacagatggatgagcttcaccacttctgatgcttcaataatgaggtggataagatgattgcaagtgggaaaaacaccaattttctgacaagacaagacgaagacgacgacaaaagaaacgaaaccaacaaaggtctatcgagttcttcttcttcttcacaatggttaaggttaaaagatccgagaatcgtacgtgtttcaagggccttcgggggtaaagacaggcacagcaaagtttacacgatacgaggattaagagactgaagggtaaggctgtcggttcctactgccattcaattatatgatctttaagacaggcttggtcttaatcaacctataaaagacgctgactgggtgcttaatgctgctaaacatgaaatcgatgaactccaacctctgccgatgccctcaccgccggcgaactttccgattttcgatgcattttggagaactaaatcgaaag

SEQ ID NO: 208009 - DNA, 479 bp, Gossypium hirsutum
cccacgcgtccgcccacgcgtccgcgatgctggtgccggtcgtatgggaggaaccacccaatacaccgtcaacaaccagatggttaatgctaccctcatgaacatcgccgataaccccaccaacgtccagctccccggtatgtacaacaaggaagagaacccccgtgtccccattatcgtcactggtaacgatttctccacactgtatgctcctctcatccgtgacggtcgtatggagaaattttactgggcaccaactagggacgaccgtgtcggtgtttgcaaaggtattttcaggaccgacggcatcccagatgaagacattgttaagctcgtcgacaccttccccggccaatccatcgatttcttcggtgccttgagggctcgggtttacgatgacgaagtgaggaaatggatcagtgatgtcggagttgcaggcgtatggaagaagttagtgaactcaagggacggacctccaa

SEQ ID NO: 208010 - DNA, 482 bp, Gossypium hirsutum
aaataagaaaattaagaggccggatttcaaaaccctttctctttaaaatatagagaaaagagggaccaaagtgaaagaaaatcgaagtatagatttgattttcaatctgcattttcagggtgtggaacaatgggtgcaggtggcagaatgtcggttcctccaagtcaaaggaaacaagaatcgggctcaatgaaaagagcccctatatctaaaccaccatttactctcagtgaaataaaaaaagccatcccaccacactgtttccaacgctcacttatccgttcattttcctatctcgtttacgacttcattttagtctctatcttttactacgtagccaccacttacttccgcaacctccctcagccactatctttcgtcgcctggccaatttattgggctcttcaaggttcagtcctcactggcgtttgggttatcgcccatgaatgcggtcaccacgcttttagcgattaccaatggat

SEQ ID NO: 208011 - DNA, 480 bp, Gossypium hirsutum
ctttttctttttcatttgcttaaaactatagagccacggtttagcagagagagagagatggggagctgcagcggcatggcatcggctgcctcggggttcttgttaatgcccagtctcaccggcactgctgcttctaagaccaataacatcagcatgctcttttccccttccagaaacaactactacaatggctcaaggctcgtcgtaagggcggctgaggaggaggcttcgccaccagcaccaccaccagcagccaccactgcgccaccagaaggtggtgaagcccctaagcctaagccaccaccgattggaccaaaaagaggaaccaaggtgaagatccttagaagggagtcgtattggtacaatggctatggatccgttgttacagttgaccaggaccccaagactcggtacccagtggtggttcgattcaacacaggaaccatgccaatgtatctactaacaactatgccatggatg

SEQ ID NO: 208012 - DNA, 478 bp, Gossypium hirsutum
  unsure (1)..(478): unsure at all n locations
ctgtcatctgtctgtctctctgttttactcttcaaccactatcactaccattatggcttcggctactgtttctgtagccaaacccaaccttcagattcaggcaaaaggaaagggtgttggttttgcagatttctcaggcctacacaactcctctactagccttccctttgccaggaaaacctctgatgacttccattcactcgttgcttttcagacatctgctctaggaagcaataatggcgggtacaggaaagggatggcagaggcaaagctaaaggtggctataaatgggtttggtaggattggcaggaacttcttaaggtgctggcatggccgtaaagactccccacttgatgtcattgccatcaatgacactggtggtgttaagcangcttctcaccttctcaaatatgattccacccttggcatcttcgctgccgatgtcaagcctgtcggcactgatggcatttctgttgat

SEQ ID NO: 208013 - DNA, 466 bp, Gossypium hirsutum
ggttccggctgatggacctaatcatgttcagttattgcacgagccgataggtgttgcaggacggataattccatggaactgtcgtgtacttatgtttgcttggaaggttgggcctgcattggcttgaggaaataccatatttttgaagactggtgagcaaactcctttgactgctctctatgtgactaagctgatccatgaggctggtcttcctccacgtgttctgaatgtagtttcggactatggtccgacagctggtgctgctcttgccaaccacattgatggtgacaaggatgcattcaccggatcaaccaataccggtaagattgtacttgaattagacgcaaaatgcatatcttaagccggtgacgttagaacttggagggaaatcgtctttcataatatgcgaagatgctgatgttgacaaagccgtggagcttgctcattttgctttgatctttaatca

SEQ ID NO: 208014 - DNA, 476 bp, Gossypium hirsutum
cggacgcgtgggggcagttgtttgaagctccagatgaagcagaaggcgacgacgatggaatatgagaagaagagccagtaattggattttggagtgggtttatatggctagttggaatgactgttgtcatttctctcctctctgaatatgttgtagaaactattgaggatgcctcagatacttggggaatttctgtaagtttcatcagcattattctgctacccattgttggaaatgcagcagaacatgcaggagcaatcatttttgcttttaaaaataagctggatatttctttacgtgttgcattagggtctgcaactcagatttccatgtttgtggtcccactctgcgtccttgtctcttggattatgggcattaacatggatcttaatttcaatctccttgaaactggctctctcgctctatccattattgctgttgccttcactttacaggatggcacttctcactacatg

SEQ ID NO: 208015 - DNA, 406 bp, Gossypium hirsutum
tttagctatagcatacactactagtacccactactagcaatggcttcctcaatgatctcatcggctaccattgccactgcctctgcggcacaggctaacatggtcgctcctttcaccggcctcaagtctgcctctgctttcccagtcaccaggaaggccaacaacgacattacttctctcgcaagcaatggcggcagagtgcaatgcatgcaggtgtggcctcctactggaaagaagaagttcgagactctctcatacctccccgatcttacacccgtgcagttggctaaggaaagggattaccttcttcgctcaaaatgggttccttgcttggaattcgaattaaaagaaggattcgtgcaccgtaaatactcgagcctacccacgtactacgatggacgctact

SEQ ID NO: 208016 - DNA, 393 bp, Gossypium hirsutum
gacgaaagacggataaacaaacaagaaaatatgttaagacccttcgatataagaatctgtatgggatctactaaattcaacggggtggcataaaaagaaagcgaataaataaacgaaagaaaataaacaaatgaaagaagggggaaaggagggagaaagggggaaggaggggcatcctaatgagatcctaatctcaagacacaaaaggggatatggcgaaattggtagacgctacggacttaattggattgagccttggtatggaaacctactaagtgataactgtcaaattcagagaaaccctggaatgaaaaaagggcaattctgagccaaatactattattgtattatttgacgaaaataaacatgaacaaaggttcagcaagcgagaat

SEQ ID NO: 208017 - DNA, 466 bp, Gossypium hirsutum
actcccctctcactgcaacactcatagcacactatccacacttgctttctttgctttgccttccagtacagccccattttaaagccttggaaagcagacagacagcattaaggaatctcgaatctcaactgggtatggcaattactgcaacggctatgactatgactgtcactacgggattacagtttgctggttctctcaatcataaacagacttcttttttaggagttcccttgaggctgtcaatgtcaaaccctcagccatctttaccctctgtcttcctcaatgttcaagccaaagctcgcacccgaacagaagatcgtgaggcccgccattctcgcattatgaagaagattgaagggacaccagatagaccaagactgtgtgtcttccgttccaacaagcatctttatgtccaagtcattgatgactcaaagatgcacacactagcttttgctttaacaat

SEQ ID NO: 208018 - DNA, 480 bp, Gossypium hirsutum
gttcatctcacatcttttctgggtgggaatgttctaccatctctataatcagttggctaccaatactctggagcgggtggcaccactgacccatgcagtgggcaacgtgctgaaacgtgtatttgtcattggcttctcaatcattgtctttggaaacaagatttcaactcagactggtataggaacagccgtagcaattgctggagtggccgcctactctttcatcaaggccaagatggaagaagagaaacgacaaatgaaagcagcatgagaataaaaaaggaggcaaggaaattggaggaagtcctgatgaagaccaaatttgattttaccttgctgttattgtgaagtttttatttttccctctttcttctcttatcatttcattttattttttcttttaaaattcagagaacaacctatttataactgtggatcagccagtgttgactctgaaataatgtgtactgctattactta

SEQ ID NO: 208019 - DNA, 459 bp, Gossypium hirsutum
cccacgcgtccgattcagtcatccaccaattaccttacttactactctgctctgctctcttctgcttattcaatctaaaacctctgtcatctgtctgtctctctgttttactccacaaccactatcactaccattatggcttcggctactgtttctgtagccaaacccaaccttcagattcaggcaaaaggaaagggtgttggttttgcagatttctcaagcctacacaactcctctactagccttccctttgccaggaaaacctctgatgacttccattcactcgttgcttttcagacatctgctctaggaagcaataatggcgggtacaggaaagggatggcagaggcaaagctaaaggtggctataaatgggtttggtaggattggcaagaacttcttaaagtgctggcatggccgtaaagactccccacttgatgtcattgccatcaatgacact

SEQ ID NO: 208020 - DNA, 401 bp, Gossypium hirsutum
tgcactggtgggaaaatgaatcatgccacctgtttttatgagaaaatgtgtgaaatcggcattgcgcctattttgactacttatgagacactgatatggggatatggtgaagcaaaacactcatgggaagctgaaaaactcctgctgattatggaagagaagggaatctctgctgagaggagcaccatacagctcgttgcggatgcttgacgtgccatcgggttactacatgaagcacggaaaacaataaaaaatgtggatctgggaattggattgactactaataatgacataccggcggatggcatggtgaagacgtacaagacacaaagcctaagtgcttcttattgtaatgatctgcatatgcctgtggtatccatgaaagaacaaaacggatcatc

SEQ ID NO: 208021 - DNA, 379 bp, Gossypium hirsutum
aaagagacaggagtcgttgttgatttcactcatccttcagcagtttatgacaacgtaaaacaggcaacagcattcggtctgagaagtgtggttcatgtgcctcggattacgggtgacacaatatcagcattatctgcattttgcgagaaagccagcatgggttgcctagttgcaccaactctgtccataggatctattctcctccagcaagctgccatttcagcttccttccactacaacaatgtagaaattgttgaatcaagggcgcatgcaacacatcttccctcaccagatgccatccagattgccaacaacctcttcaaccttggccagatctacaacagagaagacctttcaacagatgtttcggcaaggggtc

SEQ ID NO: 208022 - DNA, 472 bp, Gossypium hirsutum
  unsure (1)..(472): unsure at all n locations
cccacgcgtccggcatgataaagatgttggtgctgttgttgttggatttgatcgatacttgaggtactacaaagtccagtatgggacactttgtatccgtgaaaatcctggttgtcttttcattgcgacaaatcgtgatgctgtcactcatctcacagatgctcaggaatgggcaggtggtggttctatggttggtgccatctgtggatctactcaacgtgagccacttgttgtgggaaagccctcaacttttatgatggactacctcgcaaacaaatttggcatcctcaagtcacagatatgcatggttggggacagattagatactgacattctgtttgggcaaaacggtggctgcaaaactcttcttgttctctcangcgtgacaagtttgtcaatgcttcaaagccccagcaattccattcaacctgatttctacaccaataacatctcagattttctgtctatcaag

SEQ ID NO: 208023 - DNA, 326 bp, Gossypium hirsutum
ctcgcgatgttcgccatgctcggtttttatctctttcaccttcagcaaagcagcctggtctggatccttggctaaaggtgaaagagataaaaaacggtagactcgcgatgttcgccatgctcggtttcttcttacaagcttatgtgaccggagaaggtccggtggagaacctttcgaagcacctgagcgatccttttggcaacaacttgctcacggtcattgctggaactgctgaaagagctcccaccctctgattttaatatctttgttttctgattttcgccgctacttgttattgcgtttatgcattttgttgtacatcaaac

SEQ ID NO: 208024 - DNA, 461 bp, Gossypium hirsutum
ggtggatctgctgagttaactcggtctgccttgtttaatctcccccacccccaatcaaatccgcggaacaagaaagtcaaaaaagagggcagtgaaaaaatatggattttgatgaacatgatgaccaagaagaagaaatgggtatggctgttccaccaggctacgattcactgggtaccttatcggaaacttggtcgaaaccgggacctaccaccaccggcggtggtgatggcttggcgagaaaagtggggttcaccactgtaaggtatcgagagtgtctgaagaaccacgccgtgagtatcgtctgccacacggtggatggttgctgcgagttcataacggccggtgatgaagggaccgtcgaggcctttgaaatgcgccgcctttaactgccataggaattttcatcggaaggaaacccagggggaaaagaatgtttatatgctataacccttactacc

SEQ ID NO: 208025 - DNA, 450 bp, Gossypium hirsutum
cggacgcgtgggtttgctttggggtctgacttttgattttagtgaatggatttctggcatggggagcatgtaaataatggggtttttctgtgatctaacacttccaattcgaacttagttttttttcttcttcttctgataacactagcagttgaaacttgaaactcaaccttaaaaaactgtcttgttcccttggtttcttgttttctctctggtgaagttcaaaataataatgggaatgagaagaagagaaatgggtttttattttttggctttcttatggttttgggttcctataaacggattgctttctcctaaaggggtaaactatgaagtgcaagctttaatggctataaaggatgctttgcatgatcctcatggcgttcttgataattgggatgccgatgctggtgatccatgtacgtgggcaatgggtacttggtcacctga

SEQ ID NO: 208026 - DNA, 452 bp, Gossypium hirsutum
cggacgcgtgggcggacgcgtgggtgggatttgttttatgatacaaagttggtgggggaccaggcggggaatgactggacccaagttacccacgtggtgctttcgacccacttggactggctgatgatcctgacgcgttcgcagaattgaaggttaaggagatcaagaatgggcgccttgcaatgttctccatgtttggattctttgtccacgctattgtcacaggaaagggtgccattgagaacctctttgaccaccttgccgattcggtggccaacaacgcatgggcttatgccactaactttgtccccgggaaatgaacttaaattatagatatgtctctgaaagctgtaacattaatttgctatgtagcatctggtggtgtgtactgatgtaattcaactgctagcttttgagctggtggatcattacatacatatacctttttcctg

SEQ ID NO: 208027 - DNA, 446 bp, Gossypium hirsutum
ccaggattgaagagataagattatagtgaaaaacttaacataataaagccccttcgacttgcttcattgatttgccctctcaaagcccaagaaaaatggcttctgcttccgctactctcctcaagtcttcacctattatcgacaagtccgagtggattaagggccaaaacctccgccacccttcggtttgttttgtacggtcacaccctacatcggccgcctttgccgtccgtgctagttcatatgccgatgagcttgttaagaccgcgaaaactgttgcatctccaggtcgtggtattttggccatggatgaatcaaatgctacatgtgggaaacggcttgccttgattggtctcgagaataccgaagcaaaaccggcaagcttaccgtacccttctcgtgtctggccctggcctcggtgactacatctcgggagctattctttt

SEQ ID NO: 208028 - DNA, 482 bp, Gossypium hirsutum
cgtccgcccacgcgtccgcccacgcgtccggaaaatttgcttctgcttccgctactctcctcaagtgttgacctattatcgacgagtgcgagtggattaagggccaaaacctccgccacccttcggtttgttttgtacggtcacaccctacatcggccgcctttgccgaccgtgctagttcatatgccgatgagcttgttaagaccgcgaaaactgttgcatctccaggtcgtggtattttggccatggatgaatcaaatgctacatgtgggaaacggcttgcctcgattggtctcgagaataccgaggcaaaccggcaagcttaccgtacccttctcgtgtctgcccctggcctcggtgactacatcttgggagctatccttttcgaggagactctctaccaatctaccatcgatgggaaaaagatggtcgatgttcttgttgagcaaaagattgtccttggtatcaaagttgacaagggt

SEQ ID NO: 208029 - DNA, 240 bp, Gossypium hirsutum
gcgggcgggcgtccgaatcccagctcttacagatggagaaaagtgcttacttgcgcggttgtgccgatatactaggggggatcgacagaagacttgcggggggcaatcaaataagatcatgaactataccaatgctatgactcaaaacggctgtaacaagatgtgtgactatagacgggtatgggtacgatgggaaatagacaagtcctctactttgtaatgccaaaaacaaaaaacaaa

SEQ ID NO: 208030 - DNA, 429 bp, Gossypium hirsutum
cgcatctttgtttgttcataaaataatagtatagttttcttagaaaaaccagagtgaaagaaaaaaaaaagaagtaaaagaaaaatggctttggcaagcttggtgagaagaaaggcataccttttgtctagaaacctgtcgaattcgcccgcagatgcgttgaaatactctttttcactcagcaatttctcgaggggtttcgcttcaggatctgaagagaacgacgtcgtcgtcatcggcggcggacccggcggctacgtggcagctatcaaggctgcacagctaggtctcaaaacaacctgtatcgagaagcgtggtaccctcggtggtacttgccttaaacgtggttgcattcccatctaaggcgcttcttcattcatcccacatgtaccatgaagctacgcattcatttgcttggcatggtgtgaa

SEQ ID NO: 208031 - DNA, 245 bp, Gossypium hirsutum
gggatttgtcttgtttatgttcactttccggtgaccaccttgctgacccagtcaacaacaatgctggggcctatgccaccaactttgttcccggaaagtgaacttagagagtgagaagggatttgtcttgtttatgtttttatttggtggtgtgaatttaaatttgttgcacaatcaatgaaagtataatgtgaattttgtgtgctcaaacaaaatataactatgtatatgtatttatacttaaa

SEQ ID NO: 208032 - DNA, 416 bp, Gossypium hirsutum
ctttgttttccaatagttcgtaacaatggcggtctcacttcaagctgcagctaccctgatgcagccgatcaaggttgctgcaccatcaaggaccaatgtgccgctcaggtcctcccagagcgtttctaaggccttcggtttggagcctgttggtgctaggcttacctgctctttgcaaactgacctcaaggacttggctctgaagtgtgttgatgctaccaagctcgctggtttcgctcttgctacatctgctcttggtgtctcgggagcaagcgctgaatgagtttcaaagcggctaacctacgctgaaaatcaaagcaagacatacatggaagtcaaaggaacaggaactgcttaccagtgcccaaccatcgatggtggggtcgactcttttgcctttaagcctggcaaatact

SEQ ID NO: 208033 - DNA, 475 bp, Gossypium hirsutum
  unsure (1)..(475): unsure at all n locations
gtcgagaaagaaaatgatgggaaggaaattcttcgtcggcggaaattggaaatgcaatggaacgcactgaggaagtgaataagattgtgagtactttgaatgctggagaggtgccttctccggatgttgttgaggttgtggttagccctccatttttgttccttcctttggtaaaaacttcactgagacctgagttccaagtcgctgcacaaaattgttgggtcaagaaaggaggtgctttcactggtgaagttagtgcggagatgcttgtcaatttgagcattccttgggttattattggtcattctgagaggagacttattttgatggagtcaaatgagttcgttgcggataaggttgcttatgcactttctcaaggcttgaaggtgatagcttgtattggggaaacacttgagcaacgtgaagcangatctactgtggcggttgttgctgaacaaactaaaacaattgcagc

SEQ ID NO: 208034 - DNA, 478 bp, Gossypium hirsutum
gtttttcagtgacaagtttcaatggcaaaaccagtttccattgaagtgtggaacccaaatgggaaatacagagttattagcaccaaacctatgcctggaactcgatggatcaacctcttaatcgagcaagattgccgtgtcgaaatatgtactgagaagaaaacgattttgtccgttgaggatatcatttctttgattggcaataagtgcgatggggtgattggacagttgactgaagactggggggagactttatttgcagctttaagcagagcaggaggcaaagcatttagtaacatggctgttggttacaacaatgttgatgttaatgctgccaacaagtatggtgttgctggtggtaacactcctggtgtactcacagaaacaacggcagagctagcggcttctctttctttggcagctgctaaaagaattgttgaagcagatgagttcatgagggctggcttatatgatggat

SEQ ID NO: 208035 - DNA, 420 bp, Gossypium hirsutum
caccaccaacatagtccaacattttcataacaatggctgcagtcacaaacgccgctgctacatcctgcttcatggggacacgcttccgggacgtctacacaagttcagggagattcgtcgccaggtttggttttggcggcaaaaaagcagctcccaagaaagcctcgaaacaaacctccgaccgccctctatggtacccaggagcggtggctcctgattggctcgatggaagcttggtgggtgattacgggttcgacccgttcgggttagggaaaccagcggagtacttgcaatatgatttggattctttggaccagaacctggctaagaatatggctggtgagatcattggaactaggaccgaagttgccgacgtgaatgcgacgccgtttcaaccttacagcgacgtttttggtctac

SEQ ID NO: 208036 - DNA, 473 bp, Gossypium hirsutum
cccacgcgttcgcccacgcgttcgatgctttatatgagcagtgtgattttcaagcaatatgtggaagtggtataaaaggaaaagcaggactatctgctgacaatttggcagaagatcttgggcctctctttgagtctataatcagatgcatacctggtccacatattgacaaagatggtgcactgcaaatgcttgctacaaatattgagtatgatgaacataaaggacgaatagctattgggcgcttgcatgctggggtacttcggaaaggaatggaagtaaaggtttgcacctcagaagattcgggtagatatgcaagaatttctgaactttatgtctatgagaaatttagtaagaccgctgttgagagagtagaaactggtgacatttgtgctgtttgtggaattgaagatattcagattggagaaactattgcagataaagcatttgggaaagccattacctggccatta

SEQ ID NO: 208037 - DNA, 306 bp, Gossypium hirsutum
agccgtacagataggattgtgtttaagttatttggtaaggaaccaaatgattttcctctgggcttgcgagcacagattcttgactggctatcacatagtcccactgacatcgagagctatattaggcctggctgcattgttctgacaatttaccttcgtcaagctgaggctgcatgggatgaacttcgctatgatctgagtttcagtttgagtcggcttctgcattggtcggatgacactttctggaggactggatggatatgtataagggtgctagatcaaatagcattcatttataatggtcag

SEQ ID NO: 208038 - DNA, 425 bp, Gossypium hirsutum
cgcaagcaatggcggcagagtgcaatgcatgcaggtgtggccttctactggaaagaagaagtgcgagactctctcatacctccccgatcttacacccgtgcagttggctaaggaagtggattaccttcttcgctcaaaatgggttccttgcttggaattcgaattagaggagggattcgtgcaccgtaaatactcgagcctacccacgtactacgatggacgctactggaccatgtggaagctgcctatgttcgggtgcaccgactcggctcaggtattgaaggagcttgaggaatgcaagaaggaataccccaatgcattcattagaatcattggctttgacaacgtgcgttaagtgcagtgcattattttcattgtctacaagccttcaggcttttaagctttttataaactttgtttcttca

SEQ ID NO: 208039 - DNA, 430 bp, Gossypium hirsutum
gttccttgcttggagttcgaattggaggagggattcgtgcaccgtaagtactcgagcttacgcacgtactacgatggacgctgctggaccatgtggaagctgcccatgttcgggtgcaccgactcggctcaggtgttggaggagcttgaggaatgcaagaaggcataccccaatgcattcattagaatcattggcttcgacaacgtgcgtcaagtgcagtgcattagtttcattgcctacaagcctccaggcttctaagctttttattaactttgtctctccatttgtttgaatttgtactcagaaaaaccatgtgctttacctttgcttttttctttctttgagttattggcctttgtttcttgatttctggggtttaaatccttttttggattttcggtgggaaaaaaggctgggaactaatgaataa

SEQ ID NO: 208040 - DNA, 230 bp, Gossypium hirsutum
accgatccttcctggcacaggccatcatggtgggcctcaaaaccggccttaaataagccaatgcctatccattcaccaatgaggccaacaacgacatcacttcttctttcaagcaacactaagagagtgcaatgcatgcacgagatgcctactattgtgaaaaacaagtacgagactctttaatacatcccatatcttactctcgaacaactgtctaaagaagtatatta

SEQ ID NO: 208041 - DNA, 439 bp, Gossypium hirsutum
ggttgttgtactctggactgcaaacactgagaggtacagcaatgtcatcgtggggctaaatgacaccgtggaaagccttatgggttctttggagaagaatgaatcagagatttctccttccactttgtatgctattgcttgtgttcttgaaaatgttcctttcatcaatggcagcccacaaaacacctttgttccagggttgattgatttggctattcaaaggaactgtctgattggaggagatgacttcaagagtggccagaccaagatgaaatctgtcctcgtggatttcctttggggctgggatcaagccaacatcgatagtggagtacaaccatctgggaaataatgatggcatgaatctattcggaccccaaaccttttcgttccaaggagatctcaaagagcaatgtggttgatgacaatggttcaagcaatg

SEQ ID NO: 208042 - DNA, 461 bp, Gossypium hirsutum
atcagtgagactcttttgtatacctgtagcatatagtaatagtaagcagtaatagcaatggggtcctccatgatctcatcggcagccattgccaccgtgaaccgctcctccccggcacaggccaacatggtggcccccttcaccggcctcaaatctgcctctgctttcccagtcaccaggaaggccaacaacgacatcacttctcttgcaagcaacggtgggagagtgcaatgcatgcaggtgtggccgcctcttgggaagaagaagttcgagactctctcatacctgcccgatcttactcccgtacagttggctaaagaagtagattaccttcttcgctctaaatggattccttgcttggaattcgaattagaggagggattcgtgcaccgtaagtactcgagcttacccacgtactacgatggacgctactggaccatgtggaaactgcccatgttcgg

SEQ ID NO: 208043 - DNA, 277 bp, Gossypium hirsutum
atcagtcagactcttatgcatacctgtaccctttcgtaatatttatcaggaatagccatgggcttcttcatgagcttattggcggccattgcctccgtgaaccgttcctacccggcacatgcctacatggtggccccctttaccggtctcaaatcagcctgtgcttttccaggcaccactatggccaacaaagacatcactttttttgcaagcaaccgtgtgagagtgcagagcatgcatgtgtggccgactcttgtgaagaagaagttccagacat

SEQ ID NO: 208044 - DNA, 371 bp, Gossypium hirsutum
cccacgcgtccgcccacgcgttcgtgagatcatcactccaaactactaccggggaaaagaaagagccatgctgcttcccaactgtcttttccacatgggtggcgccgcaatcctcttgtcgaaccgtctttcctagaggtggcgtgccacgtatcgtctctgtgcatgttgttcgaacccataaaggtgcagatgataaagcctatctatgcgtgttcgaagaagaagacaaagaaagcaatgttgggatatctttatctaaagatctcatggctattgcttggagaggctttaaaaatttaacattaccacttatttggtccctttactttctttcctgcaattctgaagcaacttcctaattttttttt

SEQ ID NO: 208045 - DNA, 304 bp, Gossypium hirsutum
tcgatcagagagactcttttgtatacctgtagcatatattaatagttagcagcaatagcaatggggtccttcatgagctcatcggcggccattgtcaccccgaaccgctcctccccggcacaggccaacatgggggccccctttaccggccccaaatcttcctctgctttcccagtcaccaggaaggcctacaactacatcacttttcttgcaagcaacagtgggagagtgcactgcacgcacgtgtggcctcctctcgtgaataataaatactagactctctcatacctcccccatcttactc

SEQ ID NO: 208046 - DNA, 320 bp, Gossypium hirsutum
ccgggtcgagcgacgcgtccggtgagactctttagtatacctgtagcatatatttatagtaattagtaatagcaaatggcctagtgcatcatctgattggcaaccgggggtcaccgtgaaccgctccttccctgcacaggccaacatggaggaccccttcaccggcctcaaatctgactctgcttttccagtcaccaggaaggccaacaacgacatcacttcttttgcaagcaacggtgggagagtgcaatgcatgcatgtgtgggcgtctcttgtgaagaagaagatcgagacttttttatacctgtccgatcttactt

SEQ ID NO: 208047 - DNA, 389 bp, Gossypium hirsutum
ggtttttagggcttttctaacttttctgattattttttgataatccggagttcaatcatctgaaagaagccctaaaatccttgaatcaggtctgagcttgtggtttgttaggcctctttgatcaaactaagtttcatgtctgatcttgacgttcaaattcctactgcctttgatccctttgctgatgcaaatgctgaggactcaggtgcgggtgcaaaggagtatgtgcatattcgtattcagcaaaggaatggtcgcaaaagcctgacaactgtccaggggttgaagaaagaattcagctataacaagatacttaaagacctgaagaaggagttttgctgcaatgggaccgtggtccaggaccctgaattaagacaggtgattcaact

SEQ ID NO: 208048 - DNA, 463 bp, Gossypium hirsutum
gtgagactcttttgtatacctgtagcatatagtaatagtaagcagtaatagcaatggcctcctccatgatctcatcggcaaccattgccaccgtgaaccgctcctccccggcacaggccaacatggtggcccccttcaccggcctcaaatctgcctctgctttcccagtcaccaggaaggccaacaacgacatcacttctcttgcaagcaacggtgggagagtgcaatgcatgcacgtgtggccgcctcttgggaagaagaagttcgagactctctcatacctgcccgatcttactcccgtacagttggctaaggaagtagattaccttcttcgctctaaatggattccttgcttggaattcgaattagaggagggattcgtgcaccgtaagtactcgagcttacccacgtactacgatggacgctactggaccatgtggaaactgcccatgttcgggtgcac

SEQ ID NO: 208049 - DNA, 345 bp, Gossypium hirsutum
cccacgcgtccgtttagctatagcatacactattagtacccactactagcaatggcttcctgagcgatctcatcggctaccattgccactgcctctccggcacaggctaacatggtcgctcctttcaccggcctcaagtctgcctctgctttcccagtcaccaggaaggccaacaacgacattactcctttcgcaagcaatggcggcagagtgcaatgcatgcaggtgtggcctcctactggaaagaagaagttctagactctttcatacctttccgatcttacacccgtgcagttggctattgaagtggattacctttctttgttcaaaatggggtcctttgct

SEQ ID NO: 208050 - DNA, 412 bp, Gossypium hirsutum
ctcttttgtataactgtagcatatagtactttttagcagtaatagcaatggcctcctccatgggctcatcggcaaccattgccgccgtgaactgctcctccccggcacaggccaacatggtggcccccttcaccggcctcaagtctgcctctgctttcccagtcactaggaaggccaacaacgacatcacttctcttgcaagcaatggtgggagagtgcaatgcatgcacgtgtggcctcctcttgggaagaagaagttcgagacactctcatacctcccccatcttacaccctgacagttggctaaggaagtagattaccttcttcgctctaaatggattccttgcttggaattcgaattagaggagggattcgtgcaccgtaagtactcgagcttacccacgtactacga

SEQ ID NO: 208051 - DNA, 320 bp, Gossypium hirsutum
cggactcaggccttttctaactggttagattttttattcgattattcggagttcaatcatctgggagaatccgtaaaatccttgagtcacgtctgatcttgtacgtcgttaggcctctttgatcaaactaagtttcatgtttgatcttgacgttcaaattcctactgcctttgatccctttgctgatgcatatgctgaggactcatgtgcgtgtgcaaagtgagatgtgcatatttcttttcatcataggaatggtcgcaaatagcctgacatctgtccatgggttgaagaaagaattcatctttaacaagatacttaaa

SEQ ID NO: 208052 - DNA, 304 bp, Gossypium hirsutum
  unsure (1)..(304): unsure at all n locations
aaccgggncgagcgacacgtccggagagactcttttttatacctgtagcatattttaatagtaagcagtaatagcaaaggcctccgccatcatctgataggcaaccggggccaccaagaacctctcctctcacacacagaacaacaaagtgggccccttcaccggcctcaaataagtctttgctttcccagtcaccaggaaggccaacaacaacatcacttttcttttaagcaacagtgggagaaagcaaagcatgtcaatgtggtcgcctctttggaagaagaaaaaagagacattcttatac

SEQ ID NO: 208053 - DNA, 372 bp, Gossypium hirsutum
gttagctttagcatacactactagtacccacttctagcaatgtcttcctcaatgatctcatcgtctaccattgacactgcctgtccggcacaagctaacatggtcacccctttcaccggcctcaagtctgcctctgctttcccagtcaccaggaaggccaacaacgacattacttctctcgcaagcaacggcagcagagtgcaatgcatgcaggtgtggcctcctactggaaagaagaatttcgagactctctcatacctccccgatcttacacccttgcacttggctaaggaagtagattaccttcttctctcaaaatgggctccttgcttggcgttcgaattggaggagggattcttgcaccgtaagtac

SEQ ID NO: 208054 - DNA, 439 bp, Gossypium hirsutum
gttagctttagcatacactactagtacccactactagcaatggcttcctcaatgatctcatgggctaccattgccactgcctcggcggcacaggctaacatggtcacccctttcaccggcctcaagtctgcctctgctttcccagtcaccaggaaggccaacaacgacattacttctctcgcaagcaatggcggcagagtgcaatgcatgcaggtgtggcctcctactggaaagaagaagttcgagactctctcatacctccccgatcttacacccgtgcagttggctaaggaagtagattaccttcttcgctcaaaatgggttccttgcttggagttcgaattggaggagggattcgtgcaccgtaagtactcgagcttacccacgtactacgatggacgctactggaccatgtggaagctgcccatgttcgggtgca

SEQ ID NO: 208055 - DNA, 442 bp, Gossypium hirsutum
cccacgcgtccgcccacgcgtccgggatctgatgtttgagttgtcaatgtggcgttgcagggatgagcttcgtgttcgtgcaggcgaacttcatacatcttcaaggagagatgctaaacactacatagagttctggaaaaaagttcctccaaatgaaccctaccgcgttattcttggtgatgttagggacaagctgtatcagacacgtgaaaggtctcgccaaatgttgtctcatggtatctctgacattccagaggaggaaactttcaccaacattgagcagttttttggaaccgcttgaactatgttataggtcactttgctcttgtggtgaccggccaattgctgatggaagtcttcttgatttcttgaggcaagtgtcaacttttggcctctcacttgtcagacttgacattcggcaagagtctgaccgccacaccga

SEQ ID NO: 208056 - DNA, 282 bp, Gossypium hirsutum
gcttacgtccacgcgtacgggatctgttgttagagttgtcaatgtggcgtttcaaaggtgatcttgcggtgcgtgcagagcgaacttatacatctttaatgagagatgctaaacactacatagaggtctggaaaaaagatccttcaaatgaaccctaccgtgttattcttgtgataggtagggacaagcagtattatacacgtgaaaggttttgccaaatgtatgactcaaggtaactttgacattccagaggaggaaacttttaccaacatataacatttt

SEQ ID NO: 208057 - DNA, 407 bp, Gossypium hirsutum
gtgagctttagcatacactactagtacccactactagcaatggcttcctcaatgatctcatggggctaccattgacactgcctgggcggcacaagctaacatggtcacccctttcaccggcctcaagtctgtctttgctttcccagtcaccaggaaggccaacaacgacattacttctctcgcaagcaatggcggcagagtgcaatgcatgcacgtgtggcctcctactggaaagaagaagatcgagactctttcataccatcccgatcttacacccgtgcagttggcttaggaagtagattaccttcttctctcataaagggttccttgcttggagttcttattggaggagggattcttgcaccggaagtactttagcttacccacgtactactatggacgcttct

SEQ ID NO: 208058 - DNA, 397 bp, Gossypium hirsutum
  unsure (1)..(397): unsure at all n locations
tcggccacgcgtccggccacgcgttcgggatctgttgtttgagtttttaatgtggcttttcaggcgtgagctncgggttcgtgcagaggaacttcatacatcttcaaggagagatgcttaacactacatagagttctggaaaaaagttccttcaaatgaaccctaccgtgttattcttggtgatgttagggacaagctgtatcatacacgtgaaaggtctcgccaaatgttgactcatggtatctctgacattccatgaggaggaaacttttaccaacattgagcagctttttggaaccgcttgaactatgttataagtcactttgttcttgtggggaccggccaactgctggaggaagtctttcttgtttttttgaggcaagagtcaactttttgt

SEQ ID NO: 208059 - DNA, 434 bp, Gossypium hirsutum
gagctcaacccccggtaacccttccaggaccttatctgtaatttcagttcactgtggtcttggggagcttagagaccgtattgggtcagttaagaacacgcataatatcactgaagccatgaaacttgtggctgctgctaaagttaggagagcacatgaagctgtcgtcaatggcagacctttctctgagtccctggatgaagttctctacaacatcaatgaacagctccagactgaagacatagatgctcctcttacaaacgtcaggcctgtcaaataagttgctttggttgttgttactggtgatcgttgtttttgtggaggatttaacattgctatcattaataaagcttaatctttaattgcttaatttgaacatcttggacttgattatacaaatatcattgtggttaaaaatgtggattttatatttt

SEQ ID NO: 208060 - DNA, 334 bp, Gossypium hirsutum
acaacaccaactgcagaacactggcctgtacaaccatggcttttctttccccatcattcgccagggcggcagggaagttctgccctgtccaccccggaaatccacggaactggccgggtttacatgaggcaaaccaccaaacctgatcctcttgctagaccatgcaacggaactgaccgcaatacaaccattgggcctcttactcagaagacaccatcttactttgacgcgggagcatcttgttgctcatggctggccaagcccttatctttgatgtcagcccatgctctttctttggaacggcttgctacccttactgttctagggcttgggc

SEQ ID NO: 208061 - DNA, 466 bp, Gossypium hirsutum
gagctcaacccccggtaacccttccaggtcctcatctgtaaccccagttcactgtggtcttcgtgagcttagagaccgtattgattcagtaaagaacacgcagaagatcactgaagccatgaaacttgtggctgctgctaaagttaggagagcacaagaagctgtcgtcaatggcagacctttctctgagtccctggttgaagttctttacaacatcaatgaacagctccagactgaagacatagatgctcctctcacaaacgtcaggcctgtcaaaaaagttgctttggttgttgttactggtgatcgtggtctctgtggaggttttaacaatgctatcatcaagaaagctgaagctagaattgcagaattgaagcagcttggacttgattatacaataatcagtgtggggaaaaagggtaattcatatttcatccgcaggccctacattccagtggacaaattt

SEQ ID NO: 208062 - DNA, 436 bp, Gossypium hirsutum
cgccattctacctgctttttccaggaaaccaaacgccattcttcctcacctcattgtcaactgttacaaggtgaattgaagcatggctgcaaaatttaaaaagtgcatgatgttgttcggcaaaggtctcgaaggaagaagatatgggaagcgagtcatacgaggaagccattgcagctttgtcgaagcttctcagtgacaaagctgatctcgggagtgtcgccgccgcaaaaatcaagcagataacagccgagttagaggcagctgccgattccactcagttcgacccggtcaagcggctcgagaccggtttccttcacttcaagaaagaaaaatttgacaaaaattctgatctgtacggtgcacttgccaaagggcaaagacctaaattcttggtatttgcatgctccgactctcgggttgccccttccaattc

SEQ ID NO: 208063 - DNA, 394 bp, Gossypium hirsutum
gtgctcaacccccggtaacccttccagggcctcatctgtaaccccacttcactgtggtcttggtgagcttagagaccgtattgattcagtatagaacactcagaacatcactgaagccatgaaacttgtggctgctgctaaagttaggagagcacaagaagctgtcgttaatggcagacctttctctgtgtccctggttgaagttctttacaacatcaatgaacagctcctgactgaagacatatatgcttctctcacaaacagtaggcctgtcaaaaaagttgctttggttgttgttactggtgatcgtggtctctgtggaggttttaacaatgctttcattataaaagctgaatctagaattgcatattttaagcagcttggactttgttta

SEQ ID NO: 208064 - DNA, 363 bp, Gossypium hirsutum
tccacgcgttcgaccacgcgtccgggctgctgtcgtggcctatgtgggtcaatgcatatggggtctaaggaacacaatctgctgggggggtttgcttttattggtgaaggaattcccgttgccacgggggcggcttttacctacaaatataagcgggagattctaaaagaagcggattgtgatcatgataccttggcgtttttcggcgatggatcttgtaacaatgggcagttctttgagtgttagaatattgcgggcttgtggaaggtgcccattgtgtgtgttgttgagaacaatatgtgggctacttgtatgtctcatttgagggctacatctgatcctcatatttataagaaaggacct

SEQ ID NO: 208065 - DNA, 243 bp, Gossypium hirsutum
gtggacaatccgagtgcgaatcagccctaaacttgaacgcaatgaaccaatctccaaacccatggcacttttctttctcgtatgccagagcttttcataacacttgctagtatacatgtggaggcagaccctataacgttaaggttgctaaggatactctcctcgaactttccaaaatcaactcactctcatatctagggaaattcacccgcttgggagaatcattaaatgcctagtaaggaa

SEQ ID NO: 208066 - DNA, 428 bp, Gossypium hirsutum
ctccacaggagaatccccccagctgttcctggaatcatgttcttgtctggtggacaatccgaggttgaagcaaccctcaacttgaacgcaatgaaccaatctccaaacccatggcacgtctcgttctcgtatgccagagctctccagaacacttgcttgaagacatggggaggcagacccgagaacgttaaggctgctcaggatacgctccttgtccgtgccaaagccaactcactcgctcagctcgggaaatacaccggcgagggagaatcagaagaggccaagaaaggaatgttcgttaagggctacgtctactaagctgctgcaagcaaagctttagctgagatgatggagatttcatgatatggtttctttccctttgtggtgattgttttataggctctggagactactttttgttctggatt

SEQ ID NO: 208067 - DNA, 428 bp, Gossypium hirsutum
ctacgctcgtgggattgttcttcctggtgtctcttctaagcactcctcggcattagtctcccctccatccacatctccttccttcagctctaagagccttaaaacaagttcactatttggagaatcattaagggttgttccaaggtcatcattgaaggtttcaaaggcaaagcacactacttcactagtgacaaaatgtgaaattggagagtctttggaagagtttctcacaaaggcaacaacagataaggcattgattagattaatgatgtgtatgggtgaagcattaagaacaattgcttttaaagttagaacagcttcatgtggtggtactgcttgtgttaattcctttggtgatgaacaactttgctgttgatctacttgccaacaagcttctttttgaagctttgacatactcgcacttttgc

SEQ ID NO: 208068 - DNA, 375 bp, Gossypium hirsutum
cgcgtccgcccacgcgtccgcccacgcgtccgacaaaattaactgctttattttggcctctacaaccatgggtctttcttgcccatcattcggcggtaaggcagtgaatttctccccttccacccctgaaattcagggaactggccgtgtttccatgaggaaaaccaccaagcctgttccttctggtagcccatggtacggtcctgaccgagttttgtacttgggtccactttccggtgagccaccatcttacttgaccggtgagtttcctggtgactatggttgggacactgttggactctcagctgattccgagacctttgctaggaaccgtgagctcgaagtcatacactgtcaatgggccatgttgggagc

SEQ ID NO: 208069 - DNA, 415 bp, Gossypium hirsutum
atttagctatagcatacactactagtacccactactagcaatggcttcctcaatgatctcatcggctaccattgccactgcctctccggcacaggctaacatggtcgctcctttcaccggcctcaagtctgcctctgctttcccagtcaccaggaaggccaacaacgacattacttctctcgcaagcaatggcggcagagtgcaatgcatgcaggtgtggcctcctactggaaagaagaagttcgagactctttcatacctccccgatcttacacccgtgcagttggctaaagaagtggattaccttcttcgctcaaaatgggttccttgcttggaattcgaattagaggagggattcttgcacctgaaatactcgagcctacccacgtactacgaaggacgctactggaccatg

SEQ ID NO: 208070 - DNA, 254 bp, Gossypium hirsutum
ggctttcatcaacggttggtgccttacctcctcttcttccttttccaccacctactctttttgcgctcgtcggcgacctacattgcggccttcggacgtcgctagccttaactcttcttcttctcctccgactcttatccaataccgctcggttttcgctgtccctgttcctttgctcaccccgagagaagagatgtgaatcaagttctactacgtatccattgaagctttttagaatcttttcatagagaaag

SEQ ID NO: 208071 - DNA, 309 bp, Gossypium hirsutum
aggtagcattctgcactctgttcagggtctctctaataccgattgattggctcatgctgagaaacgacttggctggtgactcaacaagccagacaatgtaattgttgatcactacacatatgttatcttgggagatgggtgtaaactggagggtattttaaaagaagcttgttcacttgctggacactggtgactcgtaaagcttatagctttctatgatgacaaccacatttctattgaatgtgacactgaaattgcgtttactgataatgtcgatacacgctttgagggagctaggggtggcattgt

SEQ ID NO: 208072 - DNA, 279 bp, Gossypium hirsutum
  unsure (1)..(279): unsure at all n locations
cccacgcgtncgcccacgcgtncggtttgtggatttcgaggtgttgtgcagataaaggatgagtacactggatgcaactagagcagaacttgctcttgtagttttgtatttgaataaggctgaagcaagggataagatatgcagggctatacaatatggctcgaaattcttaagtgatgggcagcctggcacagcacaaaatgttgacaaatcaaccagcttggcacggaaagttttccgcctttttaagtttgtgaacgatttgcatggtcttattag

SEQ ID NO: 208073 - DNA, 232 bp, Gossypium hirsutum
tgcttttgcagcgcttgatggaagcagctcaagttgtgaacagtaatggcaatgccgatggtgactaccagtacgaaattatcagttggttcgatagtgtatcgaagaacgccgccatggtccagacggagacacttggccagattcttcatctcaactatggtgtggagtacctgaaaaaatggtttggggacatgaagatccaagacatggatgcttgtgcattggaatc

SEQ ID NO: 208074 - DNA, 338 bp, Gossypium hirsutum
aattaggaacattttggccttacactccttcaattcaactcttgtatggactaagagcagctttggaccttatttttgaggaaggacttgacaatgtcattgaaaggcatagtcgtttaggcaaagcaacaaggcttgcagtggaagcatggggcttgaagaattgcacacaaaaggaggaatggttcagtgacacggtgacggcggtgcttgttccaccatatattgatagttcggaaatcgttaaacgggcatggaagagatacaatttgagcttaggtcttggccttaacaaagtggcaagaaaagttttcagaataggacatctttgaaaccta

SEQ ID NO: 208075 - DNA, 226 bp, Gossypium hirsutum
caaccactatcactaccattatggcttcggctactgtttctgtagccaaacccaaccttcagattcaggcaaaaggaaagggtgttggttttgcagatttctcaggcctacacaactcctctactagccttccctttgccaggaaaacctctgatgacttccattcactcgttgcttttcagacatctgctctaggaagcaataatggcgggtacaggaaagggat

SEQ ID NO: 208076 - DNA, 386 bp, Gossypium hirsutum
ttttgcctgaaaaagccaaacaccttcgagaaaaaccgaaaatttctttaaacatagaaaagaaaaggcgtattttctcggataattaatgggaagagcgtttgtgtatgtaattcttggaggaggtgtagcagctggatatgcagctcttgaatttacgagaaaaggggtttctcctggtgaactttgcattatttctgaagaacctgttgccccatatgagaggcctgctttaagcaaaggctttttacttcccgaatctcctgcacgccttccatcattccacacatgcgttggtgctaatgaggaaaggttaactcctaaatggtacaaggaacatgggattgaattggtccctggaactcgagttaagtcttgtgatgtca

SEQ ID NO: 208077 - DNA, 298 bp, Gossypium hirsutum
attatcttccttccttttcattccttttgctatggcaggaactggggtgggggctgtttatgggaacggcgcggtagctgaaacccacaaatcccctttctccgtcaaggttggcctagcccaaatgctccgtggcggggtgattatggatgtcgtcacccctgaccaagctcgcatcgctgaagaagctggagcctgcgccgtcatggctcttgaacgagtccccgccgacatccgagcccaaggtggcgtggcgcggatgaatgacccacaacttatcaaagaaattaagcaagct

SEQ ID NO: 208078 - DNA, 259 bp, Gossypium hirsutum
actcactatgctgtcatgagttcctatgaatacctcagccaaggtcttaaaacgtacaatttggacaacaacatggatggtttctacattgctcctgcattcatggacaagcttgttgttcacatcaccaagaacttcatgtccctccctaacattaaggttcctctaatcttgggtatttggggaggcaaaggtcaaggaaaatctttccaatgtgagcttgtgtttgccaagatgggtatcaaccccatcatgatga

SEQ ID NO: 208079 - DNA, 381 bp, Gossypium hirsutum
  unsure (1)..(381): unsure at all n locations
cccacgcgtccgcccacgcgtccgcccacgcgtccgtaaattcatgacaatcctcggagcctttcacgattccactttgttctaaagatggaaaatatgaaggttttttcagttaaggtggaggatggaagggaaggacgagatgggaagccatcagttggtcccgtgtaccgtaacctactcgccaagcaaggataccctccacctgatcctgagatgtctaccacatggactcttttcagggatgtcgggttgggatttatggagcaaactgcccgcagtggattatggcaatggaggcctgcggtgcccacagtttggtttgtgtgcctctctatgatacactagggtctggagctgtaaattntatcatagaccatg

SEQ ID NO: 208080 - DNA, 415 bp, Gossypium hirsutum
gtgagactcttttgtatacctgtagcatatagtaatagtaagcagtaatagcaatggcctcctccatgatctcatcggcaaccattgccaccgtgaaccgctcctccccggcacaggccaacatggtggcccccttcaccggcctcaaatctgcctctgctttcccagtcaccaggaaggccaacaacgacatcacttctcttgcaagcaacggtgggagagtgcaatgcatgcaggtgtggccgcctcttgggaagaagaagttcgagactctctcatacctgcccgatcttactcccgtacagttggctaaggaagtagattaccttcttcgctctaaatggattccttgcttggaattcgaattagaggagggattcgtgcaccgtaagtactcgagcttacccacgtacta

SEQ ID NO: 208081 - DNA, 290 bp, Gossypium hirsutum
caaactcccatcacccgagatcatcttttcccttcagaatggcggctgcaaccatggctctctcgtccccatctttcgccggaaaggccgtcaagctctctccttccgcccctaaaatccaaggcaatggccgtgtttccatgaggaaaaccgctaccaaggctgcttcctctggaagtacatgggacggtcctgaccgagtcttgtacttgggtccactatctggtgagcctccatcttacttgaccggagaattccctggtgactacgcgtgggacactgctggactc

SEQ ID NO: 208082 - DNA, 410 bp, Gossypium hirsutum
ggaatattcttcttcctttttttttttttttcatgcactccaggtgtttaggaaaagtccgatattgtttttggttctaagctgtggaggttgggtatttggttaaagtagttttgaaggggtttcgaattctgggtttaattcgtcttggtggggggtagtacccaggtttagacaaattgtggacatcacggctatacacggagtttctcgggatcttattcatgtccgtactgtacgacgtaagggttgtgtgaacgaaagcaacccttcgccgcacggtgggcgtggagctttgccttctgaaggtggtagtccttccgatctcctcttccttgctggtggtggaattgtcttttagagtttcagctgtatatatatagatatcttttaatcctccatagatatat

SEQ ID NO: 208083 - DNA, 415 bp, Gossypium hirsutum
atttcattttgctttcacaaatctaagaccagagctccaaaagattgaatttttaacccctcaaattaaaatgcttcctttttcgcgttttcggttgaaaatttgtataaaaaagagggtgatttagaaacaatggatgctgattcatggagtgctcgtctttcttcagcttctaagagatatcaatcggctcttcaattacgatctgatatgcttatggggtttgaagaaattgatggagaagatgaaataagagaggagtttcgatgccctttttgttcagagtatttcgacatcgttggcttgtgttgtcacattgatgatgagcatccagtggaggctaaaaatggggtttgtccagtctgtgcaaatgaggtgggcgttgatatggttgcgcatataaccctacaacatg

SEQ ID NO: 208084 - DNA, 402 bp, Gossypium hirsutum
gaaaaaacactgatcaacgaaggatttctagggttttttttcggtatcagcgggcgatggcaatggctgctctcagacgcgaaaggaggcgtttcgcccctctgatctctccccgtccaattactgctgtccgatcctctcctatcgttcccactcacgaagatgagggtccgattggtgttcgttatatttcaacccaagtcgctagaaaccggatgaagagtgttaagaatattcagaaaattacaaaggctatgaagatggttgctgcctcaaagctgagagcagttcagactaaagctgagaattcccgaggcctctggcagccatttactgcacttcttggtgatcttcccagtgttgatgtcaagaagaacgtttgtgtaaccatctcttctgaca

SEQ ID NO: 208085 - DNA, 386 bp, Gossypium hirsutum
cccacgcgtccgcaaattttcatcacccatcaagcttttcatcaatggcttggcttcggcaagcttcaatctgtcttcaacccaagcttctttcatcttctcaacaccccagatcccttccctctctcaacctctctttttcagccactttcccttccctcaaactctccaccactcgccctcttcatggcggtgccaaaatgtcagcctccgccgctttcagctacgccaccgctttagccgatgtagccaagtccaacaacacccttgatgccaccagctccgacgttgaaaaagtcgagacaatcttctccgacccacaagtcctcgaattcttcaccaaccccaccattgatgtcctcaaaaaacgtcaggttttggatgag

SEQ ID NO: 208086 - DNA, 354 bp, Gossypium hirsutum
  unsure (1)..(354): unsure at all n locations
cccacgcgtncgcccacgcgtccgcccacgcgttcgcccacgcgtncgcacggctttggtctccggcttctgcctcacttccaactccacctctccttctaactcactccggcaacccacattgcggcggccgtctatcgtcgccaacctcaactcttccacttctcctcctactctcattcgaaatcaacccgttttcgcagcacctactcctttgctcactccttccaattggaaagaaaacatgggagaccagtcatacgaggaagccattgaagctctcaagaaactgctcaatgagaaaggagaattgaagagtgcagcgacggcaaaggtagagcaagtgacagctga

SEQ ID NO: 208087 - DNA, 331 bp, Gossypium hirsutum
aacaatggcggtctcacttcaagctgcagctaccctgatgcaaccaatcaaggttgctgcaccatcaaggaccaatgtgccgctcaggtcctcccagagcgtttctaaggccttcggtttggagcctgttggtgctaggcttacctgctctttgcaaactgacctcaaggacttggctctgaagtgtgttgatgctaccaagctcgctggtttcgctcttgctacatctgctcttgttgtctcgggagcaagcgctgaaggagtttcaaagcggctaacctacgctgaaattcaaagcaagacatacatggaagtcaaaggaacaggaact

SEQ ID NO: 208088 - DNA, 399 bp, Gossypium hirsutum
cccacgcgtccggaaaaatcatttcatttttttagttagaattttaggcgggtctcgaaaaaagatagcgaagaaaattatccctagagtagatactaagaggaatgtataaaccaatgcttccataaattcgatcgtggtttacaattatagcttccgtacctgtttatttggaatcatctcccgaataaagaaagaacaagaatcaaagaaaaggcagcgattaaaatcaagatttttccagcagcctatggcaaatcacaaatagaagtagaagcaaaaaataacaaagcaatcttgcatcagactacttgtcttcttgtagttggatctccaagttttttgaatgctccaaattccacttgagcatccaaatctggatcaatactcggcaaaaca

SEQ ID NO: 208089 - DNA, 387 bp, Gossypium hirsutum
cacattatacaaccctaacttctacattagggaagaagctcctaaggtttgagagagatggcttcaaaaagatcggcatcggttgccctcttttttgcactcaacattctcttcttttcacttgtcagtgctaattgttcttgcccttcccccaaacccaaaccaaaccccactccctccccaactcctgctgcggaaggaaaatgccccataaatacccttaaactaggtgtatgtgctgaggtgcttggtttagtcaatgtaactgttgggtcacccccagttcaaccttgctgcacccttatcaaaggccttgctgatcttgaagcagctgtttgcctttgcacagcgatcaaaagcaacattttgcgtatcaatcttaaatat

SEQ ID NO: 208090 - DNA, 379 bp, Gossypium hirsutum
aagctcactgcctttctggggtacaaggctggtatgacacacattgtcagagaggtcgaaaaacccggatctaagcttcacaagaaggagacatgtgaagctgttacaatcattgaaacccctcctatggtgattgttggggtggttggatatgtgaagacaccacgtggccttcgctccttgaacaccgtctgggctcagcatctgagtgaggaagtcaagcgccggttctacaagcactggtgcaagtccaagaagaaagcttttgtcaagtactcaaagcagtatgaaagtgaagaagggaagaagagtatccaagcacagttggaaaagatgaagaaatatgcaactgttattagggtcttggctcacactcaga

SEQ ID NO: 208091 - DNA, 390 bp, Gossypium hirsutum
gaggaactggtattggtggagggaatgatgagagagagcaaactcttaaccagctttggaccgaaatggatggtttcgagggtaacaccggtatcatcgtaattgcagcaactaacagagctgacattcttgattccgctttgttgaggccaggacggtttgatagacaggtcactgttgatgttccggatatcagaggcagaactgagatactaaaggttcatggtagcaacaagaagtttgaaactgatgtatcatttgatgttatagccatgagaacgcctggttttagtggagcagatctagcaaatctattaaacgaagctgctatgttggcttgtcggcgtggcaagaccgcatcttcatctaaagaaatcgatgattcaattg

SEQ ID NO: 208092 - DNA, 353 bp, Gossypium hirsutum
  unsure (1)..(353): unsure at all n locations
cccacgcgtncgcccacgcgtccgcccacgcgtgcgtaaccatgaaggaggttccaagcggcgcgtggcgctgtgccgagattatctccggcaacggccacacttactgcgtcaagtatggttggtttccgatcactggcgaggcggcgttggtcgagagagtcccgaggaaagcgattaggccttgccctcctcctataaatgggaccgacgattgggttcctggcgacgtcgtggaggtgttcgacgagttgtgttggaaaccagcggtgatcgttagagttttcggtggaaacaacatgttttctgtcaggattcttggatcgaagagcccaactcaagcacatcaatct

SEQ ID NO: 208093 - DNA, 332 bp, Gossypium hirsutum
catacacctatggaactttattggaactacatagatctatggaatcggttaatatatgctgaatcgcacaagagaaatgaaaaaactgcgaatattgtgggattagcttcgtcggagacaaaaatatagaatgtgagtaggcaagacaagattgagtcaaaagaattccttttttttaagtaaagatctatatgtgtcatagggcgatatgaatggtatatcacacgcactagaccggttatacgagatctatggtgagggaggaggccaacacttctattggcatatagcaggtttacaagtccatgcccaagtgcttattacctcttggg

SEQ ID NO: 208094 - DNA, 297 bp, Gossypium hirsutum
cgtaattctatactttctgtcttctttctaatttacggaaaaggaatgtttggaaatgaggctaggagagtagtagcatggatgaatgggtgcgaaggagaccccaaactccctataggcagcatagagacgcgcacattaactgtcgttccatctccatcaaaggcgatggagaggttgagtgtagccattagagagttgaaatgcagccctcctcctcttacctctggcattcttcgacttcaggtaccgatcgaggagcaaatcgaagcaatcgagtggctccatgctcaacat

SEQ ID NO: 208095 - DNA, 372 bp, Gossypium hirsutum
cccacgcgtccgggaagggcttcttcaagctggttcttcatatttttattacaagtaagttcaattcttgactatttcttgaaatttttgtatttttatgacttttacaactaggcccacttgttaaatccattagtttttgattttatgaaagaagttgaaagttgatatgaatatgtgctggaagtatatgatgatttagcatgaaattagagctttaaattgttcatatgctgattttattgaaagaattgaatagaaagtgaatgtttgggacctaatagtaaaagagtttgaagatagagttatatgtggaaattctgaatttcaatagttgtgtaacaacttataatgtctagtaaagtactaatt

SEQ ID NO: 208096 - DNA, 379 bp, Gossypium hirsutum
cccacgcgtccgcaatgtcgacggcttctatcaacggttggtgccttacctgctcttcttccaccactaccagctcctctttttccgctcgtcgacgacctacattgcggccttcagtcgtcgctagccttaactcttctccttctcctccgactcttatccaagaccgcccggcttttgctgcccctattcctttgctcaccccgagagaagagatgggaaacaagtcctacgacgaagccattgaagctctcaagaaacttctcagtgagaaaggagaactgaaagctgaagcagctgcaagggtagatcaaataacagcagagttaaacacagcatcagctgatggcaaaccatctgactcttcttgtgagagact

SEQ ID NO: 208097 - DNA, 374 bp, Gossypium hirsutum
cccacgcgtccgcccacgcgtccgaacaaaatcagttgcttcacaatggccgctacaaccatggctctttctgccccatcattcgccggtaaggcagtgaagttctccccttccacccctgaaatccggggaactggccgtgtttccatgaggaaaaccaccaagcctgttccttctggtagcccatggtacggtcctgaccgagttttgtacttgggtccactttccggtgagccaccatcttacttgaccggtgagttccctggtgactatggttgggacactgctggactctcagctgatcccgagacctttgctaggaaccgtgagctcgaagtcattcactgcagatgggccatgttgggagctcttgg

SEQ ID NO: 208098 - DNA, 424 bp, Gossypium hirsutum
cggtaattaagtctagcttcttatagttgttttttgtttccatggcggtaggcttatgcgccgccgtaactcgtaaacccttccgctcatttccgctgctgaagcctgctccaattttccatcctttactgcacctcccaaaaataacaacctacggagctcgaagaaagaaaagctttgctgtttgtttcgtggtggatgaagaacagaagcagagcgctcctacccagatcgtggaacaaggattcgaggaagttagagatcgtcagatcttaataccggcgcgtctgtcggagaaattagctagaaagagatccgaaaggtttacttacctcgttgccgctgtcatgtctagctttggaattacatccatgtctggtatggcccgttattacaggttttggtggcaaatggagggaggaga

SEQ ID NO: 208099 - DNA, 384 bp, Gossypium hirsutum
  unsure (1)..(384): unsure at all n locations
gcggtggcgggtcaagctgggtccttagccgctgccggtttggttgtgatcctcancgtttgcttgaccatgtatggtgttgcgtcgttcaaagaaggtgagccatcgatagcaccgagcctaaccctgactgggaggaagaaagagccagaccagttgcaaacggcggatggatgggctaagttcactggagggttcttctttggtggaatctctggtgtcacttgggcttacttcctcctgtatgtccttgaccttccttactactttaagtagatcatcatttgatctatgttttacctgggtccctttttaatgtannatcttgtattcaggatgatccttttggaacgaatatcaattatatcaagtgaatgtcactct

SEQ ID NO: 208100 - DNA, 402 bp, Gossypium hirsutum
cccacgcgtccgcccacgcgtccgttattttggttttaaatacaggctgaagggccattgctcttttttcctgcaaaagctgaagtgatgcctcaaccacttggtgttgttctcattttctcatcttggaatttccctttcacactggcattggacccattgatcggagcaatatctgccggcaacacggttcttttaaaaccatctgatctggcaccggcatgcatgtcgtttctcgtcgagaccatccctaaatacttggacaataaagccgttaaggtccttgccggtggagcagatataggtgaacgactgctccagctaaaatgggacaaaatattcttcactgggagtccacgagtgggtcgcttggttatggctgccgctgcaaagcatttgacg

SEQ ID NO: 208101 - DNA, 425 bp, Gossypium hirsutum
gagaaagcactgaaaacgcaaaaccatggcctctgcttctctcctcaagacgtcaccagttttagacaagtctgagtgggttaagggtcacacccttcgccaaccttccacttctgcggtgaggtgccaccctgttgcaccctctggactaactgtgcgtgcaagctcatatgccgatgagcttgtcaagactgctaaagctattgcttctcctggccgtggaattttggccatggatgagtccaacgctacctgtgggaaacgtttggcctcaatcgggctagaaaacacagaggctaaccgccaagcctacaggacgttgcttgtttcagctcctggccttggtcagtacatctctggtgccatcctctttgaggaaaccctctatcaaaccacaattgatggcaagaagatggttgatgttc

SEQ ID NO: 208102 - DNA, 328 bp, Gossypium hirsutum
  unsure (1)..(328): unsure at all n locations
cccacgcgtccgcccacgcgtncgnggacgcgtgggcggacgcgtgggcttccccccggtcaggggccatttgtattgggaaaaaaaatgcatccacttaacacatggggcaactcctcccttgaatccgtcgacccagaaatgcatgacctcatcgagaaagagaagcgtcgtcaatgccgcggcatcgagctcatcgcttccgagaacttcacttccttcgccgttatcgaagccctcggcagtgccctcaccaacaagtactccgagggcatgcccggtaaccgttactacggtggcaacgaattcatcgacgagatcgagaatc

SEQ ID NO: 208103 - DNA, 299 bp, Gossypium hirsutum
gtaaaagcgaaaccctagccactctctgttcaactcgccaatgggggcttataagtacgtgtcggagctatggaggaagaagcagtcggatgtgatgaggtttttacagagggtgaggtgctgggaataccgccagcatccgtcaattgttagggtcaaccatcctactcgccctgacaaggcacgccgcttgggttataaggccaaacaaggttatgtggtttaccgtgtccgtgttaggaggggtggtcgcaagaggcctgttcctaagggtatcgtgtatggtaagcccacaaacc

SEQ ID NO: 208104 - DNA, 389 bp, Gossypium hirsutum
cccacgcgtccgagcagctttacaggttgcattggctcaaatggaataccaattgccgcgtcttactaaaatgtggactgaccttgagcgtcaagctggaggcaaggtgaagggtatgggtgagaaacaaattgaagtggacaaacgtatcttacgtactcaaattggagttcttaaaaaagagcttgaatctgtcagaaaacatcgaaagcaatatagaaaccgccggttttctgttcccgttcctgtagtatctttggttgggtacacaaatgcgggcaagagtacacttttaaatcaattgactggagctaatgttctttcagaggaccgactgtttgctacccttgatccaacaacaagaaaggttcagatgaaaaatgggaagt

SEQ ID NO: 208105 - DNA, 441 bp, Gossypium hirsutum
cccacgcgtccggttgctcatgtctagccatgcagtgagcttgaagagagatcacccgttactccatttccaagctcaaggactcaagcctaaacctgcctctcatctcttcttcaatccattgtctaatggtgtccatacttcacccaaagctttcaccactttagctgtctttaaatcaaagaccaaagcagctcccaagagggttgagccaaagccaaaggttgaagatgggatctttggcacctctggagggattggttttaccaagcaaaatgagctctttgtgggacgtgttgccatgcttggttttgctgcatcattgctaggcgaagcaataacagggaaaagaatcctagcacagctgaatttggagactggaatcccatttatgaagctgaacccccctctctcttcttcattctcttcacactccttgga

SEQ ID NO: 208106 - DNA, 426 bp, Gossypium hirsutum
tggtgttgcaggtcttcgttacgcacttgaagttgcgaaacatggatctggggcgattatcaccaaggccgagcctcatgagagtaatacgaactatgcacaaggtggtgttagtgcagtcctgtgtccatctgattctgtagagagtcacatgcaggatacaattgtagcaggagcttatctttgcgatgaggagtctgtcaaagttgtctgtactgaaggacctgatagaatccgagaattgattgcaatgggggcttcgtttgaccatggtgatgatggaaatttgcatctggcaagggaagggggtcattctcatcaccgaattgttcatgctgctgatatgactggacgagagattgaacgggctttactcgaagcagttgtcaatgatcctaatatttctgtgttaaacaccatttcgca

SEQ ID NO: 208107 - DNA, 394 bp, Gossypium hirsutum
ggaattttggccatggatgagtccaacgctacctgtgggaaacgtttggcctcaatcgggctagaaaacacggaggctaaccgccaagcctacaggacgttgcttgtttcagctcctggccttggtcagtacatctcaggtgccatcctctttgaggaaaccctctatcaaaccacaattgatggcaagaagatggttgatgttcttgttgagcagaacatagtccctggtatcaaggttgacaagggtcttgttccactggctggttcaaacaacgagtcatggtgccaaggtcttgatggcctcgctccacgttcagctgcatactaccaacaaggagctcgttttgcaaaatggcgtactgtggtaagcattcccaatggaccaaccgaac

SEQ ID NO: 208108 - DNA, 418 bp, Gossypium hirsutum
cccacgcgtccggtagacaccatctccccaagcatccgagccacaccagtgttctccccaggctcacgagaaccattagcccttaaaaacaaggctcctagatggcatgaacagttacagtgctggtgccttaacttcaaggggcgtgtgacggtggcctctgttaagaatttccagctggtcgcagctgttgagccatcacataatgtatcacctgaagagcaagagaaggttgggaatctgcatcattgatgttgccatagattatcaagtacccctctttcaatgccatcgcaatctacaaagtagctttacgcgagctggcatatggatgccagtatctcggtaggagataaatatctttctcctctagattgcttcctgaatttagtactgtatttatggttgtaatggaagc

SEQ ID NO: 208109 - DNA, 439 bp, Gossypium hirsutum
atgaggctcatcagttctggcgacaccagctccctgatgacattaccccagactttaaggttattaatgaggatgattctcaaagtatggagcctgggagcctctccttagcaggtttgtccttgcatgatggtagcgaagcttcaagggttcctgcttctgctgctggtggatatgtatttggggatcagcaggaactactgcatcagtatggtaatggtaataactcggatgaaaaatttagatatccttcttcatcctatggagaggagcctatatcagctagttttttgaacttaccactcaaaccttgggatgagcaactcgttaacagtgatcggttgattggcaatgggagggaaggacaactgtatgatggaaattctaggcatgcatttgccagtgatattttggtgagcacacatatatccatgatact

SEQ ID NO: 208110 - DNA, 374 bp, Gossypium hirsutum
cgccattctacctgctttttccaggaaaccaaacgccattcttcctcacctgactgtcaactcttacaaggtgaattgaagcatggctacaaaatttaaaaagtgcatgatgttatgttgttcggcaaaggtctcgaaggaagaagatatgggaagcgagtcatacgaggaagccattgcagctttgtcgaagcttcttagtgacaaagctgatctcgggagtgtcgccgccgcaaaaatcaagcagataacagacgagttagaggcagctgccgagtccactcagttcgacccggtcaagcggctcgagaccggtttccttcacttcaagaaagaaaaatttgacaaaaatcctgatctgtacggtgcacttg

SEQ ID NO: 208111 - DNA, 379 bp, Gossypium hirsutum
gtaatcgccgatatgctcatattggtgacgttattgttgctgtgatcaaggaagcagtgccaaatacacctctagaaagatcagaagtgatcagagctgtaattgtacgtactcgtaaagaactcaaacgcgacaacgggatgataatacgatatgatgacaatgctgccgttgtcattgatcaagaaggaaatccaaaaggaactcgaatttttggtgcgatcgcccgggaattgagacagttaaatttcactaaaatagtttcattagctcccgaggtattataagacgagacccaagtatagttagagtatttagagtatttaaatggcatagattaattagtagattgtgtctcacgtatatacctttactaagt

SEQ ID NO: 208112 - DNA, 362 bp, Gossypium hirsutum
cccacgcgtccggttctcaagcactttgattggcctgaaggaaaggctgatgcattaagagaggcagcttttgaataccaggacctaatgaagttggagaagctggtctcttcctttgttgatgatccaaaccttccatgtgaagctgctctgaagaagatgtacaagttgcttgagaaagtggaacaaagtgtatatgccctcttgcgtacaagagatatggctatttcacgatacagggagtttggaattccagtgaattggttattagattctgggattgttggcaagatcaagctttcatctgtacaattggcaaggaaatatatgaaacgtgtagcatcagaacttgatgcactgag

SEQ ID NO: 208113 - DNA, 407 bp, Gossypium hirsutum
atggaggtttacagcagaaggctgatgtttctagtgtttgcatttgcattagtaagtatagggtatgcacaagagtcggactcgaccactctggttccagcaatactgacttttggtgactcagtggtagatgtgggcaataatgattatctccccaccatcttcagggctaattaccctccttatgggagggacttcaccaaccaaaagcctaccgggaggttttgtaatggaaagttggccactgacatcactgctgaaactctggggtttactacttatccaccagcatatttaagccctgaagcatcagggaacaaccttcttattggagccaattttgcttctgctggatctggctatgacgacagagctgcctctttgaatcatgctatcacgttgagtca

SEQ ID NO: 208114 - DNA, 428 bp, Gossypium hirsutum
cccacgcgtccgcccacgcgtccgagtaaacagagttctttttttcacagcgatggcagccatgaactccagggttttggcatgcaactatgctatctcaggcactggatcatctgagcttaatgccaagcttgcttcagcaccatcagttgcttccccagttatgtgcggtggtcacaagttgcctgtgatcagagcccagcaggctaaattttctgattccaaaggatcaggtgccagtgaaggaagaagagctgctatgctctacttggcagctggccttttcaccacagcttgtgcttcttctgcaaatgctggggtcattgacgagtaccttgaaaagagcaaagctaacaaggaattgaatgacaagaagaggttggcaacaagtggaaaacttttccagagcatacactgttcaatttggc

SEQ ID NO: 208115 - DNA, 419 bp, Gossypium hirsutum
cccacgcgtccgctcctctatttcttaacaaacctcaacttcaaagatcggcgaaacatgctaggaactgagcgtgatttgaacttcaatgagaccgagctgtgtctcggccttcctggtggaagtggtggaggaggaggagctgcagccgccggtggtggtggtaaaaatgaagtggaaagttccccaaagaccaccgggaaaagaggctactccgagactgttgatttgaagcttaatcttcagtctaaagaaggttgcatggatctgaaccagaacctagaaaatggttcaaaagaaaagaatcatctccctgcaaaaccaccagccaaggcacaagtattgggttggccaccagttcgatcttataggaagaacattatggctaaccagaagaacaacagtgacgaaatcagtga

SEQ ID NO: 208116 - DNA, 287 bp, Gossypium hirsutum
cccacgcgtccgaagaaatccaagtccacccacagtctcctaattacgaaagaggaaggattggaattatacgaagatatgatactaggaagagcatttgaagatatgtgtgctcagatgtattacagaggcaaaatgtttggttttgttcatctttacaacggccaagaagctgtttcaactttttattaagctcttaaagcagcaagattctgtcgtaagcacataccgtgatcacgtgcacgccttgagcaaaggagtccccgcacgcgccgtcatgagtgagc

SEQ ID NO: 208117 - DNA, 440 bp, Gossypium hirsutum
  unsure (1)..(440): unsure at all n locations
ggaattggcagcttggtccttgacacaattggtcacactatcagtcaaaagtaccacagcagggttattcaagtagtacctctcttctgttttcatgtatttgacttcagttcatgatgaccatgtctaaatcacttcatagatatgtgttaactattattagtctttcatactgcggaaagactgaaactgatatccacagaaaccaattacttattgtataccgacttcggtgcagcatgaagctggtcatttcttgatcgcgtacctggtgggcatccttcctagaggatatacattaactagtttggaagctntaaagaaagaaggatcactcaatattcaagcaggaacagcctttgtggattttgagtttctcgaagaagtcaatgcagggaaagtatcagctacgacactgaacagattcttatgcatagccc

SEQ ID NO: 208118 - DNA, 402 bp, Gossypium hirsutum
  unsure (1)..(402): unsure at all n locations
ccgaccaggaccgatggaagggtcttgcttatgatatctccgatgaccaacgggacattaccagagggaaaggtatggtcgactcattgttccaagctcccatgaacgatggtactcactatgctgtcatgagctcctatgagtacattagccaaggccttcgcacatacgacttggacaacaacatggatggattctacattgccccagctttcatggacaagcttgttgttcacatcaccaagaactacatgacccttcctaacattaaggttcctcttatcttgggtatttggggaggcaaaggtcaaggaaaatctttccaatgtgagctcgtctttgccaagatgggaatcaaccccattatgatgagtgccngagaattgaaaagtggaacgccgg

SEQ ID NO: 208119 - DNA, 320 bp, Gossypium hirsutum
cccacgcgtacgtcaccaccaccaccatagtccaacattttcataacaatgggtgccatcacaaacgccgctggtacatgctccttcatggggacactcttccccgacgtctacacaagttcagggagattcgtcgccaggtttggctttggcggcaaaaaagcagctcccaagaaagtctcgaaacgaaccccagaccgccctctatggtacccaagagcagtggcgcctgattggctcgatggaagttcggtgggtgattacgggttcgacccgttcgggttagggaaactcgcggagtacttgcaatatgatttgga

SEQ ID NO: 208120 - DNA, 382 bp, Gossypium hirsutum
  unsure (1)..(382): unsure at all n locations
atttattttattcccttcacattcacactcattccatctatttcctcccagtgtttcacaacgtaattctatactttctgttttctttctgctaacccatcatatttacaatataatttacggaaaaggaatgtttggaaatgaagctaggagagcagtagcatggatgaatgggtgcgaaggagaccccaaactccctgtaggcagcatagagacacgcacattaactgtcgttccatctccatcaaggcgatggagaggttgaatgtagccattagagagttgaaatgcagccctcctcctcttacctctggcattcttcgacttcaggtaccgatcgaggagcanatcgaagcaatcgagtggcttcatgctcaacatg

SEQ ID NO: 208121 - DNA, 294 bp, Gossypium hirsutum
cagagttggtgtcatcttttcaatactactagatttcttctctcataatctcaaaaccggaggaggcgttcgatcccacacctgttctgaaaaaaaatcatcttcaaaaacgaaaaatattataaaattctcgttctgaaattccaaaaaaagaaagaaaaagggatcaatggcgtggtgcgatagcctgagcgacaagaacgcggttttcagaaagctgaaagcaaaatcagaaaacaagatgtgttttgattgtaatgcgaaaaatacaacatgggcgtccgtcacgtatgg

SEQ ID NO: 208122 - DNA, 399 bp, Gossypium hirsutum
ctactccatcttcactccccctcctcacccaaaccctacaaaatggccgccgccgcgcgccctcttgtcttcgtccaaaccatagagtccgacatggctactgatgccactccaaccgttcctctcgctgatgtgatgaaagcctcgattcgacccgacatcgtcaccttcgttcacgacaatatatccaaaaacagccgtcaaccctatgccgtctccaaacgcgctggtcaccaaacttcagctgaatcctggggtaccggtcgtgccgtctcacgtatccctcgtgttcctggtgggggtactcaccgtgcaggccaaggtgctttcggaaacatgtgtcgcggtggacgcatgtttgtcctaccagatctgcgccgctgcaccggaaatcaacgt

SEQ ID NO: 208123 - DNA, 316 bp, Gossypium hirsutum
  unsure (1)..(316): unsure at all n locations
gttctagatcgcgagcgcccccttttttttttttttttttttttttttttttngaaagcggttgggagggaacagtgagaaatggcgggaggaaatatccgtaaacaggagggttctttagtgatcaataatacgaacgttttcgcggctcttgaaactctcaggaggaagaagaaatctgataaggaccgaggttctttgaagaaatcttctttcaagtctcagcagcagccggaaaaagaagccgagccgcaggtcttttggtctccggcgccgcttacgggcaaatcgtgggccgatgttgatgatgaccatg

SEQ ID NO: 208124 - DNA, 351 bp, Gossypium hirsutum
  unsure (1)..(351): unsure at all n locations
ctggacttcttttcgcaccatcccgaaagcttgcacatgttcaccttcctggttgatgacatcggtgttccacaggattataggcacatggatggctctggtgttcatacctacacactaatcaacaaggctgggaagtcacactatgtgaaattccattggaaacccacttgtggtgtaaaatctttgttggaggatgaagccataagagtaggtggtgcgaatcacagtcatgccacacaagatctttatgactcgattgcagccggaaactaccctgaatggaaactgttcattcaaataatggatcctcttcatgaggataggtttgattntgacccacttgatgta

SEQ ID NO: 208125 - DNA, 446 bp, Gossypium hirsutum
  unsure (1)..(446): unsure at all n locations
aagctctcgataccatcgaaatggaacccaagcaaagaggtggagttcccaggtcaagtgctgaggtacgaggacaacttcgacaccaccagcaatttgagcgtcatgatcactcccacggacaagaagtccatcaccgactacggttcccctgaggagttcctctcttcggtggattatcttcttggaaaacaagcttactttggtaaaactgatgctgagggtggttttgactccggtgcggtggcgaccgcaaacatattggagagttcaagttcaacagtcggcgggaagccgtactacttcttgtcagtgttgacaagaaccgccgacggagacgaaggcgggaagcaccagctaataacagccaccgtcaacaactgcaagctttacatttgcaaggcacaagctggggacagangtggttcaagggagctagaaagttt

SEQ ID NO: 208126 - DNA, 398 bp, Gossypium hirsutum
  unsure (1)..(398): unsure at all n locations
cccacgcgtncgaaagattctctcaaaacagtgagggagtagtagttcgagttatcgaggacgttttttttcaacacgaaaaaaaatggattacttttatggaccagggaggaaccatctcttcgttccgggtccggttaacataccggaacccgttattcgagccatgaaccggaataacgaggattaccgttccccggctattccggcaatgacaaaaacccttctcgaagatgttaagaagatattcaagactacgaccgggactccttttatgatcccaacaacaagaaccggcgcatgggagagtgcacttactaatacgttatcccccgtgaccgaatcgtatcgnntctcattggacaantcagtcttctttggatcgatcaacaacaacg

SEQ ID NO: 208127 - DNA, 404 bp, Gossypium hirsutum
  unsure (1)..(404): unsure at all n locations
aaaactcaaaagagtctgtcatttcccttacttcctcaaaccagaagccatggccagcatgataatggcttcctcaaagcctgtaatctccattgctgcttcatcatccttcttttccaaacccaaactcaaacaaatcccacaactttccctcccaaaactccccactccaaagttcttgaaaacccaacaaatcccctcactctcgtccaccactctcaaatctatctccctcttcacagtcaccactttatcctttgccccaccttctgttgctgcagaaatagaaaaggccgctcttttcgatttcaacttaaccctccccatcatgatggtccagntcttgttcctcatgtttgctcttgacaaggtctactttaccccactcgggaaattcatggatg

SEQ ID NO: 208128 - DNA, 393 bp, Gossypium hirsutum
acgaaagcctatcaaagaagatttctaccagaattgggctcatggaaaatccttcgttaaaggggatgttcttgggttcaaatccggtcttgaaaaatctgaaaaagttgcagaggtaacggaaaaggcttacgatctgtgcgaaattgccaatactatatcatccgccatccccataccgataaatattactcttaacaggaccggagcttattacttcatttctactatcgccgataactgttggaacgggcaaaagctcaacatcacagtcggagatgagagcaaccctactgctgctgttcccgcagctggaccgagtctcaccacctcgcctggaacttcaattcctcctcttgtgaccaactcagcttcttccctttgttctactct

SEQ ID NO: 208129 - DNA, 349 bp, Gossypium hirsutum
acgcagaggacaagcaatggagccagcgcgggaagcagcagagcaagaagctggaatcgctggatgaagcgtatacgcccccgatagcgcgaccggctctcgccatcaaagccaccatcgagaaaaccaagagacggttcgacaactacggcaagtacggcttgctctgcggctccgatgggttgcctcatttgatagtgagcggcgatcagaggcactggggtgagttcatcacgcccggcctgttgttcttgtacatcgctggatggatcgggtgggtcggaaggagctaccttattgctataagcgatgacaagaagccagccatgaagggagatcatcatcggat

SEQ ID NO: 208130 - DNA, 403 bp, Gossypium hirsutum
gtctcataacatttgaagccaagcaaagttcagattaggatttagggttttttgtttggttttctttttgtgaaaggcaaaatggatctggatatgaacgtgaacgcccctcactcaatgggcacaacaatcatcggagtcacctacaatggtggtgtcgtcctcggcgccgactctcgtaccagcaccgggatgtatgttgctaatcgggcatctgacaaaattacacagctcactgataacgtctacgtttgccgttctggatccgctgctgattctcagattgtttctgactacgtccgttatttccttcatcaacatacgatacaacttgggcagcctgcaactgtcaaagtttctgctaaccttatcaggctactatcctacaataacaagaacatgc

SEQ ID NO: 208131 - DNA, 338 bp, Gossypium hirsutum
agaggacaagcaatggagccagcgcgagaagcagcagagcaagaagctggaatcctggatgaagctttacgcccccgatagcgcgaccggctctcgccatcaaagccaccatcgagaaaaccaagagacggttcgacaactacggcaagtacggcttgctctgcggctccgatgggttgcctcatttgatagtgagcggcgatcagaggcactggggtgagttcatcacgcccggcctgttgttcttgtacatcgctggatggatcaggtgggtcggaaggagctaccttattgctataagcgatgacaagaagccaaccatgaaggagatcatcatc

SEQ ID NO: 208132 - DNA, 291 bp, Gossypium hirsutum
catagatctatggaacttttttggaactacatagatctatggaatcggttaatatatcctgaatcgcacaaaagagatgaaaaaactgtgaatattgtgtgattagcttcgtcggtgtcaaaaatatagaatttgagtaggcaagagaagattgaatcaaaataattccttttttttaagtaaagttctatttctgtcagagggcaatatgaatggtatatcaaacgcactaaacgggttatacgatatctctggtgtggaagtaggccaacatttctattggcaaatagc

SEQ ID NO: 208133 - DNA, 414 bp, Gossypium hirsutum
gacacattctcttttagagcttactcatcacttaatcaaattcatccatggcttcttttgctactttcaatattgtcggtctgagatttggtgagccagtctattggattcattccaatgcagaaaccaggcggcttggtgggtctgtccctgagtcggatcatacccaccagccattgctgttctaataccacaatggccctgttctaactagcaacatatttgttgacttcatttggtatggaaatttcaagccttctcaacgagccatttgttcccattgtatcaattccctcgcctcttctaagcttgtttcaacttaaccatctgttgctacatagaggaaagccatggatacatactataaccctaccaacaaatcttctttccttgtcaatagcttgggatcacaaa

SEQ ID NO: 208134 - DNA, 127 bp, Gossypium hirsutum
aaatcaactgcttcacaatggcctctacaaccatggctctttcttccccatcattccccggtaaggcattaaagttctccccttccacccctaaaacccagggacctggccgggtttccatgaggaa

SEQ ID NO: 208135 - DNA, 462 bp, Gossypium hirsutum
aaaataaagaacacacaacaatggccgccaacacactaatgagctgtggcatagccaccacatttccttcacttctttcctcatcaaagtccaagttcagtggcgccgccgtatcgttgcctagtgctgttggtaccaatgttggccaccgtgttagcatgtcagctgattggatgcctggtcaacctagaccaccttaccttgatggctcagcaccaggtgactttgggtttgacccactaagacttggtgaggtccctgagaaccttgagaggtacaaagaatctgagttgattcactgcagatgggctatgcttgctgttccaggtatattggtaccagaggccttagggttgggaaactgggtaaaagctcaagaatgggcagcaattccaggtggccaagccacttacttagggaacccagtcccatggggtaccctccccaccatcttggtcattg

SEQ ID NO: 208136 - DNA, 403 bp, Gossypium hirsutum
cccacgcgtccggtttgcacaggtattttcaggaccgacaatgttcccgttgatgaccttggtaagcttgttgacaccttcccgggccaatccattgactttttcggtgctctgagggccagagtttacgatgacgaagtgaggaaatggatcggagaggtcggagtcaatggtgtcgggaaaaagctcgtgaactcgagggaagggccaccatctttcgagcaaccgaagatgaccattgagaagctgttggaatatggatacatgcttgttgctgagcaagagaatgtgaagagggttcaattggctgacaaatatttgagtgaagctgcccttggaaatgctaatgacgatgctatcaagagaggagctttctaaatgggaaattaagctctaagggaag

SEQ ID NO: 208137 - DNA, 442 bp, Gossypium hirsutum
gctatagcatacactactagtacccactactagcaatggcttcctcaatgatctcatcggctaccattgccactgcctgtccggcacaggctaacatggtcgctcctttcaccggcctcaagtctgcctctgctttcccagtcatcaggaaggccaacaacgacattacttctctcgcaagcaatggcggcagagtgcaatgcatgcaggtgtggcctcctactggaaagaagaagttcgagactctctcatacctccccgatcttacacccgtgcagttggctaaggaagtagattaccttcttcgctcaaaatgggttccttgcttggaattcgaattagaggagggattcgtgcaccgtaaatactcgagcctacccacgtactacgatggacgctactggaccatgtggaagctgcctatgtgtcggtgcaccgactc

SEQ ID NO: 208138 - DNA, 446 bp, Gossypium hirsutum
gtgagactcttttgtatacctgtagcatatagtaatagtaagcagtaatagcaatggcgctcctccatgatctcatcggcgaccattgccaccgtgaaccgctcctccccggcacaggccaacatggtggcccccttcaccggcctcaaatctgcctctgctttcccagtcaccaggaaggccaacaacgacatcacttctcttgcaagcaacggtgggagagtgcaatgcatgcaggtgtggccgcctcttgggaagaagaaattcgagactctctcatacctgcccgaacttactcccgtacagttggctaaggaaggagattaccttcttcgctctaaatggattccttgcttggaattcgaattagaggaaggattcgtgcaccgtaagtactcgagcttacccacgtactacgatggacgctactggaccatgtggaaact

SEQ ID NO: 208139 - DNA, 340 bp, Gossypium hirsutum
  unsure (1)..(340): unsure at all n locations
aaaaaaaaaaacctgagcagccttttttttttctctcagcctccccacctccggcctgggcactggcgagcctgcgctgggatgagcacgtatatgagtcncttggttccaaaatctaatttcagcatgttgttatttagtggacaagccattaaagctgaagttttacgcttaagagaacaaacggtgttggttgatgcatggattgggagccctaggatttgtacccaagacgagaccacattaaccagatcggaaatcaatcgatttgaggataaggtgggattcttcgataaaggagtgggcggcggtgaatcactggtgagaaagcggcttttgg

SEQ ID NO: 208140 - DNA, 443 bp, Gossypium hirsutum
cccacgcgtccgattttaggataacgcgtattttatatgtgactttcttcgaaaatcctaggaaaagtgtattgtagattgttgctgcaaattgccacttcctctgtttccaataactttgcagtatacattttttatggtttgtgcaagaatgacagctgaacattgttgctgcaaatcctaacaatgtatgagcaggaagtacagttttgtcttacgtatatatggtctgcgctactttgcgccactcgattccaaagtccattgtttattgtcaagtccgtgaagctaaaagaagcctgcttgactttttctacacggaattgggtaaactggagcaaaaacaattatcggcattactgaatgaggatccagcaatcatggaatgccgatccgctcttgcgaagagactgaaattatatatgagtgcacaagctgaaatc

SEQ ID NO: 208141 - DNA, 447 bp, Gossypium hirsutum
ccaagcttctattcagttttgtaagagctatggctaaggacattgaggttggtggtgagttccaggccaaggactaccatgatcctccacccgctccattggtagacgctcaggagttagccaagtggtctttttacagggctgtcatagctgagttcattgccactctcctctttctctacatcactgtcttgactgtgatcggttacaagacccagaccgaccttgctaagggcggtgaagattgtggaggcgttggcattctcggcattgcttgggcttttggtggcatgatttttatccttgtttactgcactgccggtatctctgggggacacatcaacccagcagtgacctttggacttttcttgggtaggaaggtgtcgttagttcgagccatattttacatgggtgctcagtgtttgggagccatatgtggatgtgggc

SEQ ID NO: 208142 - DNA, 453 bp, Gossypium hirsutum
  unsure (1)..(453): unsure at all n locations
gcgcccacgcgtccgatcatctcccttgtcttgattctctccatctttctaattatagtaaggcttcgtggacttaaatctggcaagaaacatggcagttgtaaagaaaatagtggcatccataatacaagcagcaggttcattgctcctactaccatagacttaaacgctagtccagatgtgaaagggaactgtttatatggaggtagtatgcgtaaacctgcaagtgcatacagaggggtgcaagtttttacttacaaggagctggaatttgccactgataacttcagtgaagctaatgtgattggcaatggtgggtctagtgtggtgtacaaaggagtccttgctgatggtactgtggcagccatcaagaggcttcaccgtgacagaaagcaaggggagcgtgctttcaggatggaggtggatctgctaantcgcttgaactctccttac

SEQ ID NO: 208143 - DNA, 456 bp, Gossypium hirsutum
cccacgcgtccgcccacgcgtccgcccacgcgtccgcccacgcgtccgtttagctataggatacacgactagtacccacgactagcaatggcttcctcaatgatctcatcggctaccattgccactgcctctccggcacaggctaacatggtcgctcctttcaccggtctcaagtctgcctctgctttcccagtcaccaggaaggccaacaacgacattacttctctcgcaagcaatggcggtagagtgcaatgcatgcaggtgtggcctcctactgggaagaagaagtttgagactctctcatacctccccgatcttacacccgtgcagttggctaaggaagtagattaccttcttcgctcaaaatgggttccttgcttggaattcgaattggaggagggattcgtgcaccgtaagtactcgagcttacccacgtactacgatggacgctactgg

SEQ ID NO: 208144 - DNA, 449 bp, Gossypium hirsutum
cgaagggactcgccttccttcacagtgcggaaacaagagttatatatcgagacttcaagacttccaacatcttgctcgatacgaactacaatgcaaagctctctgattttgggttggccaaagatgggccaacaggtgataagagccatgtttctacccgagttatggggacttacggatatgctgccccggagtatcttgccacaggtcatttgtctgcaaggagtgatgtgtatagttttggagttgtgctgctggagatgttatctggccggagagtagttgacaagaatcgaccatctggagaacataaactggtggaatgggccaaaccttaccttgccaacaaacgcaaaatatttcgtgtcctaaataatcgccttgaaggccagtatacaatcgaaggagcctttaaggctgctacccttgctttgcgatgcctgtcgatc

SEQ ID NO: 208145 - DNA, 408 bp, Gossypium hirsutum
cccaccagacgactccaaagaaattttaaggaaaaaaaagaaagagagaaagaattagaggaagaagagcaggcattgatggcggagggaaaacaggagaagaacacgacaagcgaagagagcgttaagctgttcgtcggtcaagtgccgaagcacatgacagaagctcaagttcttgcaatcttcgaagagttcgctttggtcgacgaagtcaacatcatcaaagacaaggctactctttcctctagaggttgttgctttgttatatgcccgtcgagagaagaggccgataaggcggtcgatgcctgtcacaataagaagactttgcctggggcatctagtccattgcaagtgaagtatgcagatggcgagttggaaagattagagcacaaactttttgttggcatg

SEQ ID NO: 208146 - DNA, 424 bp, Gossypium hirsutum
ctcattgcgactctggatacattcagcaagccttgcacaatggccaccatcacctctggcgctgtcgctatcccatctttcaccggccttaaagccggtgcaaccgcagctaaagttagcgccacagccaaggttgcagcctctccagtcccaagggtcagcatcaaggcctccctcaaagacgtcggtgttgctgttgcggcaactgctgcaagcgcaatccttgccaacaatgccatggccattgaagtcttgctcggcagtgacgatgggggtctggctttcattcccaaagaattcagcgtaagcccaggggagaagattgtgttcaagaacaatgccggattcccacacaatgttgtgttcgatgaggacgaaatcccaagcggcgtcgacgtatccaaaatctccatgcctgaagaag

SEQ ID NO: 208147 - DNA, 389 bp, Gossypium hirsutum
gaggaaaatcatgggtgccaaagttcttttcttctttgctttgctttccttttcagcggtctcggcatttgcacaggatgaggaagaccaaggtcttgttatgaacttctacaaggattcttgtcctcaggctgaagacattatcaaggagcaagttaagctactgtacaagcgacacaaaaacactgctttttcttggctgataaacattttccatgactgtgctgtccagtcatgtgatgcttcactgctgctggactccacaagaaggagcttgtctgataaggagacagacaggagctttggcctaaggaatttcaggtacattgagaccatcaaagaagctgtagaaagggaatgtcctggagttgtttcttgtgctgatatcc

SEQ ID NO: 208148 - DNA, 444 bp, Gossypium hirsutum
aaaaaaaaaggcagttaggaaccagaaaccaaggcaatggcttctcttgcaaccttaggtggtgttcaaccaacgaccgtgaagggccttggtggcatctctctcaatggaaccaagctcttggtgaagtcaactcgccagagtttcaaacccaaaaactacagggctggtgctgtggtagcaaagtatggtgataagagtatatactttgatttggaggatattggcaacacaactgggcaatgggacttgtatggatccgatgcaccttcaccgtacaacccactccagagcaagttctttgagacatttgcagctccatttaccaagagaggattgttgctcacgttcctgatctttggaggcggttccctcggtctttacctcattgccactgcttccgatgaccttctaccgatcaagaaagggtcgcaactcccaccc

SEQ ID NO: 208149 - DNA, 356 bp, Gossypium hirsutum
tcgctctgtgccctctttctgctcttcactcttcttttacactcaacattcaccactgcttgcaagtcatgcaaaccggaacctggaccatgcccttcacctttttgccctaaggacacattgaagctcggtgtctgtgctgacgtgcttggactagtcaacgtgattgttggaaccccttcttccaacaaatgctgtgctttgcttcaaggattggctgatttggaagctggcctttgcctttgtactgccattaaagccaatgtacttggaatcaacctaaacattccaggttatattagtctaatccttattgcatgtcagaaggaggttactccaggcttcaaacgtttata

SEQ ID NO: 208150 - DNA, 411 bp, Gossypium hirsutum
cccacgcgtccgcccacgcgtccgctctttctcccaattgaaaggaaaatggcaaccatatctactaccaccttcacctcatcaatcacccctgcactcaagccatcagcaagggttgcatccccagtcgctattgggtttcctgcaattgcaaagaaggggaaagtgatgtgctccatggagaagaagggttcaggagaggagaatgggttaaccatgggcatgagagcatcactattggcagcagcagcagcctgtgcagcaacggtgtcaagcccctcatccatgggtctggtggacgagagaatgtccacagaagggaccggacttccctttggtttgagcaacaaccttcttgtgtggatactattaggcgtattcggcttgatttgggcactttattttgttaca

SEQ ID NO: 208151 - DNA, 446 bp, Gossypium hirsutum
  unsure (1)..(446): unsure at all n locations
cttaggagaaaagagaagaaaacaatgtcaggtcctcagtgctgttcgaatccaccaacattggattctgcaagtggggctggtcacgttgagaatcttgctggtctcaacacttatgtttctgggtctcttcaatctaagcttgctgtttttcttatctctgatattttcggatatgaggctccaaactttagaaagctcgcggacaaggttgcagccgctgggttctatgtggtggctcctgacttcttttatggagaaccctatgaccctaataaccctgatagacctctatctgtttggataaaggatcatggaccggataaaggttacgaggatgcaaagctcgtaattgacgctttgaaaagtaaaggggtttcatccattggagctgctgggttctgttggggtgctaaagttgtggctggactggctaangatcccct

SEQ ID NO: 208152 - DNA, 433 bp, Gossypium hirsutum
  unsure (1)..(433): unsure at all n locations
gtgagactcttttgtatacctgtagcatatagtaatagtaagcagtaatagcaatggcctcctccatgatctcatcgggagccattgccaccgtgaaccgctcctccccggcacaggccaacatggtggcccccttcaccggcctcaaatctgcctctgctttcccagtcaccaggaaggccaacaacgacatcacttctcttgcaagcaacggtgggagagtgcaatgcatgcatgtgtggccgcctcttgggaagaagaagttcgagactctctcatacctgcccgatcttactcccgtacaggnggctaaggaagtagattaccttcttcgctctaaatggattccttgcttggaattcgaattagaggagggattcgtgcaccgtaagtactcgagcttacccacgtactacgatggacgctactggac

SEQ ID NO: 208153 - DNA, 437 bp, Gossypium hirsutum
  unsure (1)..(437): unsure at all n locations
ccactatctgtccatctttcagtaagagaaaggaaatggagtttagttcagacgctaaccagcgcattgccaggctcgcagcccatctccaacctcagatggacgaaagttctattttgaggcgagctgactgtanagcgaaaggagggtcaccagggttcaaagttgctatcttaggagcagctggaggcattggccagcctcttgcaatgttaatgaagatgaatcctctcgtctcggttcttcatctttacgatgttgtgaactctcctggtgtcacagctgacctcagtcacatggatactggtgctgtggtacgtggtttcctagggcagccgcagcttgagagtgcgttgaccggcatggaccttgtgatcatacctgctggtgttccaaggaagcctggaatgacgagggatgaccttttcaacatcaat

SEQ ID NO: 208154 - DNA, 420 bp, Gossypium hirsutum
actggacatctgtgagaccagtctacatatatggacctttgaattataaccctgttggagaatggttcttccaccgattgaaagccggtcgccctattccaattcccaactctggagtgcaaataacccaacttggtcatgtcaaggacttggcaacggctttcattgcggttcttggtaatgaaaaagccagcaagcaggtgttcaacatttcgggagaaaagtacgtgaccttcgatggattagcaaaggcgtgcgccaaggctggtggatttcccgaacctgagattgttcactacaacccaaaggagtttgacttcggtaaaaagaaggcattcccgttccgagatcagcatttcttcgcatcagtcgagaaagcaaagcatgtgctaggatggaaaccggaatttggcctggtcg

SEQ ID NO: 208155 - DNA, 437 bp, Gossypium hirsutum
aagcaggcttctcaccttctcaaatatgattccacccttggcatcttcgctgccgatgtcaagcctgtcggcactgatggcatctctgttgatggcaaggttatcaaggttgtttctgaccgcaacccttccaacctcccatggggggacctatgaatagatctagtcatcgaaggaaccggtgtgttcgtcgatagagaaggtgcaggtaagcacattcaagcaggagccaagaaagtgctgattactgctccaggtaagggtgacatccccacctatgttgttggagtgaatgctgacacctacaactcagatgagcctatcatcagcaatgcttcttgcaccaccaattgccttgctcctttcgtcaaggttctggaccagaaggttggtatcatcaagggcaccatgactaccactcactcgtacaccggtga

SEQ ID NO: 208156 - DNA, 444 bp, Gossypium hirsutum
atcttacttgaccggagaattccctggtgactacggttgggacactgctggactctcggcggacccagagacatttgccaggaaccgtgagctcgaagtcatccactgtaggtgggctatgttgggtgctcttgggtgtgttttccctgagcttttggctaggaatggagtcaaattcggtgaggctgtgtggttcaaggccggatctcacatcttcagcgaaggtgggcttgactacttgggaaacccaagcttgatccacgctcaaagcatcttggccatctgggcttgccaagttatcttgatgggagctgttgagggttaccgtattgctggcgggcctctcggtgaggtgaccgaccccttgtacccaggtggcagcttcgacccattgggtcttgctgacgacccagaggcattcgctgagcttaaggtgaaagagat

SEQ ID NO: 208157 - DNA, 448 bp, Gossypium hirsutum
cccacgcgtccgcccacgcgtccgaacgcttttgccaaaaaaaaaaaaaaacctccattgaatatggctttatccatggcttccacttcattttcaagcttctcaataatcaggattcatcccaaaaaattattttcgagaaaagttacgacattgttacgaggggaaactcgtacgaaagcaacgaaaggtggagtctcgagtgtttgtgaaccactgcctcctgatagacctttgtggttccctggtagcacacctcctgaatggcttgatggcagccttcctggagattttggtttccatccacttggattaggttccgatccagaaaccctaaaatggttcgcacaagccgaactaatgcacgcaaggtgggcaatgctggccgtggccggaatcctcatacccgaactactcgaatccttgggcttcatcgacaacttctcat

SEQ ID NO: 208158 - DNA, 421 bp, Gossypium hirsutum
tcggaaaactattaaagccgactttggggcttttattcagaagttagagttgcttcctccgcctgagcctgctcctggtaaagctccccatcctctcaccggtctcaatttcgccgcttctgatgtatttgacattgaagggtatgtgactgggtttggccatccagactggttgaggacacatgaaccatctactcgcacatcacctgtggttttggcccttgtagaaggaggtgctacctgtatagggaaaactgttgtggatgaactggcatacagtatccatggagagaataaacactatagcacaccaaccaatcctgctgcacctgcacgcattcccggtggatcctttagtggagcagctgttgctgttgctgctgattttgtggacttctctttatgcatcgatactcttggt

SEQ ID NO: 208159 - DNA, 390 bp, Gossypium hirsutum
aagatcccccctaaggagaacagtaatacattttcacaggtagggctgaattctcttaactgcggagatagttgctatattacgacaccttatccgtttcctgtgcactctgaggtgtaatgaaaaagacaaagaagacgggattgattttataaaatgtcaagcttgcacctggctcaacgcggggcccatacgttggggagactgttgaactctattctgaagacccatacattttctttttatccagaccaaaaagacatggtgaaattttcacaacccatataccgggttgagcacgcgtgacgaccgacaacccttttgcgggtatgttcgagttggggacacatgctcatttttttattccgacctaccttaagagcaaatatt

SEQ ID NO: 208160 - DNA, 460 bp, Gossypium hirsutum
gtcacaactcagagaagagaaggggaagggaaacaacaatgatggggcaaaggcaacacgttgttcttctcattgtctcagcttttcttctcttccaaacctcaaacgcccataacgttacacgtctgcttgcaaagcacccctctttgtccacattcaatcattacctcaccctcactcacttagctcccgagatcaaccgccgcaccaccatcactgtccttgccttagacaacgccgccatgtcttccctcttggataaaaacccttccatttacaccatcaagaacatcctttcccttcatgtcctccttgactactttggtgccaagaagcttcaccaaataaggaatggtactgcactagctgctactatgttccaagctactggtgtggctactggggtttctgggtttgttaatataaccgattttaaaggtgggaaagttggtttttgagc

SEQ ID NO: 208161 - DNA, 410 bp, Gossypium hirsutum
  unsure (1)..(410): unsure at all n locations
gcgcaggtattttcaggaccgacaatgttcccgttgatgacattgttaagcttgttgacaccttcccgggccaatccattggctttttcggtgctctgagggccanagnttactatgacgaagtgaggaaatggatcggagaggtaggagtcaatagtgtcgggaaaaagctcgtgaactcgagggaagggccaccatctttcgagcaacctacgatgaccattgagaagctgttggagtatggaaacatgcttgttgcanaacaagagaacgtgaagagggttcaattggctgacaaatatttgagtgaagctgtccttggaaatgctaatgacgatgctatcaanagaggagctttctaaatgggaaattaagctccaagggaatgaaaaaaaatctatattggacac

SEQ ID NO: 208162 - DNA, 440 bp, Gossypium hirsutum
  unsure (1)..(440): unsure at all n locations
tcgcccacgcgtccgcccacgcgtgcggtgagactcttttgtatacctgtagcatatantaggagtaagcagtaatagcaatggcctcctccatgatctcatcgtcaaccattgccaccgtgaaccgctcctccccggcacaggccaacatggtggcccccttcaccggcctcaaatctgcctctgctttcccagncaccaggaaggccaacaactacatcacttttcttgcaagcaacggtgggagagtgcaatgcatgcaggtgtggccgcctcttgggaagaataagttcgagactctcttatacctgcccgatcttactcccgtacagttggctaaggaagnnagataccttcttcgctctaaatggattccttgcttggaattcgaattagaggagggattcgtgcaccgtaagtactcaagcttacccacgtac

SEQ ID NO: 208163 - DNA, 387 bp, Gossypium hirsutum
  unsure (1)..(387): unsure at all n locations
aaattgtttaacaaatggctcgtactaagcaaactgcgaggaaatcaaccggcggcaaggccccacgcaagcaactagccactaaggctgctcgtaagtcagctccggcgacaggaggagtgaagaagcctcaccgtttcaggccaggaactgtggctctcatggaaatcaggaagtaccagagtagcaccgagctcttgatcagaaagcttccattctagaggcttgtgagagaaatcgctcaagatttcaagaccganttaaggttccaaagcagcgctgtctgcgctctttaagaagctgccgaggcttatctcgtcggactgtttgaagatactaatctatgtgctattcatgctaagagggttaccatcatgcctaaagata

SEQ ID NO: 208164 - DNA, 359 bp, Gossypium hirsutum
gtgagactcttttgtataactgtagcatatagtactagtaagcagtaatagcaatggcctcctccatgatctcatcggcggccattgccaccgtgaactgctcctccccggcacaggccaacatggtggcccccttcaccggcctcaagtctgcctctgctttcccagtcactaggaaggccaacaacgacatcacttctcttgcaagcaatggtgggagagtgcaatgcatgcaggtgtggcctcctcttgggaagaataagttcgagacactctcataccttcccgatcttacacccgtacaggtggctaaggaagtagattaccttcttcgctctaaatggattccttgcttggaa

SEQ ID NO: 208165 - DNA, 434 bp, Gossypium hirsutum
tgtcggtctcacttcaagctgcagctaccctgatgcaaccaatcaaggttgctgcaccatcaaggaccaatgtgctgctcagggcctcccagagcgtttctaaggccttcggtttggagcctgttggtgctaggctcacctgctctttgcaaactgacctcaaggacttggctcagacgtgtgttgatgctaccaagctcgctggtttcgctcttgctacatctgctcttgttgtctcgggagcaagcgctgaaggagttccaaagcggctaacctacgatgaaatccaaagcaagacatacatggaagtcaaaggaacaggaactgctaaccagtgcccaaccatcgatggtggtgtcgactcttttgccttcaagcctggcaaatactaccccaagaagttctgcttggagcccacttcctttactgtcaag

SEQ ID NO: 208166 - DNA, 450 bp, Gossypium hirsutum
  unsure (1)..(450): unsure at all n locations
agcttttatccgctattaaggcggctgttacttccttcttccctctcttctcgacttgccttgtaacccagcttatcggttctgggatcagtttgatccttggtttagccttttctgcagtagtcattttaggcttccaagttcattaccctncaccttattttattttcctttgccttgtttacgtgattattctcttgtttattgtggagcatttacaagtgaattggatatttgcttacgtagtcgtcgtcgttgaatcaagctgggggtttgaaccattaaagcgaagtcgaaatttaattaaaggaatgaaaggcgttgctttgaagattatactgcntttcgggctcgtaatttccattaatacctggcgctcagttatgacatacaggaattcagctgctgataaatggacaagttggttatttgtttgaatatggacgtcac

SEQ ID NO: 208167 - DNA, 412 bp, Gossypium hirsutum
  unsure (1)..(412): unsure at all n locations
cttcaatggctactacttctccaatggcaagtcggctgaagagcagttttacatcatgtcttacaagaaaactagttggcccaaagggaatttccggagccccatttatattctcacccggcaagacccgaactccctgtttcactgtcaaagctgttcaatcagacaagccaacattttaagtaattcaacccattaatggtgacccattcattggaagtttagagacaccaatcacatcaagtcctttaattgcttnggacttatccaaccttccagcttatagaacagcagggaacccacttctaagaggcatataagttggtttagcccatgggnttctcttagtatgtccatttgtcaaagctggtcctttaaggaacacagctgttgcaggtcaagctggttcatt

SEQ ID NO: 208168 - DNA, 451 bp, Gossypium hirsutum
cgcaaaaccctccttgcagacgtcttctgcttcttcctccaaacaatctccaaggaaacgaaaatggctgcctcttccgcttttctttctacttttatttctccccaaacggtctccttctcacccaaatcctcctcttctcttcgcctccttcctccaactagcgtgcgcatggtacgaactgtgaccctagccaccgcttcacagcccgccaccatcccccggacgccacgcggcatcatgaatccgcgtcgtgtaacgcctgagatgcaggatgtcgtcggagtccctgaaattccccgaactcaagcccttaagcagatttgggcttacattaaagagcacaatcttcaggaccctgaaaacaagaagattataaactgtgatgagaagctgaagaagatatttggtgggaaagatcgcattggatttcttgaaattgctgtgttga

SEQ ID NO: 208169 - DNA, 367 bp, Gossypium hirsutum
tggacgcgtgggcggacgcgtgggttcgaatgggttaagggacctgtgagtaaggttatctgtcactacagctgtgcagttttatgacctacaagatcggttggggtatgatcagcctagtaaagctgttgagtggctaattaaagcagcttttgatgctattgctgaactttcttcacttaacacttcattccctgatacaccaaagcaactgattgatgagaaaagagggagtgggggaatagaacaagggtttgactcagctgaagttgtgttagatggagatccaagcaattaccaacaacaccttttcttgtccaaattagctttcagtaacacgtctgagactcgaaagaactcgagttta

SEQ ID NO: 208170 - DNA, 443 bp, Gossypium hirsutum
atcttatcgaggtgatcggatttgtttcggtagatatgctcttcaagcacttgaacccgcttggattacatctagacaaatagaagcggtgcgccgcgcaatgacacgaaatgtacgccgtggtggaaaaatatgggtacgtatatttacagacaaacccgttacggtaagacctacataaacacgtatgtgttcggtgaaaggatcttccgagtattgggtagctgtcggtaaaccgggcagaatactttatgaaatgagcggagtagccgaaaatatagccagaaaggctatttcaatagcggcgtcaaaaatgcctataaaaactcaattcattatttcaggataggaatatagaaccaaaggaaagaagtcttgtcttgggaataaaaaaacaattgcgagtttgcttttttttttttggacaacaatatttttttttt

SEQ ID NO: 208171 - DNA, 360 bp, Gossypium hirsutum
gcagatcttgcattgtattatccgtggaccatggggatgggggtttggttcctgttccacaggattcactttacggagctacaagatctctctttggcggttcacttgtttcttactacctaaaagagactgcaaactgggggctgtacgtaaacaatcttcgaggatcatttgcacaggctcgcttcaaaggaataactgagagagcattggttattattaaccctgcgaaccctactgggcagtgtctcattgaagctgatttaaaagaaatattgcatctttgttaccaagaaaacttggtattacttgtagatgacgcttaccaccagaatatataccaagactagcgcgccttta

SEQ ID NO: 208172 - DNA, 454 bp, Gossypium hirsutum
cattaacttctcttcttgacaaggcagaaagtgttgttccgctagatttacgatcaaagacccctgtgagagttggggcaactgctggtctgagggcattaggaggcgaggcatctgataaaattttgcaatcggttagggaacttttgaaaagtagaagcacccttaaatccgaggcaaatggggtcaaaattctggacggctctcaagaaggttcttatgagtgggtgacaataaattacctactagggaatttgggaaggacatatcatgacacagttggcatagttgatcttggtggtggatctgttcaaatggcgtatgccatctccgagaatgctgcttcaagggctccaagtgtaccagctggacaggacaattatgtaaatgaaatgtatctcaagggatcaaaatattacctctatgtatacaggtatttgcactatggcttact

SEQ ID NO: 208173 - DNA, 420 bp, Gossypium hirsutum
  unsure (1)..(420): unsure at all n locations
aaaaagaaaagaaaataaaagaaaatggttaagtccgacatggcatctcantggagggtgctgagtggcgagaacgactgggatgggttactccaaccactgaatctncatctccgccactacattattcactacgnacaaagggctgggtctgntggtgatcgctacaatcataacaaacatggtggatgcctgaaagataagtttcttgcagaagccggccttgataaatgaaatgagtgcaagttcagcgtcacccactacatgcatgcagagtcagatatttgtgagccctcatgggtnggatttgtggcagtaacaacagatgaaggaaaggctgttcttnnaaggaaggacattgtgattgcttggagaggaaccatacattacactgagtggattaatgatttatacgctaat

SEQ ID NO: 208174 - DNA, 436 bp, Gossypium hirsutum
aaaaagctctctaaattccctttcccgagctgaaagataaacaaggtgagcctaaaagagctgaagcaatggcagtttgctcagcatacaccacccagtccctccattcaacgtgttcaatctccacaccagcgaaaacccatttaggttttcaccaaaagcaagtagttttctataggagaagcagcaagagaggtggcagcggcagcagcagcggcccatgcgtgataacatgctcggccggtgattcacaaacagctgtgattggtttggccgcagactcaggatgtgggaagagtacctttatgaggaggctaacaagtgtgtttggtggtgcatccgatccaccgaagggaggcaaccctgattcaaacacgctcattagcgatatgaccactgtgatatgcttagatgattaccattcactcgacagaac

SEQ ID NO: 208175 - DNA, 180 bp, Gossypium hirsutum
tcgggaagctgcctatgttcgggtgcaccgactcggctcaggtattgaaggagcttgaggaatgcaagaaggaataccccaatgcattcattataatcattggcttcgacaacgtgcgttaagtgcagtgcattaggttcattggctacaagcctccaggcttataagctttttataaac

SEQ ID NO: 208176 - DNA, 443 bp, Gossypium hirsutum
cccacgcgtccggccttctcagcagctcttgctctttcttccattcttctctcagccgcgcagcctgccgtagctgatattgcaggcctcacaccatgcaaagagtccaagcaattcgccaaacgtgagaagcagcacatcaagaagctggaatcgtcgttgaagctatacgcccctgacagcgctccagctctcgctatcaaagcaaccatcgagaaaaccgagagacggtttgacaactatgggaagtacgggctgttgtgtgggtctgatgggttgcctcatttgatagtgagcggtgatcagaggcactggggtgagttcatcacgcctggtctcttgttcttgtacatcgctggatggatcgggtgggttggaaggagctacctcattgctattagcgatgataagaagcctgccatgaaggagatcatcattgacgt

SEQ ID NO: 208177 - DNA, 425 bp, Gossypium hirsutum
ctttgccttcacaacttacaactcagcgtctccactctctttctctcttcgcctccaaatggcttctgccaccacttccaccactttttccctcctcaaaaccaccgcctccaccacctcttcctccgcctcccgctcttctgcatccctcatccgccttccctccactcgccgccacctcaaatcctcttctctcatccacagcctaggcttctcctccgctgcttctggggactctctgctttccctccatgcctcctccaaagttccatctttcaagggaaaagggtcaagaggggttgtttcaatggccaagaagagtgttggggacttgactgccgctgatttgaaagggaagaaagtgtttgtgagggctgacttgaatgttccattggatgatagccagaacatcactgatgacacca

SEQ ID NO: 208178 - DNA, 413 bp, Gossypium hirsutum
  unsure (1)..(413): unsure at all n locations
cccacgcgtccgcccacgcgttcgctcaaattcgaggagaaagatgggattgattatgctgccgtcacagttcagcttggtggtggtgagcgtgtgccttncctgttcaccatcaagcaattggttgcatcaggcaaacctgatagctttggaggagactttcttgtaccattctaccgtggctcatcttttttggacccaaagggaatgggtggctcaaccggttacgataatgcagtggccttgcctgctggaggaagaggggatgaggaagagctagccaatgagaacaacgagagtgcttcatcttcatcagggaaaatcaccttgagcgtcacaaagagcaagccggagaccggtgaatttaatcgtgtgttcgagagccttcagtcatcttacactgacttgggtgc

SEQ ID NO: 208179 - DNA, 432 bp, Gossypium hirsutum; identical to SEQ ID NO: 194233

SEQ ID NO: 208180 - DNA, 400 bp, Gossypium hirsutum
ggatgttgcacatgaatcattgagggaatctgttattaaaggagatttcggtcctgcttctgactctcttaatagggtgatgtacatggatccttgtacacctaaaggttacttgtttccatcatcaaatctttcactgggttatatggctgaaaaaagtaaatatagttccgaacttcaagctactggtaacttctcagagtgcacatctgctgcactaatgttattacaaaacggaaaagaaaaatgttccaactaccgctgttatttggggtctgttttcatgcccaagctttaaggaaaatttttggctacagaaaatttctttcatacctcaaagttctttaggttgcatcaaagggcctctctttctgatgtcatgatggcggggcaacatttt

SEQ ID NO: 208181 - DNA, 399 bp, Gossypium hirsutum
cggattgcatatccggaacgtggagccgggtcgggtcatggatcgggtgagtcccgttctggtgatcaggggacggcgattatggcggttccggaagtttcccacttggggtggggacattggtatactttgagagagcttgaggaggctactgatgaatttgctgctgagaatgtgattggtgaaggcggctatggaattgtttaccgtggcgtcttggaagataatacaaaagttgctgtgaaaaatctactaaataataggggccaagctgaaaaggagtttaaggttgaagtggaaacaaatggacgcgtacgacatatgaatttggtgagggttcttggttattgtgcggaaggagctcataagatgcttgtttatgaatacgttgacaatggg

SEQ ID NO: 208182 - DNA, 183 bp, Gossypium hirsutum
  unsure (1)..(183): unsure at all n locations
gccagccccttcccttctcgatgacaacattgccagcatcttgccatgtaacaccagtgagccatggaacggtaagtgcgccaagcgtanccaacatggcccaccgnccatggatcaattcacactccctaaaccnctgcantcacaaacgccgatgctacatgcttctttatggggacacgc

SEQ ID NO: 208183 - DNA, 172 bp, Gossypium hirsutum
  unsure (1)..(172): unsure at all n locations
gtaaaatgatcctgcattcgtaaagaatctagctaatctcgctaacctccatgtcaatgatgcattaggcactgcgcacggatcccatgctttcacaganngagtggctaattacttaaagccttctngcgctggtttttgtatgcaaaaggaaatcgattatgttgatgga

SEQ ID NO: 208184 - DNA, 418 bp, Gossypium hirsutum
tttagctatagcatacactactagtacccactactagcaatggcttcctcaatgatctgatcggctaccattggcactgcctctccggcacaggctaacatggtcgctcctttcaccggcctcaagtctgcctctgctttcccagtcaccaggaaggccaacaacgacattacttctctcgcaagcaatggcggcagagtgcaatgcatgcaggtgtggcctcctactggaaagaagaagttcgagactctctcatacctccccgatcttacacccgtgcagttggctaaggaagtggattaccttcttcgctcaaaatgggttccttgcttggaaattcaattagaggagggattcgtgcaccgtatatactcgagcctacccacgtactacgatggacgctactggaccatgtgga

SEQ ID NO: 208185 - DNA, 437 bp, Gossypium hirsutum
  unsure (1)..(437): unsure at all n locations
gccacgctctcgttctttgaaattcccttgctatcgccctttgtaacaaactttgttgagatggcccgtgcgaagcacactgctcatcaatccaccggcanctacgctccaaggaagcatcttgccactcaggctgctagtaaggcggcaccgacgaccggaggcgctaaaaagcgtgaccgatatcgtcctggatctgtacctgtagctgaaattctgaagtacctgataagttctgaactccttattaggaaactgactttgcaaatgctctttcaagaaattgtccaagactttaacaccgatctgaagatccagatccatgctgagatggcttctcaatgaggcgtagaggcataccttgatgcatagttcgaagataccaacctatacgccattcatgctacgcttgttacaatcattcccacagtcattca

SEQ ID NO: 208186 - DNA, 446 bp, Gossypium hirsutum
  unsure (1)..(446): unsure at all n locations
cccacgcgtccgcttcaatggctgcttctacttcggtttcagtagctgggtttaaggggggtttagggaagagttccttggatggaggtgaagattatgccatgttggcggctaaatcgactcccaacgtcgttcgaatcggaaagccagttcgagctcagccgatgatgaagaacgttaatgaagggaaaggggtgtttgcgccgcttgtggtggttactcgccaaatcgtcggcaaaaagaggttcaatcagcttagaggaaaagctattgccttacattctcaggtaattaacgaattttgcaaagcaattggggcagatggtaaacaaaggcaaggattgattcgcttggcaaagaagaatggtgagaagcttggattccttgcctgatttatggccttacacgtggactntcgttttgtctttatttacaaaatgtttcat

SEQ ID NO: 208187 - DNA, 354 bp, Gossypium hirsutum
aaacaaagcattatactcgtactaagaagaaactagttgtaggcagctattatatcgcttctcctttctcccttctcttaagagtagaatgattattggaaggttacgccaatggttaagtctactggtctgtgtgcttgctgttatactactcaaatctgaaggcgctagtgtagggattacttatctgcaggatgccgtagcgaaaggagccgtttgtttggatgggagtccaccagcttaccattttgacaagggctctggcgctggacttgataattggattgttcacatggagggtggaggatggtgtgaaaatgtgccgacttgcctctctcgtaagaacaccgattt

SEQ ID NO: 208188 - DNA, 409 bp, Gossypium hirsutum
cccacgcgttcgcttcaaaggctgcttctacttcggtttcagtatctgggtttaagggaagtggagggaagagttccttcaatggaggtgaagattatgccatgttggcggctaaatcgactcccaacgtcgttcgaatcggaaagccacttcgagctcagccgatgatgaagaacgctaatgaagggaaaggggtgtttgcgccgcttgtggtggttactcgccaaatcgtcggcaaaaagaggttcaatcagcttagaggaaaagctattgccttacattctcaggtaattaacgaattgtgcaaagcacttggggcagatggtaaacaaaggcgaggattgattcgtttggcaaagaagaatggtgagaagcttggattccttgcctgatttatgggcttacacgt

SEQ ID NO: 208189 - DNA, 459 bp, Gossypium hirsutum
cccacgcgtccgcccacgcgtccgcccacgcgtccgcccacgcgtccgcccacgcgtccgcccacgcgttcgagcgtttagctgaaaaacccaatcccaacttgtttcttcatggcgtctccttcgctcttacaatccacatcctcctccttccacggcccctcccctttccttgcaccaccattctccgcgcgcctgccctactctaaccccagaaatggatacgccggcgtcgtttcggtgagggcaacgggagagattgtgttggtggataaatcggaagccgaaaaaccctaccgtctcaaaactacttacctagacaaaattattccttcctaaagaagagttcaagtacaccaatattcaccaggttccaaagcttgaaaagattgtggtgaatcgtgggattggagatgctgcccagaacgcgaaaggcttggaagccgcaatgaacgagat

SEQ ID NO: 208190 - DNA, 455 bp, Gossypium hirsutum
actattacatcatcttttaatatgtccactatcatctttttcaattgttgctcttctttgactgcctccaaattgattaatccaagaatacccactaaaggttcaagctttctaaggactcacaagagtttttcatggtggaataggcacttcttgcccaaatgtacttcccagaagcatgttcaatgtcagcttcaaaatgggcagaaaatgaggtcattttcactgaaggaatgtgcaatctcagttgctttggctgctggattgataattggaatgccatcattggattcatctcctatggcttatgcagctaatccttcattgcccgatttatcggttttaatctcggggcctcctataaaggaccctggagcattgttgagatatgcactgccaattgataataaagctataagagaagtacaaaagccacttgaagatataacagagag

SEQ ID NO: 208191 - DNA, 419 bp, Gossypium hirsutum
ggtgacttcctccagaactactatgtcaaccctctacttaaccatgcctatactccagaccagtacggctcattccttattgataccttcacaaacttcgtcaagaacctctatgggttgggagctaggaaaattggggttacctcacttccaccgttaggttgcgttccattagcaagaacattgttcggttaccacgagaaaggatgcatctccaggttcaataccgatgctcaacaattcaataaaaagctcaacgccgcagcagccaatctccagaagcagcatcctggtcttaagattgtggttttcgacatattcaaggcactttacgacattgttaaatctccctctaactatggttttgttgaagcaacaaaagggtgttgtggaactggaacagtagagacaaccgcatt

SEQ ID NO: 208192 - DNA, 438 bp, Gossypium hirsutum
gttagctatagcatacactactagtacccactactagcaatggcttcctcaatgatcggatcggctaccattgccactgcctctccggcacaggctaacatggtcgctcctttcaccggcctcaagtctgcctctgctttcccagtcatcaggaaggccaacaacgacattacttctctcgcaagcaatggcggcagagtgcaatgcatgcaggtgtggcctcctactggaaagaagaagttcgagactctctcatacctccccgatcttacacccgtgcagttggctaaggaagtacattaccttcttcgctcaaaatgggttccttgcttggaattcgaattagaggagggattcgtgcaccgtaaatactcgagcctacccacgtactacgatggacgctactggaccatgtgggagctggctatggtcgggtgc

SEQ ID NO: 208193 - DNA, 380 bp, Gossypium hirsutum
  unsure (1)..(380): unsure at all n locations
atataattcccccaagcctttcttaatttggccggccccaatttttttccttaactaccaacaaaaacctggaattgtggaccaacaatcatatttccaaacccaaggttatcccgggccttcaaaacctatcctaataaaccggnactatccctgagaaccgctatatctccattaaaggcccnacctgtaaggttgtggaagtttccacctccaatactgtgaagcacggtcatgctaagtgtcacttcgttggcatcgatatcttcactggcaagaagttggaagatattgttccctcctcccataactgtgatgttcctcatgtcaatcgtactgactaccaatttatttacatttctgangatggatttgggagc

SEQ ID NO: 208194 - DNA, 450 bp, Gossypium hirsutum
gagactttaaactgagctttgctgaattttcgtgatcgtcgagaaagaaaattatgggaaggaaattcttcgttggcggcaattggaaatgcaatggaaccactgaggaagtgaataagattgtgagtactttgaatgctggagaggtgccttctcaggatgttgttgaggttgtggttagccctccatttgtgttccttcctttggtcaaaacttcactgagacccgatttccatgtcgctgcacaaaattgttgggtcaagaaaggaggtgctttcactggtgaagttagtgcagagatgcttgtcaatttgagcattccttgggttattattggtcattctgagaggagacttattttgaaggagtcaaatgagttcgttgcggataaggttgcttatgcacttgctcaaggcttgaaggtgatagcttgtattggggaaacacttg

SEQ ID NO: 208195 - DNA, 437 bp, Gossypium hirsutum
cagtgagactctttgtataactgtagcatatagtactagtaagcagtaatagcaatggccggctccatgatctcatcggcaaccattgccaccgtgaactgctcctccccggcacaggccaacatggtggcccccttcaccggcctcaagtctgcctctgctttcccagtcactaggaaggccaacaacgacatcacttctcttgcaagcaatggtgggagagtgcaatgcatgcaggtgtggcctcctcttgggaagaagaagttcgagacactctcatacctccccgatcttacacccgtacagttggctaaggaagtagattaccttcttcgctctaaatggattccttgcttggaattcgaattagaggagggattcgtgcaccgtaagtactcgagcttacccacgtactacgatggacgctactggaccat

SEQ ID NO: 208196 - DNA, 353 bp, Gossypium hirsutum
  unsure (1)..(353): unsure at all n locations
gcgggtactacctctgttcttccttgtacactccctcgggcaaaacttactccagaggccgcataacttgtaaccaaccctaatctatgctttttggccttactttcgagatccttgaggtctcttaaaggaaccaggctgactactgataatgcgtgtggctcaactatggcctctcgtatgggctcccgtcctgccgtccagacacacatatttnttgatattgagacctttgtcttcaagaaggagaaagggtacctcgctggtcaggacgagtacattgtgagaggagggagagacttgcttaagatggttggctgacgctttcaaagggggtaagcaaaattggtgtt

SEQ ID NO: 208197 - DNA, 354 bp, Gossypium hirsutum
taacaatatcacattgttttcttcaggctctttctcagccatggctgcagccatctccaccgtcgctggcgctgccgccgccaaccgagctctgggagtgtcagtcccaacctcagctttcatggggaagaaagtgagctcaagattcaacagcaccaggcaggttccttcgggaagttttaaggtgatggcggcggagaaagagatagacgaagagacacagaccgaaaaggaccgatggaaagggttggcttacgatatttcggacgaccaacatgacattactcgagggaaagggatggtggattccttgttccaagctcccatgaatgatggaacttactatgctggcat

SEQ ID NO: 208198 - DNA, 263 bp, Gossypium hirsutum
cccatcgtacatccacgccactgttcacacgtgcgatctattacacccggcgggaagggataccttagaggtgaaaaagccaaaaatcactggttacaatcatctactagggatgtgttgtccttacccttcataaagaatggttacattcgattaagcacttacctgaggacctacaacattggttactatgttgacaccaagggctatggtgcctttcacaagggtatgccccactagttctaccatggccgcactggtct

SEQ ID NO: 208199 - DNA, 448 bp, Gossypium hirsutum
caatggccaatacaacctccctcgaagaataattaaggaaactcagcgtctcctcagtgaaccagcacctggaattagtgcttcaccatcagaggataacatgcgatatttcaatgtgatgatccttggtcccacacagtctccatatgaaggaggcgttttcaagttggaactatttttgcctgaagaatatcccatgactgctcccaaggttcggtttcttacaaagatatatcatccgaacattgataagcttggaagaatatgccttgatattctcaaagacaaatggagtcctgctctccaaatccgaactgtacttttgagcattcaagcactcttgagtgctccaaatcccgatgatccactctccgagaacattgctaaacactggaaaacgaatgaggctgaagctgtcgagacagctaaggaatggacccgtctatac

SEQ ID NO: 208200 - DNA, 309 bp, Gossypium hirsutum
gcgcgcgtgcgacacattgactcttccttgaccattgtcatttgagaagacatggtcaaagtgggggcctggtatgacaatgaatggggctacagacaaatgcttgttgatcttgcacacttggtggcaagcaagtggcacggcatgcctgtaaatggaagcggtgaccccttgaaggattactgcatggcaaacccagcatatgaggaatgcaaagtgtacgaggcttaaatagatgcaactttatgattatttttaatggtatttatacccgcagatggtataaatactggccaagggcttttcaat

SEQ ID NO: 208201 - DNA, 443 bp, Gossypium hirsutum
cccaccgtccgcttacttactctgataatgtcttgcaaaattagttccttgctgtctcacggtttcatcctcagcattctgggtgttattgctgggcaagccattgcagcacgtgacatctcgaagaatgatgatcaaatgaaacagcctgaatatctaaaacatgaccgtagtgtgctcattccaggccttggacgagtgttgctgccaccagttttcaaacatcacaatccacacactatcggcactggcacccacaccggcagcagtggcggccaccttggcagcacaattggccgaaatcgccagattccacgtggtgatgacacattcgttccaaaccctggttttgaggtgccaattccaacaggtcgtggtgcttgcattgcacgaacaaacccacgttcttgaacatgcttggctatgaaacttccaataaatct

SEQ ID NO: 208202 - DNA, 454 bp, Gossypium hirsutum
  unsure (1)..(454): unsure at all n locations
cccacgcgtncgccacgcgtncgcccacgcgtacggccacgcgtncgaccaaccatggaagcaacctcacttctttcttcatcttcttccttcaccctctctttccttccttcacctctttcttctccacatctccaccacaggtctcttttcttcaggggcatgtttccagttactgtaaacccgcagacatgttcaacagctgttgtccgcaaaaagttgagcttctgcacaaaggcagttcttggaggaaatgtgcatgtaacaggagttcctacttctgtccctgtaagagtagcacacgagcttcatcaagctgggcatcgatatttggatgttaggactcctgaagagttcagtgcagggcatgtccctggggccattaacatcccttacatgtacaaagttggaccaggaatggcaaaaaaccccagctttgtagctgaagtatcat

SEQ ID NO: 208203 - DNA, 404 bp, Gossypium hirsutum
cccacgcgtccggataagcaagacatccatgagttggggccaatagaagaggttgtttacaatttggtgaatcatgtttatgctgctccaaatcaaatggtcaatatacttgatatgcaagagagaacaagtgaagggaaaaactattatacctttgaatatgaactcacctctccaaactatgctagtgctttctttgcaacaatagctattggaaatgggagatattacacactggttgttggagcccttgaaagacggtggagaaggcttcgaaacaagctgaaaggggtggccgactccttcaaggtgcttgacatctgaagaccccccaacttattctttcattgtatataaaccccgaaacataccaattggttttgtgtttagttgagcatcatcat

SEQ ID NO: 208204 - DNA, 346 bp, Gossypium hirsutum
atttgggttgcaatgcacaagcaatggctttgatgactggtttacgtggctcttcacaagcgtcgttggaaggtagtctccaactcatcggccaaactcggttgaacgttgctagcaccaacaggttggctgtggctagacccggttttaccgttagagctcaacatgtccctgccgagcctgaaactggacgcatagctgtgctgggtcttgttgctgctggtttggctactggctcctttgttcaagctgaccttgctgatgcacgaagcatcaaagttgggccggcttcaccggcctccggtggattgcccggaacttttaattccgatgagccaagagacct

SEQ ID NO: 208205 - DNA, 443 bp, Gossypium hirsutum
gtgataacatgatgagaggtctaccaacttggactggtacaagggccctacacttcttgaggctcttgaccagatcaatgagcccaagaggccttcagacaagcctctccgtctaccacttcaggatgtgtacaagattggtggtattggaactgtcccagttggtcgtgttgaaactggtgtcttgaagcctggtatggttgtgacctttggtcctactggtctgaccactgaagttaagtctgttgagatgcaccatgaagctcttacggaggcgcttcctggtgataatgttgggttcaatgttaagaatgtcgctgttaaggatctcaagcgtggttatgttgcatccaactccaaggatgatcctgctaaggaggctgcaaacttcacttctcacgtcatcatcatgaaccatcctggacaaattggaaacggatatg

SEQ ID NO: 208206 - DNA, 269 bp, Gossypium hirsutum
ctatagcatacatactagtacccactactagcaatggcttcctcaatgatctcatcggctgcgcattggcactgcctctccggcacaggctaacatggtcgctcctttcaccggcctcaagtctgcctctgctttcccaggcaccaggaaggccaacaacgacattacttctctcgcaagcaatggcggcagagtgcaatgcatgcacgtgtggccttctactggaaagaagaagttcgagactctctcataccttcccgatcttacac

SEQ ID NO: 208207 - DNA, 448 bp, Gossypium hirsutum
gaagcagcagtgaactggagatgtgccttttttgcgcctttctgctgcatcatctccattggtgagtggggatctaggtgggctatcacaagctttaccgtcattacctaggcgtcgtggatctaatttggtgcctcgagcttcaaaggatgtcccgtacagttttcgttttccaccgatgactaagaaacccaaatggtggtggaggactttagcgtgccttccttatttaatgcctcttcacgagacgtggatgtatgcagaaacagcatatcatttacacccatttttagaagactttgagtttttgacctatccgtttctcggagccattggaagtttaccgagctggttcttaatggcatatttctttgttgcatatctaaggatagtgagaagaaaggatggccccatttttttcgatttcatgttgtgatgggcatggtat

SEQ ID NO: 208208 - DNA, 437 bp, Gossypium hirsutum
cccacgcgtccgtttgttctttgttcctcttccgcatgtagaatatgatattctcagatgctagcatttgatgttggtgaattatgtgacctttggtggagagtgtgaggctctgcgctgagcaaatagatgcaggcagttggcttttagtagtaatgaagaacatacaggttgtggaaggctctccagttttatgcaggcttcagcattttcatgctttatgtgtatcaactccctatagagttctcaagtatgttacagtggatagctgattttgttggtctattcaaaatatgtgcaacatctgagtggactgaaatttgctcttctgtttctctcgtacttttttacatcatgggatgtaccacttttattactataagtctgattctgtttaaagattttagctgaacctttaaatgaaatgcaatacacgc

SEQ ID NO: 208209 - DNA, 314 bp, Gossypium hirsutum
gaaaaaagagttaaatcattttgaatttgttttgagatttaaaaaaagggtgatgaacatggggtatgggtggatttctggccacctccttttgggatgagagtgaggattgttctggtggagatagagataaaatacgcgttcaaggaagaagattttaggaacaagagtgatgtgcttctgaagatgaaccctgttcataagaaaattcttgttcttatctataatggaaaaactgtgtgtgagttcctcaatcacgttcaatacattgatgagattttgacggataaaacttccctacttcctactcatcc

SEQ ID NO: 208210 - DNA, 441 bp, Gossypium hirsutum
ctccagtctcccaaccaaaccaaacaaccccttatccttttccatctctctcaaagaaatggctacatctcagctaacagcgtcgtcagtgacagcatcagctaggaacttggcttcattacaagggcttaggctgtccactgtcaaattctcttcctttggaacattaaagcctggggctttgaccagcacgtccttcaaacgtttggttgttaaagcggctaccgttgttgcccctaagtacacttcagttaagcccttgggtgacagggtgttggtgaagattaaagaaacagaggagaagactgagggtggcattttgcttccaacaactgctcaatcaaagcctcaaagaggtgaggtggttgctgttggtgaaaggaagacaattgggaataccaaattggaaagttctgtgaagactgttgctcacgtcatata

SEQ ID NO: 208211 - DNA, 428 bp, Gossypium hirsutum
gcgcccacgcgtccgcacaattttgatgacccattaagcttttcatcaatggctttccttcaagaagcttgggtctctcttcaacccaagcttctttcatcttctcaacaccccacatcccttacctctctgaacctgtctttttcagccactttcccttgcctcaaactcttcaccactcgccctcttcatggcggggccaaaatgtcagcctgcgtcgcttccagctacaccaccgctttagccgatggagccaaggacaacaacacccttgatgccaccagcttcgacggtgaaaaagtcgagacaatctttttcgacccacaagttcttgaattcttaacaaccccaccattgatgttctcaaaaacgtcaggtttgggtgagatggtagctcctcgagcttattcgacacggcaaattttgac

SEQ ID NO: 208212 - DNA, 429 bp, Gossypium hirsutum
cagatattattggaagaagcttgaagacaaataccatttctcttgccaatttacagctgagctttttgcaatgaaccatacagatttcatcatcaccagtactttccaggaaattgcaggaagcaaggacactgttggtcaatacgagagccacactgctttcactcttcctggtctctaccgcgttgtacatggtatcgatgtgtttgatcccaaattcaacattgtttcccctggtgctgatatggagatatacttcccttacaccgaagagaagcggaggttgaagcattttcatcctgagatcgaagaccttctttacagcaaagttgagaatgaagaacacttatgtgtgctcaatgaccgcaacatgccaattctgttcacaatggcaaggcttgatcgtgtcaagaacttaaccggactcgt

SEQ ID NO: 208213 - DNA, 284 bp, Gossypium hirsutum
aacaaaccaagtaacctaaagccttaggcaccatggcaacctctgctatccaacaatctggggtcgttggccagaccgctttgaagcagtccaatgagctcttacgcaaagtcggagctttcgatggtggtcgtgttaccatgcgcagaactgtgaaaagtgcccctaccagcatctggtacggccctgaccgcccaaagtacttgggtccattctcagaccaaatcccatcatacctgacaggtgaattccctggtgactatgggtgggacactgctgggtta

SEQ ID NO: 208214 - DNA, 382 bp, Gossypium hirsutum
actgcgcgtctaggatcgtgccacgggtcaacgccaagggcaagctgaatacaccccgctggccacgacgttctgtccgggcgaattcaccggggccgaactgcgtcgcgggtatgagatcgtttgggggacaaccttggacaggcgcaactttcattgcaaggtgaccggggccgactgattcctggtgcccacgggtcgcaccaccggacgcgatggcggcaggcctgcccagctgtaccggcggggagacctgcagctgttgcacccgccgatgatgctcgcccggtgagatcgcggaagtgctggcggtcgcactataacacgttcttatttgaccgggctgggattgtctgaagcagaacacttcggtgatcgactt

SEQ ID NO: 208215 - DNA, 354 bp, Gossypium hirsutum
gctttgcttgcttttcccttggtgtcaagcaaatgatttgctgttgcaacaagatggatgccactacccctaaatactcgaaggctaggtatgatgaaatcgtgaaggaagtctcttcctacttgaagaaggttggatacaaccctgacaagattccatttgttcccatttctggttttgagggtgataacatgattgagaggtctaccaacttggactggtacaagggccctacacttcttgaggctcttgaccagatcaatgagcccaagaggccttcagacaagccttttcgtctaccactttaagatgtgtacaagattgggggtattggaactgtcccggttggtcgtg

SEQ ID NO: 208216 - DNA, 420 bp, Gossypium hirsutum
cccacgcgtccgccacgcgtgcgaaaatcatcaacctcaagctttagcagatggtttctgggtctcctcaattcaagaactaataaagtatggcaaccatttcagctacctcatcaatcaccattgcagcttctctttcatacaagccatcatcactcaagctcacctccccaattgccattgggtggccaacaatggcgaagaaagggaaagtgatgcgttctatgaaggaggaggaaaagaatagctctagcgttggcatgagtgctgcatcgctgttagctgcagcagtcatgtcaagctcaccagctatggctctggtggatgagagaatgttcaccgaaggaactggactttcctttgggttgagcaacaaccttcttgggtggatcttgtttggtgtattcggcttgatatggg

SEQ ID NO: 208217 - DNA, 150 bp, Gossypium hirsutum
  unsure (1)..(150): unsure at all n locations
cataatcagcngcttccactggcctgtacattacatggttctttgttccccatcattcctgggccagggcgtgaagttcttcagtcccacccctgaaatacctggaactggccgggtttccattacgaaaaccaccaagactgttccttc

SEQ ID NO: 208218 - DNA, 287 bp, Gossypium hirsutum
gagatgaggaaaatcatgggtgccaaagttcttttcttctttgctttgctttccttttcaggtgtctcggcatttgcacagggtgaggaagaccaaggtcttgttatgaacttttacaaggattcttgttctcaggctgaagacattatcaaggagcacgtttagctactgaacaagcgacacataaacactgctttttcttggctgagaaacatttttcatgactgtgctgtccagtcatgtgatgcttcactgctgcttgacttcacaagaaggagcttgtctga

SEQ ID NO: 208219 - DNA, 448 bp, Gossypium hirsutum
gcgctcaaattcagataacaatttcacagttgttttcttcactctctctctcagccatggctgcggccatgttcaccgtctccggcgctgccgccgcctaccgagctctgggagtgtcagtcccaacctcagctttcatggggaagaaagtgagctcgagattcaacaacaccaggctggttccttcgggaagttttaaggtgatggcggccgaaatagagatagacgaagagactcagaccgaataggaccgatggaaagggttggcttacgatatttcggacgaccaacaagacattactcgagggaaagggatggtggattccttgttccaagctcccatgaatgatggaactcactatgctggcatgaagtcctatggatacatcagtcaaggtcctaatacgttcaatttggacatcatcattgatggtatttacatcggttc

SEQ ID NO: 208220 - DNA, 342 bp, Gossypium hirsutum
cccacgcgttcgggaaaaagaaacccccccccctctcctcttgaaaacaggcaatggcgtggattcaatattcatctccttgggtcagaacaacctcatttcctactttatcagtgcccatcagagcttcttcacgtctgtctctgccaaccactttcagaaaatgggtcgcacattttagagtcaagtccttgaactgggtcttctctggtgctcttgctcttacattatctgcagcaggggttgggttcgcggaggcaaaagtcggtgttaacaagccggaattgcttcctagagagttcactccagtgattgatgtatcaggcttttctctttgatggc

SEQ ID NO: 208221 - DNA, 343 bp, Gossypium hirsutum
tcgtccacgcgtccgcaggcagtcttttttctgaaaactgaaaatggcttccaccgtcgttctgggcactttcacggtcagcagcacctcattcgtccgccgtcagccagtgaggagcctatccttcctcccaaactttaagcaggctcttttcgggctaaaaccccaaagaggtgggcgtcttacaatggcagtatacaaagtaacgctgctcactccggaaggacctcaagagtttgagtgcccagatgacttgaagatcctggacgcggcggatgagaacgggattgatcttccgtactcgtgcagggctggtgcttgctcttcatgtgcttggagagtc

SEQ ID NO: 208222 - DNA, 228 bp, Gossypium hirsutum
gggaaacaagtcctacgacgaagccattgatgctctcaagaaacttctcagtgagaaaggagaactgaaagctgaagcagctgcaagggtagatcaaataacagcagagttaaacacagcatcagctgatggcaaaccatctgactcttctgttgagagactgaaagaaggcttcgtttactttaagaaagaaaaatatgaaaagaatcctgctctgtatggtgagct

SEQ ID NO: 208223 - DNA, 264 bp, Gossypium hirsutum
gacaggcgttcgatcataaacctaagagggcttccagtttctaagtcattcacatctttcttagtggggttgttaattccttgcattaatgctgcacccttgggtccagaatccgatagagtaatcaagctgccgaaccagccggcgacgccatcgatatcacagttttcggggtatgtcacagtgaatgaagaacatggaagggcacttttctactggttctttgaagcacagtctgaggcatctaaaaaacctctcctgctt

SEQ ID NO: 208224 - DNA, 265 bp, Gossypium hirsutum
aggcgtccggtcaaaatgctagcttgcttgtggtagaagagcgcgtcaagcatcttcacgtaaggagtgtatggctactggataaacccaatcttgatacacgctcaaagcatcttggtcatctgggcttgccaagttatcttgatgggagctgttgagggttaccgtattgctggcgggcctctcggtgaggtaaccgaccctttgtacccaggtggcagcttctacccattgggtcttgctgacgacccacaggcattcgctg

SEQ ID NO: 208225 - DNA, 324 bp, Gossypium hirsutum
cccaggcgtccggtcaaattcggtgaggccgtgtggttcaaggccggatctcagatcttcagggaaggtgggcttgactacttgggaaacccaagcttgatacacgctcaaagcatcttggccatctgggcttgccaagttatcttgatgggagctgttgagggttaccgtattgctggcgggcctctcggtgaggtaaccgaccccttgtacccaggtggcagcttcgacccattgggtcttgctgacgacccagaggcattcgttgagcttaaggtgaaggagatcaagaccggcagatgggctatgttctccatgttggga

SEQ ID NO: 208226 - DNA, 361 bp, Gossypium hirsutum
agaaggggaagaatatttatcaatcaacgcatgcgaaacacaaaccgttccatcaacttctgagcgctgattctgctctgtgtcgggaccatcacctctgctgaagctttcttacaagaacgctctgaagatggatgggaaagacgttgggtaaaatctgactggaagaaagatgagaacatggctggggaatggaattacacttctgaacactggaatggagatcctaatgacaaaggtatccacactagtgaagactacagcgtttatgctatttcagctgagttcccaaacgttaacaacaagggcaagactctggtcttccaattttctgtgaagcacgagcagaagtttgactggg

SEQ ID NO: 208227 - DNA, 236 bp, Gossypium hirsutum
gcgtccggatcttcactcaccattgttccaagtttgtttgtaaaccaagctagaaccagcatccaacatcgcctcattagcagcctacagcgctgccgcctcccttggcgtctctgaaatgctcggtaaccctctgaatttcagtggtggagctaggtcatcggctccaacaccatccaactaatcctttttcaagaccgttgctcttttctccaagaagaaggccgttcctccaa

SEQ ID NO: 208228 - DNA, 170 bp, Gossypium hirsutum
aggcgttcttgttttaaaacatgttaaccatgtcgactccttacccggccaatccatcgattgcttcggtgccttgagggctcgggtttacgatgacgaagtgaggaaatggatcagtgaggtcggagtcgcatgcgtagggaagaagttagtgaactcatgggaaggac

SEQ ID NO: 208229 - DNA, 279 bp, Gossypium hirsutum
ggtgcttaccgacagctcttccacccagaacaactcatcagcggcaaggaagacgcgctaacggctttgcccgtggtcactacaccattggcaaggagattgtcgacctctgtttggaccgcatcaggaaacttgctgataactgcactggtcttcaaggattccttgttttcaacgctgttggtggaggtaccgcatcaggtcttggttctctccttttggagcgattgccatgcgattatggcaagaaatccacgttgggttttactgtctacccat

SEQ ID NO: 208230 - DNA, 248 bp, Gossypium hirsutum
agaaggcgaagaatattcatcaattatcgatgagttcattgaagcgatcttaacacgttagcgtgaggctattgtacagtttgaggattctcaaatgaagtgggcctttacaactctgaaacgctatcgggaaaggtctcgcatttttaatgatgacgtacacggaactgctggagtcgcacttgctggattgttaggaactgtaagagcacaacgtccatctttggctgattatccaaaccacaaga

SEQ ID NO: 208231 - DNA, 298 bp, Gossypium hirsutum
  unsure (1)..(298): unsure at all n locations
gaagtttgattgagctctctcatggcgttttctacccgtctcctctacaaatctcgccagctgtatgttagtcaagctgttctgcggcaggaggttgccattcctgtccgcttttactctaaagaggcttctccccctggtttaaaaggagatgagatattgaaaaatatctttgtggaggttaagaacaaattcgagacagcattgngaatatttaggagggagaaaatcaccattgacccagttgaccaagttgctgtttctcagtatgcaaatgttttaaagactgttagaaaaa

SEQ ID NO: 208232 - DNA, 228 bp, Gossypium hirsutum
ctcctgtcccatctgatacaatgaaggaactatcttctccatatgcagcctctctaaaactagcgctttttctttttgtaatttcaggatacaataaaagcgagtccaccagaaaataagtcaatgaagagagcgagtggtgtcggtgtcacgaccaccactttattctatgtactgtgtggcattgttggatacgcagcattcggaaacgatgcaccaggaaatttc

SEQ ID NO: 208233 - DNA, 292 bp, Gossypium hirsutum
gtctcagatctgaggtgccgttgctgatttgttcatcagcttgattgaatctgacgcctatggtcgtcgccggcaccgaactgttgctttaaaaagaaatggagaatttaatttctcttgtgaacaagattcaaagagcttgcaccgctcttggtgaccatggagaagcacgtgcattgccgactctttgggactcattacctgcgattgccgtcgtcggcggtcagagttcagggaaatcttcggcgctcgaaggcattgtcggcaaagatttttaccccggggatcagga

SEQ ID NO: 208234 - DNA, 412 bp, Gossypium hirsutum
cccacgcgtccgcccacgcgtccgtttagctatagcatacactactagtacccactactagcggtggcttcctcaatgatctgatcggctaccattgccactgcctctccggcacaggctaacatggtcgctcctttcaccggcctcaagtctgcctctgctttcccagtcaccaggaaggccaacaacgacattacttctctcgcaagcaatggcggcagagtgcaatgcatgcaggtgtggcctcctactggaaagaagaagttcgagactttttcatacctccccgatcttacacccgtgcagttggctaaggaaggggattaccttcttcgttcaaaatgggttccttgcttggaattcgaattaaaggagggattcgggcaccgtaaatacttgagcctacccacgt

SEQ ID NO: 208235 - DNA, 361 bp, Gossypium hirsutum
cccacgcgtccgcccacactctcaaattcagttaacaatttcacagttgttttcttcagtctgtctctcagccatggctgcagccatctccaccgtcgctgccgctgccgccgccaaccgagctctgggagtgtcagtcccaacctcagctttcatggggaagaaagtgagctcaagattcaacagcaccaggcaggttccttcgggaagttttaaggtgatggcggcggaaaaagagatagacgaagagacacagaccgaaaaggaccgatggaaagggttggcttacgatatttcggacgaccaacaggacattactcgagggaaagggatggtggattccttggtccaagctcccatg

SEQ ID NO: 208236 - DNA, 295 bp, Gossypium hirsutum
accagtcgtgcgcgcacgcgtacgattagctttagcaaacactactagaacccaatactagcggtggctagaccaatgagggatcgctaccatcgccactgcctatccgcacaggctaacatgggcggctccttacaccgacctaaagtctgcctctgctttcccagtcaccaggaaggccaacaacgacattacttctcttgaatgcaatggctgaagagtgcaatgcatgcaggtgtagcctcctactggaaagaagaagttcgagactctcttatacctacccgatcttaca

SEQ ID NO: 208237 - DNA, 296 bp, Gossypium hirsutum
cccaggtggaactatgatggatcaagtactgtacaagcacccggtgaagatagtgaagtatgttataccctcaagcaatgtttaaggaccctttccgaggaggtaacaatatcttggtaatttgtgattcatacacaccagctggtgagcctattcccacaaacaagcgccaccgtgccgctgagattttcagtaacaagaaggtggtcgatgaagtaccatggtttggttttgagcatgagtacactttactttaacaaaatgtgaaatggccttttggatggcctgttggaggc

SEQ ID NO: 208238 - DNA, 385 bp, Gossypium hirsutum
actaggcgtacccatacgcttccgctagtgttttacagaacaaatgttgacttataattataagcctaatagagctactttgagtattttgctgaatggtctgtgtaaaaatgggaaaactgaggatgcgcttaagatgtttgatgaaatgactctgaggggtatagagccaaataggtgtatatataccataatcatttcgggtttgtgtcgagcagatagggctgatgatgcttgtaggctgttaggtaggatgaaagatagtgggtgctcccctgattttggtgcttataaagctttgcttaatggggttttgtgagtggggtttggcttgaattaaactttttgcccttttggcagttttttttaaaatgggaccggtttt

SEQ ID NO: 208239 - DNA, 196 bp, Gossypium hirsutum
tttggctctttgtttttgttttttggtttagagagatggatcatgcagcagatgctcatagcgctgatttgatgacaataacacgtttcgtgttgaacgagcaatccaagtatcctgagtctcgtggggatttcaccatcttgcttaatcacatcgttcttggttgcaagtttgcttgctctgctgctaacaaggc

SEQ ID NO: 208240 - DNA, 274 bp, Gossypium hirsutum
tttggctctttgtttttgttttttggtttagagagatggatcatgcagcagatgctcatagggctgatttgatgacaatagacacgtttcgtgttgaacgagcaatccaagtatcctgagtctcgtggggatttcaccatcttgcttaatcacatcgttcttggttgcaagtttgtttgctctgctgctaacaaggctggtcttgccaaactcatcggactcgctggggagactaatgttcagggtgaagaacaaaagaaattggatgtgcttt

SEQ ID NO: 208241 - DNA, 220 bp, Gossypium hirsutum
gtcggattccgggtcgcggacgcgtccgcccgcacctctcttcggtggattatcttattttaaaacacgcttactttggtaaaactgatggtgagggtggttttgacgtgcggtgcggtggcgaccgcaaacatattggagagttcaagttcaacagtcggcgggaagccgtactacttcttgtcagtgttgacaagaaccgccgacggagacgaaggcg

SEQ ID NO: 208242 - DNA, 237 bp, Gossypium hirsutum
cccacgcgtccgaccactcgtacggcatacataataaagaagcctatcttgcttatccatttgcaagaagacaacaacccgggaacattaaccatgcagtcggatcgtttcttcaatgccctgaagggtcatggagctctctgtcgccttgttattctaccctttgagagccatggttattctggtcgagaaagcatcatgcatgtcctgtgggaaactgataaatggctttaaaag

SEQ ID NO: 208243 - DNA, 127 bp, Gossypium hirsutum
ctgacagtaaacgcactggaaaacccgtaaggcgcaaggaagctgattggcggcatccctcgggggtgcaccgccgaccgaccttgatcttctgagaagggttccagagagagcatgcttgtaggca

SEQ ID NO: 208244 - DNA, 363 bp, Gossypium hirsutum
cccacgcgtccgcccacgcgtccgatagttcgtaacaatgtcggtctcacttcaagctgcagctaccctgatgcaaccaatcaaggttgctgcaccatcaaggaccaatgtgctgctcaggtcctcccagagcgtttctaaggccttcggtttggagcctgttggtgctaggctcacctgctctttgcaaactgacctcaaggacttggctcagacgtgtgttgatgctaccaagctcgctggtttcgttcttgctaaatctgctcttgttgcttcgggagcaagcgctgaaggagttccaaagcggttaacctacgatgaaatccaaagcaagacatacatgggagttaaaggaacagggac

SEQ ID NO: 208245 - DNA, 223 bp, Gossypium hirsutum
  unsure (1)..(223): unsure at all n locations
nnnnnnnnnnnnnnnnnnnnntnnnatttcgtcttcaagatctcagttctcaaatcgtagcgctcttttctatcaagccatggctctgatcttgcatgcaggaaaaacatacaaaaatgactttaaggcactcattgctgcagaatatagtggtgtgcaggtcaaaatggttgagaattatgagatgggtgtgtcaaataagactcctgagttcatcaagatg

SEQ ID NO: 208246 - DNA, 304 bp, Gossypium hirsutum
gtggaattttggccatggatgagtccaacgctacctgtgggaaacgtttggcctcaatcgggctagaaaacacggaggctaaccgccaagcctacaggacgttgcttgtttcagctcctggccttggtcagtacatctcaggtgccatcctttttggggaaaccctctataaaaccacacttgatggcaagaagatggttgatgttcttgttgagcaaaacatagtccctggtatcaaggttgacaagggtcttgttccactggctggttcaaacaacgagtcatggtgccaaggtcttgatgg

SEQ ID NO: 208247 - DNA, 413 bp, Gossypium hirsutum
gtcgcgacggtctcattgaacatttaatagatcatgtctttctcattcttcaagccgtcgaggccgaaaaccccaccagaggttgccaaagcgatcaaagacagccttaatgcactcgacaccaaaaccgttgctgaagttaaagcccttgaaaaggctatggaagaagttgaaaaaaattttgtgacaatgagatgcatgctttctggggatggtgaggttgaaccgaatgtcgagcaggtctcacagttggcacttgaaatctctaaagaggatgttatttccctttgtgttcacaaagtaccgatactgggatgggaagcaagaaaagatttagtccactgttggtccatattgttggagcaacaaggtgattccaaatattggtgtttggaatacattgagaaacattt

SEQ ID NO: 208248 - DNA, 265 bp, Gossypium hirsutum
gtggaattttggccatggatgagtccaacgctacctgtgggaaacgtttggccttaatcgggctggaaaacacggaggctaaccgccaagcctacaggacgttgcttgtttcagctactggccttggtcagtacatctcaagtgccatcctttttgaggaaaccctctatcaaaccacaattgatggcaagaagatggttgatgttcttgttgagcagaacatagtccctggtatcaaggttgacaagggtctttgtccactggc

SEQ ID NO: 208249 - DNA, 148 bp, Gossypium hirsutum
aaaatcatatcattgcaacattgaatagatgatgtctctgtcatgcttaactctagtccgactgtgtgacaaagacttgagaggtgtaggatacgtgggagctctcggtcgaaattgaaataccactactgttaacgttattgtactt

SEQ ID NO: 208250 - DNA, 172 bp, Gossypium hirsutum
atttagctatagcatacactactagtacccactactagcaatggcttcctcaatgatctcagcggctaccattgccactgcctctccggcacaggctaacatggtcgctcctttcaccggactcaagtctggctctgctttcccaggcaccaggaagggccaccacgacaat

SEQ ID NO: 208251 - DNA, 320 bp, Gossypium hirsutum
ggtttcgttgcttcaaactctaaggatgatcctgcaaaggaggctgccagcttcacctctcaggtcatcatcatgaaccaccctgggcagattggaaacggatatgccccagtccttgactgccatacctcccacattgctgtgaaattttccgaattgctgaccaagatcgacaggcgatctggaaaggagcttgagaaggagcccaagttcttgaagaatggtgatgcagggatgataaagatggttcccaccaagcctatggttgtggagactttctctgagtacccaccacttggacggtttgctgtcagggacat

SEQ ID NO: 208252 - DNA, 365 bp, Gossypium hirsutum
  unsure (1)..(365): unsure at all n locations
attgatttagagcagcatgatagaagggagcagctaaagaaaagtggtcttggaaaggtcattatgttcttatcaaaatctgatgaggaaactacgtccaacaggaaacttgctaaggaattggttgataaatggagtagaccaatctttaataagagcactaggtttgaagacatgagaaatgttgaggatgatagagttcccttgcgaaggccatctgtgaaaaggcccacanatagagctgcatcaatggaatctagagatggtgattttgatttggatatttctcgggaccacaagtctggtagatcatcgtcaggtcaaaatgcttnncagtctgaatcttcttcaaggctacaacatgc

SEQ ID NO: 208253 - DNA, 278 bp, Gossypium hirsutum
  unsure (1)..(278): unsure at all n locations
cccacgcgttcggagctttgaaggccgaggaggggaaaggttccatgtgaacggcacttgcgcatgggttagtcgatcctaagagacgggggaagcccgtccgacagcgcgtccagcgcgagcttcgaaagggaatcgggttaaaattcctgaaccgggacgcggcggctgacggcaacgttagggagtccggaaacgtcggcgggggcctcgggaagagttatcttttctgtttaacggcctgcccaccctggaaacggttcanccggaggtagggt

SEQ ID NO: 208254 - DNA, 231 bp, Gossypium hirsutum
atttagctatagcatacactactaccacccactactatgcagatggcttcctcaatgatctcatcggctaccattgccactgcctctccggcacaggctaacatggtcgctcctttcaccggtctcaagtctgcctctgctttcccagtcaccaggaaggccaacaacgacattacttctctcgcaagcaatggcggtagagtgcaatgcatgcaggtgtggcctcctact

SEQ ID NO: 208255 - DNA, 157 bp, Gossypium hirsutum
agcatacactacacctcccggaagatttagcatcaattgtgacttcatgttggcaagaggatccaaatgctcggcccaatttcagccaaatcatacagatgctattacactatctctcgaccatttcaccacccgagcctgtgatgcctcctaagag

SEQ ID NO: 208256 - DNA, 322 bp, Gossypium hirsutum
attccgatcaaatcacgatcccaccggcgccgactattagagttaaagtcaaatacggctctatttaccatcaaatcaacatcaattctcaagctacattcggggaattaaagaaaatgttaacgggaccaacgggattacaccataaagatcaaaagctaatatacaaagataaagagagggattcgaatgtgtttttggatatggtgggtgttaaagataaatcgaaaatggttttaatggaagacccaattagtcaagaaaagagattaatggagatgaggaaaaatgctaaaatggagaaaggctctaaatccatatc

SEQ ID NO: 208257 - DNA, 238 bp, Gossypium hirsutum
  unsure (1)..(238): unsure at all n locations
tcccaatggcatcnnctttgtgggttagccatgaatgtgtagaagaagcagtatattgataaagaaaagatatttttttccaaaatcaaaagagcgattgggttgaaaaaataaaggatttcgaaccgtcttcttatcctataacgaacataaatcaattagatggcaaaagataggatagagaatccgttgatgaatccgcctgtctccgaggtatctattcttttcttactataat

SEQ ID NO: 208258 - DNA, 293 bp, Gossypium hirsutum
cttgagggaaagaaaaaaaaagaagaagaagcttgaatctatttttttgaagatggagggtaaagaagaagatgttaagctaggagcaaacaagttctcagagagacaacctattgggacatcagcccagacagacaaggactacaaggagccaccagcagcacccttctttgagcctggtgaactcaaatcatggtctttttacagagctggtattgccgagtttgtagccacctctttgttcctttacatcaccgacttgactgtcatgggtgtgtctcacgctaaaacca

SEQ ID NO: 208259 - DNA, 330 bp, Gossypium hirsutum
  unsure (1)..(330): unsure at all n locations
gcaaactcctcataagtgattactgcaaaagttccaagactccatccagggagtttgctgagtatatcaagcagagaggctatgatcttcatgatgtaaaatcatatggacagatgcttgaggatgctggttttgatgtgattcttgcagaggatcgaaccgatcagttcttacaagttctgcggcgtgaattgaaccaagtggagaaagagaaggatgcattcatctctgacttctctaaggaagactatgatgaaatagttggtggatggaaggcanagctgataagaagctcatcangggagcagagatgggccctttttcttgcca

SEQ ID NO: 208260 - DNA, 305 bp, Gossypium hirsutum
ccgtccgaattcccggtcgccacgcgtcatctcttcttcacactctctccctgctgcattctagccccgacccacctcccgaaacgtacgatttcgtcgtacggccgagcattgaaggccaggtcatgaacttctacgtgttgaaacggcccggcgtcgattttttcctggaagaaataagcaagaaacacgaagtggtggttttcacggcggggctcaagcaatatgcttcccaggtcttggataagctcgacccgaagggcttaatatcccaccggctttatcgggattcttgcaaggaactg

SEQ ID NO: 208261 - DNA, 165 bp, Gossypium hirsutum
  unsure (1)..(165): unsure at all n locations
atctttcttgacttagacgagaccnngnnganctatagcatacactactagtacccactactagcaatggcttcctcaatgatctcatcggctaccattgccactgcctctccggcacaggctaacatggtcgctcctttcaccggtctaagtctgccttgcttt

SEQ ID NO: 208262 - DNA, 267 bp, Gossypium hirsutum
cccacgcgtccggcatctcagtacctccgcagttcactgagaaatggatgaggaagttaaggctgtggttcctgagtcactcttgaagaaacagaagagggctgaagaatgggagcttgccaaaaagcaggaccttgaagtggcaaaaaagaggaaagtcgagaaccgcaggctgatttacactatggctaaccagtatgcaaaggagtacgaggctaaggaaaaagagctgattcatttgaagcgggaggcaaagttaaagggggg

SEQ ID NO: 208263 - DNA, 318 bp, Gossypium hirsutum
gttcctttgattccccgttctggactaccaattctggtgctccagtttggaacaataactcatcacttactgtgggagcaagaggtccaattctccttgaagactatcatttggtggagaagctagctaatttcgacagagaacgcatacctgaacgtgttgttcatgctagaggagccagtgcgaaagggttctttgaggtcactcatgatatatctcagctcacatgtgctgatttccttcgtgcccctggagtgcagaccccgctcattgttagattctccacggttattcatgaacgtggtagtcctgaaactt

SEQ ID NO: 208264 - DNA, 240 bp, Gossypium hirsutum
cccacgcgtccgaaaagatgcttcttctttgcatttattacggttctctctctacgagtattgtaatttgaagagttttattactccaaagaaatctatttcgatttttaatccaagattattcttgttcctatataattctcatacatgtgaataccaatccattttccttttttttccgaatcaaatcttttaattaacaatcaactttttttggggtttttttggaccaattttttt

SEQ ID NO: 208265 - DNA, 245 bp, Gossypium hirsutum
ctttgagcctggtgaactcaaatcatggtctttgtatctgatcccgaagatgactcatagggcggccttcttgttcctttacatcaccgtcttgactgtcatgggtgtgtctcagtctaaaaccaaatgtgcaaccgttggtattcaaggcattgcttgggcttttggtggcatgatctttgcccttgtttactgtactgccggcatttcaggtggtcatattaaccctgctgtgacctttggat

SEQ ID NO: 208266 - DNA, 139 bp, Gossypium hirsutum
atcaccaacaaaatcagttgcttcacaatggcctctacaaccatggctctttcttccccatcattcgccggtaaggcagtgaagttctccccttccacccctgaaatccggggaactggccgtgtttccatgaagaaaa

SEQ ID NO: 208267 - DNA, 182 bp, Gossypium hirsutum
cccacgcgtccgaaaagatgcttcttctttgcatttattacagtactctctctactactatggtaatttgaagagttatattactccaaaaaacaatatttctatttatcaaccaacattattcctctctctatataaaacacctacaatttaattccaaaaacattttcattcttttcata

SEQ ID NO: 208268 - DNA, 286 bp, Gossypium hirsutum
ttcaaaatcacatgatgtgtactcctcttgggatgatgaattcaaaaaactggtgcaaagcttccccaaagagaaaggctgggcaggatccaatctttatttctatcaaggtttttggtgcccctctcttgttctaaaagcttttatttctttccagaaacattttcaagcatttaattctgatataatcgttgctccttttccaaaatgtggtactacttggctcaaggccttgactttctccactttgtaccggattcagttccaatgggatgaaaatccattg

SEQ ID NO: 208269 - DNA, 384 bp, Gossypium hirsutum
cccacgcgtccgaattcaaccaccatcactgcctactcctcagccatggcaaccaccacagctgccaccgtgtcacattttttcggtacccgtatccaaacctctaacccaagctccggtagaatccaagctaggttcggctttggaaccaagaaagcaccacccgcaccaaaaaaggccgcccctaaacggccatccgatcgccttgtttggttccccggcgcaaacccaccggaatggcttgacggtacaatgatcggagaccgtgggttcgatcctttcgggtttgctaaaccggctgaatacttacagtacgatttggactcgttggacaaaactttaccaagaatgtggcttgtgaaattataggggtgattagcgaga

SEQ ID NO: 208270 - DNA, 204 bp, Gossypium hirsutum
aatgctcctcgcataaggatttcataactgattatacgtggctttttacaagctgcgttggaagggagtctccaacttagcggccaaacccggttgaacgttgctagcaccaacagggtggctgtggctagacctggttttaccgttagagctcaacaggtccctgccgagcctgaaactggacgcagagctgtgctgggtctt

SEQ ID NO: 208271 - DNA, 353 bp, Gossypium hirsutum
gctgagtaccgtgccggtattgttcccgtttcctaccgccgggtgccatgccggaaaagaggagggataaggttcacaatcaatggatttcgatatttcaacttagtgttgatttctaacgtggcgggttcagggaatatcgtgaaggctagtgtgaaaggatcaaggacagggtggatgagcatgagtcgaaattggggtcagaattggcagtcaaacgttgtgctggttggtcagtcgctctcatttagggtcacaggcagtgacagacgcacttccacctcttggaacattgtccctgcccattggcaatttggtcaaacattcacgggcaaaaatttcagagtttgatt

SEQ ID NO: 208272 - DNA, 284 bp, Gossypium hirsutum
cggacgcgtgggtagctatagcatacactactagtacccactactagcaatggcttcctggatgatctcatcggctaccattgccactgcctctccggcacaggctaacatggtcgctcctttcaccggcctcaagtctgcctttgctttcccagtcaccaggaaggccaacaccgacattacttctttcgaaggcaatggcggcagagtgcaatgcatgcaggtgtggcctcctactggaaagaagaagttcgagactctctaatacctccccgatcttacac

SEQ ID NO: 208273 - DNA, 234 bp, Gossypium hirsutum
atcaccaacaaaatcagttgcttcacaatggcctctacaaccatggctctttcttccccatcattcgccggtaaggcagtgaagttctccccttccacccctgaaatccggggaactggccgtgtttccatgaggaaaaccaccaagcctgttccttctggtagcccatggtacggtcctgaccgagttttgtacttgggtccactttccggtgagccaccatcttacttgacc

SEQ ID NO: 208274 - DNA, 246 bp, Gossypium hirsutum
accaatccttttttttttcctgtgcttgtacacaatggctatgactgtaaatgcagcagtgtctcttccatcttccaagtcatctaccctgtcatttaaaaactcagtcactgtccctgaaagaatcaacttcaacaagagtgttttgtacccaaaaaatgtcagccttggtggaaatgtggtttccattagagctcaggtcactacagaggctcctgcaaaggcaccaaaaatttccaagaaaga

SEQ ID NO: 208275 - DNA, 341 bp, Gossypium hirsutum
  unsure (1)..(341): unsure at all n locations
cccacgcgtccgcccacgcgtccgacaatggcctctacaaccatggctctttcttccccatcattcgccggtaaggcagtgaagttctccccttccacccctgaaatccagggaactggccgtgtttccatgaggaaaaccaccaagcctgttccttctggtagcccatggtacggtcctgaccgagttttgtccttgggtccactttccggtgagccaccatcttacttgaccggtgagttccctggtgacntatggtgggacactgctggactctcagctgatcccgagacctttgctaggaaccgtgagctcgaagtcattcactgcagatgggccat

SEQ ID NO: 208276 - DNA, 379 bp, Gossypium hirsutum
caaatgcaaaatactcaacccgttcaacttgatgaagcgtgcgaattgttttatgaaggggtaaatcgacatgggccttattgggaccatgttctggggtactggaaagcaagtttggaacatccagacaagttactattcttgaaatatgaagaactgattgaagatactgttttgtatcttaagaaaatagcagaatttatgggttatcctttctcgtcagaggaacaacaacaaggggtgcctgaaaacattgtacagctgtgcagtttcgagaatttaaatggcttggaagtaaataaaactgggaaacatcttgactggcaaggagatttggcgattgaaaataacaatttctttctgaaagggaaagttggag

SEQ ID NO: 208277 - DNA, 287 bp, Gossypium hirsutum
cggacgcgtgggcggctggtgcctcacttcgtcctccactgccaccgccacttctttccctctctggcgacccacattacgatcctcctccattgttgccaccctcaactcttccccttctcctccaacactcatccgcaaccagcctgttttcgctgctcctgttcctttgctcaccccttctaattggagagaagacatgggagacaagtcatacgaggaagccattgaagctctcaagaaactgcttagtgagaaaggagaattgaaagctgtagcagccgcaa

SEQ ID NO: 208278 - DNA, 271 bp, Gossypium hirsutum
caaatcccaaaatactcaacccgttcaacttgatgaagcgttcgaattgttttatgaaggtgtaaattggtatgggccttattgggaccatgttctggggtactggaaagcaagtttggaacatccagacaagttactattcttgaaatatgaagaactgattgaagatactgttttgtatcttaagaaaatagcagaatttatgggttatcctttctcgtcagaggaacaacaacaaggggtgcctgaaaacattgtacagttgtgcagt

SEQ ID NO: 208279 - DNA, 163 bp, Gossypium hirsutum
attgaaagcaatggcagtagataccacagttctaggactttcaaaagaagaggccgaaaagaaaccatatattgcctctatgggagtatatgttttcaagaaggagatccttttaaaccttttgagatggcgttttccaacttcaaatgactttggatcaaaa

SEQ ID NO: 208280 - DNA, 160 bp, Gossypium hirsutum
gcaccggtcacagttactggggatattgtatttgtcctccaacagaaagatcatccaaaatttaaacgaaagggtgatgacttatttgtagaacatacgttgacacttactgaggcagtttgcggcttccagtttatactgacccacctagatggtaggc

SEQ ID NO: 208281 - DNA, 211 bp, Gossypium hirsutum
caacgggacacattaactgatggaggagcaatgagaagaagctgcaaaatgttcagcaaagactttaatatggaacctgtcggttggcagtcgaatcccatagtagtacttcggaattgttcaagccaatggcaatatgccgaccatcaggagcccaattcacacttgtaactggtccgttttcgtaatcaacagtgacaagttttgaagt

SEQ ID NO: 208282 - DNA, 337 bp, Gossypium hirsutum
cccacgcgtccggaaaaaatcagccttaaggctcttatcttggatatctttgcagccggtaccgatacgacatacgtggtcctggagtgggcaatgacagaactcttaaggcaccccaagataatgaagaaacttcaaaacgaggtcaggaatgtttctgctgaaaattcaagcatatcagtggatgatctcgataacatgcgctacctaaaagcagtgatcaaagagactcttcgtttacatcctccgattcccttgctgctttcaacaatatctacaaaagacgtcaagctcaagggctatgacatttatcaaggaactcaagttatcatcaatg

SEQ ID NO: 208283 - DNA, 200 bp, Gossypium hirsutum
ctcacacttggactgacatttgtgtagctgacgaaactctttaatggctgaaaaaagcatggcttagatcatcggaggaactgtatacctgtgaaagttcattgcggaagccaacgcaaaagagggtcattccactcttgccgttgtaagggagtccaccgaatccaacactgttaaggaaaaacttgtcgacactttca

SEQ ID NO: 208284 - DNA, 237 bp, Gossypium hirsutum
ccgcacagctgctccgtaatatttggagcaacagagtacactacagctattgacatctggtctgctggttgtgtccttgctgaaatgttacttggacagcctttgtttcctggtgagagtggggtcgaccagctggttgagattattaaggtcttggccactccaaccggagaagaaattaattgcatgaatcttaataatacaaagttcaaattccttcaaattaaggttaaccca

SEQ ID NO: 208285 - DNA, 312 bp, Gossypium hirsutum
cccacgcgtccgcggacgcgtgggcggacgcgtgggctggatcacgggacaatgtccagtggcagctttggttacaggatgaaagatagcttaaaagacagagaaggaagcaatcaaacagagagtctgctcggcgatcaaggttgcgtaagcaggcggaatgtgatgagctggctcaacgtgctgaagccttaaaggaagaaaatgctaaccttatatcagaagttagtcgcctcatgagcgagtatgagcagcttcatgctgagaatgcctctcttaaagagaggctaggggaaatccctgggcacgagg

SEQ ID NO: 208286 - DNA, 362 bp, Gossypium hirsutum
ttcacctcgccttctttcaactcaccttccttactctttgttcccaacacgcatgaccgatgatacctcggtttgccgtttcgtttacatctgccgggaccccaaagatgtttttgtctcaaagtggcatttcgccaacaagttgagacccaaggaactgccaccactatcactagaggaagcctttgacttgttctgcaaaggggtatcggaatatggaccgttttgggatcacgttttggggtactgggaagctagtgtggagtcaccgaagaaagtgttgttcttgaaatacgaagatgtgaaaaaggagcctttgtggtgtgtgaggaaacttgcagagttcttgggggtacccttta

SEQ ID NO: 208287 - DNA, 384 bp, Gossypium hirsutum
ctttagagtaaatttcttttgcaatcctttgtagagctccgggatccattgtcaccatgtcttgctcaaatctgacaatgtgggtgtcctcaaaaccctctctttctgacacttcttcactctctttccgttctttcatcagcccttttcagctcccatctcagagctcaacccccggtaacccttccaggtcctcatctgtaaccccagttcactgtggtcttcgtgagcttagagaccgtattgattcagtaaagaacacgcagaagatcactgaagccatgaaacttgtggctgctgctaacagtagagagcacaagaagctgttgtcaatggcagaccccttctctgagtccctggttgaagtctttacaacatcaatga

SEQ ID NO: 208288 - DNA, 345 bp, Gossypium hirsutum
  unsure (1)..(345): unsure at all n locations
ctctgaaacagtcacttagctgttaacagcactcaacaatggcgaccacccttttcttcctcctatttttcacccccttcctctactccgccaccgcaccaaatcataatgcaccgcaagatctggtccgttcatcatgcatcaacgccagctacccctcactctgcctccgcacactatcatcctactctggccccaccggcaccccacgcgacttagcccaagccgncgttaaagtcagcctcgcccgcgcccgcaaagcttcgacctacttaaaaaccagcgtcacggggaaaagcaaaagggaacgagcggctctaagcgactgcgtggagcaaatggctg

SEQ ID NO: 208289 - DNA, 170 bp, Gossypium hirsutum
ggctaacggacgaggtcagactctaaagccttaggcaccatggcaacctctgctatccaacagtctgctttcgttggccagaccgctttgaagcagtccaatgagctcttacgcaaagtcggagctttcgatggtggtcgtgttaccatgcgcagaactgtgaaaagtgc

SEQ ID NO: 208290 - DNA, 294 bp, Gossypium hirsutum
cacctcgataacacccataatcagcatacccatggcaactcaagcaggtcttttcactcccactatcaccacttcaaagtctctggctccatggaacccatcttcaccattttcattagctacccccaagtccatcaacttctccatggctaaaaaaactagcgttagggctgcagctgcaaatgaagctgttgctgccgttgccacaaaggaagctccggtgggtttcacccctccagatttggacccaaacaccccatcacccatcttcggaggaagcactggtggactgct

SEQ ID NO: 208291 - DNA, 302 bp, Gossypium hirsutum
ggctaacaaaccaagtcaacctgatgcataggacaggctcaggctgtggatttggatgaggttgatgctaaggttagtaagttgatgccagagcttgggttttcccccgaggattccgataggttggtcgcaagttttagtagcggatggcagatgaggatgtcacttgggaagattttgttgcaggagcctgatttattacttttggacgagcctacaaatcacctcgaccttgatacaatcgagtggcttgaaggatatctcaacaagcatgatgtgccaatggtcatcatatctcatga

SEQ ID NO: 208292 - DNA, 336 bp, Gossypium hirsutum
cccacgcgtccgtggaaggtgcagaccgatatggagccaccaaatccattggcaccatgtgttgctcaaatctgacaatgtgggtgtcctcaaaaccctctctttctgacacttcttcactctctttccgttctttcatcagcccttttcagctcccatctcatagctcaacccccggtaacccttccaggtcctcatctgtaaccccagttcactgtggtcttcgtgagcttagagaccgcattgattcagtaaaaaacacgcataagatcactgaagccatgaaacttgtggctgctgctaaagataggagagcacaagaagctgttgtcaatg

SEQ ID NO: 208293 - DNA, 384 bp, Gossypium hirsutum
  unsure (1)..(384): unsure at all n locations
cccacgcggtccgtatcgctttgatttcgcatccttgctgtgcactcgatggcaaatcgatggttgaggcctgaggtgtatccgctgtttgcggccgtaggtgttgctgtcggaatctgcgggtttcagttggtgcgcaatatctgcatcaaccctgaagtcagggtaaccaaggagaacagggctgctggggttttggacaactttgctgagggagaaaaatattctgaacatttcttgagaaaatatgtccgcaacaagacgccaganatcatgcccagtatcaacagcttcttcactgacccanagtgaggcttcactcttgctttatgctgaaactaaaaaataaaaaaaatagaggaactaagtcttattcaatcaata

SEQ ID NO: 208294 - DNA, 371 bp, Gossypium hirsutum
cccacgcgtccgtggaaggtgttgatggatatggggccaccaattagcatggaagtccagggcgtttctttccacactgtgtctaaaggatattggggtgaatgtgggcagcgagggggatactttgagatgaccaacattcctccaaagacagttgacgagatatacaagattgcatcaatatccctcagtcctaatgttcccgctcagatatttatgggattgatggtcaacccactcaaacctggagatgtttcatatgatcaatttgttagggaaagcaaaggaatccttgaatcattgagaagaagagcagggataatgactgatggatttaacagctgcaaaaatgtggtttgaaatttcactga

SEQ ID NO: 208295 - DNA, 232 bp, Gossypium hirsutum
gttcatcggtaaccttcctcaagtattatggtcaattcctgggttgaacctgcttgatatctctgacaataatttcactggggagctgcctactgctttggacaataatgccattgctgcggttcttgacatgtctcggaacaagttttatggaggtctaacaactgttctcagaaggttcagttctattaatttgtctggaaactattttgaaggcagggttccagattac

SEQ ID NO: 208296 - DNA, 350 bp, Gossypium hirsutum
cccacgcgtccgggtttgtcagccgaccctgaggcctttgccaggaatagggctcttgaggtcatccatggaagatgggcaatgttgggagcactaggctgcatcacaccagaagtacttgagaaatggcttagggttgatttcaaggaaccagtatggttcaaggcaggagctcaaattttctcagaaggtggcttggattacttaggcaaccctaacctagtccatgctcaaagcatcctcgccgttctcggattccaagtcgtcctaatgggactcgtcgaaggattccgcatcaatggcctccctggtgttggtgaaggcaatgatctttaccctggtggccagta

SEQ ID NO: 208297 - DNA, 221 bp, Gossypium hirsutum
ctcacgcgtgcgtgcaaagccattgatgaatctcgggatatctaaagctgttttcttcaatcgttggcaggtagtactgactgctggtgcaacccctgcgatcgagattcttagtttctgcttagcagatgttggaaatgcatttcttgttccaacaccttgttatcctggttatgacagggatgtaaaatggcgaaccgcggtggaaaaaatacatgttc

SEQ ID NO: 208298 - DNA, 243 bp, Gossypium hirsutum
ctcacgcgtccggcacttcgaaggccggcgaggggtaaggtcacatcttgaccatggctgggaaggtcgtagagctcttgaccaagattgacagacgatctggtaaggagctagagaaggagcctaagttcttgaagaatggtgatgcaggtgtgattaacatggttccgaccaagcccatggttgtggaaaccttctccgaataccctccactggaaccttttgccgttagggacatgagac

SEQ ID NO: 208299 - DNA, 206 bp, Gossypium hirsutum
cccacgcgtccgcccacgcgtccgcccacgcgtccgcccactgctgtcctaatcatgctccttgggctctccagctccgcggccacaccaaagagcggtgcaggtcacgacctggtccgttcatcatgtgtccacgcaagctatcaaggcctttgttttagcacccttgtttcttactccggccaagccaacaccccacgtgagtt

SEQ ID NO: 208300 - DNA, 198 bp, Gossypium hirsutum
cccacgcgtccgcccacgcgtccgaaagcactgaaaacgcaaaaccatggcctctgcttctctcctcaagacttcaccagttttagacaagtctgagtgggttaagggtcacacccttcgccaaccttccacttctgcggtgaggtgccaccctgttgcaccctctggactaactgtgcgtgcaagctcatatgccga

SEQ ID NO: 208301 - DNA, 187 bp, Gossypium hirsutum
acgccttaggcaccatggcaacctctgctatccatcaatctgctttcgttggccagaccgctgggaagcagtccaatgagctcttacgcaaagtcggagctttcgatggtggtcgtgttaccatgcgcagaactggtgaaagtgcccctaccagcaattggtacgggccttaccgcccaaagtactt

SEQ ID NO: 208302 - DNA, 450 bp, Gossypium hirsutum
gtgattgcagaagctgtcaatcctgtgattgccttgtccttgagtgaagaagcagcagcctggacttgaagccttccattggatgttgtacttgggattgcccccgatggcttgagtggcaatggcttaaagaaagcttcagaggcaggcaccctgttttgggtagcacgagttagtggcagagccattgaaactgctgaagtggaagccattgatttctctcttctcactctgagttgaaaacctgcaacgctgcaacttcttctgtgagtgtttttagtatgaagggaaatggagggaggaagttagtgaactcaaggtacggacctccaacatttgagcaaccgaaaatgaccatttgaaaagctattggaatatggaaacatgcttgttgctgagcaagagaatgttaagagaggtcaaattggcttacaaatactggtgtgaagc

SEQ ID NO: 208303 - DNA, 208 bp, Gossypium hirsutum
cccacgcgtccgttgcgatctcaaagaaggcaggaatgatccctctgcagatggaattggggggaaaagatgcatgtatcgtactcgaggatgccgacttggatttagttgctgcaaacataataaaaggaggattttcttacagtggtcaaagatgcacggctgtcaaggttgtgttagtgatggaatctgttgctgatgttctggt

SEQ ID NO: 208304 - DNA, 362 bp, Gossypium hirsutum
gtcttcctttacttcacaaacaaacagtactatttctttcaaaactttgcttaatattttgggttcttttgcaatatgtcccgttcttaccaagatttagagcctgattgccaatacaaagaaggagaagctcaggaccttatcgagtttcatgtcaaacattttagaaaggaccagctgaaagttcacttcggcagcaacaacgtcctaaccgtttccggcgaacggcccctggaaggaagtaaatggacccgattccgcagggaattcaccattcccaaagactgcaaagcgaacgaaatccgtgcgaggttcagttccggttttctttatataccattcccaaagaaaatcgttttttc

SEQ ID NO: 208305 - DNA, 193 bp, Gossypium hirsutum
ggtaccgtccgtattcccgttcgtcgacgcgtccgacctttctttctttcttattttatttatttctcttttgcctcttctaccattgctatttcgtgcgcatgattccacggtatggcagtgaatctctccccttcaacccctgaattccagggaactggccgtgtttccttgagtaaaaccaccaagcctg

SEQ ID NO: 208306 - DNA, 230 bp, Gossypium hirsutum
aacaatcgcagctccccctaggaagcctgtagatgtcccattctccagaaactatatgcctacttgggcttttgatcacattaagtatttcaatggtggctctgagattcagctccaccttgacaaatacactggtactggtttccagtccaaaggatcatacttgttcggacacttcagtatgcaaataaagctagtccctggagattctgcggggactgtcactgcct

SEQ ID NO: 208307 - DNA, 376 bp, Gossypium hirsutum
ctttggaccagaacctggctaagaattcggctggtgagataattggaactaggaccgagggtgccgacgtgaaggcgacgccgtttcagccttacagcgaggtttttggtctacagaggtttagggagtgtgagttgatccatggacggtgggccatgttggctacgcttggtgcacttaccgttgaatggctcactggtgttacatggcaagatgctggcaaggtggagttagttgagggttcatcgtatctcggccaaccccttcccttctcgatgacaacattgatttggatagaagtattggtgatcggattcatcgagtttcaaaggaacgccgagcttgacccggagaagaggctgtaccccggaggaaa

SEQ ID NO: 208308 - DNA, 264 bp, Gossypium hirsutum
ctgcatatcgatctcgactgtggttatatttctacatacggatctcgtgaccttcattccgggcatcgttccacatgttgaaggtttgcctcttggtgccgaaacaacaaatgacgttcctttccctttgcatcctctcattatgactgccatggattgcacagaaccagatattgaagcttaccttcgtgaactcaaaccccattttgttttctttgatttcgcgtgttggttgccaactttgactaacgagctaggcataaa

SEQ ID NO: 208309 - DNA, 188 bp, Gossypium hirsutum
ccctgcgtccgtccgattccggtcgccgcgctccggttttaatttaaaaatggctacggaatcttcagaatcggaagaagaagggaagatcacaggaggaaaccaacacctaatcgttgaagatgacctgagagaaatgggcaaaaaagcagcttggagtgtcagctcttgtaaaactggcaatggcg

SEQ ID NO: 208310 - DNA, 207 bp, Gossypium hirsutum
cgcgtccgctgcacatcgatctcgactgtggtgagattgggaagaacaagcagcctcatatgtcagtggggtccgatgtgaaattggcattgcaggggataaataagatattggagaccacgggagctaagctgaatcttgattattcggaatggaggcaggagttaaacgagcagaagctgaaattcccttggagttacaagacct

SEQ ID NO: 208311 - DNA, 169 bp, Gossypium hirsutum
tggattcttcccttcaccaacaaaatcacatgcttcacaatggcctctacaaccatggctgggtgttccccatcattcgccggtaaggcagtgaagttctccccttccacccctgaaatccggtgaactggccgtgtttacatgaggaaaaccaccaagcctgttcctt

SEQ ID NO: 208312 - DNA, 362 bp, Gossypium hirsutum
gcgtccggtcgcgcgttcggtatgcggtgatattgtaatatcatctatgatgctctcgtcatttacttgagttctttcctaataaaggtacaagttaaatagacaccgacgtatcgttgcctagtgctgttggtaccaatgttggccaccgtgttagcatgtcagctgactggatgcctggtcaacctagaccaccttaccttgatgggtcagctccaggtgactttgggtttgacccactaagacttggtgtggtccctgtgaaccttgagaggtacaaagaatctgagttgattcactgcagatgggctatgcttgctgttccaggtatattggtaccataggccttttggttaggaaac

SEQ ID NO: 208313 - DNA, 229 bp, Gossypium hirsutum
gaaaatctttccagtttcaattttctcacaacaaaactgaaaatgtcttgctgttcaggaaggtgtggctgcggcgctgattgcaagtgtggcagtggctgtaacggatgcagtatgttccctgacataatagagaagactacaactgagactattgttcttggtgtggcaactcagaaaatgcactttgagggatctgagatgggagttggggttgagggtggatgcc

SEQ ID NO: 208314 - DNA, 344 bp, Gossypium hirsutum
cccacgcgtccgatggccgccaacacactaatgagctgtggcatagccaccacatttccttcacttctttcctcatcaaagtccaagttcagtggcgccgccgtatcgttgcctagtgctgttggtaccaatgttggccaccgtgttagcatgtcagctgactggatgcctggtcaacctagaccaccttaccttgatgggtcagcaccaggtgactttgggtttgacccactaagactaggtgaggtccctgagaaccttgagaggtacaaagaatctgagtggatacactgcagatgggctatgcttgctgttccaggtatattggtaccagaggccttagg

SEQ ID NO: 208315 - DNA, 235 bp, Gossypium hirsutum
ctccacgcgtccgccagcccttccaggagaaaacttcttatgcgttccttagggaggttaagtgcactgactacctatattatgatctgccataaatcgatgcgcatgatttgacatgcgttatccttaaagaggattgaggcactctaaatgcactttttcatgttccgataaataatcaaacctatttaaatgttcccgccattctctatttccctggaaaagggacctaaac

SEQ ID NO: 208316 - DNA, 259 bp, Gossypium hirsutum
cccacgcgtccgcccacgcgttcgtagactattttgtataactgtagcatataatactagtgagcagtaatagcaatggcctgctccatgatctcatcggtagaccattgccaccgagaactgctctttctcggtacatgccaacatggcggccccctttaccggccttaagtttgcctatgtttttcgagacacttggagggccatcaacgactttacttttcttgtatgcaatggtgggagagtgcaaggcatgcag

SEQ ID NO: 208317 - DNA, 300 bp, Gossypium hirsutum
cggacgcgtgcgctttcttgttcttccaacctttctaaatcacttcattcttcacaatcctgtggttttcgtgttaagatgactgcttctgttgaagataaaaagaagaattatacccttcaaaaatctgaaaaagctttcaatgctgccaagaatttgatgcctggaggtgtaaattctcctgtccgtgcctttaaatccgttggtggacaaccgattgtgattgattctgttaaaggttctcatatgtgggacatagatggtaatgagtatatcgactatgttggctcctggggtccg

SEQ ID NO: 208318 - DNA, 164 bp, Gossypium hirsutum
accgagaagctgagctgatccatggacgttgggccatggctgctgtcgtcagcatgttcgggggccaagcttggagtggcattccatggttcgaggcaggagctgacccaggtgcgatagctccattctctttcggatcactccttggtactcagctaatccta

SEQ ID NO: 208319 - DNA, 250 bp, Gossypium hirsutum
gtcgaccacgcgtccgcagactcttacaatatggtgccaaaacggcgttaaagggtggctagggtttctgaatttaagtgcttaaaaatcatttgggaaaaagatccaaaattgtcgcaacgcaattcgggagattaatgcctaatcttgatcaacaaagcacgaaactgctaattttaacggctgtccgtcgtatggaccctttctgaaaaaaaattcttatcaccgctgctcatgtcgccttctatga

SEQ ID NO: 208320 - DNA, 284 bp, Gossypium hirsutum
gcgaatagctgagttagagccactagcactagtaccaaccctggcttacgccgcatgtttggggcagcaccacgcactcaccaccaatggcagatcatcatcattaccgccgtcgctgcgccaggcttcaaacatgaagcctaaccagcgggcggtgtgcaaggctcataagctggaagatgatggaagccttgtgacccgaaggtcggctctcactgtactaattggtgctgacgctgcaggctctaaggtttgtaccgctgatgctgcctatggtgaagctg

SEQ ID NO: 208321 - DNA, 179 bp, Gossypium hirsutum
gcgtccgcccacgcgtccgcccactcgtccgcccacgcgtccgaaagattctctcaaaacagtgagggagtggtagttcgagttatcgacgacgttttttttcaacacgaaaaaaaatggattacttttatggaccagggaggaaccatctcttcgttccgggtccggttaacataccg

SEQ ID NO: 208322 - DNA, 213 bp, Gossypium hirsutum
  unsure (1)..(213): unsure at all n locations
ggcggacgcgtncgnccacgcctccncccacgcgtaagaacagtatatcggcaaaaatgttcattgagagctttggggttgagagtccaaatgtcaagtacacagacaatgcattccagtcggtgtacaactatgagactactgagcttgttcatgagaacagggatggaacctatcaatgggttgtcaagcccaagactgttaaatatgaat

SEQ ID NO: 208323 - DNA, 304 bp, Gossypium hirsutum
  unsure (1)..(304): unsure at all n locations
ggcattcaggttgtcaaggctgatgactgcattggtccagaagtagaaaagttagttgctggacttcctgaaggtggtgttcttcttcttgaaaatgttagattttacaaggaagaggaaaagaatgaacctgaatttgcaaagaagcttgcttcgttagctgatctctntgtcaatgatgcatttgggactgcacatcgagcacatgcatcaacagagggtggtacaaaattcttgatgccatcacgtgcttgtttccttttacagaagggactagcctaccttgttggtgctgtttaaagcc

SEQ ID NO: 208324 - DNA, 178 bp, Gossypium hirsutum
aacatcgcgtccgagcccgtgaattcatatataggagggattcgtgcaccgtaaatactcgagcctacccacgtactacgatggacgctactggaccatgtggaagctgcctatgttcgggtgcaccgactcggctcaggtattgaaggagcttgaggaatgcaaaaaggaatacccc

SEQ ID NO: 208325 - DNA, 227 bp, Gossypium hirsutum
cccatttccaatctccagctcccaaggtaaatatgccgatcagaaacatagcggttggccggcccgaagaggctactcaccccgatgctctcaaggctgctttggctgagttcatctcaaccttgatcttcgttttcgctggatcgggctcaggaatggcctttaacaagttgactgacaacggagcaaccaccccggctggtctcgtagccgccgctctagctcat

SEQ ID NO: 208326 - DNA, 352 bp, Gossypium hirsutum
cttagactcggatccaacaaacttagtacaaaacctccgcaaggatggaaagaagccgaggggatacattgcagataccaccactgcaaacgcccaggttcgaactctggctgaaactgtgcgactagatgcacgaaccaagttgttgaaccccaaatggtatgaaggaatgatgtccagtggatatgaaggggttcgcgaaattgagaagcgccttacaaatactgtagggtggagtgcaacttcggggcaagtggataactgggtgtacgaagaggctaattcaactttcattcaagatgagaacatgttgagcaggctgatgaacaccaatcccaactcgttcaggaag

SEQ ID NO: 208327 - DNA, 181 bp, Gossypium hirsutum
cccacgcgtccggggaagtgtatgcgtgtagtacacatgctgtttttagtcctcctgcaatgagaaagattgtcaagtggtcttttccaagaggtaatcataacaaacaccatcccagtgtcagagcaaaactattttcctcagttgactgtcctctctgtggcaaaccttctgggagaga

SEQ ID NO: 208328 - DNA, 286 bp, Gossypium hirsutum
cagctgaaacatatagcgctagtaagcaatactagcaatggcctcctccatggggcgatcggcaaccattggcagcgttaactgctccttcccgtgacatgccaacatggtggcccccttcaccggcctcaagtctgactgtgctttcccagtcactaggaaggccaacaacgacatcgctattcttgcatgcaatggtgggagagtgcgatgcatgcaggttgggcctcctcttggtgagaagatgtttgtgacacgcttagacctgccgcggtcttacacccgg

SEQ ID NO: 208329 - DNA, 101 bp, Gossypium hirsutum
caccgactcgcattaggtattgaaggagcttgaggggggcaagaaggaataccccaatgcattcattataatcattggctttgacaacttgcttcaagtgc

SEQ ID NO: 208330 - DNA, 459 bp, Gossypium hirsutum
gcgtccgtcacgcgtccggtgaagtgtatgcgtgtagtacacatgctgtttttagtcctcctgcaatgcggagattgtcaagtggggggttccaataggtaatcataacaaacaccatcccagtgtcagagcaaaactactttccttagttgactgtgctgtctgtggcaaaccttctgggagagaccatatggcgtctccatgatgattgctctggagggttagaaccctatgcaaccttgggcattgattgaattctccacatgctatgagaattttcgtatggaactgcaaatcaattatctatggcttcattgggtagttaggtggtcttcttttaatcacaaaaagtttgtggaatgaactggtaaggcaacaattggatggctactatttttttgcttctcttctttggggttatattgatatccggcgtaatgggtggtattttttttttcc

SEQ ID NO: 208331 - DNA, 345 bp, Gossypium hirsutum
cccacgcgtccgatttagctatagcatacactactagtacccactactagcaatggcttccgcaatgatctcatcggctaccattgccactgcctctccggcacaggctaacatggtcgctcctttcaccggtctcaagtctgcctctgctttcccagtcaccaggaaggccaacaacgacattacttttctcgcaggcaatggcggaagagtgcaatgcatgcaggtgtggcctcctactgggaagaagaagtttgagactttttcatacctccccgaccttacacccgtgcagttggctaaggaagtaaattaccttcttcgttcaaaatgggttccttgctt

SEQ ID NO: 208332 - DNA, 352 bp, Gossypium hirsutum
cccacgcgttcctccacgcgtccctcgctttcaaacgaaaaagactgaaatgctgaagaagggagttgaagaaaagagatggtctgaaaaatttatttcacgtgtagtgttcaatgatgacttggtcatagcatctccagacacttttaaagtagctcttggatcagatgcagaatttgtcctgttggcatctgatggtttatgggattacataaacagttcggacgcagttgcttttgttcgaaatcaattacgagaacatggagatgttcaggtagcatgtgatgcacttgcacaagccgctctggataaaggctcagaagacaatgtcagcattatcatagctgatttc

SEQ ID NO: 208333 - DNA, 201 bp, Gossypium hirsutum
cttttgtttttctttagcatatagtactagtaagcagtaatagcaatggcctcctccatgatctcatcggcaaccattgccaccgtgaactgctcctccccggcacaggccatcatggtggcccccttcaccgccctcaagtttgcctctgctttccaagccactaggaaggccaccaccgacttcacttttctggcaggc

SEQ ID NO: 208334 - DNA, 177 bp, Gossypium hirsutum
atatttagctatagcatacactactagtacccactactagcaatggcttcctcaatgatctcatcggctaccattgccactgcctctccggcacaggctaacatggtcgctcctttcaccggtctcaagtctgcctttgctttcccagtcaccaggaaggccaacaacgacattact

SEQ ID NO: 208335 - DNA, 224 bp, Gossypium hirsutum
gaaaacagtacgaaaacttccaagaattcaacatttatatgccccagttgactggtaacctgggaaaggaagatgatgagtttgagatcttgtcttctctccacccaactccagcggtttgtggacttccaaaagaagctgcacgcctcttcatttcagaaactgaaatgtttgaccgagggatgtatgctggaccagttggttggtttggaggaggagaaagt

SEQ ID NO: 208336 - DNA, 359 bp, Gossypium hirsutum
  unsure (1)..(359): unsure at all n locations
caccaacaaaatcagttgcttcacaatggcctctacaaccatggctctttcttccccatcattcgccggtaaggcagtgaagttctccccttccacccctgaaatccggggaactggccgtgtttccatgaggaaaaccaccaagcctgttccttctggtagcccatggtacggtcctgaccgagttttgtacttgggtccactttccggtgagccaccatcttacttgaccggtgagttccctggtgactatgggttggacactgctggactctcagctgatcccgagacctttgctaggaaccgtgagctcgaagtcattcactgcagatgtgccatgtngggagctcttgggtgtg

SEQ ID NO: 208337 - DNA, 433 bp, Gossypium hirsutum
cgcctagcctaggttgtctgtcgacaacaatgtctcacctgctgaagctctatctctggggttacaactctctccaggcttttggctggacaatttctttggtcagaattttgtcctgtttcatagccaccaaatctgtcattggcgcctatgcttctgctggagacttaatctgtttgttacaaacttgtgcgttcttggaagttgtacatggagcaatagggattgttccaagtggagtgttgtttcctctgatgcaatggggtggaagaacacatttcttattagcaatcgtccgccggattcacgaggtacaggaattatctgcagttttcataacattttttgcttggagcctaaccgaggtaatacggtattcgcattatgcattgaacatatctgggcggttgttcgtcttggctcacctacctga

SEQ ID NO: 208338 - DNA, 254 bp, Gossypium hirsutum
cttgagggaaagaaataaaaagaagaagaagtttgaatctatttttttgaagatcgacggtggggaataaagatgttaagcgtgggacaaacaacttctcaaagtggacatcctatggggacttcatgcccaaacgaccaaggactacaacgtgccaccatgagaacccttgtttgaccctggtgaactcaaatcatggaccttatacagagctggttttgccgcgtatgaagccaccttcttgttcctttaca

SEQ ID NO: 208339 - DNA, 370 bp, Gossypium hirsutum
gccacgcgtcctaccacgcgtccgacaatggcctttacaaccatggctctttcttccccagcattcggcggtaaggcagtgaagttctccccttccacccctgaaatccagggaactggccgtgtttccatgaggaaaaccaccaagcctgttccttctggtagcccatggtacggtcctgaccgagttttgtacttgggtccactttccggtgagccaccatcttacttgaccggtgagttccctggtgactatggttgggacactgttggactcttagctgatcccgagacctttgctaggaaccgtgagctcgaagtcattcactgcagatgggccatgttgggagctcttgggtgtgttttccctg

SEQ ID NO: 208340 - DNA, 311 bp, Gossypium hirsutum
gtttctttcttctctctcaaaaatctctcaaatccaatagactctccgctcctctgatctgtgcttcgacttggtttatgagctcgaaggagaaacccactcttggcggtacgcggattaagacccgcaaacggaatattgctgcacccctggacccttcagcatttggtgatgcagtagtccagatctatttggataatgctggtgacctggaacttgttgccaggagcattgaatcttcagatcttaacttctcaagatacggtgacaccttctttgaggttgtttttgctggaggccgcacacaaccg

SEQ ID NO: 208341 - DNA, 230 bp, Gossypium hirsutum
cccacgcgtccggtcggttcagtgacagttcacatcctattgagagatttaaaaggatagggcgggcaactcaaggtgccctcattgtagcttccactcttcagattgtccttggcttcagtggcctttggcgtaatgttgcgaggtttttaagtccactttcagtcgttcctttggtatctctagttgcttttggtcttacaaatttgcttttcctggggttgccaaat

SEQ ID NO: 208342 - DNA, 194 bp, Gossypium hirsutum
ggttcctctgttttcaagaaacggttctgggtgggggtctggggctgttgttgtttgtgctaccaaaggagccaataataagccattaacaggtgtgatttttgagccttttgaggaagttaagaaggaacttaatcttgtcccaactgtgcctcaaatgtccttggctcgtcaaaagtttgctgatgagtgtg

SEQ ID NO: 208343 - DNA, 225 bp, Gossypium hirsutum
tgcattagtttcattgcctacaagcctccaggcttctaagctttttataaactttgtctcgccatttgtttgaatttgtactcagaaaaaccatgttctttacttttgtttttctctttctttgagttattggcctttgtttctcgatttctgggttttaatcctttttggattttcattggaagaaaggctgagaactaatgaataaaagttggttttcttccc

SEQ ID NO: 208344 - DNA, 225 bp, Gossypium hirsutum
gatatattcagcaagccttgcacaatggccaccatcacctctgccgctgtcgctatcccatctttcaccggccttaaagccggtgcaaccgcagctaaagttagcgccacagccaaggttgcagcctctccagtcccaaggggcagcatcaaggcctccctcaaagacgttggtgttgctgttggggcaactgttgcatgcgtaatccttgccagcattgccatg

SEQ ID NO: 208345 - DNA, 281 bp, Gossypium hirsutum
tccatgcttcacagtcacagcaacaaggaaatgcttactctatgacatccaagaaacaatgggtgactccctctccatcgcctggtattgatgggagcagtcccattgtacgtgagaaagcctcagaggatgggtataactggcgtaaatacgggcagaaacttgttaaaggaaatgaatttgttcgaagttattacagatgtacacattcaaactgccaagttaaaaaagcaattggatttttcacaatgatggtaaaatgggctgacactgtttatttt

SEQ ID NO: 208346 - DNA, 167 bp, Gossypium hirsutum
ctcactcaacattcccactttccaatctccatctttcaaggtcaatatgccgatcagaaacggggcagttggccggcccgtagaggcgactcacctcgatgctctcaaggcagctatggctgagttcattttaaccttgatcttcgttttttgctggatcggttctc

SEQ ID NO: 208347 - DNA, 260 bp, Gossypium hirsutum
gccttaggcaccatggcaacctctgctatccaacaatctgctttcgttggccagaccgctttgaagcagtccaatgagctcttacgcaaagtcggagctttcgatggtggtcgtgttaccatgcgcagaactgtgaaaagtgcccctaccagcatctggtacggccctgaccgcccaaagtacttgggtccattctcagaccaaatcccatcatacctgacaggtgaattccctggtgactatgggtgggacactgttgg

SEQ ID NO: 208348 - DNA, 195 bp, Gossypium hirsutum
gccatgcgcaccgtgacaacctgtgctatacagcaatctgctttcgttggccagaccgctgggatgcggggcattgagcttttacgcaaattctgagcttctcatggccggtcgttgcccatgcgcagacctgtgaaaagggccccaaccagcgcttgttccggtcaggaccgcccaaaggacttgggtcccttt

SEQ ID NO: 208349 - DNA, 197 bp, Gossypium hirsutum
ccgacgactcttccgctcacgcgtgcggttatctctgagggtggcttaataaacgcctggggggtactttcggtctccattgacttctttatttctacgcttgcgaatttttcgtacgcgaaaatgagagagtgcctttcagttcacatcggtcaggctggcatccaagtcggaaatgcctgctggaagctgtactg

SEQ ID NO: 208350 - DNA, 234 bp, Gossypium hirsutum
cgcgttcggcattcgtccgaacacgcgtccgtgagaacgaaggtaaagggaggcaatgctaagaacgggggtggtccaacggtcaaatatgtggaaaagtgcatgatttcccaaagttggttcttttccaaagtgtctgacatacattgtaagcatggctgctgatgtccatcgtacattactatacgggggtatctttctgtacctttcagataagaaaagcccaactgaaaa

SEQ ID NO: 208351 - DNA, 222 bp, Gossypium hirsutum
cccacgcgtccgatcagcatgtcataaaacataagaaaataggctgaagtttaatttacgagctttggggcaaaagtgtaaatatgtgaaagtttacgatcaaaactataatttttccaaaatatggatttggggtcaatttgaatactgtgagtcctaattagactattttttaaatgatggagcaaggaaaactaaattccgggcttaaatgggaaaaat

SEQ ID NO: 208352 - DNA, 179 bp, Gossypium hirsutum
aaactcccatcacccgagatcatctttccccttcagaatggcggctgcaaccatggctcggtcttccccatctttcgccggaaaggccgtcaagctctctccttccgcccctaaaatccaaggcaagggccgggtttccatgaggaaaaccgctcccaaggctgctcccctttggaagt

SEQ ID NO: 208353 - DNA, 283 bp, Gossypium hirsutum
gcccatatgcaccaagcttgcatttcattcaaattgtacaggcttcttcgtgttccttgacgacatcaaccatggtgctatccaagacagcttctcaatctgatgtctcagttcactccacttttgcctctcgttatgtccgagaccaacttcctaggttaaggatgccagagaactcaataccaaaggacgctgcatatcaaatcatcaacgatgaactgatgcttgatgggaacccgaggtggaacctggcctcttttgtaactacctggatggagcctga

SEQ ID NO: 208354 - DNA, 211 bp, Gossypium hirsutum
gcccctgccatcgcttatcacttaattggaccagttcattgcttacaacagatgcgagacttaatgaatgaacaggttcaagatcaactagggcaaagccacttcattggacatcatgtttaaagatagcagaagatgttgcagagggccttgcctacatccaccaagcatcaaggcttttccatggcaacttgaaatcgtccaacgtcct

SEQ ID NO: 208355 - DNA, 253 bp, Gossypium hirsutum
gttcctttcattgcttatcactcaattgtacaatggcagcagcaaccatggctctttcttccccatcctttgccggaaaggctgtcaagttctctccttctactcctgaaatccaaggcattgggcgtgtttccatgaggaaaactgccaccaaccctgctgcctttggaagcccatggtccggccctgatagagttttatacttgggtccactctccggtgagcctccatcctacttgaccggagagttccc

SEQ ID NO: 208356 - DNA, 282 bp, Gossypium hirsutum
cccacgcgtccggtttacctgtttgatgaaggctcaaccatctcatggataccatgtggaaggaagctcacttgttcttaccctggcatcaaattctcctatggccctgacacatacttgggccatgaggttactgttctggagatggacgggcaatttgacagattagatgaactgatatacgtagaaggccatttaagcaatctctctaccaagttctatggagaagtcactcaacaaatgttgaagcatgctgatttcccaggaagtaacattggaact

SEQ ID NO: 208357 - DNA, 194 bp, Gossypium hirsutum
gcgcctaagagttttaaggaaaatgcagatcttcgtgaaaaccctaactgggaagaccagtaaccctagaggttgaatccagcgacactatcgacaatgttaaggctaagatccaggacaaggaaggtatcccgccggaccagcagaggttgatctttgccgaaaagcagcttgaggatggtcgtacacttgcc

SEQ ID NO: 208358 - DNA, 302 bp, Gossypium hirsutum
cccacgcgtccgatttttttttatattctatacaaaaacaaaactccatgcggcgaaatggcatttatcaattcttttctgtatctgtttgttataaatataaattcaaatttgagtataatttttcttcttccgttcatacgcatttcatatttcatacattccacatatattatatggtatatggagttagataaaatttcatgtgattcagtaaacagaatagaaattcaattccatcattattagatcgattcgtaggattcgatgaagattgaaaaaaagaatgggatttttttgag

SEQ ID NO: 208359 - DNA, 397 bp, Gossypium hirsutum
cccacgcgtccgagagattgtaggggggttttcgttttcatctagaaagaattgggatctaggttaggcattatgttttcccgtttatttttggtagcagctggtgccgagttttgataggctgttggtaaaaaaataataataatggaagggaattcttggagcggcggaactgacagaggaggaaacgacgtggaactgctttcaaaactcttcaggtggaacacaggctgttctacttcgatctcaaggagaacccacgcgggcgttatttgaaaatcttggaaaagacattggccaccaggttcaccatcattgtcccctcctatggcatttcttggttcctggaccttttcaatttttacgtaaactccgacgacaacgacctttttagcaa

SEQ ID NO: 208360 - DNA, 179 bp, Gossypium hirsutum
cccacgcgtccgagaatatggagaaattgatggcaagggatcctgatgcgtttgcttatgctataaagcgatcatgtgaaaacaaggctgaggttgtgtcactagatgagaaggaaagtggattgggggcctcccctgacttggggtaatccattgggcaatgcaataaaacctgggtt

SEQ ID NO: 208361 - DNA, 335 bp, Gossypium hirsutum
acgaaggaaacccaccaagatctgcaggttctttacttttctttgcttcctcataaaggagagaggctaatgaagtggtatacaatatgtatatgcattctcgaactccttctaacaacctatgcattttgttatcatttccgattggacgatccattaatccagctggcggaagatgataaatggatgaatttttttgattgttactggggattgggaatagatggactttgtatagggcccattttactgacaggatttataaccactctagcgactttggcggctgggccggttactcgagattcgcgattatttattttcctgatgctagc

SEQ ID NO: 208362 - DNA, 358 bp, Gossypium hirsutum
ctctttcgtataactgtagcatatagtactagtaagcagtaatagcaatggcctcctccatgatctcatcggcaaccattgccaccgtgaactgctcctccccggcacaggccaacatggtggcccccttcaccggcctcaagtctgcctctgctttcccagtcactaggaaggccaacaacgacatcacttctcttgcaagcaatggtgggagagtgcaatgcatgcaggtgtggcctcctcttgggaagaagacgttcgagacactctcatacctccccgatcttacacccgtacagtttggctaaggaagtagattaccttcttcgctctaaatggattccttgcttggaattcg

SEQ ID NO: 208363 - DNA, 292 bp, Gossypium hirsutum
tttagctatagcatacactactagtacccactactagcaatggcttcctcaatgatctcatcggctaccattgccactgcctctccggcacaggctaacatggtcgctcctttcaccggtctcaagtctgcctctgctttcccagtcaccaggaaggccaacaacgacattacttctctcgcaagcaatggcggtagagtgcaatgcatgcaggtgtggcctcctactgggaagaagaagtttgggactctctcatacctccccgacctaacacccgtgcagttggctaagg

SEQ ID NO: 208364 - DNA, 248 bp, Gossypium hirsutum
gagatgttggtagccctgacattaagggatttgggaagaaaccggtgtcaattgcctacaatggtgaagataaaccagtgttcttgacaaaactgtctttgaaattcaaggaacctgaaaatacaaccttattcattatggacaaatttgatgggaattctgaactggttgcggagttggtcactgcaaatggattcaaagctgcttatgcagtcaaagatggtgctgaaggaccacggggatgggtg

SEQ ID NO: 208365 - DNA, 190 bp, Gossypium hirsutum
gcgacaggctacttgttggggccaactttgcgtcagctggcattggaatcctcaatggcgccggcgtccaatttataaacatcatcagaatgtacaagcaattaaaatactttcaacaatacccggcccgggtgggttgccctcgtgggttccgaggaaccccaggggttcgtaaccgtggccctggggc

SEQ ID NO: 208366 - DNA, 242 bp, Gossypium hirsutum
gattgtcccgaagacatctaatagatatcggaggaaccgatgcttgaacagaggcaatcaaattcctggctacatgagtcccgtgcaacccggaagcctttatcaactaatcacagctccttacttgccaccagctgaagccccaaatccgttcctgaccgaagcagatgtcaccgagccccctttgcctcctgtcgctgcaaaagccccaagtacttttccaaatggtactgtactggccc

SEQ ID NO: 208367 - DNA, 239 bp, Gossypium hirsutum
cagcagcagggaagaagcggaggcagcgtcgtggttgcttcctaaccctaaccacaaagcgggggaaagcccggacgtgaagacagggcaatacaagtcttccgagattgattcgtacctagatctggattaccgccatgtttgatcttaaaatggaaaccccggaccaggaccattactattttggaactgttggagtgggacctttgcaaagcaacatccttgcaatcttcgatgat

SEQ ID NO: 208368 - DNA, 139 bp, Gossypium hirsutum
cccacgcgtccgctcttggagaaatgtgacattctccttcttggtggtggtatgattttgacattttacaaggcacaaggcctatcagtcggttaatccttggtagaggaggatagcctggacctggcaccatcacttt

SEQ ID NO: 208369 - DNA, 166 bp, Gossypium hirsutum
caggacccgtgggcgccggtaaggcagtgaagttctccccttccacccctgaaatccagggaactggccgtgtttccatgaggaaaaccaccaagcctgttccttctggtagcccatggtacggtcctgaccgagttttgtacttgggtccactttccggtgagcc

SEQ ID NO: 208370 - DNA, 233 bp, Gossypium hirsutum
gaagacattccggagagtatcgtgagtaaagaaaaagagctggagatgcaaagagatgatctggcatctaaaccagagaacattagagagaagatagtggaaggcagagtttcaaagaggcttggagagcttgcccttttggaacagcccttcattaaggatgacagtctgttggttaaagactgggtaaagcaaactgttgcagcacttgaagagaacataaaagtccgaag

SEQ ID NO: 208371 - DNA, 327 bp, Gossypium hirsutum
acgcgcatgtcacagattcaagagctcctacacagcatccgtgtactaacctatacattttcggggatgcgactctgatgactgtgcatgcacttcttctctaaaaagacatatgctacaaggaggaggaaaggaatgtacctgaaagggcatagaaactcgcttcgaaagctgatcttttaggcactggtgcatatgggactgaacatctagcgcatgcatcatcagagggtggacaaaaactttgtagccatcacatgctggactcttttgacagaaagaactattctaccttgttgaagcttgtttaagccctaaaaggctttt

SEQ ID NO: 208372 - DNA, 185 bp, Gossypium hirsutum
gcatacactagaagaagcggaggcagcgtcgaggttgcttcctaaccctaaccacaaaggacatgaaagcccggacgtgaacacagggcagtacgtgtttcccgagatggatccgtacctagatctggattacggtcatgtggatccggaaatggaaaccccgggccaggaccagaacagttttg

SEQ ID NO: 208373 - DNA, 269 bp, Gossypium hirsutum
  unsure (1)..(269): unsure at all n locations
ggagaagaaaggggttccgcgtttacgtgatgatgccgttggatagcgtgacgaacgggaatacggtgaatagaaagaaggcgatgaatgcgagtctccacgcgctgaaaagcgcgggagtggaggggataatgattgacgtttggtggggtctggtggagagggaagcgacggntgcttacaattggggtggctacgccgagcttctcgagatggctaagaagcatggccttaaagtccaggctgtcatgtcattccatcagtgtggg

SEQ ID NO: 208374 - DNA, 280 bp, Gossypium hirsutum
gcatacactactagtacccactactagcaatggcttcctcaatgatctcatcggctaccattgccactgcctctccggcacaggctaacatggtcgctcctttcaccggcctcaagtctgcctctgctttcccagtcatcaggaaggccaacaacgacattacttttttcgcaggcaatggcggcagagtgcaatgcatgcaggtgtggcctcctactggaaagaagaagttcgagactttcttatacctccccgatcttacacccgtgcagttggttaa

SEQ ID NO: 208375 - DNA, 150 bp, Gossypium hirsutum
ggctactgtttctgtagccaaacccaaccttcagattcaggcaaaaggaaagggtgttggttttgcagatttctcaggcctacacaactcctctactagccttccctttgccaggaaaacctctgatgacttccattcactcttgctttt

SEQ ID NO: 208376 - DNA, 254 bp, Gossypium hirsutum
ggcaaacaaaccaagtcaacctaaagccttaggcaccatggcaacctctgctatccaacgatctgctttcgttggccagaccgctttgaagcagtccaatgagctcttacgcaaagtcggagctttcgatggtggtcgtgttaccatgcgcagaactgtgaaaagtgcccctaccagcatctggtacggccctgaccgcccaaagtacttgggtccattctcagaccaaatcccatcatacctgacaggtgaat

SEQ ID NO: 208377 - DNA, 249 bp, Gossypium hirsutum
cagtgagactcttttgtatacctgtagcatatagtaatagtaagcagtaatagcaatggccgcctccatgatctcatcggcaaccattgccaccgtgaaccgctcctccccggcacaggccaacatggtggcccccttcaccggcctcaaatctgcctctgctttcccagtcaccaggaaggccaacaacgacatcacttctcttgcaagcaacggtgggagagtgcaatgcatgcaggtgtggccgcc

SEQ ID NO: 208378 - DNA, 243 bp, Gossypium hirsutum
gtctcttgcttgtgattccaaacagcactctgcatcacatgggcctttcttacccatcatggggcggtaaggcagtgaagttctccccttccacccctgaaatccagggaactggccgtgtttccatgaggaaaaccaccaagcctgttccttctggtagcccatggtacggtcctgaccgagttttgtacttgggtccactttccggtgagccaccatcttacttgaccggtgagttccctg

SEQ ID NO: 208379 - DNA, 290 bp, Gossypium hirsutum
ttacgtcacatgctcgatttggattctccactctcacggctgtactttgcattaactattgggacaggtccttaagtacctttcagtttcaaagagataatccttggatgatccaactactgggtgtcacttgtctctctttggctgcaaaagttgaagagacacatgtgcctctgctcctagacctacaagtggcggagacaatgtatgttttcgaggccaaatctatcaaaagaatggagctttcggtgctctccacactgaaatggaagatgcatccagttacaccc

SEQ ID NO: 208380 - DNA, 341 bp, Gossypium hirsutum
cccacgcgtccgcaaaaacaaaataaaataaagaacacacaacaatggccgccaacacactaatgagctgtggcatagccaccacatttccttcacttctttcctcatcaaagtccaagttcagtggcgccgccgtatcgttgcctagtgctgttggtaccaatgttggccaccgtgttagcatgtcagctgattggatgcctggtcaacctagaccaccttaccttgatggctcagcaccaggtgactttgggtttgacccactaagacttggtgaggtccctgagaaccttgagaggtacaaagaatctgagttgattcactgcagatgggctatgctt

SEQ ID NO: 208381 - DNA, 244 bp, Gossypium hirsutum
catcggcgccacgcatgcgcttcgtctcggatccaacaaacttagtacaaaacctccgcaaggatggaaagaagccgagtgcatacattgcagataccaccactgcaaacgcccaggttcgaactctggctgaaactgtgcgactagatgcacgaaccaagtagttgaaccccaaatggtatgaaggaatgatgtccattggatgtgaaggggttggagacattgagaagcgccttacaaatac

SEQ ID NO: 208382 - DNA, 199 bp, Gossypium hirsutum
ggcaaacatacggggttgcaatggcacaagcaatggcatcgatgactggtttacgtggctcttcacaagctgtgttggaaggtagtctccaactcagcggccaaacccggttgaacgttgctagcaccaacagggtggctgtggctagacctggttttaccgttagagctcaacaggttcctgccgagccctgaaacct

SEQ ID NO: 208383 - DNA, 296 bp, Gossypium hirsutum
gtcccttgcatatgtgttaaaattagaggagggattcgtgcaccgtaaatactcgagcctacccacgtactacgatggacgctactggaccatgtggaagctgcctatgttcgggtgcaccgactcggctcaggtattgaaggagcttgaggaatgcaagaaggaataccccaatgcattcattagaatcattggcttcgacaccgtgcgtcaggtgcagggcattagtttcattgcctacaagcctccagccttctaagcttttaataaacttggcttctcaattggttggaatt

SEQ ID NO: 208384 - DNA, 240 bp, Gossypium hirsutum
ctcaagcattcggggttgcaatgacacaggcatgggagtttaaggctctttgcattgggggtctgatttaatgagcagtagtggttataagcacaagaagagaaaacaattgcagacagtagacctgaaggtgaggttggactgtgatggttgtgaactcaaggacaagaaagccctctttttattgattggagtgaaatcggtgatcataaacaggaaacagatgatggtgattgtaat

SEQ ID NO: 208385 - DNA, 173 bp, Gossypium hirsutum
acccacgcgtccgagcatatagtactagtaagcagtaatagcaatggcctcctccatgatctcatcggcaaccattgccaccgtgaactgctcctccccggcacaggccaacatggtggcccccttcaccggcctcaagtctgcctttgctttcccagtcataggaggccaca

SEQ ID NO: 208386 - DNA, 117 bp, Gossypium hirsutum
caccaactttgtccccggaaagtgaacttagagagtgagaagggatttgccttgtttatgtttttatttgttggtgtgaatttaaatttgttgcacaatcaatgaaagtataatgtg

SEQ ID NO: 208387 - DNA, 329 bp, Gossypium hirsutum
tcttgctcaaatctgacactgtgggtgtcctcaaaaccctctctttctgacactcattcactctctttgcggtctttcatcagcccttttcagcttccgtctcagagctcaacccccggtaaccgttgcaggtccttatctgtaaccccaggtcactgcggtcttcgggagcttagagaccgtgttgattcagtaaagaccacgcagaacatcactgaagctatgaaactggtggctgctgctaaagttaggagagcacacgatgctgctgtcaatggcagaccttaatctgagtccctggctgaagttctttacagcatcaatgaaca

SEQ ID NO: 208388 - DNA, 179 bp, Gossypium hirsutum
cccacgcgtccgcccacgcgtccgcccacgcgtccgcccacgcgtccgcccacgcgtccgggctgtggtaaaactgtgattagtcaagctctttccaagtactctaattctgatgctgttgtctatgttggttgtggagagcgaggaaccgaaatggctggggttctaatggatttcct

SEQ ID NO: 208389 - DNA, 391 bp, Gossypium hirsutum
gtgcttttggcgacactcgatttaaaacgaagaagaatgaaatgctgaagaagggagttggggaaaagagatggtctgaaaaatttatttcacgtgtagcgttcaatgatgacttggtcatagcatcttcagacacttttaaagtagctattggatcagatgcagaatttgtcctgttggcatctgatggcttatgggattacataaacagttcggacgcagttgcttttgttcgaaatcaattacgagaacatggagatgttcatgtagcatgtgatgcacttgcacaagccgctctggataaaggctcacaagacaatgtcagcattatcatagctgatttcgggcatactgaatggcagaaattgccagttgagcaacagaattttct

SEQ ID NO: 208390 - DNA, 129 bp, Gossypium hirsutum
agaacttttgcggtattgctgaataaggatgggttaatggccacccatgattaggaaacggaacacttcttcaaggatactgatgtcaactgtgtcttatgccctcgtaatccaaatgatggtggaagt

SEQ ID NO: 208391 - DNA, 443 bp, Gossypium hirsutum
  unsure (1)..(443): unsure at all n locations
cagactctcccgctccttctcgctgcgatttcgtcttcaagatctcagttctcaaatcggagcgctcttttctatcaagccatggctctgatcttgcatgcaggaaaaacaaacaaaaatgcctttaaggcactcattgctgcaaaatatagtggcgtgcaggtcaaaatggttgagaattttgagatgggtgtgtcaaataagactcctgagttcatcaagatgaaccccttgggggaagggtcctgtgttggaaaacacctggagggttcggtattttgagagcaaaggccaatggctcggttatgttggctcggctcaaaagggtaacaacccctattatgtgggnttctacatttgattggattaatgggcatattcgaggcaatgggattggatttttgcagccccttggaaattgattgcttaatatttgccaaaat

SEQ ID NO: 208392 - DNA, 306 bp, Gossypium hirsutum
agcactcaaaatactttcaacaataccagaccaggctcggctgatcttgtcggatcacacgtaaggacagggggttgtaaacgatgcacttgtgctcattactgctgatggaaacgcttgcttgaacacctcctattagggtccattattgcttagagctcgccagtttagcataccagatgatggtcaattgctcaggtgtgcagacaggaaactcctactgaggttgatggatcaaggacctcggacggttcggttgactgggaccgacccaatgggttgggttccagcagaattagccatgag

SEQ ID NO: 208393 - DNA, 221 bp, Gossypium hirsutum
gcgtacgtgcacgcgtgcgacgagagctggcattacagaggggtgcggagaaggccatggggcaagtgggctgcagagatccgagacccgaccaggaagggacgtcgtgtttggctaggtactttcgatactgatgtcgatgctgtcaaggcttatgattgtgcagcattttaaaatgagggggcagaaagcattactgaatttcccattggaagctggac

SEQ ID NO: 208394 - DNA, 320 bp, Gossypium hirsutum
cacaaccactatcactaccattatggcttcggctactgtttctgtagccaaacccaacctggagatgcaggcaaaaggaaagggtgttggttttgcagatttctcaggcctacacaactcctctactagccttccctttgccaggaaaacctctgatgacttccattcactcgttgcttttcagacatctgctctaggaagcaataatggcgggtacaggaaagggatggcagaggcaaagctaaaggtggctataaatgggtttgggaggattggcaggaacttcttaaggtgctggcatggtccgaaagactccccac

SEQ ID NO: 208395 - DNA, 241 bp, Gossypium hirsutum
gacgcgtgcgtccacgcgatgcgattacttatgtggcaagccatgcacgtagagtccattgcatgcatcagcatcgcgattactggaaagaagaagcttgacactatctcatacctacccgatcttacacccgtgcagtatgctaacgtagtagcttaccttctattttcaaaatgggtagcttgcttggaatacaaattggaggacgtattcgtgcaccgtaagtactctagcttaccca

SEQ ID NO: 208396 - DNA, 255 bp, Gossypium hirsutum
ggtggccgacgcatccgtgacggtcgtatggagaagttttactgggcacccaccagggaagataggatcggtgttcgcgcaggtcttttcaggaccgacaatgttcccgttgatgaccttgttaagcttgatgacaccttcccgggccaatccattgactttttcggtgctgtgagggccagagtttacgatgacgaaatgaggaaatggatcggagaggtcggagtcaatggtgtcgggagatagctcgtgaac

SEQ ID NO: 208397 - DNA, 296 bp, Gossypium hirsutum
tccacgcgtccgcaaattttacctttactaaatggcccccaaagctgagaaaaagccaggcgaaaagaaaccggcggaggagaaaaagaccaccgttgccgagaaatccccggcggagaagaaaccgaaggccggcaagaagcttccaaaagaaggcggtgccgccgctgacacgaagaagaagaaggccatgaggagtgtggagacttacaagatctacatcttcgagcgttcttaaacaagttcaccctgatatcgggatctcaagcaacgctaatggggtactgaacagtttc

SEQ ID NO: 208398 - DNA, 355 bp, Gossypium hirsutum
ctgggtctacttcagggacgcctagcgcattggcgaccatcactgatgatacagcccagcatggggtacgtattcgaagctatgacgttcaacatccactgtggttacctagaagcgatcgtgagaggtcaccggtccggtctcttaaccgccgacgattacaacaatctctgccaatgcgagacccttgacgatatcaagatgcacctatccgccaccgaatacggtccttacctccaaaatgaaccttcaccattgcatacgactactattgtggagaaatgcactcttaaactcgttgatgagtataagcatatgctatgccaggctaccgagccatgtccaccttttagag

SEQ ID NO: 208399 - DNA, 292 bp, Gossypium hirsutum
gaaaaaaaaaaggtggggagagggcttacacacatgaacagatcctcataatggagggaacgatattgggacgattggaatggactttaacggtgcctacacattacgtgttcttagcacggttcatcaaagcatcgatccctgacccgaagatggaaaacatggtgtatttcttagctgagttggggataatgcattacgagaccattaggtattgtccgtcgatggtggctgcttcggctgtgtatgccgcacggtgcaccttgaagaagacaccagcttggacagacac

SEQ ID NO: 208400 - DNA, 316 bp, Gossypium hirsutum
gctatagcatacactactagtacccactactagcatatggcttcctcaatgatctcatcggctaccattgccactgcctctccggcacaggctaacatggtcgctcctttcaccggtctcaagtctgcctctgctttcccagtcaccaggaaggccaacaacgacattacttctctcgcaagcaatggcggtagagtgcaatgcatgcaggtgtggcctcctactgggaagaagaagtttgagactctctcatacctccccgatcttacacccgtgcagttggctaaggaagtagattaccttcttcgctcaaaat

SEQ ID NO: 208401 - DNA, 192 bp, Gossypium hirsutum
ctgaagcaatcaatggtttattctgaatttaccgatcactgaacagagggggcgcatcatgagacgggagataacaaagaccttgctctcatggagcatattctacatggaagctttcatgtgaacgcacctatgaaagtgcttgaaacgcgcccgccgcaaaaaccgaaacatgaccgcctcccattgagg

SEQ ID NO: 208402 - DNA, 314 bp, Gossypium hirsutum
taccgtccgaattccgggtcggcccacagcgtgcgcccacgcggtgcttatgcctggccacgagcgagtactcacagtcggagcgagtgtcgggattgagaggtggcgatcatatatggtgtgatagatacattctagagagaatcactgaacatgccggtgtcgtactctgacctcgatcctaaaccaatagagggcgactggaatggcgctggatgccacacaaattacagcactaagagcatgagggaagatggaggcttcgaaggtataaagaaagcaatcctgaatttgtcgtttcgccacaaggagca

SEQ ID NO: 208403 - DNA, 333 bp, Gossypium hirsutum
ccggtccgaattcccggtcggccccacgtccgcccacgcgcccgacccactctatggtgcgcctttacttgtactatgcgcttccgtcctcagggaagaccctaaccctttgcgcgggcccttctccttttggggataccacttcttggctaatcgctctcgccttcttcttcgctcggggtttcatcaagactggacttggtaatcgaatcgcttaccaattcgtttccttattcggatcttcctcattaggtttaggctacagcttagtcttcagcgaagctttattagcgcccgcaatttcaatccgattccgacgcgctggaggaattt

SEQ ID NO: 208404 - DNA, 345 bp, Gossypium hirsutum
  unsure (1)..(345): unsure at all n locations
gcgcaccacgcgtcccatccccattgacacaatggcttccatgcctagctctggaattgttctgtaggccaaccccatttcttggccaaaccaaaaatgctaaccctcttagagatgttgtctctttgggcactcccaaatatgcaatgggaaatgaactatggtatggaccagacagagtgaagtacttgggaccattttcagctcagactccatcttacttgactggagaattccctggtgactatggttgggacactgttggtttgtcagccgaccctgaggccttngccaggaatagggctcttgaggtcattcatggaagatgggcaatgttgggagcac

SEQ ID NO: 208405 - DNA, 218 bp, Gossypium hirsutum
gcaccgggtatttgttgaacaacaaggatgcttctcagcacatctttgaagtatctgctgggcgtgactctcttgttcttggagaaggtcaaatccttgcacaagttaaacatgttgtcaaagttgggcaaggtgttgttggctatggaaggaacatgacagggctgatcaagctcgcatttactgctgggaagcgtgatagaacagaaactaacatt

SEQ ID NO: 208406 - DNA, 240 bp, Gossypium hirsutum
atcattttgcgtggcaatgtcgacggcttctatcaacggttggtgccttacctcctcttcgtccaccactaccacctcctctttttccgctcgtcgacgacctacattgcggccttcagtcgtcgctagccttaactcttctccttctcctccgactcttatccaagaccgcccggtttttgctgcccctattcctttgctcaccccgagagaagagatgggaaacaagtcctacgacga
